(19) United States
(12) Patent Application Publication
(10) Pub. No.: US 2011/0277190 A1
(43) Pub. Date: Nov. 10, 2011

(54) Transgenic Plants With Enhanced Agronomic Traits

(75) Inventor: Mark Scott Abad, Webster Grove, MO (US)

(73) Assignee: MONSANTO TECHNOLOGY LLC, ST. LOUIS, MO (US)

(21) Appl. No.: 12/479,507

(22) Filed: Jun. 5, 2009

Related U.S. Application Data
(63) Continuation of application No. 11/374,300, filed on Dec. 21, 2005, now abandoned.
(60) Provisional application No. 60/638,099, filed on Dec. 21, 2004.

(51) Int. Cl. A01H 5/00; A01C 7/00; A01G 1/00; C12N 5/04; A01H 5/10

(52) U.S. Cl. 800/300; 435/419; 800/298; 800/320.1; 800/312; 800/314; 800/320.3; 800/320.2; 800/301; 800/300.1; 47/58.1 FV; 111/100

(57) ABSTRACT

This invention provides transgenic plant cells with recombinant DNA for expression of proteins that are useful for imparting enhanced agronomic trait(s) to transgenic crop plants. This invention also provides transgenic plants and progeny seed comprising the transgenic plant cells where the plants are selected for having an enhanced trait selected from the group of traits consisting of enhanced water use efficiency, enhanced cold tolerance, increased yield, enhanced nitrogen use efficiency, enhanced seed protein and enhanced seed oil. Also disclosed are methods for manufacturing transgenic seed and plants with enhanced traits.

### CROSS REFERENCE TO RELATED APPLICATIONS

[0001] This application is a continuation of U.S. application Ser. No. 11/374,300 which was filed Dec. 21, 2005 and which claims benefit under 35 USC §119(e) of U.S. provisional application Ser. No. 60/638,099, filed Dec. 21, 2004, both of which are herein incorporated by reference.

### INCORPORATION OF SEQUENCE LISTING

[0002] Two copies of the sequence listing (Copy 1 and Copy 2) and a computer readable form (CRF) of the sequence listing, all on CD-Rs, each containing the text file named “38-21-53720-D_seqListing.txt”, which is 168,659,874 bytes (measured in MS-WINDOWS), were created on Aug. 28, 2009 and are incorporated herein by reference.

### INCORPORATION OF COMPUTER PROGRAM LISTING

[0003] Computer Program Listing folders hmmer-2.3.2 and 347pfamDir filed on Dec. 21, 2005 with U.S. application Ser. No. 11/374,300 and published in U.S. Patent Application Publication 2008/0148432A1 are hereby incorporated herein by reference in their entirety. Folder hmmer-2.3.2 contains the source code and other associated file for implementing the HMMer software for Pfam analysis. Folder 347pfamDir contains 347 Pfam Hidden Markov Models. Both folders were created on Dec. 21, 2005 and filed with U.S. application Ser. No. 11/374,300, and have a total size of 26,340,736 bytes (measured in MS-WINDOWS).

### INCORPORATION OF TABLE

[0004] Table 2 contained in the file named 38-21(53720)D_table2.txt, which is 561,487 bytes (measured in MS-WINDOWS), which was created on Dec. 21, 2005 and filed with U.S. application Ser. No. 11/374,300 and published in U.S. Patent Application Publication 2008/0148432A1, and which comprises 132 pages when viewed in MS Word, is herein incorporated by reference.

### FIELD OF THE INVENTION

[0005] Disclosed herein are inventions in the field of plant genetics and developmental biology. More specifically, the present inventions provide plant cells with recombinant DNA for providing an enhanced trait in a transgenic plant, plants comprising such cells, seed and pollen derived from such plants, methods of making and using such cells, plants, seeds and pollen.

### BACKGROUND OF THE INVENTION

[0006] Transgenic plants with improved agronomic traits such as yield, environmental stress tolerance, pest resistance, herbicide tolerance, improved seed compositions, and the like are desired by both farmers and consumers. Although considerable efforts in plant breeding have provided significant gains in desired traits, the ability to introduce specific DNA into plant genomes provides further opportunities for generation of plants with improved and/or unique traits. Merely introducing recombinant DNA into a plant genome doesn't always produce a transgenic plant with an enhanced agronomic trait. Methods to select individual transgenic events from a population are required to identify those transgenic events that are characterized by the enhanced agronomic trait.

### SUMMARY OF THE INVENTION

[0007] This invention employs recombinant DNA for expression of proteins that are useful for imparting enhanced agronomic traits to the transgenic plants. Recombinant DNA in this invention is provided in a construct comprising a promoter that is functional in plant cells and that is operably linked to DNA that encodes a protein having at least one amino acid domain in a sequence that exceeds the Pfam gathering cutoff for amino acid sequence alignment with a protein domain family identified by a Pfam name in the group of Pfam domain names as identified in Table 12. In more specific embodiments of the invention the protein expressed in plant cells has an amino acid sequence with at least 90% identity to a consensus amino acid sequence in the group of consensus amino acid sequences consisting of the consensus amino acid sequence constructed for SEQ ID NO: 742 and homologs thereof listed in Table 2 through the consensus amino acid sequence constructed for SEQ ID NO:1482 and homologs thereof listed in Table 2. In even more specific embodiments of the invention the protein expressed in plant cells is a protein selected from the group of proteins identified in Table 1.

[0008] Other aspects of the invention are specifically directed to transgenic plant cells comprising the recombinant DNA of the invention, transgenic plants comprising a plurality of such plant cells, progeny transgenic seed, embryo and transgenic pollen from such plants. Such plant cells are selected from a population of transgenic plants regenerated from plant cells transformed with recombinant DNA and that express the protein by screening transgenic plants in the population for an enhanced trait as compared to control plants that do not have said recombinant DNA, where the enhanced trait is selected from group of enhanced traits consisting of enhanced water use efficiency, enhanced cold tolerance, increased yield, enhanced nitrogen use efficiency, enhanced seed protein and enhanced seed oil.

[0009] In yet another aspect of the invention the plant cells, plants, seeds, embryo and pollen further comprise DNA expressing a protein that provides tolerance from exposure to an herbicide applied at levels that are lethal to a wild type of said plant cell. Such tolerance is especially useful not only as a advantageous trait in such plants but is also useful in a selection step in the methods of the invention. In aspects of the invention the agent of such herbicide is a glyphosate, dicamba, or glufosinate compound.

[0010] Yet other aspects of the invention provide transgenic plants which are homozygous for the recombinant DNA and transgenic seed of the invention from corn, soybean, cotton, canola, alfalfa, wheat or rice plants. In other important embodiments for practice of various aspects of the invention in Argentina the recombinant DNA is provided in plant cells derived from corn lines that that are and maintain resistance to the Mal de Rio Cuarto virus or the Puccina sorghi fungus or both.

[0011] This invention also provides methods for manufacturing non-natural, transgenic seed that can be used to produce a crop of transgenic plants with an enhanced trait resulting from expression of stably-integrated, recombinant DNA for expressing a protein having at least one domain of amino acids in a sequence that exceeds the Pfam gathering cutoff for amino acid sequence alignment with a protein domain family identified by a Pfam name in the group of Pfam names identified in Table 12. More specifically the method comprises (a) screening a population of plants for an enhanced trait and a recombinant DNA, where individual plants in the population can exhibit the trait at a level less than, essentially the same as or greater than the level that the trait is exhibited in control plants which do not express the recombinant DNA, (b) selecting from the population one or more plants that exhibit the trait at a level greater than the level that said trait is exhibited in control plants, (c) verifying that the recombinant DNA is stably integrated in said selected plants, (d) analyzing tissue of a selected plant to determine the production of a protein having the function of a protein encoded by nucleotides in a sequence of one of SEQ ID NO:1-741; and (e) collecting seed from a selected plant. In one aspect of the invention the plants in the population further comprise DNA expressing a protein that provides tolerance to exposure to an herbicide applied at levels that are lethal to wild type plant cells and the selecting is effected by treating the population with the herbicide, e.g. a glyphosate, dicamba, or glufosinate compound. In another aspect of the invention the plants are selected by identifying plants with the enhanced trait. The methods are especially useful for manufacturing corn, soybean, cotton, alfalfa, wheat or rice seed.

[0012] Another aspect of the invention provides a method of producing hybrid corn seed comprising acquiring hybrid corn seed from a herbicide tolerant corn plant which also has stably-integrated, recombinant DNA comprising a promoter that is (a) functional in plant cells and (b) is operably linked to DNA that encodes a protein having at least one domain of amino acids in a sequence that exceeds the Pfam gathering cutoff for amino acid sequence alignment with a protein domain family identified by a Pfam name in the group of Pfam names identified in Table 12. The methods further comprise producing corn plants from said hybrid corn seed, wherein a fraction of the plants produced from said hybrid corn seed is homozygous for said recombinant DNA, a fraction of the plants produced from said hybrid corn seed is hemizygous for said recombinant DNA, and a fraction of the plants produced from said hybrid corn seed has none of said recombinant DNA; selecting corn plants which are homozygous and hemizygous for said recombinant DNA by treating with an herbicide; collecting seed from herbicide-treated-surviving corn plants and planting said seed to produce further progeny corn plants; repeating the selecting and collecting steps at least once to produce an inbred corn line; and crossing the inbred corn line with a second corn line to produce hybrid seed.

[0013] Another aspect of the invention provides a method of selecting a plant comprising plant cells of the invention by using an immunoreactive antibody to detect the presence of protein expressed by recombinant DNA in seed or plant tissue. Yet another aspect of the invention provides anti-counterfeit milled seed having, as an indication of origin, a plant cells of this invention.

[0014] Still other aspects of this invention relate to transgenic plants with enhanced water use efficiency or enhanced nitrogen use efficiency. For instance, this invention provides methods of growing a corn, cotton or soybean crop without irrigation water comprising planting seed having plant cells of the invention which are selected for enhanced water use efficiency. Alternatively methods comprise applying reduced irrigation water, e.g. providing up to 300 millimeters of ground water during the production of a corn crop. This invention also provides methods of growing a corn, cotton or soybean crop without added nitrogen fertilizer comprising planting seed having plant cells of the invention which are selected for enhanced nitrogen use efficiency.

### BRIEF DESCRIPTION OF THE DRAWINGS

[0015] FIG. 1 is a multiple sequence alignment.

### DETAILED DESCRIPTION OF THE INVENTION

[0016] As used herein a “plant cell” means a plant cell that is transformed with stably-integrated, non-natural, recombinant DNA, e.g. by Agrobacterium-mediated transformation or by bombardment using microparticles coated with recombinant DNA or other means. A plant cell of this invention can be an originally-transformed plant cell that exists as a microorganism or as a progeny plant cell that is regenerated into differentiated tissue, e.g. into a transgenic plant with stably-integrated, non-natural recombinant DNA, or seed or pollen derived from a progeny transgenic plant.

[0017] As used herein a “transgenic plant” means a plant whose genome has been altered by the stable integration of recombinant DNA. A transgenic plant includes a plant regenerated from an originally-transformed plant cell and progeny transgenic plants from later generations or crosses of a transformed plant.

[0018] As used herein “recombinant DNA” means DNA which has been a genetically engineered and constructed outside of a cell including DNA containing naturally occurring DNA or cDNA or synthetic DNA.

[0019] As used herein “consensus sequence” means an artificial sequence of amino acids in a conserved region of an alignment of amino acid sequences of homologous proteins, e.g. as determined by a CLUSTALW alignment of amino acid sequence of homolog proteins.

[0020] As used herein “homolog” means a protein in a group of proteins that perform the same biological function, e.g. proteins that belong to the same Pfam protein family and that provide a common enhanced trait in transgenic plants of this invention. Homologs are expressed by homologous genes. Homologous genes include naturally occurring alleles and artificially-created variants. Degeneracy of the genetic code provides the possibility to substitute at least one base of the protein encoding sequence of a gene with a different base without causing the amino acid sequence of the polypeptide produced from the gene to be changed. Hence, a polynucleotide useful in the present invention may have any base sequence that has been changed from SEQ ID NO:1 through SEQ ID NO: 741 substitution in accordance with degeneracy of the genetic code. Homologs are proteins that, when optimally aligned, have at least 60% identity, more preferably about 70% or higher, more preferably at least 80% and even more preferably at least 90% identity over the full length of a protein identified as being associated with imparting an enhanced trait when expressed in plant cells. Homologs include proteins with an amino acid sequence that has at least 90% identity to a consensus amino acid sequence of proteins and homologs disclosed herein.

[0021] Homologs are be identified by comparison of amino acid sequence, e.g. manually or by use of a computer-based tool using known homology-based search algorithms such as those commonly known and referred to as BLAST, FASTA, and Smith-Waterman. A local sequence alignment program, e.g. BLAST, can be used to search a database of sequences to find similar sequences, and the summary Expectation value (E-value) used to measure the sequence base similarity. As a protein hit with the best E-value for a particular organism may not necessarily be an ortholog or the only ortholog, a reciprocal query is used in the present invention to filter hit sequences with significant E-values for ortholog identification. The reciprocal query entails search of the significant hits against a database of amino acid sequences from the base organism that are similar to the sequence of the query protein. A hit is a likely ortholog, when the reciprocal query's best hit is the query protein itself or a protein encoded by a duplicated gene after speciation. A further aspect of the invention comprises functional homolog proteins that differ in one or more amino acids from those of disclosed protein as the result of conservative amino acid substitutions, for example substitutions are among: acidic (negatively charged) amino acids such as aspartic acid and glutamic acid; basic (positively charged) amino acids such as arginine, histidine, and lysine; neutral polar amino acids such as glycine, serine, threonine, cysteine, tyrosine, asparagine, and glutamine; neutral nonpolar (hydrophobic) amino acids such as alanine, leucine, isoleucine, valine, proline, phenylalanine, tryptophan, and methionine; amino acids having aliphatic side chains such as glycine, alanine, valine, leucine, and isoleucine; amino acids having aliphatic-hydroxyl side chains such as serine and threonine; amino acids having amide-containing side chains such as asparagine and glutamine; amino acids having aromatic side chains such as phenylalanine, tyrosine, and tryptophan; amino acids having basic side chains such as lysine, arginine, and histidine; amino acids having sulfur-containing side chains such as cysteine and methionine; naturally conservative amino acids such as valine-leucine, valine-isoleucine, phenylalanine-tyrosine, lysine-arginine, alanine-valine, aspartic acid-glutamic acid, and asparagine-glutamine. A further aspect of the homologs encoded by DNA useful in the transgenic plants of the invention are those proteins that differ from a disclosed protein as the result of deletion or insertion of one or more amino acids in a native sequence.

[0022] As used herein, “percent identity” means the extent to which two optimally aligned DNA or protein segments are invariant throughout a window of alignment of components, for example nucleotide sequence or amino acid sequence. An “identity fraction” for aligned segments of a test sequence and a reference sequence is the number of identical components that are shared by sequences of the two aligned segments divided by the total number of sequence components in the reference segment over a window of alignment which is the smaller of the full test sequence or the full reference sequence. “Percent identity” (“% identity”) is the identity fraction times 100.

[0023] As used herein “Pfam” refers to a large collection of multiple sequence alignments and hidden Markov models covering many common protein families, e.g. Pfam version 18.0 (August 2005) contains alignments and models for 7973 protein families and is based on the Swissprot 47.0 and SP-TrEMBL 30.0 protein sequence databases. See S. R. Eddy, “Profile Hidden Markov Models”, Bioinformatics 14:755-763, 1998. Pfam is currently maintained and updated by a Pfam Consortium. The alignments represent some evolutionary conserved structure that has implications for the protein's function. Profile hidden Markov models (profile HMMs) built from the Pfam alignments are useful for automatically recognizing that a new protein belongs to an existing protein family even if the homology by alignment appears to be low. Once one DNA is identified as encoding a protein which imparts an enhanced trait when expressed in transgenic plants, other DNA encoding proteins in the same protein family are identified by querying the amino acid sequence of protein encoded by candidate DNA against the Hidden Markov Model which characterizes the Pfam domain using HMMER software, a current version of which is provided in the appended computer listing. Candidate proteins meeting the gathering cutoff for the alignment of a particular Pfam are in the protein family and have cognate DNA that is useful in constructing recombinant DNA for the use in the plant cells of this invention. Hidden Markov Model databases for use with HMMER software in identifying DNA expressing protein in a common Pfam for recombinant DNA in the plant cells of this invention are also included in the appended computer listing. The HMMER software and Pfam databases are version 18.0 and were used to identify known domains in the proteins corresponding to amino acid sequence of SEQ ID NO: 742 through SEQ ID NO:1482. All DNA encoding proteins that have scores higher than the gathering cutoff disclosed in Table 12 by Pfam analysis disclosed herein can be used in recombinant DNA of the plant cells of this invention, e.g. for selecting transgenic plants having enhanced agronomic traits. The relevant Pfams for use in this invention, as more specifically disclosed below, are bZIP_{—}1, bZIP_{—}2, Meth_synt_{—}1, Homeobox, Succ_DH_flav_C, RWP-RK, Meth_synt_{—}2, CTP_synth_N, WD40, Sigma70_r2, Sigma70_r3, Fer4, Sigma70_r4, Sigma70_r1_{—}2, CMAS, Sugar_tr, Rubrerythrin, Pro_dh, Ldh_{—}1_C, START, HATPase_c, Cpn10, Glycos_transf_{—}1, Glycos_transf_{—}2, Pkinase, KH_{—}1, cobW, Ldh_{—}1_N, DUF393, SecY, PCI, SRF-TF, IF4E, Lectin_legA, MatE, Dehydrin, Lectin_legB, Ank, 2-Hacid_dh_C, Tic22, Chal_sti_synt_C, AA_kinase, ELFV_dehydrog_N, HLH, Ribonuclease_T2, HEM4, AT_hook, Peptidase_A22B, tRNA-synt_{—}2b, Suc_Fer-like, Glyco_transf_{—}20, MFS_{—}1, HMA, Ketoacyl-synt_C, Steroid_dh, Hydrolase, Peptidase_C1, Ion_trans, Aa_trans, peroxidase, GAF, Cu-oxidase, ABC1, PMSR, B12D, Chromo, Lipase_GDSL, Ran_BP1, DUF125, Lig_chan, GAT, Tub, NPH3, BAH, GFO_IDH_MocA, DUF6, Orn_DAP_Arg_deC, F-box, 3_{—}5_exonuc, NUDIX, Cyclin_C, Trehalase_Ca-bi, Acyltransferase, MtN3_siv, zf-B_box, PUA, AMPKBI, Peptidase_M20, Transaldolase, ketoacyl-synt, Cyclin_N, HisKA, Ribosomal_L7Ae, Methyltransf_{—}11, Methyltransf_{—}12, Hexapep, Ribosomal_S2, Jacalin, ERp29, MFMR, Usp, DUF641, Pyr_redox_dim, Auxin_resp, Inhibitor_I29, Transferase, cNMP_binding, BURP, Epimerase, Ribosomal_L39, Metallothio_{—}2, Pyr_redox_{—}2, WRKY, GSHPx, Kelch_{—}1, Kelch_{—}2, Aminotran_{—}1_{—}2, ABC_tran, UDPGT, Cystatin, YL1, AMP-binding, NTP_transferase, HALZ, Kunitz_legume, HSP20, DUF581, FGGY_N, Aminotran_{—}3, PHD, B56, Aminotran_{—}5, PS1_PsaF, malic, zf-C2H2, HEAT, UPF0057, Asn_synthase, K-box, HAMP, PTR2, SapB_{—}1, Ammonium_transp, SapB_{—}2, GATase, Pyr_redox, Cu-oxidase_{—}2, Cu-oxidase_{—}3, Cyclotide, Asp, M20_dimer, PA, Thiolase_C, FHA, YjeF_N, Citrate_synt, GTP—EFTU_D2, GTP_EFTU_D3, PK, GATA, Thiolase_N, Glycogen_syn, WHEP-TRS, B3, EF1_GNE, FAD_binding_{—}3, ComA, Remorin_C, FAD_binding_{—}7, RmlD_sub_bind, CBS, ELFV_dehydrog, YL1_C, zf-D of, Ribosomal_S11, ArfGap, GRAS, Metallophos, Annexin, Ras, NAC, Acetyltransf_{—}1, Ribosomal_S17, NAF, DUF246, GST_C, CN_hydrolase, Na_Ca_ex, DUF1423, Ubie_methyltran, p450, PP2C, NAM, Histone, GST_N, Tubulin, 2-Hacid_dh, Ribosomal_L19e, CCT, Malic_M, PK_C, VHS, IPK, HSF_DNA-bind, Tubulin_C, Sina, JmjC, CH, Catalase, DUF250, HMG_box, PfkB, Yippee, DSPc, Pkinase_C, UbiA, Ribosomal_S27, ADH_zinc_N, Zip, Globin, JmjN, Cys_Met_Meta_PP, HI0933_like, GH3, Bromodomain, ERO1, DAO, DUF760, Methyltransf_{—}2, Gp_dh_C, HGTP_anticodon, Methyltransf_{—}3, Aldo_ket_red, Thioredoxin, NmrA, SelR, LEA_{—}5, Orn_Arg_deC_N, Polysacc_synt_{—}2, Gp_dh_N, NifU_N, GFO_IDH_MocA_C, Gamma-thionin, FBA_{—}1, H_PPase, ADH_N, Heme_oxygenase, AUX_IAA, NAD_binding_{—}4, Auxin_inducible, LIM, Response_reg, Dirigent, E2F_TDP, Di19, Alpha_adaptinC2, efhand, ICL, Rieske, GTP_EFTU, ARID, adh_short, Transket_pyr, AA_permease, TPP_enzyme_C, NDK, RRM_{—}1, Trypsin, Pro_CA, Hexokinase_{—}1, CBFD_NFYB_HMF, Glyco_hydro_{—}38C, TPP_enzyme_M, TPP_enzyme_N, Hexokinase_{—}2, 3Beta_HSD, DUF788, Wzy_C, E1_dh, Glycolytic, RuBisCO_small, ZF-HD_dimer, DUF1530, PARP, Pyridoxal_deC, IlvC, Ribosomal_L1, Alpha-amylase, EB1, CorA, Sucrose_synth, PGAM, IlvN, MAP1_LC3, DNA_photolyase, PAD_porph, Abhydrolase_{—}1, Glyco_hydro_{—}16, NTF2, CobW_C, GATase_{—}2, Cation_efflux, Gln-synt_C, VQ, DUF296, W2, SAM_{—}1, SAM_{—}2, Gln-synt_N, Transketolase_C, PEPcase, GRIM-19, Pkinase_Tyr, DnaJ, MIP, PRA1, Trehalose_PPase, Transketolase_N, LRR_{—}2, KA1, Mpv17_PMP22, Reticulon, Trp_syntA, YTH, Aldedh, zf-C3HC4, GIDA, Trp_Tyr_perm, UBA, PB1, PAS, Carb_kinase, zf-LSD 1, CAF1, Xan_ur_permease, Hist_deacetyl, Cpn60_TCP1, XET_C, Ribosomal_L10e, Trehalase, ubiquitin, Glyco_hydro_{—}38, AP2, Myb_DNA-binding, APS_kinase, PBD, FAE_{—}3-kCoA_syn1, the databases for which are included in the appended computer listing.

[0024] As used herein “promoter” means regulatory DNA for initializing transcription. A “plant promoter” is a promoter capable of initiating transcription in plant cells whether or not its origin is a plant cell, e.g. is it well known that Agrobacterium promoters are functional in plant cells. Thus, plant promoters include promoter DNA obtained from plants, plant viruses and bacteria such as Agrobacterium and Bradyrhizobium bacteria. Examples of promoters under developmental control include promoters that preferentially initiate transcription in certain tissues, such as leaves, roots, or seeds. Such promoters are referred to as “tissue preferred”. Promoters that initiate transcription only in certain tissues are referred to as “tissue specific”. A “cell type” specific promoter primarily drives expression in certain cell types in one or more organs, for example, vascular cells in roots or leaves. An “inducible” or “repressible” promoter is a promoter which is under environmental control. Examples of environmental conditions that may effect transcription by inducible promoters include anaerobic conditions, or certain chemicals, or the presence of light. Tissue specific, tissue preferred, cell type specific, and inducible promoters constitute the class of “non-constitutive” promoters. A “constitutive” promoter is a promoter which is active under most conditions.

[0025] As used herein “operably linked” means the association of two or more DNA fragments in a DNA construct so that the function of one, e.g. protein-encoding DNA, is controlled by the other, e.g. a promoter.

[0026] As used herein “expressed” means produced, e.g. a protein is expressed in a plant cell when its cognate DNA is transcribed to mRNA that is translated to the protein.

[0027] As used herein a “control plant” means a plant that does not contain the recombinant DNA that expressed a protein that impart an enhanced trait. A control plant is to identify and select a transgenic plant that has an enhance trait. A suitable control plant can be a non-transgenic plant of the parental line used to generate a transgenic plant, i.e. devoid of recombinant DNA. A suitable control plant may in some cases be a progeny of a hemizygous transgenic plant line that is does not contain the recombinant DNA, known as a negative segregant.

[0028] As used herein an “enhanced trait” means a characteristic of a transgenic plant that includes, but is not limited to, an enhance agronomic trait characterized by enhanced plant morphology, physiology, growth and development, yield, nutritional enhancement, disease or pest resistance, or environmental or chemical tolerance. In more specific aspects of this invention enhanced trait is selected from group of enhanced traits consisting of enhanced water use efficiency, enhanced cold tolerance, increased yield, enhanced nitrogen use efficiency, enhanced seed protein and enhanced seed oil. In an important aspect of the invention the enhanced trait is enhanced yield including increased yield under non-stress conditions and increased yield under environmental stress conditions. Stress conditions may include, for example, drought, shade, fungal disease, viral disease, bacterial disease, insect infestation, nematode infestation, cold temperature exposure, heat exposure, osmotic stress, reduced nitrogen nutrient availability, reduced phosphorus nutrient availability and high plant density. “Yield” can be affected by many properties including without limitation, plant height, pod number, pod position on the plant, number of internodes, incidence of pod shatter, grain size, efficiency of nodulation and nitrogen fixation, efficiency of nutrient assimilation, resistance to biotic and abiotic stress, carbon assimilation, plant architecture, resistance to lodging, percent seed germination, seedling vigor, and juvenile traits. Yield can also affected by efficiency of germination (including germination in stressed conditions), growth rate (including growth rate in stressed conditions), ear number, seed number per ear, seed size, composition of seed (starch, oil, protein) and characteristics of seed fill.

[0029] Increased yield of a transgenic plant of the present invention can be measured in a number of ways, including test weight, seed number per plant, seed weight, seed number per unit area (i.e. seeds, or weight of seeds, per acre), bushels per acre, tonnes per acre, tons per acre, kilo per hectare. For example, maize yield may be measured as production of shelled corn kernels per unit of production area, for example in bushels per acre or metric tons per hectare, often reported on a moisture adjusted basis, for example at 15.5 percent moisture. Increased yield may result from improved utilization of key biochemical compounds, such as nitrogen, phosphorous and carbohydrate, or from improved responses to environmental stresses, such as cold, heat, drought, salt, and attack by pests or pathogens. Recombinant DNA used in this invention can also be used to provide plants having improved growth and development, and ultimately increased yield, as the result of modified expression of plant growth regulators or modification of cell cycle or photosynthesis pathways. Also of interest is the generation of transgenic plants that demonstrate enhanced yield with respect to a seed component that may or may not correspond to an increase in overall plant yield. Such properties include enhancements in seed oil, seed molecules such as tocopherol, protein and starch, or oil particular oil components as may be manifest by an alterations in the ratios, of seed components.

[0030] A subset of the nucleic molecules of this invention includes fragments of the disclosed recombinant DNA consisting of oligonucleotides of at least 15, preferably at least 16 or 17, more preferably at least 18 or 19, and even more preferably at least 20 or more, consecutive nucleotides. Such oligonucleotides are fragments of the larger molecules having a sequence selected from the group consisting of SEQ ID NO:1 through SEQ ID NO: 741, and find use, for example as probes and primers for detection of the polynucleotides of the present invention.

[0031] In some embodiments of the present invention, a dominant negative mutant of a native gene is generated to achieve the desired effect. As used herein, “dominant negative mutant” means a mutant gene whose gene product adversely affects the normal, wild-type gene product within the same cell, usually by dimerizing (combining) with it. In cases of polymeric molecules, such as collagen, dominant negative mutations are often more deleterious than mutations causing the production of no gene product (null mutations or null alleles). For example, SEQ ID NO: 839-842 are constructed to encode agl11 protein with K-box deleted or C-terminal domain deleted. AGL11 or MADS box protein can be considered as having three functional domains. There is an N-terminal DNA-binding domain (the MADS box), a more distal dimerization domain (the K-box) and a C-terminal domain that is usually involved in interactions with other proteins. In plants the region between the MADS box and the K-box has been shown to be important for DNA binding in some proteins and is often referred to as the I-box (Fan et al., 1997). Several different classes of dominant negative constructs are considered. Deletion or inactivation of the DNA-binding domain can create proteins that are able to dimerize with their native full length counterparts as well as other natural dimerization partners. Likewise, removal of the C-terminal domain can allow dimerization with both the native protein and it's natural dimerization partners. In both cases these types of constructs disable both the target protein and any other protein capable of interacting with the K-box.

[0032] In other embodiments of the invention a constitutively active mutant is constructed to achieve the desired effect. For example, SEQ ID NO: 831 and SEQ ID NO: 832 encode only the kinase domain from a calcium-dependent protein kinase (CDPK). CDPK1 has a domain structure similar to other calcium-dependant protein kinases in which the protein kinase domain is separated from four efhand domains by 42 amino acid “spacer” region. Calcium-dependant protein kinases are thought to be activated by a calcium-induced conformational change that results in movement of an autoinhibitory domain away from the protein kinase active site (Yokokura et al., 1995). Thus, constitutively active proteins can be made by over expressing the protein kinase domain alone.

[0033] DNA constructs are assembled using methods well known to persons of ordinary skill in the art and typically comprise a promoter operably linked to DNA, the expression of which provides the enhanced agronomic trait. Other construct components may include additional regulatory elements, such as 5′ leaders and introns for enhancing transcription, 3′ untranslated regions (such as polyadenylation signals and sites), DNA for transit or signal peptides.

[0034] Numerous promoters that are active in plant cells have been described in the literature. These include promoters present in plant genomes as well as promoters from other sources, including nopaline synthase (NOS) promoter and octopine synthase (OCS) promoters carried on tumor-inducing plasmids of Agrobacterium tumefaciens, caulimovirus promoters such as the cauliflower mosaic virus. For instance, see U.S. Pat. Nos. 5,858,742 and 5,322,938, which disclose versions of the constitutive promoter derived from cauliflower mosaic virus (CaMV35S), U.S. Pat. No. 5,641,876, which discloses a rice actin promoter, U.S. Patent Application Publication 2002/0192813A1, which discloses 5′, 3′ and intron elements useful in the design of effective plant expression vectors, U.S. patent application Ser. No. 09/757,089, which discloses a maize chloroplast aldolase promoter, U.S. patent application Ser. No. 08/706,946, which discloses a rice glutelin promoter, U.S. patent application Ser. No. 09/757,089, which discloses a maize aldolase (FDA) promoter, and U.S. patent application Ser. No. 60/310,370, which discloses a maize nicotianamine synthase promoter, all of which are incorporated herein by reference. These and numerous other promoters that function in plant cells are known to those skilled in the art and available for use in recombinant polynucleotides of the present invention to provide for expression of desired genes in transgenic plant cells.

[0035] In other aspects of the invention, preferential expression in plant green tissues is desired. Promoters of interest for such uses include those from genes such as Arabidopsis thaliana ribulose-1,5-bisphosphate carboxylase (Rubisco) small subunit (Fischhoff et al. (1992) Plant Mol. Biol. 20:81-93), aldolase and pyruvate orthophosphate dikinase (PPDK) (Taniguchi et al. (2000) Plant Cell Physiol. 41(1):42-48).

[0036] Furthermore, the promoters may be altered to contain multiple “enhancer sequences” to assist in elevating gene expression. Such enhancers are known in the art. By including an enhancer sequence with such constructs, the expression of the selected protein may be enhanced. These enhancers often are found 5′ to the start of transcription in a promoter that functions in eukaryotic cells, but can often be inserted upstream (5′) or downstream (3′) to the coding sequence. In some instances, these 5′ enhancing elements are introns. Particularly useful as enhancers are the 5′ introns of the rice actin 1 (see U.S. Pat. No. 5,641,876) and rice actin 2 genes, the maize alcohol dehydrogenase gene intron, the maize heat shock protein 70 gene intron (U.S. Pat. No. 5,593,874) and the maize shrunken 1 gene.

[0037] In other aspects of the invention, sufficient expression in plant seed tissues is desired to effect improvements in seed composition. Exemplary promoters for use for seed composition modification include promoters from seed genes such as napin (U.S. Pat. No. 5,420,034), maize L3 oleosin (U.S. Pat. No. 6,433,252), zein Z27 (Russell et al. (1997) Transgenic Res. 6(2):157-166), globulin 1 (Belanger et al (1991) Genetics 129:863-872), glutelin 1 (Russell (1997) supra), and peroxiredoxin antioxidant (Per1) (Stacy et al. (1996) Plant Mol. Biol. 31(6):1205-1216).

[0038] Recombinant DNA constructs prepared in accordance with the invention will also generally include a 3′ element that typically contains a polyadenylation signal and site. Well-known 3′ elements include those from Agrobacterium tumefaciens genes such as nos 3′, tml 3′, tmr 3′, tms 3′, ocs 3′, tr7 3′, for example disclosed in U.S. Pat. No. 6,090,627, incorporated herein by reference; 3′ elements from plant genes such as wheat (Triticum aesevitum) heat shock protein 17 (Hsp17 3′), a wheat ubiquitin gene, a wheat fructose-1,6-biphosphatase gene, a rice glutelin gene a rice lactate dehydrogenase gene and a rice beta-tubulin gene, all of which are disclosed in U.S. published patent application 2002/0192813 A1, incorporated herein by reference; and the pea (Pisum sativum) ribulose biphosphate carboxylase gene (rbs 3′), and 3′ elements from the genes within the host plant.

[0039] Constructs and vectors may also include a transit peptide for targeting of a gene target to a plant organelle, particularly to a chloroplast, leucoplast or other plastid organelle. For descriptions of the use of chloroplast transit peptides see U.S. Pat. No. 5,188,642 and U.S. Pat. No. 5,728,925, incorporated herein by reference. For description of the transit peptide region of an Arabidopsis EPSPS gene useful in the present invention, see Klee, H. J. et al (MGG (1987) 210:437-442).

[0040] Transgenic plants comprising or derived from plant cells of this invention transformed with recombinant DNA can be further enhanced with stacked traits, e.g. a crop plant having an enhanced trait resulting from expression of DNA disclosed herein in combination with herbicide and/or pest resistance traits. For example, genes of the current invention can be stacked with other traits of agronomic interest, such as a trait providing herbicide resistance, or insect resistance, such as using a gene from Bacillus thuringensis to provide resistance against lepidopteran, coliopteran, homopteran, hemiopteran, and other insects. Herbicides for which transgenic plant tolerance has been demonstrated and the method of the present invention can be applied include, but are not limited to, glyphosate, dicamba, glufosinate, sulfonylurea, bromoxynil and norflurazon herbicides. Polynucleotide molecules encoding proteins involved in herbicide tolerance are well-known in the art and include, but are not limited to, a polynucleotide molecule encoding 5-enolpyruvylshikimate-3-phosphate synthase (EPSPS) disclosed in U.S. Pat. Nos. 5,094,945; 5,627,061; 5,633,435 and 6,040,497 for imparting glyphosate tolerance; polynucleotide molecules encoding a glyphosate oxidoreductase (GOX) disclosed in U.S. Pat. No. 5,463,175 and a glyphosate-N-acetyl transferase (GAT) disclosed in U.S. Patent Application publication 2003/0083480 A1 also for imparting glyphosate tolerance; dicamba monooxygenase disclosed in U.S. Patent Application publication 2003/0135879 A1 for imparting dicamba tolerance; a polynucleotide molecule encoding bromoxynil nitrilase (Bxn) disclosed in U.S. Pat. No. 4,810,648 for imparting bromoxynil tolerance; a polynucleotide molecule encoding phytoene desaturase (crtl) described in Misawa et al, (1993) Plant J. 4:833-840 and Misawa et al, (1994) Plant J. 6:481-489 for norflurazon tolerance; a polynucleotide molecule encoding acetohydroxyacid synthase (AHAS, aka ALS) described in Sathasiivan et al. (1990) Nucl. Acids Res. 18:2188-2193 for imparting tolerance to sulfonylurea herbicides; polynucleotide molecules known as bar genes disclosed in DeBlock, et al. (1987) EMBO J. 6:2513-2519 for imparting glufosinate and bialaphos tolerance; polynucleotide molecules disclosed in U.S. Patent Application Publication 2003/010609 A1 for imparting N-amino methyl phosphonic acid tolerance; polynucleotide molecules disclosed in U.S. Pat. No. 6,107,549 for imparting pyridine herbicide resistance; molecules and methods for imparting tolerance to multiple herbicides such as glyphosate, atrazine, ALS inhibitors, isoxoflutole and glufosinate herbicides are disclosed in U.S. Pat. No. 6,376,754 and U.S. Patent Application Publication 2002/0112260, all of said U.S. patents and patent application Publications are incorporated herein by reference. Molecules and methods for imparting insect/nematode/virus resistance is disclosed in U.S. Pat. Nos. 5,250,515; 5,880,275; 6,506,599; 5,986,175 and U.S. Patent Application Publication 2003/0150017 A1, all of which are incorporated herein by reference.

[0041] In particular embodiments, the inventors contemplate the use of antibodies, either monoclonal or polyclonal which bind to the proteins disclosed herein. Means for preparing and characterizing antibodies are well known in the art (See, e.g., Antibodies: A Laboratory Manual, Cold Spring Harbor Laboratory, 1988; incorporated herein by reference). The methods for generating monoclonal antibodies (mAbs) generally begin along the same lines as those for preparing polyclonal antibodies. Briefly, a polyclonal antibody is prepared by immunizing an animal with an immunogenic composition in accordance with the present invention and collecting antisera from that immunized animal. A wide range of animal species can be used for the production of antisera. Typically the animal used for production of anti-antisera is a rabbit, a mouse, a rat, a hamster, a guinea pig or a goat. Because of the relatively large blood volume of rabbits, a rabbit is a preferred choice for production of polyclonal antibodies.

[0042] As is well known in the art, a given composition may vary in its immunogenicity. It is often necessary therefore to boost the host immune system, as may be achieved by coupling a peptide or polypeptide immunogen to a carrier. Exemplary and preferred carriers are keyhole limpet hemocyanin (KLH) and bovine serum albumin (BSA). Other albumins such as ovalbumin, mouse serum albumin or rabbit serum albumin can also be used as carriers. Means for conjugating a polypeptide to a carrier protein are well known in the art and include using glutaraldehyde, m-maleimidobencoyl-N-hydroxysuccinimide ester, carbodiimide and bis-biazotized benzidine.

[0043] As is also well known in the art, the immunogenicity of a particular immunogen composition can be enhanced by the use of non-specific stimulators of the immune response, known as adjuvants. Exemplary and preferred adjuvants include complete Freund's adjuvant (a non-specific stimulator of the immune response containing killed Mycobacterium tuberculosis), incomplete Freund's adjuvants and aluminum hydroxide adjuvant.

[0044] The amount of immunogen composition used in the production of polyclonal antibodies varies upon the nature of the immunogen as well as the animal used for immunization. A variety of routes can be used to administer the immunogen (subcutaneous, intramuscular, intradermal, intravenous and intraperitoneal). The production of polyclonal antibodies may be monitored by sampling blood of the immunized animal at various points following immunization. A second, booster, injection may also be given. The process of boosting and titering is repeated until a suitable titer is achieved. When a desired level of immunogenicity is obtained, the immunized animal can be bled and the serum isolated and stored, and/or the animal can be used to generate mAbs.

[0045] mAbs may be readily prepared through use of well-known techniques, such as those exemplified in U.S. Pat. No. 4,196,265, incorporated herein by reference. Typically, this technique involves immunizing a suitable animal with a selected immunogen composition, e.g., a purified or partially purified antifungal protein, polypeptide or peptide. The immunizing composition is administered in a manner effective to stimulate antibody producing cells. Rodents such as mice and rats are preferred animals, however, the use of rabbit, sheep, or frog cells is also possible. The use of rats may provide certain advantages (Goding, 1986, pp. 60-61), but mice are preferred, with the BALB/c mouse being most preferred as this is most routinely used and generally gives a higher percentage of stable fusions.

[0046] Following immunization, somatic cells with the potential for producing antibodies, specifically B lymphocytes (B cells), are selected for use in the mAb generating protocol. These cells may be obtained from biopsied spleens, tonsils or lymph nodes, or from a peripheral blood sample. Spleen cells and peripheral blood cells are preferred, the former because they are a rich source of antibody-producing cells that are in the dividing plasmablast stage, and the latter because peripheral blood is easily accessible. Often, a panel of animals will have been immunized and the spleen of animal with the highest antibody titer will be removed and the spleen lymphocytes obtained by homogenizing the spleen with a syringe. Typically, a spleen from an immunized mouse contains approximately 5×10⁷ to 2×10⁸ lymphocytes.

[0047] The antibody-producing B lymphocytes from the immunized animal are then fused with cells of an immortal myeloma cell, generally one of the same species as the animal that was immunized. Myeloma cell lines suited for use in hybridoma-producing fusion procedures preferably are non-antibody-producing, have high fusion efficiency, and enzyme deficiencies that render them incapable of growing in certain selective media which support the growth of only the desired fused cells (hybridomas).

[0048] Any one of a number of myeloma cells may be used, as are known to those of skill in the art (Goding, 1986, pp. 65-66; Campbell, 1984, pp. 75-83). For example, where the immunized animal is a mouse, one may use P3-X63/Ag8, X63-Ag8.653, NS1/1.Ag 4 1, Sp210-Ag14, FO, NSO/U, MPC-11, MPC11-X45-GTG 1.7 and S194/5XX0 Bul; for rats, one may use R210.RCY3, Y3-Ag 1.2.3, IR983F and 4B210; and U-266, GM1500-GRG2, LICR-LON-HMy2 and UC729-6 are all useful in connection with human cell fusions.

[0049] One preferred murine myeloma cell is the NS-1 myeloma cell line (also termed P3-NS-1-Ag-4-1), which is readily available from the NIGMS Human Genetic Mutant Cell Repository by requesting cell line repository number GM3573. Another mouse myeloma cell line that may be used is the 8-azaguanine-resistant mouse murine myeloma SP2/0 non-producer cell line.

[0050] Methods for generating hybrids of antibody-producing spleen or lymph node cells and myeloma cells usually comprise mixing somatic cells with myeloma cells in a 2:1 ratio, though the ratio may vary from about 20:1 to about 1:1, respectively, in the presence of an agent or agents (chemical or electrical) that promote the fusion of cell membranes. Fusion methods using Spend virus have been described (Kohler and Milstein, 1975; 1976), and those using polyethylene glycol (PEG), such as 37% (v/v) PEG, (Gefter et al., 1977). The use of electrically induced fusion methods is also appropriate (Goding, 1986, pp. 71-74).

[0051] Fusion procedures usually produce viable hybrids at low frequencies, about 1×10⁻⁶ to 1×10⁻⁸. However, this does not pose a problem, as the viable, fused hybrids are differentiated from the parental, unfused cells (particularly the unfused myeloma cells that would normally continue to divide indefinitely) by culturing in a selective medium. The selective medium is generally one that contains an agent that blocks the de novo synthesis of nucleotides in the tissue culture media. Exemplary and preferred agents are aminopterin, methotrexate, and azaserine. Aminopterin and methotrexate block de novo synthesis of both purines and pyrimidines, whereas azasenne blocks only purine synthesis. Where aminopterin or methotrexate is used, the media is supplemented with hypoxanthine and thymidine as a source of nucleotides (HAT medium). Where azaserine is used, the media is supplemented with hypoxanthine.

[0052] The preferred selection medium is HAT. Only cells capable of operating nucleotide salvage pathways are able to survive in HAT medium. The myeloma cells are defective in key enzymes of the salvage pathway, e.g., hypoxanthine phosphoribosyl transferase (HPRT), and they cannot survive. The B-cells can operate this pathway, but they have a limited life span in culture and generally die within about two weeks. Therefore, the only cells that can survive in the selective media are those hybrids formed from myeloma and B-cells.

[0053] This culturing provides a population of hybridomas from which specific hybridomas are selected. Typically, selection of hybridomas is performed by culturing the cells by single-clone dilution in microtiter plates, followed by testing the individual clonal supernatants (after about two to three weeks) for the desired reactivity. The assay should be sensitive, simple and rapid, such as radioimmunoassays, enzyme immunoassays, cytotoxicity assays, plaque assays, dot immunobinding assays, and the like.

[0054] The selected hybridomas would then be serially diluted and cloned into individual antibody-producing cell lines, which clones can then be propagated indefinitely to provide mAbs. The cell lines may be exploited for mAb production in two basic ways. A sample of the hybridoma can be injected (often into the peritoneal cavity) into a histocompatible animal of the type that was used to provide the somatic and myeloma cells for the original fusion. The injected animal develops tumors secreting the specific monoclonal antibody produced by the fused cell hybrid. The body fluids of the animal, such as serum or ascites fluid, can then be tapped to provide mAbs in high concentration. The individual cell lines could also be cultured in vitro, where the mAbs are naturally secreted into the culture medium from which they can be readily obtained in high concentrations. mAbs produced by either means may be further purified, if desired, using filtration, centrifugation and various chromatographic methods such as HPLC or affinity chromatography.

### Plant Cell Transformation Methods

[0055] Numerous methods for transforming plant cells with recombinant DNA are known in the art and may be used in the present invention. Two commonly used methods for plant transformation are Agrobacterium-mediated transformation and microprojectile bombardment. Microprojectile bombardment methods are illustrated in U.S. Pat. Nos. 5,015,580 (soybean); 5,550,318 (corn); 5,538,880 (corn); 5,914,451 (soybean); 6,160,208 (corn); 6,399,861 (corn) and 6,153,812 (wheat) and Agrobacterium-mediated transformation is described in U.S. Pat. Nos. 5,159,135 (cotton); 5,824,877 (soybean); 5,591,616 (corn); and 6,384,301 (soybean), all of which are incorporated herein by reference. For Agrobacterium tumefaciens based plant transformation system, additional elements present on transformation constructs will include T-DNA left and right border sequences to facilitate incorporation of the recombinant polynucleotide into the plant genome.

[0056] In general it is useful to introduce recombinant DNA randomly, i.e. at a non-specific location, in the genome of a target plant line. In special cases it may be useful to target recombinant DNA insertion in order to achieve site-specific integration, for example to replace an existing gene in the genome, to use an existing promoter in the plant genome, or to insert a recombinant polynucleotide at a predetermined site known to be active for gene expression. Several site specific recombination systems exist which are known to function implants include cre-lox as disclosed in U.S. Pat. No. 4,959,317 and FLP-FRT as disclosed in U.S. Pat. No. 5,527,695, both incorporated herein by reference.

[0057] Transformation methods of this invention are preferably practiced in tissue culture on media and in a controlled environment. “Media” refers to the numerous nutrient mixtures that are used to grow cells in vitro, that is, outside of the intact living organism. Recipient cell targets include, but are not limited to, meristem cells, callus, immature embryos and gametic cells such as microspores, pollen, sperm and egg cells. It is contemplated that any cell from which a fertile plant may be regenerated is useful as a recipient cell. Callus may be initiated from tissue sources including, but not limited to, immature embryos, seedling apical meristems, microspores and the like. Cells capable of proliferating as callus are also recipient cells for genetic transformation. Practical transformation methods and materials for making transgenic plants of this invention, for example various media and recipient target cells, transformation of immature embryo cells and subsequent regeneration of fertile transgenic plants are disclosed in U.S. Pat. Nos. 6,194,636 and 6,232,526, which are incorporated herein by reference.

[0058] The seeds of transgenic plants can be harvested from fertile transgenic plants and be used to grow progeny generations of transformed plants of this invention including hybrid plants line for selection of plants having an enhanced trait. In addition to direct transformation of a plant with a recombinant DNA, transgenic plants can be prepared by crossing a first plant having a recombinant DNA with a second plant lacking the DNA. For example, recombinant DNA can be introduced into first plant line that is amenable to transformation to produce a transgenic plant which can be crossed with a second plant line to introgress the recombinant DNA into the second plant line. A transgenic plant with recombinant DNA providing an enhanced trait, e.g. enhanced yield, can be crossed with transgenic plant line having other recombinant DNA that confers another trait, for example herbicide resistance or pest resistance, to produce progeny plants having recombinant DNA that confers both traits. Typically, in such breeding for combining traits the transgenic plant donating the additional trait is a male line and the transgenic plant carrying the base traits is the female line. The progeny of this cross will segregate such that some of the plants will carry the DNA for both parental traits and some will carry DNA for one parental trait; such plants can be identified by markers associated with parental recombinant DNA, e.g. marker identification by analysis for recombinant DNA or, in the case where a selectable marker is linked to the recombinant, by application of the selecting agent such as a herbicide for use with a herbicide tolerance marker, or by selection for the enhanced trait. Progeny plants carrying DNA for both parental traits can be crossed back into the female parent line multiple times, for example usually 6 to 8 generations, to produce a progeny plant with substantially the same genotype as one original transgenic parental line but for the recombinant DNA of the other transgenic parental line

[0059] In the practice of transformation DNA is typically introduced into only a small percentage of target plant cells in any one transformation experiment. Marker genes are used to provide an efficient system for identification of those cells that are stably transformed by receiving and integrating a transgenic DNA construct into their genomes. Preferred marker genes provide selective markers which confer resistance to a selective agent, such as an antibiotic or herbicide. Any of the herbicides to which plants of this invention may be resistant are useful agents for selective markers. Potentially transformed cells are exposed to the selective agent. In the population of surviving cells will be those cells where, generally, the resistance-conferring gene is integrated and expressed at sufficient levels to permit cell survival. Cells may be tested further to confirm stable integration of the exogenous DNA. Commonly used selective marker genes include those conferring resistance to antibiotics such as kanamycin and paromomycin (nptII), hygromycin B (aph IV) and gentamycin (aac3 and aacC4) or resistance to herbicides such as glufosinate (bar or pat) and glyphosate (aroA or EPSPS). Examples of such selectable are illustrated in U.S. Pat. Nos. 5,550,318; 5,633,435; 5,780,708 and 6,118,047, all of which are incorporated herein by reference. Selectable markers which provide an ability to visually identify transformants can also be employed, for example, a gene expressing a colored or fluorescent protein such as a luciferase or green fluorescent protein (GFP) or a gene expressing a beta-glucuronidase or uidA gene (GUS) for which various chromogenic substrates are known.

[0060] Plant cells that survive exposure to the selective agent, or plant cells that have been scored positive in a screening assay, may be cultured in regeneration media and allowed to mature into plants. Developing plantlets regenerated from transformed plant cells can be transferred to plant growth mix, and hardened off, for example, in an environmentally controlled chamber at about 85% relative humidity, 600 ppm CO₂, and 25-250 microeinsteins m⁻² s⁻¹ of light, prior to transfer to a greenhouse or growth chamber for maturation. Plants are regenerated from about 6 weeks to 10 months after a transformant is identified, depending on the initial tissue. Plants may be pollinated using conventional plant breeding methods known to those of skill in the art and seed produced, for example self-pollination is commonly used with transgenic corn. The regenerated transformed plant or its progeny seed or plants can be tested for expression of the recombinant DNA and selected for the presence of enhanced agronomic trait.

### Transgenic Plants and Seeds

[0061] Transgenic plants derived from the plant cells of this invention are grown to generate transgenic plants having an enhanced trait as compared to a control plant and produce transgenic seed and haploid pollen of this invention. Such plants with enhanced traits are identified by selection of transformed plants or progeny seed for the enhanced trait. For efficiency a selection method is designed to evaluate multiple transgenic plants (events) comprising the recombinant DNA, for example multiple plants from 2 to 20 or more transgenic events. Transgenic plants grown from transgenic seed provided herein demonstrate improved agronomic traits that contribute to increased yield or other trait that provides increased plant value, including, for example, improved seed quality. Of particular interest are plants having enhanced water use efficiency, enhanced cold tolerance, increased yield, enhanced nitrogen use efficiency, enhanced seed protein and enhanced seed oil.

[0062] Table 1 provides a list of protein encoding DNA (“genes”) that are useful as recombinant DNA for production of transgenic plants with enhanced agronomic trait, the elements of Table 1 are described by reference to:

“PEP SEQ” which identifies an amino acid sequence from SEQ ID NO: 742 to 1482.
“NUC SEQ” which identifies a DNA sequence from SEQ ID NO: 1 to 741.
“Base Vector” is a reference to the identifying number in Table 4 of base vectors used for construction of the transformation vectors of the recombinant DNA. Construction of plant transformation constructs is illustrated in Example 1.
“PROTEIN NAME” which is a common name for protein encoded by the recombinant DNA.

TABLE 1

| PEP | NUC | | | |
|---|---|---|---|---|
| SEQ | SEQ | | | |
| ID | ID | | Base | |
| NO | NO | GENE ID | Vector | PPROTEIN NAME |
| 742 | 1 | PHE0001089_1179 | 1 | Arabidopsis NAC domain transcription factor |
| 743 | 2 | PHE0001133_1223 | 1 | yeast aspartate aminotransferase (AAT2) |
| 744 | 3 | PHE0001134_1224 | 1 | yeast aspartate aminotransferase (AAT1)- |
| | | | | CAA97550 |
| 745 | 4 | PHE0001135_1225 | 1 | E. coli aspC-1651442 |
| 746 | 5 | PHE0001181_1271 | 1 | rice IAA1-like 1-AJ251791 |
| 747 | 6 | PHE0001227_1317 | 1 | yeast CTT1-NP_011602 |
| 748 | 7 | PHE0001228_1318 | 1 | yeast STE20-AAB69747 |
| 749 | 8 | PHE0001247_1338 | 1 | Arabidopsis cyclin D3-like-CGPG 710 |
| 750 | 9 | PHE0001252_1343 | 1 | Arabidopsis arabinogalactan-protein 1 |
| 751 | 10 | PHE0001267_1358 | 1 | Arabidopsis hypothetical protein |
| 752 | 11 | PHE0001275_1336 | 1 | Arabidopsis CIP8 |
| 753 | 12 | PHE0001287_1377 | 1 | Arabidopsis hypothetical protein |
| 754 | 13 | PHE0001382_1474 | 1 | rice Short-Root SHR-like transcriptional |
| | | | | factor 1 sequence- |
| 755 | 14 | PHE0001531_1622 | 1 | Bacillus subtilis GDH |
| 756 | 15 | PHE0001532_1623 | 1 | Saccharomyces cerevisiae GDH-1431821 |
| 757 | 16 | PHE0001535_1626 | 1 | Pseudomonas fluorescens GDH |
| 758 | 17 | PHE0001536_1627 | 1 | Bacillus halodurans GDH |
| 759 | 18 | PHE0001538_1629 | 1 | Synechocystis sp. 6803 GDH |
| 760 | 19 | PHE0001593_1699 | 5 | yeast transketolase |
| 761 | 20 | PHE0001593_1700 | 1 | yeast transketolase |
| 762 | 21 | PHE0002070_2180 | 1 | rice G664-like 2 |
| 763 | 22 | PHE0002128_2236 | 1 | E. coli phosphoenolpyruvate carboxylase |
| 764 | 23 | PHE0002258_69 | 2 | corn nphI-S851D |
| 765 | 24 | PHE0002259_68 | 2 | corn nphI-S849D |
| 766 | 25 | PHE0002260_70 | 2 | corn nphI-S849D-S851D |
| 767 | 26 | PHE0002645_2764 | 1 | Arabidopsis GH3 protein 3 |
| 768 | 27 | PHE0002976_3126 | 1 | Yeast Serine/Threonine Protein Kinase |
| 769 | 28 | PHE0002999_3149 | 1 | Yeast Stereospecific (2R,3R)-2,3-butanediol |
| | | | | dehydrogenase with similarity to |
| | | | | alcohol/sorbitol dehydrogenases |
| 770 | 29 | PHE0003000_3150 | 1 | Yeast Car2p: Ornithine aminotransferase |
| 771 | 30 | PHE0003001_3151 | 1 | Yeast alpha-Mannosidase |
| 772 | 31 | PHE0003002_3152 | 1 | Yeast Putative indole-3-pyruvate |
| | | | | decarboxylase |
| 773 | 32 | PHE0003004_3154 | 1 | Yeast Citrate synthase |
| 774 | 33 | PHE0003006_3156 | 1 | Yeast Galactose-induced protein with strong |
| | | | | similarity to crystallin protein of vertebrate |
| | | | | eye lens |
| 775 | 34 | PHE0003007_3157 | 1 | Yeast Phosphoglycerate mutase |
| 776 | 35 | PHE0003008_3158 | 1 | Yeast Heat shock protein of 26 kDa, |
| | | | | expressed during entry to stationary phase and |
| | | | | induced by osmostress |
| 777 | 36 | PHE0003012_3162 | 1 | Yeast Neutral trehalase (alpha, alpha- |
| | | | | trehalase), catalyzes the conversion of |
| | | | | intracellular trehalose to glucose |
| 778 | 37 | PHE0003014_3164 | 1 | YEAST P16547 MITOCHONDRIAL |
| | | | | OUTER MEMBRANE 45 KD PROTEIN |
| 779 | 38 | PHE0003022_3172 | 1 | Yeast Protein of unknown function, has |
| | | | | strong similarity to Tal1p (Transaldolase |
| | | | | PFAM domain) |
| 780 | 39 | PHE0003031_3181 | 1 | Yeast Long-chain fatty acid CoA ligase (fatty |
| | | | | acid activator 1) |
| 781 | 40 | PHE0003035_3185 | 1 | Yeast Glucokinase, specific for aldohexoses |
| 782 | 41 | PHE0003037_3187 | 1 | Yeast Aldose reductase with NADPH |
| | | | | specificity; induced by osmotic stress |
| 783 | 42 | PHE0003044_3194 | 1 | Yeast Calcium/calmodulin-dependent |
| | | | | serine/threonine protein kinase (CaM kinase) |
| | | | | type II |
| 784 | 43 | PHE0003056_3206 | 1 | yeast CBK1 |
| 785 | 44 | PHE0003166_3368 | 6 | Agrobacterium tumefaciens str. C58 sucrose |
| | | | | phosphorylase |
| 786 | 45 | PHE0003191_3390 | 1 | rice G1225-like 1 |
| 787 | 46 | PHE0003266_3485 | 1 | Arabidopsis unknown protein |
| 788 | 47 | PHE0003295_3515 | 6 | rice unknown protein |
| 789 | 48 | PHE0003358_3581 | 16 | rice dwarf4-like |
| 790 | 49 | PHE0003416_3656 | 16 | Arabidopsis homogentisate |
| | | | | phytylprenyltransferase |
| 791 | 50 | PHE0003457_3688 | 1 | rice G1660 like 1 |
| 792 | 51 | PHE0003502_3748 | 4 | rice G2239 like1 |
| 793 | 52 | PHE0003506_3752 | 1 | rice G2317 like2 |
| 794 | 53 | PHE0003522_3768 | 1 | rice G2536 like1 |
| 795 | 54 | PHE0003592_3838 | 1 | rice G864 like1 |
| 796 | 55 | PHE0003595_3841 | 1 | rice G46 like1 |
| 797 | 56 | PHE0003633_3891 | 1 | rice G2930 like 1 |
| 798 | 57 | PHE0003635_3893 | 1 | rice G2969 like2 |
| 799 | 58 | PHE0003663_3921 | 1 | rice G1108 like2 |
| 800 | 59 | PHE0003670_3928 | 1 | rice G1792 like3 |
| 801 | 60 | PHE0003672_3930 | 4 | rice G1013 like2 |
| 802 | 61 | PHE0003675_3933 | 1 | rice G1493 like3 |
| 803 | 62 | PHE0003945_4522 | 4 | Arabidopsis CGPG2571 |
| 804 | 63 | PHE0001066_1156 | 1 | yeast SIP1-AAB64887 |
| 805 | 64 | PHE0001471_1563 | 1 | rice NH4-uniport AMT1-like sequence- |
| 806 | 65 | PHE0001530_1621 | 1 | Emericella nidulans GDH |
| 807 | 66 | PHE0002940_3090 | 1 | Yeast Proline oxidase (proline |
| | | | | dehydrogenase) |
| 808 | 67 | PHE0002957_3107 | 1 | Yeast MIP (member of major intrinsic protein |
| | | | | family of transmembrane channels) |
| 809 | 68 | PHE0002961_3111 | 1 | Yeast protein with 3 RRM domains (RNA |
| | | | | recongnition motifs) |
| 810 | 69 | PHE0002962_3112 | 1 | Yeast Putative Dual Specificity Phosphatase |
| 811 | 70 | PHE0003003_3153 | 1 | Yeast Aromatic amino acid aminotransferase |
| | | | | II |
| 812 | 71 | PHE0003024_3174 | 1 | Yeast protein of unknown function |
| 813 | 72 | PHE0003042_3192 | 1 | Yeast Possible 6-phosphogluconolactonase |
| 814 | 73 | PHE0003236_3451 | 1 | Arabidopsis unknown protein |
| 815 | 74 | PHE0003280_3499 | 1 | Arabidopsis DUF6 |
| 816 | 75 | PHE0000035_61 | 1 | corn lip19 |
| 817 | 76 | PHE0000036_62 | 1 | corn EF1-alpha |
| 818 | 77 | PHE0000130_220 | 2 | b-glucosidase-aggregating factor |
| 819 | 78 | PHE0000134_224 | 2 | LEA protein EMB5 |
| 820 | 79 | PHE0000135_225 | 2 | PP2C |
| 821 | 80 | PHE0000136_226 | 2 | histone deacetylase |
| 822 | 81 | PHE0000139_229 | 2 | ascorbate peroxidase |
| 823 | 82 | PHE0000141_231 | 1 | cp drought-induced stress protein |
| 824 | 83 | PHE0000142_232 | 2 | rab7a |
| 825 | 84 | PHE0000146_236 | 1 | rab11d |
| 826 | 85 | PHE0000148_238 | 2 | protein kinase |
| 827 | 86 | PHE0000149_239 | 2 | EREbp-like AP2 domain TF |
| 828 | 87 | PHE0000150_240 | 2 | protein kinase |
| 829 | 88 | PHE0000189_282 | 1 | soy HSP20 (HS11) |
| 830 | 89 | PHE0000200_293 | 1 | protein phosphatase 2C-like |
| 831 | 90 | PHE0000211_304 | 2 | CDPK kinase domain |
| 832 | 91 | PHE0000213_306 | 2 | CDPK kinase domain |
| 833 | 92 | PHE0000368_459 | 1 | rice mlip19 |
| 834 | 93 | PHE0000369_460 | 1 | OSK5 |
| 835 | 94 | PHE0000370_461 | 1 | abscisic acid-inducible protein kinase |
| 836 | 95 | PHE0000780_853 | 1 | Arabidopsis agl11 |
| 837 | 96 | PHE0000782_855 | 4 | corn agl11-like 1 |
| 838 | 97 | PHE0000783_856 | 1 | rice MADS3-L37528 |
| 839 | 98 | PHE0000785_858 | 1 | Arabidopsis agl11 delta C-terminus |
| 840 | 99 | PHE0000791_864 | 1 | soy agl11-like 1 delta C-terminus |
| 841 | 100 | PHE0000792_865 | 1 | soy agl11-like 1 delta K-box |
| 842 | 101 | PHE0000794_867 | 1 | rice MADS3 delta C-terminus-L37528 |
| 843 | 102 | PHE0000821_896 | 1 | corn duf6 10 |
| 844 | 103 | PHE0001051_1141 | 1 | corn zinc finger protein |
| 845 | 104 | PHE0001053_4292 | 11 | corn NAM-like protein |
| 846 | 105 | PHE0001054_1144 | 1 | corn QKI-like RNA-binding protein |
| 847 | 106 | PHE0001055_1145 | 1 | corn putative kinase regulatory subunit |
| 848 | 107 | PHE0001056_1146 | 1 | corn unknown protein |
| 849 | 108 | PHE0001057_1147 | 1 | corn thionin-like protease inhibitor |
| 850 | 109 | PHE0001064_1154 | 1 | yeast GAL83-Q04739 |
| 851 | 110 | PHE0001071_1161 | 1 | Arabidopsis AP2 domain transcription factor |
| 852 | 111 | PHE0001073_1163 | 1 | Arabidopsis myb domain transcription factor |
| 853 | 112 | PHE0001075_1165 | 1 | Arabidopsis myb domain transcription factor |
| 854 | 113 | PHE0001077_1167 | 1 | Arabidopsis GARP domain transcription |
| | | | | factor |
| 855 | 114 | PHE0001083_1173 | 1 | Arabidopsis AP2 domain transcription factor |
| 856 | 115 | PHE0001095_1185 | 1 | Arabidopsis bZIP domain transcription factor |
| 857 | 116 | PHE0001096_1186 | 1 | Arabidopsis bZIP domain transcription factor |
| 858 | 117 | PHE0001097_1187 | 1 | Arabidopsis bZIP/TGA domain transcription |
| | | | | factor- |
| 859 | 118 | PHE0001098_1188 | 1 | Arabidopsis GATA domain transcription |
| | | | | factor |
| 860 | 119 | PHE0001099_1189 | 1 | Arabidopsis bZIP domain transcription factor |
| 861 | 120 | PHE0001101_1191 | 1 | Arabidopsis GATA domain transcription |
| | | | | factor |
| 862 | 121 | PHE0001107_1197 | 1 | rice CCA1-like 1 |
| 863 | 122 | PHE0001108_1198 | 1 | rice alanine aminotransferase 2-AAK52114 |
| 864 | 123 | PHE0001109_1199 | 1 | corn alanine aminotransferase 1 |
| 865 | 124 | PHE0001110_1200 | 1 | corn alanine aminotransferase 4 |
| 866 | 125 | PHE0001115_1205 | 5 | yeast 5-aminolevulinic acid synthase mature |
| | | | | form-P09950 |
| 867 | 126 | PHE0001120_1210 | 4 | corn G1820 like 1 |
| 868 | 127 | PHE0001123_1213 | 1 | corn G1820-like 2 |
| 869 | 128 | PHE0001125_1215 | 1 | soy G1820 like 2 |
| 870 | 129 | PHE0001126_1216 | 1 | corn putative myb-related transcription factor |
| 871 | 130 | PHE0001127_1217 | 1 | corn putative dehydration-responsive protein |
| | | | | RD22 precursor- |
| 872 | 131 | PHE0001128_1218 | 1 | corn homeodomain leucine zipper protein |
| 873 | 132 | PHE0001130_1220 | 5 | corn acetohydroxyacid reductoisomerase, |
| | | | | chloroplast precursor- |
| 874 | 133 | PHE0001132_1222 | 1 | corn cytosolic aspartate transaminase |
| 875 | 134 | PHE0001138_1228 | 1 | corn hypothetical protein |
| 876 | 135 | PHE0001145_1235 | 1 | corn unknown protein |
| 877 | 136 | PHE0001146_1236 | 1 | corn MAP kinase kinase |
| 878 | 137 | PHE0001147_1237 | 1 | corn hypothetical protein |
| 879 | 138 | PHE0001148_1238 | 1 | corn transfactor-like protein |
| 880 | 139 | PHE0001151_1241 | 1 | corn dehydration-responsive protein RD22 |
| | | | | precursor- |
| 881 | 140 | PHE0001152_1242 | 1 | corn histone H3 |
| 882 | 141 | PHE0001153_1243 | 1 | corn calcium-dependent protein kinase |
| 883 | 142 | PHE0001154_1244 | 1 | corn histone H2B |
| 884 | 143 | PHE0001156_1246 | 1 | corn ATFP4-like |
| 885 | 144 | PHE0001157_1247 | 1 | corn unknown protein |
| 886 | 145 | PHE0001158_1248 | 1 | corn glucose-6-phosphate/phosphate- |
| | | | | translocator precursor- |
| 887 | 146 | PHE0001159_1249 | 1 | corn DnaJ-like protein |
| 888 | 147 | PHE0001167_1257 | 1 | rem1-Mu |
| 889 | 148 | PHE0001171_1261 | 1 | soy TU8-like 1 |
| 890 | 149 | PHE0001172_1262 | 1 | soy TU8-like protein 2 |
| 891 | 150 | PHE0001179_1269 | 1 | corn AXR2-like 2 |
| 892 | 151 | PHE0001198_1288 | 1 | soybean G175-like 2 |
| 893 | 152 | PHE0001199_1289 | 1 | soybean G175-like 1 |
| 894 | 153 | PHE0001208_1298 | 1 | soybean G22-like 1 |
| 895 | 154 | PHE0001211_1301 | 1 | soybean G867-like 1 |
| 896 | 155 | PHE0001212_1302 | 1 | STE11-NP_013466 |
| 897 | 156 | PHE0001214_1304 | 1 | soybean STE11-like 1 |
| 898 | 157 | PHE0001215_1305 | 1 | soybean G1836-like 1 |
| 899 | 158 | PHE0001220_1310 | 1 | soybean AtGSK3-like 2 |
| 900 | 159 | PHE0001221_1311 | 1 | maize AtGSK3-like 1 |
| 901 | 160 | PHE0001225_1315 | 1 | maize catalase-like 1 |
| 902 | 161 | PHE0001238_1328 | 1 | maize cup1a-like 1 |
| 903 | 162 | PHE0001239_1329 | 1 | maize AtGSK3-like 2 |
| 904 | 163 | PHE0001241_1331 | 1 | Putative RNA Binding protein- |
| 905 | 164 | PHE0001242_1332 | 1 | Protein Disulfide Isomerase- |
| 906 | 165 | PHE0001244_1334 | 1 | LIM DOmain Transcription Factor SF3- |
| 907 | 166 | PHE0001245_1335 | 1 | Unkown Protein |
| 908 | 167 | PHE0001246_1337 | 1 | soy CIP8-like 1 |
| 909 | 168 | PHE0001254_1345 | 1 | Arabidopsis hypothetical protein |
| | | | | [NM_111482] |
| 910 | 169 | PHE0001258_1349 | 1 | corn NADH:ubiquinone oxidoreductase |
| 911 | 170 | PHE0001259_1350 | 1 | soy NADH:ubiquinone oxidoreductase |
| 912 | 171 | PHE0001279_1369 | 1 | corn cysteine proteinase inhibitor |
| 913 | 172 | PHE0001280_1370 | 1 | soy cysteine proteinase inhibitor |
| 914 | 173 | PHE0001282_1372 | 1 | corn fatty acid elongase 1 |
| 915 | 174 | PHE0001284_1374 | 1 | soy ADP-ribosylation factor 1 GTPase |
| | | | | activating protein- |
| 916 | 175 | PHE0001285_1375 | 1 | corn ADP-ribosylation factor 1 GTPase |
| | | | | activating protein- |
| 917 | 176 | PHE0001291_1381 | 1 | soy hypothetical protein |
| 918 | 177 | PHE0001292_1382 | 1 | corn hypothetical protein |
| 919 | 178 | PHE0001297_1387 | 1 | corn cryptochrome like protein 1 |
| 920 | 179 | PHE0001299_1389 | 1 | corn cryptochrome like protein 5 |
| 921 | 180 | PHE0001303_1393 | 1 | rice Pra2-like protein 2 |
| 922 | 181 | PHE0001306_1396 | 1 | soy Pra2-like protein 1 |
| 923 | 182 | PHE0001312_1402 | 1 | corn CGPG 1145-like protein 1 |
| 924 | 183 | PHE0001313_1403 | 1 | corn CGPG 1145-like protein 2 |
| 925 | 184 | PHE0001314_1404 | 1 | corn CGPG 1145-like protein 3 |
| 926 | 185 | PHE0001332_1423 | 1 | rice SNF1-like protein 4-BAB61199 |
| 927 | 186 | PHE0001333_1424 | 1 | rice SNF1-like protein 5-BAA96628 |
| 928 | 187 | PHE0001334_1425 | 1 | rice SNF1-like protein 6 [OSK1]-D82039 |
| 929 | 188 | PHE0001337_1428 | 1 | rice AKIN-like protein 1 |
| 930 | 189 | PHE0001339_1430 | 1 | soy AKIN-like protein 1 |
| 931 | 190 | PHE0001343_1434 | 1 | soy SNF1-like protein 3 |
| 932 | 191 | PHE0001346_1437 | 1 | corn SNF1-like protein 1 |
| 933 | 192 | PHE0001347_1438 | 1 | corn SNF1-like protein 2 |
| 934 | 193 | PHE0001349_1440 | 1 | corn SNF1-like protein 4 |
| 935 | 194 | PHE0001350_1441 | 1 | corn SNF1-like protein 5 |
| 936 | 195 | PHE0001354_1445 | 1 | corn SNF1-like protein 9 |
| 937 | 196 | PHE0001355_1446 | 1 | corn SNF1-like protein 10 |
| 938 | 197 | PHE0001356_1447 | 1 | corn SNF1-like protein 11 |
| 939 | 198 | PHE0001357_1448 | 1 | corn SNF1-like protein 13 |
| 940 | 199 | PHE0001358_1449 | 1 | corn SNF1-like protein 14 |
| 941 | 200 | PHE0001359_1450 | 1 | corn SNF1-like protein 15 |
| 942 | 201 | PHE0001360_1451 | 1 | Corn Putative CCR4 Associated Factor |
| 943 | 202 | PHE0001361_1452 | 1 | Soy Putative AP2 Domain Transcription |
| | | | | Factor |
| 944 | 203 | PHE0001362_1453 | 1 | Soy GATA Binding Transcription Factor |
| 945 | 204 | PHE0001363_1455 | 1 | NAC1 type transcriptional activator- |
| 946 | 205 | PHE0001364_1456 | 1 | Corn Putative Transcriptional Regulator X2 |
| 947 | 206 | PHE0001375_1467 | 1 | Corn PRL 1 |
| 948 | 207 | PHE0001377_1469 | 1 | rice PINOID-like protein kinase 1 sequence- |
| 949 | 208 | PHE0001380_1472 | 1 | rice PP2A regulatory subunit A RCN1-like 1 |
| | | | | sequence- |
| 950 | 209 | PHE0001385_1477 | 1 | maize IAA-alanine resistance protein IAR1- |
| | | | | like sequence- |
| 951 | 210 | PHE0001386_1478 | 1 | maize IAA-Ala hydrolase like 1 sequence- |
| 952 | 211 | PHE0001389_1481 | 1 | maize nitrilase 1 like 1 sequence- |
| 953 | 212 | PHE0001392_1484 | 1 | soybean root-specific kinase ARSK1 like |
| | | | | sequence- |
| 954 | 213 | PHE0001394_1486 | 1 | soybean MADS-box protein AGL14-like |
| | | | | sequence- |
| 955 | 214 | PHE0001397_1489 | 1 | soybean Ran binding protein RanBP1-like 1 |
| | | | | sequence- |
| 956 | 215 | PHE0001398_1490 | 1 | maize Ran binding protein RanBP1-like 1 |
| | | | | sequence- |
| 957 | 216 | PHE0001405_1497 | 1 | nifU like protein Homolog- |
| 958 | 217 | PHE0001411_1503 | 1 | photosystem-I PSI-F subunit precursor- |
| 959 | 218 | PHE0001416_1508 | 1 | growth-on protein GRO10- |
| 960 | 219 | PHE0001417_1509 | 1 | Transcription Factor Homolog BTF3- |
| 961 | 220 | PHE0001418_1510 | 1 | Putative CGI-19 Protein Homolog- |
| 962 | 221 | PHE0001421_1513 | 1 | glutamate dehydrogenase- |
| 963 | 222 | PHE0001426_1518 | 1 | Rice GATA Factor Homolog- |
| 964 | 223 | PHE0001436_1528 | 1 | Methionine Synthase- |
| 965 | 224 | PHE0001437_1529 | 1 | Putative ABC Transporter- |
| 966 | 225 | PHE0001442_1534 | 1 | corn C-24 sterol methyltransferase |
| 967 | 226 | PHE0001444_1536 | 1 | soy hypothetical protein |
| 968 | 227 | PHE0001452_1544 | 1 | maize root hair Ted2-like sequence- |
| 969 | 228 | PHE0001463_1555 | 1 | soybean homeodomain protein (GLABRA2) |
| | | | | like sequence- |
| 970 | 229 | PHE0001477_1569 | 1 | soybean werewolf (WER) like sequence- |
| 971 | 230 | PHE0001481_1573 | 1 | rice ethylene-response ETR1 like sequence- |
| 972 | 231 | PHE0001483_1575 | 1 | soybean xyloglucan endotransglycosylase |
| | | | | (XET) like 1 sequence- |
| 973 | 232 | PHE0001516_1607 | 1 | Zea Mays SelR Domain protein |
| 974 | 233 | PHE0001522_1613 | 1 | corn LPE1-like permease 6 |
| 975 | 234 | PHE0001539_1630 | 1 | soy glutamate dehydrogenase |
| 976 | 235 | PHE0001577_1676 | 1 | Rice Homolog Putative Transcription Factor |
| | | | | X2- |
| 977 | 236 | PHE0001602_1713 | 1 | rice rac-like GTP binding protein like 1 |
| | | | | sequence |
| 978 | 237 | PHE0001604_1715 | 1 | rice rac-like GTP binding protein like 3 |
| | | | | sequence |
| 979 | 238 | PHE0001605_1716 | 1 | rice rac-like GTP binding protein like 4 |
| | | | | sequence |
| 980 | 239 | PHE0001606_1717 | 1 | rice rac-like GTP binding protein like 5 |
| | | | | sequence |
| 981 | 240 | PHE0001610_1721 | 1 | maize translation initiation factor 3 delta |
| | | | | subunit like sequence |
| 982 | 241 | PHE0001617_1728 | 1 | maize metal transporter ZIP8 like 1 sequence |
| 983 | 242 | PHE0001624_1735 | 1 | maize magnesium transporter, mrs2-2-like 1 |
| | | | | sequence |
| 984 | 243 | PHE0001629_1740 | 1 | maize low temperature and salt responsive |
| | | | | protein LTI6A-like 1 sequence |
| 985 | 244 | PHE0001642_1753 | 1 | rice salt-induced-zinc-finger-protein 1 |
| | | | | sequence |
| 986 | 245 | PHE0001649_1760 | 1 | soybean salt-tolerance protein 1 seqeunce |
| 987 | 246 | PHE0002017_2128 | 1 | Corn RING Finger Transcription Factor |
| 988 | 247 | PHE0002023_2134 | 1 | Corn RING Finger Transcription Factor II |
| 989 | 248 | PHE0002024_2135 | 1 | Corn RING Finger Transcription Factor III |
| 990 | 249 | PHE0002027_2138 | 1 | Glutamine Synthetase |
| 991 | 250 | PHE0002041_2151 | 1 | Corn ubiquitin fusion protein/ribosomal |
| | | | | protein S27a |
| 992 | 251 | PHE0002042_2152 | 1 | soybean AtHSP17.6A like 1 sequence |
| 993 | 252 | PHE0002049_2159 | 1 | Ribulose bisphosphate carboxylase small |
| | | | | chain chloroplast precursor |
| 994 | 253 | PHE0002052_2162 | 1 | Corn ligand-gated channel-like protein |
| | | | | precursor |
| 995 | 254 | PHE0002054_2164 | 1 | Corn Nitrilase I |
| 996 | 255 | PHE0002055_2165 | 1 | Corn Tic 22 Like protein |
| 997 | 256 | PHE0002067_2177 | 1 | corn G664-like 5 |
| 998 | 257 | PHE0002068_2178 | 1 | corn G664-like 6 |
| 999 | 258 | PHE0002071_2181 | 1 | soy G664-like 2 |
| 1000 | 259 | PHE0002080_4290 | 11 | corn sec61 |
| 1001 | 260 | PHE0002081_2191 | 1 | soy sec61 |
| 1002 | 261 | PHE0002088_2198 | 1 | rice osr8 |
| 1003 | 262 | PHE0002095_2205 | 1 | Corn Calmodulin EF hand |
| 1004 | 263 | PHE0002096_2206 | 1 | Rice Calmodulin EF Hand |
| 1005 | 264 | PHE0002099_2209 | 1 | Rice Putative Calmodulin EF Hand Protein |
| 1006 | 265 | PHE0002103_2213 | 1 | rice Bobs kinase 2 |
| 1007 | 266 | PHE0002123_2231 | 4 | rice phosphoenolpyruvate carboxylase 2 |
| 1008 | 267 | PHE0002125_2233 | 1 | corn phosphoenolpyruvate carboxylase 2 |
| 1009 | 268 | PHE0002127_2235 | 1 | soy phosphoenolpyruvate carboxylase 2 |
| 1010 | 269 | PHE0002145_2253 | 1 | Corn Unkown Protein |
| 1011 | 270 | PHE0002148_2256 | 1 | Corn Cytochrome P450 |
| 1012 | 271 | PHE0002163_2270 | 1 | Corn Protein (Similar to peptidyl prolyl |
| | | | | isomerase) |
| 1013 | 272 | PHE0002164_2271 | 1 | Corn Protein (similar to yippie-1 & a peptidyl |
| | | | | prolyl isomerase) |
| 1014 | 273 | PHE0002183_2290 | 1 | soybean Hsp17.7 like 1 sequence |
| 1015 | 274 | PHE0002189_2296 | 1 | maize pyrroline-5-carboxylate synthetase like |
| | | | | 2 sequence |
| 1016 | 275 | PHE0002202_2309 | 1 | soy annexin 1 |
| 1017 | 276 | PHE0002203_2310 | 1 | soy annexin 3 |
| 1018 | 277 | PHE0002204_2311 | 1 | soy annexin 4 |
| 1019 | 278 | PHE0002210_2317 | 1 | soybean drought-induced protein BnD22 like |
| | | | | 1 sequence |
| 1020 | 279 | PHE0002224_2331 | 1 | maize drought-induced protein Di19-like |
| | | | | sequence |
| 1021 | 280 | PHE0002227_2334 | 1 | maize protease inhibitor like 2 sequence |
| 1022 | 281 | PHE0002232_2339 | 1 | soybean ABA-responsive element binding |
| | | | | protein 2 (AREB2) like sequence |
| 1023 | 282 | PHE0002233_2340 | 1 | Arabidopsis ABA-responsive element binding |
| | | | | protein 3 (AREB3) like sequence |
| 1024 | 283 | PHE0002238_2345 | 1 | soybean CPRD14 like 1 sequence |
| 1025 | 284 | PHE0002239_2346 | 1 | Brassica napus CPRD14 like 1 sequence |
| 1026 | 285 | PHE0002240_2347 | 1 | soybean CPRD14 like 2 sequence |
| 1027 | 286 | PHE0002242_2349 | 1 | maize CPRD14 like 1 sequence |
| 1028 | 287 | PHE0002244_2351 | 1 | Arabidopsis drought inducible heat shock |
| | | | | transcription factor like sequence |
| 1029 | 288 | PHE0002246_2353 | 1 | soybean protein phosphatase 2C like sequence |
| 1030 | 289 | PHE0002254_2361 | 1 | soybean CPRD12 like 3 sequence |
| 1031 | 290 | PHE0002268_2371 | 1 | soybean calcium-dependent protein kinase |
| | | | | like 1 sequence |
| 1032 | 291 | PHE0002269_2372 | 1 | rice calcium-dependent protein kinase like 1 |
| | | | | sequence |
| 1033 | 292 | PHE0002272_2375 | 1 | rice calcium-dependent protein kinase like 4 |
| | | | | sequence |
| 1034 | 293 | PHE0002298_2400 | 4 | rice Dehydrin ERD10 like 1 sequence |
| 1035 | 294 | PHE0002299_2401 | 1 | rice drought-induced S-like ribonuclease like |
| | | | | 1 sequence |
| 1036 | 295 | PHE0002321_2422 | 1 | maize Di19 like sequence |
| 1037 | 296 | PHE0002331_2432 | 1 | soybean PIP like 1 sequence |
| 1038 | 297 | PHE0002340_2441 | 1 | soybean MIP4 like 1 sequence |
| 1039 | 298 | PHE0002354_2455 | 1 | maize glutathione transferase like 2 sequence |
| 1040 | 299 | PHE0002357_2458 | 1 | maize 8-oxoguanine-DNA glycosylase like |
| | | | | sequence |
| 1041 | 300 | PHE0002361_2462 | 1 | rice CEO1 like sequence |
| 1042 | 301 | PHE0002362_2463 | 1 | maize dolichyl-phosphate beta- |
| | | | | glucosyltransferase like sequence |
| 1043 | 302 | PHE0002364_2465 | 1 | maize glutathione reductase (GR2) like 1 |
| | | | | sequence |
| 1044 | 303 | PHE0002365_2466 | 1 | soybean glutathione reductase (GR2) like 1 |
| | | | | sequence |
| 1045 | 304 | PHE0002367_2468 | 1 | rice glutathione reductase (GR2) like 1 |
| | | | | sequence |
| 1046 | 305 | PHE0002370_2471 | 1 | soybean glutathione-peroxidase like 1 |
| | | | | sequence |
| 1047 | 306 | PHE0002372_2473 | 1 | maize glutathione-peroxidase like 2 sequence |
| 1048 | 307 | PHE0002373_2474 | 1 | maize glutathione-peroxidase like 3 sequence |
| 1049 | 308 | PHE0002383_2484 | 1 | maize T-complex polypeptide 1 alpha subunit |
| | | | | like sequence |
| 1050 | 309 | PHE0002390_2491 | 1 | soybean methionine sulfoxide reductase (msr) |
| | | | | like sequence |
| 1051 | 310 | PHE0002414_2514 | 1 | Arabidopsis GAD2 |
| 1052 | 311 | PHE0002431_2531 | 1 | Rice Leucine Zipper Protein similar to At103 |
| | | | | and PNIL34 |
| 1053 | 312 | PHE0002447_2547 | 1 | soybean arabidopsis-heat-shock-TF like 1 |
| | | | | sequence |
| 1054 | 313 | PHE0002449_2549 | 1 | soybean heat shock factor 6 like 1 sequence |
| 1055 | 314 | PHE0002459_2559 | 1 | rice heat shock TF like sequence |
| 1056 | 315 | PHE0002461_2561 | 1 | soybean HSF1 like 1 sequence |
| 1057 | 316 | PHE0002462_2562 | 1 | soybean HSF4 like 1 sequence |
| 1058 | 317 | PHE0002464_2564 | 1 | soybean HSF4 like 3 sequence |
| 1059 | 318 | PHE0002470_2570 | 1 | soybean hsp17.4 like 2 sequence |
| 1060 | 319 | PHE0002471_2571 | 1 | soybean hsp17.4 like 3 sequence |
| 1061 | 320 | PHE0002484_2584 | 1 | Corn Sucrose Synthase |
| 1062 | 321 | PHE0002486_2586 | 1 | Corn Putative protein phosphatase 2A |
| | | | | regulatory subunit B |
| 1063 | 322 | PHE0002489_2589 | 1 | Arabidopsis CycD2 |
| 1064 | 323 | PHE0002490_2590 | 1 | Arabidopsis CycD3 |
| 1065 | 324 | PHE0002490_3963 | 16 | Arabidopsis CycD3 |
| 1066 | 325 | PHE0002491_2591 | 1 | Arabidopsis CycB1 |
| 1067 | 326 | PHE0002498_2598 | 1 | Corn Protein Kinase like protein |
| 1068 | 327 | PHE0002502_2602 | 1 | Corn 20 KDA CHAPERONIN, |
| | | | | CHLOROPLAST PRECURSOR (PROTEIN |
| | | | | CPN21) |
| 1069 | 328 | PHE0002506_2606 | 1 | Corn protein of unknown function wi PFAM |
| | | | | domain similar to human Reticulon and may |
| | | | | associate with ER |
| 1070 | 329 | PHE0002507_2607 | 1 | Corn Transfactor like protein |
| 1071 | 330 | PHE0002514_2614 | 1 | Corn branched-chain alpha keto-acid |
| | | | | dehydrogenase E1 alpha subunit |
| 1072 | 331 | PHE0002515_2615 | 1 | Corn haloacid dehalogenase-like hydrolase |
| | | | | Putative ripening related protein |
| 1073 | 332 | PHE0002530_2630 | 1 | Rice Dof zinc finger protein |
| 1074 | 333 | PHE0002532_2632 | 1 | Corn ribosomal protein L1p/L10e family |
| 1075 | 334 | PHE0002536_2636 | 1 | Rice auxin response transcription factor 3-like |
| | | | | protein |
| 1076 | 335 | PHE0002540_2640 | 1 | Oryza Sativa auxin response factor 2 |
| 1077 | 336 | PHE0002547_2647 | 1 | Corn homolog to Arabidopsis protein wi |
| | | | | hydrolase fold |
| 1078 | 337 | PHE0002551_2651 | 1 | Corn TF with 3 leucine zippers & PFAM |
| | | | | mTERF domain |
| 1079 | 338 | PHE0002552_2652 | 1 | Corn protein with Duf210 PFAM domain |
| 1080 | 339 | PHE0002565_2664 | 1 | Corn metallothionein-like protein |
| 1081 | 340 | PHE0002581_2680 | 1 | maize hsp60 like 1 sequence |
| 1082 | 341 | PHE0002582_2681 | 1 | maize hsp60 like 2 sequence |
| 1083 | 342 | PHE0002583_2682 | 1 | maize hsp60 like 3 sequence |
| 1084 | 343 | PHE0002586_2685 | 1 | rice hsp60 like 1 sequence |
| 1085 | 344 | PHE0002588_2687 | 1 | Corn protein with “Universal Stress Protein |
| | | | | Family” PFAM domain |
| 1086 | 345 | PHE0002591_2690 | 1 | Corn protein similar to Yersinia pestis |
| | | | | membrane protein and Bacillus Subtilis yuxK |
| 1087 | 346 | PHE0002596_2695 | 1 | Corn Myb related Transcription Factor |
| 1088 | 347 | PHE0002604_2703 | 1 | Rice putative putative photoreceptor- |
| | | | | interacting protein-like protein |
| 1089 | 348 | PHE0002608_2707 | 1 | Arabidopsis sigma factor 2 |
| 1090 | 349 | PHE0002615_2714 | 1 | corn sigA binding protein 2 |
| 1091 | 350 | PHE0002622_2739 | 1 | Arabidopsis GLK1 |
| 1092 | 351 | PHE0002629_2748 | 1 | rice trehalose-6-P synthase like 1 sequence |
| 1093 | 352 | PHE0002634_2753 | 1 | rice DL-glycerol-3-phosphatase like 1 |
| | | | | sequence |
| 1094 | 353 | PHE0002639_2758 | 1 | rice GH3 protein 8 |
| 1095 | 354 | PHE0002640_2759 | 1 | rice GH3 protein 3 |
| 1096 | 355 | PHE0002643_2762 | 1 | rice GH3 protein 2 |
| 1097 | 356 | PHE0002644_2763 | 1 | rice GH3 protein 9 |
| 1098 | 357 | PHE0002649_2768 | 1 | wheat AGL21-like 1 |
| 1099 | 358 | PHE0002661_2781 | 5 | Synechocystis sp. PCC 6803 ADP-glucose |
| | | | | pyrophosphorylase |
| 1100 | 359 | PHE0002664_2787 | 6 | rice ADP-glucose pyrophosphorylase 5 |
| 1101 | 360 | PHE0002688_2821 | 1 | rice beta-3 tubulin like 1 sequence |
| 1102 | 361 | PHE0002689_2822 | 1 | rice beta-3 tubulin like 2 sequence |
| 1103 | 362 | PHE0002690_2823 | 1 | Corn protein similar to cell division related |
| | | | | protein kinase |
| 1104 | 363 | PHE0002703_2836 | 1 | rice VTC2 like 1 sequence |
| 1105 | 364 | PHE0002710_2843 | 1 | Zea Mays cytoplasmic malate dehydrogenase |
| 1106 | 365 | PHE0002715_2848 | 1 | Oryza sativa putative thiolase |
| 1107 | 366 | PHE0002717_2850 | 1 | Corn Translation Elongation factor EF1-beta |
| 1108 | 367 | PHE0002721_2854 | 4 | Maize fructose-bisphosphate aldolase |
| 1109 | 368 | PHE0002724_2859 | 1 | Corn L19 Like ribosomal protein |
| 1110 | 369 | PHE0002728_2861 | 1 | maize sucrose transport protein SUC2 like 1 |
| | | | | sequence |
| 1111 | 370 | PHE0002729_2863 | 1 | Corn 60S ribosomal protein L10 (probable |
| | | | | transcription factor) |
| 1112 | 371 | PHE0002733_2866 | 1 | Corn Ribosomal protein S11 |
| 1113 | 372 | PHE0002734_2867 | 1 | Corn Ribosomal protein S12 |
| 1114 | 373 | PHE0002749_2882 | 1 | rice sucrase-like 1 sequence |
| 1115 | 374 | PHE0002751_2884 | 1 | Corn Ribosomal protein S14 |
| 1116 | 375 | PHE0002752_2885 | 1 | Corn Homolog to putative 40S Ribosomal |
| | | | | protein |
| 1117 | 376 | PHE0002771_2904 | 1 | [Zea mays] beta-glucosidase aggregating |
| | | | | factor precursor |
| 1118 | 377 | PHE0002790_2925 | 1 | rice CYP72A5 like 1 sequence |
| 1119 | 378 | PHE0002846_2981 | 1 | Zea Mays trehalose-6-phosphate phosphatase |
| 1120 | 379 | PHE0002864_2999 | 1 | soy CDKA 8 |
| 1121 | 380 | PHE0002869_3004 | 1 | corn CDKD 12 |
| 1122 | 381 | PHE0002875_3010 | 1 | Corn homolog to Arabidopsis unknown |
| | | | | expressed protein |
| 1123 | 382 | PHE0002889_3024 | 1 | soy dsPTP 3 |
| 1124 | 383 | PHE0002896_3031 | 1 | rice dsPTP 1 |
| 1125 | 384 | PHE0002918_3053 | 1 | Oryza Sativa putative Hexose Transporter IV |
| | | | | (distant homology to Yeast Maltose |
| | | | | permease) |
| 1126 | 385 | PHE0002946_3096 | 1 | Zea mays Putative Polyamine Transporter |
| 1127 | 386 | PHE0002963_3113 | 1 | Zea Mays Dual Specificity Phosphatase I |
| | | | | (similar to human YVH1) |
| 1128 | 387 | PHE0002966_3116 | 1 | Oryza Sativa Dual Specificity Phosphatase II |
| 1129 | 388 | PHE0002984_3134 | 1 | Zea mays 3-phosphoinositide-dependent |
| | | | | protein kinase |
| 1130 | 389 | PHE0003061_3211 | 1 | [Oryza sativa] Putative integral membrane |
| | | | | protein |
| 1131 | 390 | PHE0003074_3224 | 1 | Zea Mays RNA Binding Protein |
| 1132 | 391 | PHE0003101_3969 | 16 | soy nonsymbiotic hemoglobin |
| 1133 | 392 | PHE0003101_76 | 3 | soy nonsymbiotic hemoglobin |
| 1134 | 393 | PHE0003124_3270 | 1 | soy adenylylsulfate kinase like |
| 1135 | 394 | PHE0003138_3292 | 6 | rice fructokinase 1 |
| 1136 | 395 | PHE0003139_3295 | 1 | corn fructokinase 1 |
| 1137 | 396 | PHE0003190_3389 | 1 | soy G1225-like 2 |
| 1138 | 397 | PHE0003196_3395 | 1 | Arabidopsis seven-in-absentia 1 |
| 1139 | 398 | PHE0003198_3397 | 1 | corn seven-in-absentia 5 |
| 1140 | 399 | PHE0003211_3417 | 4 | Arabidopsis AVP1 |
| 1141 | 400 | PHE0003211_3967 | 16 | Arabidopsis AVP1 |
| 1142 | 401 | PHE0003217_3423 | 1 | soy G200-like 13 |
| 1143 | 402 | PHE0003224_3432 | 1 | corn-CGPG1897-like5 |
| 1144 | 403 | PHE0003228_3444 | 16 | soy SAG13 full length |
| 1145 | 404 | PHE0003229_3445 | 16 | soy SAG13 truncated |
| 1146 | 405 | PHE0003237_3453 | 1 | rice-CGPG1264-like1 |
| 1147 | 406 | PHE0003240_3456 | 1 | soy-CGPG1857-like1 |
| 1148 | 407 | PHE0003243_3459 | 1 | corn-CGPG867-like4 |
| 1149 | 408 | PHE0003253_3470 | 1 | soy-CGPG1276-like1 |
| 1150 | 409 | PHE0003257_3474 | 1 | soy-CGPG1294-like2 |
| 1151 | 410 | PHE0003273_3492 | 1 | soy-CGPG1287-like1 |
| 1152 | 411 | PHE0003276_3495 | 1 | Arabidopsis dehydrogenase |
| 1153 | 412 | PHE0003282_3501 | 1 | corn-CGPG241-like3[DUF6] |
| 1154 | 413 | PHE0003286_3505 | 1 | rice CTP synthase |
| 1155 | 414 | PHE0003287_3506 | 1 | corn CTP synthase |
| 1156 | 415 | PHE0003304_3524 | 6 | corn unknown protein |
| 1157 | 416 | PHE0003309_3528 | 1 | soy-CGPG1307-like1 |
| 1158 | 417 | PHE0003312_3531 | 1 | Arabidopsis nitrate transporter |
| 1159 | 418 | PHE0003321_3540 | 1 | Arabidopsis PDK1 like 2 |
| 1160 | 419 | PHE0003327_3546 | 1 | corn NEK like-1 |
| 1161 | 420 | PHE0003328_3547 | 1 | corn NEK like-2 |
| 1162 | 421 | PHE0003330_3549 | 1 | Arabidopsis eIFiso4E like p28 subunit |
| 1163 | 422 | PHE0003333_3552 | 1 | soy eIF4E like 1 |
| 1164 | 423 | PHE0003333_4250 | 17 | soy eIF4E like 1 |
| 1165 | 424 | PHE0003336_3555 | 1 | Arabidopsis eIF4E |
| 1166 | 425 | PHE0003353_3572 | 1 | corn seven-in-absentia 5 C57S |
| 1167 | 426 | PHE0003361_3584 | 1 | malate dehydrogenase |
| 1168 | 427 | PHE0003362_3585 | 1 | hexokinase |
| 1169 | 428 | PHE0003364_3587 | 1 | aminotransferase-like protein |
| 1170 | 429 | PHE0003369_3592 | 4 | glyceraldehyde 3-phosphate dehydrogenase |
| 1171 | 430 | PHE0003373_3596 | 1 | putative purple acid phosphatase |
| 1172 | 431 | PHE0003381_3604 | 1 | hypothetical protein2 |
| 1173 | 432 | PHE0003385_3608 | 1 | expressed protein2 |
| 1174 | 433 | PHE0003391_3614 | 1 | serine/threonine protein kinase like protein |
| 1175 | 434 | PHE0003392_3615 | 1 | lipase-like protein |
| 1176 | 435 | PHE0003393_3616 | 1 | Putative Squalene monooxygenase |
| 1177 | 436 | PHE0000132_222 | 2 | FUS5 |
| 1178 | 437 | PHE0000285_375 | 1 | sorghum mLIP15 |
| 1179 | 438 | PHE0000668_771 | 1 | Arabidopsis glycerol-3-phosphate |
| | | | | acyltransferase-D00673 |
| 1180 | 439 | PHE0000790_863 | 1 | soy agl1 1-like 1 delta MADS-box |
| 1181 | 440 | PHE0001074_1164 | 1 | Arabidopsis NAC domain transcription factor |
| 1182 | 441 | PHE0001078_1168 | 1 | Arabidopsis NAC domain transcription factor |
| 1183 | 442 | PHE0001079_1169 | 1 | Arabidopsis NAC domain transcription factor |
| 1184 | 443 | PHE0001082_1172 | 1 | Arabidopsis NAC domain transcription factor |
| 1185 | 444 | PHE0001085_1175 | 1 | Arabidopsis myc domain transcription factor |
| 1186 | 445 | PHE0001113_1203 | 1 | Arabidopsis serine glyoxylate |
| | | | | aminotransferase-AB048945 |
| 1187 | 446 | PHE0001136_1226 | 1 | rice aspartate aminotransferase-D14673 |
| 1188 | 447 | PHE0001142_1232 | 1 | corn caffeoyl-CoA 3-O-methyltransferase |
| 1189 | 448 | PHE0001216_1306 | 1 | maize G1836-like 1 |
| 1190 | 449 | PHE0001240_1330 | 1 | Inorganic pyrophosphatase- |
| 1191 | 450 | PHE0001243_1333 | 1 | Tubby Protein- |
| 1192 | 451 | PHE0001248_1339 | 1 | Arabidopsis hypothetical protein |
| 1193 | 452 | PHE0001257_1348 | 1 | Arabidopsis NADH:ubiquinone |
| | | | | oxidoreductase |
| 1194 | 453 | PHE0001263_1354 | 1 | Arabidopsis hypothetical protein |
| | | | | [NM_114619] |
| 1195 | 454 | PHE0001266_1357 | 1 | corn hypothetical protein |
| 1196 | 455 | PHE0001283_1373 | 1 | Arabidopsis Asp1 |
| 1197 | 456 | PHE0001286_1376 | 1 | Arabidopsis putative inositol hexaphosphate |
| | | | | kinase- |
| 1198 | 457 | PHE0001301_1391 | 1 | Arabidopsis Pra2-like protein-AAF97325 |
| 1199 | 458 | PHE0001304_1394 | 1 | corn Pra2-like protein 1 |
| 1200 | 459 | PHE0001316_1406 | 1 | rice CGPG 1145-like protein 1 |
| 1201 | 460 | PHE0001317_1407 | 1 | rice CGPG 1145-like protein 2 |
| 1202 | 461 | PHE0001319_1409 | 1 | Arabidopsis hypothetical protein |
| 1203 | 462 | PHE0001323_1413 | 1 | Arabidopsis hypothetical protein |
| | | | | [NM_111447] |
| 1204 | 463 | PHE0001324_1414 | 1 | Arabidopsis expressed protein |
| 1205 | 464 | PHE0001466_1558 | 1 | Arabidopsis thaliana ROOT HAIRLESS 1 |
| | | | | (RHL1)-AAC23500.1 |
| 1206 | 465 | PHE0001564_1663 | 4 | Xanthomonas campestris asparagine synthase |
| 1207 | 466 | PHE0002094_2204 | 1 | Corn serine/threonine kinase |
| 1208 | 467 | PHE0002121_2229 | 1 | corn G664-like 4 |
| 1209 | 468 | PHE0002225_2332 | 1 | rice drought-induced protein Di19-like |
| | | | | sequence |
| 1210 | 469 | PHE0002226_2333 | 1 | maize protease inhibitor like 1 sequence |
| 1211 | 470 | PHE0002293_2395 | 1 | soybean drought-inducible cysteine proteinase |
| | | | | like 1 sequence |
| 1212 | 471 | PHE0002338_2439 | 1 | maize MIP3 like 3 sequence |
| 1213 | 472 | PHE0002524_2624 | 1 | Rice putative thioredoxin like protein |
| 1214 | 473 | PHE0002567_2666 | 1 | Arabidopsis VPE1 |
| 1215 | 474 | PHE0002607_2706 | 1 | Arabidopsis Sigma factor 1 |
| 1216 | 475 | PHE0002609_2708 | 1 | Arabidopsis sigma factor 3 |
| 1217 | 476 | PHE0002625_2744 | 1 | rice waxy like 1 sequence |
| 1218 | 477 | PHE0002939_3089 | 1 | Oryza Sativa Proline oxidase (proline |
| | | | | dehydrogenase) |
| 1219 | 478 | PHE0003057_3207 | 1 | Schizosaccharomyces pombe orb6 |
| 1220 | 479 | PHE0003182_3341 | 1 | Neurospora_crassa Glycogen synthase like |
| | | | | sequence |
| 1221 | 480 | PHE0003232_3448 | 1 | soy-CGPG1264-like3 |
| 1222 | 481 | PHE0003234_3450 | 1 | rice-CGPG1464-like3 |
| 1223 | 482 | PHE0003239_3455 | 1 | corn-CGPG1857-like2 |
| 1224 | 483 | PHE0003246_3462 | 1 | Arabidopsis hypothetical protein |
| 1225 | 484 | PHE0003259_3476 | 1 | Arabidopsis Microtubule associated protein |
| 1226 | 485 | PHE0003267_3486 | 1 | Arabidopsis Glycine-tRNA |
| 1227 | 486 | PHE0003269_3488 | 1 | Arabidopsis unknown protein |
| 1228 | 487 | PHE0003274_3493 | 1 | Arabidopsis Unknown protein |
| 1229 | 488 | PHE0003285_3504 | 1 | rice-CGPG566-like1 |
| 1230 | 489 | PHE0003289_3508 | 8 | corn aluminium-induced protein |
| 1231 | 490 | PHE0003311_3530 | 1 | Arabidopsis hypothetical protein |
| 1232 | 491 | PHE0003360_3583 | 1 | 3-ketoacyl-ACP synthase |
| 1233 | 492 | PHE0003365_3588 | 1 | putative chlorophyll synthase |
| 1234 | 493 | PHE0003374_3597 | 1 | putative xyloglucan endotransglycosylase |
| 1235 | 494 | PHE0003375_3598 | 1 | Tryptophan synthase alpha chain |
| 1236 | 495 | PHE0003378_3601 | 1 | MtN3 |
| 1237 | 496 | PHE0003379_3602 | 1 | hypothetical protein1 |
| 1238 | 497 | PHE0003383_3606 | 1 | expressed protein1 |
| 1239 | 498 | PHE0003387_3610 | 4 | nodulin-like protein |
| 1240 | 499 | PHE0003401_3624 | 1 | corn sterol 5 alpha desaturase |
| 1241 | 500 | PHE0003417_3657 | 19 | soy G1634-like 1 |
| 1242 | 501 | PHE0003418_3658 | 19 | Arabidopsis isocitrate lyase |
| 1243 | 502 | PHE0003433_3642 | 1 | corn dehalogenase-phosphatase 1 |
| 1244 | 503 | PHE0003450_3681 | 1 | soy G1274 like 1 |
| 1245 | 504 | PHE0003458_3689 | 1 | corn G1660 like 1 |
| 1246 | 505 | PHE0003459_3690 | 1 | corn G1730 like 1 |
| 1247 | 506 | PHE0003476_3707 | 1 | soy G1988 like 1 |
| 1248 | 507 | PHE0003484_3730 | 1 | corn G2035 like1 |
| 1249 | 508 | PHE0003491_3737 | 1 | soy G2063 like2 |
| 1250 | 509 | PHE0003499_3745 | 1 | rice G2207 like2 |
| 1251 | 510 | PHE0003518_3764 | 1 | soy G2505 like1 |
| 1252 | 511 | PHE0003524_3770 | 1 | soy G2536 like1 |
| 1253 | 512 | PHE0003570_3816 | 1 | soy G922 like1 |
| 1254 | 513 | PHE0003576_3822 | 1 | soy G975 like1 |
| 1255 | 514 | PHE0003583_3829 | 1 | corn G728 like1 |
| 1256 | 515 | PHE0003587_3833 | 1 | soy G3083 like1 |
| 1257 | 516 | PHE0003599_3845 | 1 | corn G2981 like1 |
| 1258 | 517 | PHE0003600_3846 | 4 | corn R-S |
| 1259 | 518 | PHE0003630_3888 | 1 | corn G1206 like 2 |
| 1260 | 519 | PHE0003641_3899 | 4 | corn G2998 like2 |
| 1261 | 520 | PHE0003644_3902 | 1 | corn G303 like2 |
| 1262 | 521 | PHE0003650_3908 | 1 | soy G355 like2 |
| 1263 | 522 | PHE0003678_3936 | 1 | corn G1052 like2 |
| 1264 | 523 | PHE0003686_3961 | 16 | soy NDPK2 |
| 1265 | 524 | PHE0003740_4042 | 16 | soy G481-like 3 |
| 1266 | 525 | PHE0003742_4044 | 4 | corn UDP-glucose 4-epimerase CGPG1003 |
| | | | | like2 |
| 1267 | 526 | PHE0003743_4046 | 4 | rice UDP-glucose 4-epimerase CGPG1003 |
| | | | | like1 |
| 1268 | 527 | PHE0003825_4192 | 4 | soy G1412 like1 |
| 1269 | 528 | PHE0003839_4208 | 4 | rice G2604 like1 |
| 1270 | 529 | PHE0003885_4266 | 4 | wheat hemoglobin |
| 1271 | 530 | PHE0003886_4267 | 4 | Arabidopsis hemoglobin-like 1 |
| 1272 | 531 | PHE0003927_4321 | 4 | Zea mays AIH-like |
| 1273 | 532 | PHE0003959_4544 | 4 | Glycine max CGPG7857 pseudo-response |
| | | | | regulator |
| 1274 | 533 | PHE0003961_4662 | 14 | maize Kas I |
| 1275 | 534 | PHE0003965_4553 | 4 | corn ABI5 like |
| 1276 | 535 | PHE0003966_4554 | 4 | Corn AtUPS1-like |
| 1277 | 536 | PHE0003977_4565 | 4 | corn AfMONFEED001213 uroporphyrinogen |
| | | | | III synthase |
| 1278 | 537 | PHE0003978_4566 | 4 | corn AfMONFEED000902 |
| | | | | proteophosphoglycan |
| 1279 | 538 | PHE0003982_4569 | 4 | corn AfMONFEED000317 serine |
| | | | | carboxypeptidase II-1 |
| 1280 | 539 | PHE0003993_4579 | 4 | corn AfMONFEED001219 putative |
| | | | | Ca2+/H+-exchanging protein |
| 1281 | 540 | PHE0003994_4580 | 4 | corn AfMONFEED001169 putative |
| | | | | pathogenesis related protein |
| 1282 | 541 | PHE0003996_4582 | 4 | corn AfMONFEED000906 auxin-induced |
| | | | | protein-related |
| 1283 | 542 | PHE0003997_4583 | 4 | corn AfMONFEED001366 isoflavone |
| | | | | reductase homolog |
| 1284 | 543 | PHE0003999_4585 | 4 | corn AfMONFEED000689 proline-rich |
| | | | | protein |
| 1285 | 544 | PHE0004000_4586 | 4 | corn AfMONFEED000920 nodulin-related |
| | | | | protein |
| 1286 | 545 | PHE0004002_4588 | 4 | corn AfMONFEED001475 hypothetical |
| | | | | protein |
| 1287 | 546 | PHE0004003_4589 | 4 | corn AfMONFEED000648 acyltransferase |
| 1288 | 547 | PHE0004004_4590 | 4 | corn AfMONFEED000503 pathogenesis- |
| | | | | related protein 4 |
| 1289 | 548 | PHE0004005_4591 | 4 | corn AfMONFEED001364 unknown protein |
| 1290 | 549 | PHE0004006_4592 | 4 | corn AfMONFEED000623 hydrolase |
| 1291 | 550 | PHE0004009_4595 | 4 | corn AfMONFEED000074 unknown protein |
| 1292 | 551 | PHE0004010_4596 | 4 | corn AfMONFEED000152 Myb-like DNA- |
| | | | | binding domain |
| 1293 | 552 | PHE0004011_4597 | 4 | corn AfMONFEED001001 ACT domain- |
| | | | | containing protein |
| 1294 | 553 | PHE0000788_861 | 4 | corn agl1 1-like 1 delta C-terminus |
| 1295 | 554 | PHE0000789_862 | 4 | corn agl1 1-like 1 delta K-box |
| 1296 | 555 | PHE0000795_868 | 1 | rice MADS3 delta K-box-L37528 |
| 1297 | 556 | PHE0000881_964 | 1 | Synechocystis sp. PCC 6803 Hik33 |
| 1298 | 557 | PHE0001226_1316 | 1 | wheat catalase-like 1 |
| 1299 | 558 | PHE0001253_1344 | 1 | soy arabinoglactan-protein 1 |
| 1300 | 559 | PHE0001335_1426 | 1 | rice SNF1-like protein 8 [OsPK7]- |
| | | | | BAA83689 |
| 1301 | 560 | PHE0001381_1473 | 1 | rice ANR1-like |
| 1302 | 561 | PHE0001521_1612 | 1 | soy LPE1-like permease 2 |
| 1303 | 562 | PHE0001630_1741 | 1 | maize low temperature and salt responsive |
| | | | | protein LTI6A-like 2 sequence |
| 1304 | 563 | PHE0001659_1770 | 1 | corn SDD1-like 1 pre-pro domain |
| 1305 | 564 | PHE0002079_2189 | 1 | rice sec61 |
| 1306 | 565 | PHE0002185_2292 | 1 | rice Hsp17.7 like 1 sequence |
| 1307 | 566 | PHE0002229_2336 | 1 | rice protease inhibitor like 1 sequence |
| 1308 | 567 | PHE0002392_2493 | 1 | rice copper chaperone like 1 sequence |
| 1309 | 568 | PHE0002410_2510 | 1 | E. coli gadA |
| 1310 | 569 | PHE0002411_2511 | 1 | Synechocystis sp. PCC 6803 gad |
| 1311 | 570 | PHE0002485_2585 | 4 | Corn Amino Acid Transport Protein |
| 1312 | 571 | PHE0002496_2596 | 1 | Corn Glutamate-1-semialdehyde |
| | | | | aminotransferase |
| 1313 | 572 | PHE0002611_2710 | 1 | soy sigma factor 1 |
| 1314 | 573 | PHE0002616_2723 | 1 | Arabidopsis proline/glycine betaine |
| | | | | transporter 1 |
| 1315 | 574 | PHE0002670_2793 | 5 | Streptomyces coelicolor glucose-1-phosphate |
| | | | | adenylyltransferase |
| 1316 | 575 | PHE0002727_2860 | 1 | rice sucrose synthase-1 like 2 sequence |
| 1317 | 576 | PHE0002950_3100 | 1 | Yeast protein involved in resistance to H2O2 |
| 1318 | 577 | PHE0002997_3147 | 1 | Yeast Protein of unknown function, has WD |
| | | | | (WD-40) repeats |
| 1319 | 578 | PHE0003011_3161 | 1 | Yeast Protein (wi Carbonic anhydrase PFAM |
| | | | | domain) involved in protection against |
| | | | | oxidative damage |
| 1320 | 579 | PHE0003021_3171 | 1 | Yeast protein of unknown function (may be |
| | | | | involved in cell damage) |
| 1321 | 580 | PHE0003200_3399 | 1 | Arabidopsis seven-in-absentia 2 |
| 1322 | 581 | PHE0003227_3443 | 16 | soy G1820 like |
| 1323 | 582 | PHE0003261_3478 | 1 | rice-CGPG1517-like2 |
| 1324 | 583 | PHE0003270_3489 | 1 | soy-CGPG1191-like1 |
| 1325 | 584 | PHE0003277_3496 | 1 | soy-CGPG1430-like1 |
| 1326 | 585 | PHE0003352_3571 | 1 | Corn ethylene receptor 1 |
| 1327 | 586 | PHE0003366_3589 | 1 | transaldolase |
| 1328 | 587 | PHE0003370_3593 | 4 | Circulin B |
| 1329 | 588 | PHE0003526_3772 | 1 | soy G2567 like2 |
| 1330 | 589 | PHE0003581_3827 | 1 | rice G2603 like2 |
| 1331 | 590 | PHE0003681_3942 | 4 | rice G1792-like 3 |
| 1332 | 591 | PHE0003683_3944 | 16 | soy SUC1-like 1 |
| 1333 | 592 | PHE0003683_3945 | 18 | soy SUC1-like 1 |
| 1334 | 593 | PHE0003815_4288 | 4 | Synechocystis NblS-like |
| 1335 | 594 | PHE0003986_4573 | 4 | corn AfMONFEED001223 putative stearoyl- |
| | | | | acyl-carrier protein desaturase |
| 1336 | 595 | PHE0003989_4575 | 4 | corn AfMONFEED000878 remorin-like |
| | | | | protein |
| 1337 | 596 | PHE0003990_4576 | 4 | corn AfMONFEED001231 unknown protein |
| 1338 | 597 | PHE0003995_4581 | 4 | corn AfMONFEED001033 putative succinate |
| | | | | dehydrogenase |
| 1339 | 598 | PHE0004022_4657 | 4 | Arabidopsis Alfin-like |
| 1340 | 599 | PHE0000667_770 | 1 | chimeric glycerol-3-phosphate acyltransferase |
| 1341 | 600 | PHE0000784_857 | 1 | Arabidopsis agl1 1 delta MADS-box |
| 1342 | 601 | PHE0000880_963 | 1 | Nostoc sp. PCC7120 Hik33 |
| 1343 | 602 | PHE0000883_966 | 1 | Synechocystis sp. 6803 Rer1 |
| 1344 | 603 | PHE0001063_1153 | 1 | yeast SNF4-Z72637 |
| 1345 | 604 | PHE0001065_1155 | 1 | yeast SIP2-Z72730 |
| 1346 | 605 | PHE0001069_1159 | 1 | Arabidopsis bZIP domain transcription factor |
| 1347 | 606 | PHE0001076_1166 | 1 | Arabidopsis NAC domain transcription factor |
| 1348 | 607 | PHE0001080_1170 | 1 | Arabidopsis AP2 domain transcription factor |
| 1349 | 608 | PHE0001087_1177 | 1 | Arabidopsis homeodomain transcription |
| | | | | factor |
| 1350 | 609 | PHE0001094_1184 | 1 | Arabidopsis zinc finger protein |
| 1351 | 610 | PHE0001100_1190 | 1 | Arabidopsis bZIP domain transcription factor |
| 1352 | 611 | PHE0001112_1202 | 1 | yeast alanine aminotransferase 2-CAA88665 |
| 1353 | 612 | PHE0001131_1221 | 5 | yeast acetohydroxyacid reductoisomerase- |
| | | | | AAB67753 |
| 1354 | 613 | PHE0001143_1233 | 1 | corn putative isoprenylated protein |
| 1355 | 614 | PHE0001149_1239 | 1 | corn HvB12D homolog |
| 1356 | 615 | PHE0001169_1259 | 1 | Arabidopsis TFL2-AF387639 |
| 1357 | 616 | PHE0001176_1266 | 5 | Synechocystis sp. PCC 6803 heme |
| | | | | oxygenase-1651897 |
| 1358 | 617 | PHE0001177_1267 | 5 | Nostoc sp. PCC 7120 heme oxygenase- |
| | | | | 17132210 |
| 1359 | 618 | PHE0001184_1274 | 1 | rice SHY2-like 1-BAA92982 |
| 1360 | 619 | PHE0001256_1347 | 1 | Arabidopsis protease HhoA precursor |
| 1361 | 620 | PHE0001264_1355 | 1 | Arabidopsis hypothetical protein |
| 1362 | 621 | PHE0001265_1356 | 1 | Arabidopsis hypothetical protein |
| | | | | [NM_105159] |
| 1363 | 622 | PHE0001268_1359 | 1 | Arabidopsis hypothetical protein |
| 1364 | 623 | PHE0001270_1361 | 1 | yeast ero1-CAA90553 |
| 1365 | 624 | PHE0001311_1401 | 1 | Arabidopsis expressed protein [NM_126228] |
| 1366 | 625 | PHE0001322_1412 | 1 | Arabidopsis expressed protein |
| 1367 | 626 | PHE0001519_1610 | 1 | rice WD domain protein |
| 1368 | 627 | PHE0001523_1614 | 1 | rice LPE1-like permase 1-BAB61205 |
| 1369 | 628 | PHE0001527_1618 | 1 | Nostoc sp. PCC 7120 GDH |
| 1370 | 629 | PHE0001528_1619 | 1 | Nostoc punctiforme GDH |
| 1371 | 630 | PHE0001533_1624 | 1 | Streptomyces coelicolor GDH |
| 1372 | 631 | PHE0001541_1632 | 1 | rice glutamate dehydrogenase-15787849 |
| 1373 | 632 | PHE0001567_1666 | 1 | Bacillus halodurans asparagine synthase- |
| | | | | 10174030 |
| 1374 | 633 | PHE0001568_1667 | 4 | Corynebacterium glutamicum Asparagine |
| | | | | synthase-19551250 |
| 1375 | 634 | PHE0001611_1722 | 1 | rice translation initiation factor 3 delta subunit |
| | | | | like sequence |
| 1376 | 635 | PHE0001632_1743 | 1 | arabidopsis magnesium/proton exchanger |
| | | | | AtMHX |
| 1377 | 636 | PHE0002029_2140 | 1 | Corn Axi 1 |
| 1378 | 637 | PHE0002078_2188 | 1 | yeast sec61 |
| 1379 | 638 | PHE0002084_2194 | 1 | Corn cyclic nucleotide and calmodulin- |
| | | | | regulated ion channel |
| 1380 | 639 | PHE0002089_2199 | 1 | Agrobacterium tumefaciens hypothetical |
| | | | | protein |
| 1381 | 640 | PHE0002090_2200 | 1 | Nostoc sp. PCC 7120 stress induced |
| | | | | hydrophobic peptide |
| 1382 | 641 | PHE0002151_2259 | 1 | Corn Kaurene Synthase |
| 1383 | 642 | PHE0002194_2301 | 1 | maize Betaine-aldehyde dehydrogenase like 1 |
| | | | | sequence |
| 1384 | 643 | PHE0002483_2583 | 1 | maize heat shock TF like sequence |
| 1385 | 644 | PHE0002494_2594 | 1 | Arabidopsis ascorbate oxidase |
| 1386 | 645 | PHE0002509_2609 | 1 | cORN Hsp20/alpha crystallin family” |
| 1387 | 646 | PHE0002523_2623 | 1 | Corn putative thioredoxin protein |
| 1388 | 647 | PHE0002527_2627 | 1 | Hypothetical Nostoc protein similar to cobW |
| 1389 | 648 | PHE0002546_2646 | 1 | Corn dual-specificity protein |
| | | | | phosphatase-like protein |
| 1390 | 649 | PHE0002557_2657 | 1 | soy G1792-like 10 |
| 1391 | 650 | PHE0002566_2665 | 1 | Ribosomal protein L39 |
| 1392 | 651 | PHE0002614_2713 | 1 | Brassica napus sigA binding protein 2 |
| 1393 | 652 | PHE0002648_2767 | 1 | soy AGL21-like 2 |
| 1394 | 653 | PHE0002652_2771 | 1 | Corn GDP-mannose pyrophosphorylase A |
| 1395 | 654 | PHE0002791_2926 | 1 | rice CYP72A5 like 2 sequence |
| 1396 | 655 | PHE0002849_2984 | 1 | Oryza Sativa Putative Glucosyl Transferase |
| 1397 | 656 | PHE0002855_2990 | 1 | Synechocystis sp unknown protein wi/ABC1 |
| | | | | PFAM domain (putative novel chaperonin) |
| 1398 | 657 | PHE0002856_2991 | 1 | Nostoc sp unknown protein wi/ABC1 PFAM |
| | | | | domain(putative novel chaperonin) |
| 1399 | 658 | PHE0002886_3021 | 1 | Brassica dsPTP 1 |
| 1400 | 659 | PHE0002888_3023 | 1 | soy dsPTP 2 |
| 1401 | 660 | PHE0002893_3028 | 1 | Corn dsPTP 3 |
| 1402 | 661 | PHE0002901_3036 | 1 | Yeast GAT2 GATA Zinc Finger TF |
| 1403 | 662 | PHE0002906_3041 | 1 | Zea Mays Zinc Finger Transcription Factor |
| | | | | IV |
| 1404 | 663 | PHE0002910_3045 | 1 | Yeast IKS1 |
| 1405 | 664 | PHE0002923_3058 | 1 | Yeast GGA1 protein (mediator of protein |
| | | | | traficking between Trans golgi network and |
| | | | | vacoule) |
| 1406 | 665 | PHE0002928_3065 | 1 | Yeast Zinc Finger protein (DNA damage |
| | | | | responsive repressor of PHR1) |
| 1407 | 666 | PHE0002941_3091 | 1 | Yeast SET6p putative Transcription Factor |
| 1408 | 667 | PHE0002947_3097 | 1 | Zea Mays Sugar & other (polyamine) |
| | | | | transporter like protein |
| 1409 | 668 | PHE0002948_3098 | 1 | Yeast Xylulokinase |
| 1410 | 669 | PHE0002987_3137 | 1 | Yeast oxidoreductase of unknown function |
| | | | | (PFAM NAD-binding Rossmann fold & C- |
| | | | | terminal alpha/beta domain) |
| 1411 | 670 | PHE0003017_3167 | 1 | Yeast Transketolase 2 |
| 1412 | 671 | PHE0003018_3168 | 1 | Yeast Ubiquitin polyprotein |
| 1413 | 672 | PHE0003023_3173 | 1 | Yeast unknown protein (uncharacterized |
| | | | | protein family) |
| 1414 | 673 | PHE0003025_3175 | 1 | Yeast Protein of unknown function, (similar |
| | | | | to mouse MPV17 a putative integral |
| | | | | membrane peroxisomal protein) |
| 1415 | 674 | PHE0003026_3176 | 1 | Yeast Protein of unknown function, putative |
| | | | | paralog of Ecm4p, a cell wall biogenesis |
| | | | | protein |
| 1416 | 675 | PHE0003027_3177 | 1 | Yeast Protein of unknown function (Pfam |
| | | | | Domain YjeF-related protein N-terminus) |
| 1417 | 676 | PHE0003028_3178 | 1 | Yeast Potential alpha-ketoisocaproate |
| | | | | reductase |
| 1418 | 677 | PHE0003030_3180 | 1 | Yeast Yapsin 6, GPI-anchored aspartyl |
| | | | | protease |
| 1419 | 678 | PHE0003062_3212 | 1 | soy G571 |
| 1420 | 679 | PHE0003088_3240 | 1 | Arabidopsis AtPK1 |
| 1421 | 680 | PHE0003089_3237 | 1 | Arabidopsis AtPK19b |
| 1422 | 681 | PHE0003090_3238 | 1 | soy S6K1 |
| 1423 | 682 | PHE0003091_3239 | 1 | corn S6K1 |
| 1424 | 683 | PHE0003102_3244 | 6 | Clostridium acetobutylicum fructokinase |
| 1425 | 684 | PHE0003102_3579 | 16 | Clostridium acetobutylicum fructokinase |
| 1426 | 685 | PHE0003121_3267 | 1 | Arabidopsis cyt P450 like |
| 1427 | 686 | PHE0003130_3276 | 1 | Arabidopsis glucosyltransferase-like |
| 1428 | 687 | PHE0003134_3280 | 1 | Arabidopsis microtubule-associated protein |
| | | | | EB1-like protein like |
| 1429 | 688 | PHE0003194_3393 | 1 | corn seven-in-absentia 2 |
| 1430 | 689 | PHE0003195_3394 | 1 | soy seven-in-absentia 1 |
| 1431 | 690 | PHE0003199_3398 | 1 | rice seven-in-absentia 2 |
| 1432 | 691 | PHE0003201_3400 | 1 | soy seven-in-absentia 4 |
| 1433 | 692 | PHE0003208_3410 | 7 | soy triose phosphate translocator 1 |
| 1434 | 693 | PHE0003213_3419 | 1 | yeast TAT2 |
| 1435 | 694 | PHE0003214_3420 | 1 | yeast CUP1a |
| 1436 | 695 | PHE0003222_3428 | 1 | Corynebacterium glutamicum glutamate 5- |
| | | | | kinase |
| 1437 | 696 | PHE0003238_3454 | 1 | Arabidopsis fructose-bisphosphate aldolase |
| 1438 | 697 | PHE0003242_3458 | 1 | Arabidopsis ABC transporter |
| 1439 | 698 | PHE0003251_3468 | 1 | Arabidopsis unknown protein |
| 1440 | 699 | PHE0003260_3477 | 1 | soy-CGPG1517-like1 |
| 1441 | 700 | PHE0003272_3491 | 1 | Arabidopsis hypothetical protein |
| 1442 | 701 | PHE0003275_3494 | 1 | Brassica-CGPG1391-like1 |
| 1443 | 702 | PHE0003302_3523 | 1 | Arabidopsis hypothetical protein |
| 1444 | 703 | PHE0003308_3527 | 1 | Arabidopsis Yippee putative zinc-binding |
| | | | | protein |
| 1445 | 704 | PHE0003315_3534 | 1 | Arabidopsis unknown protein |
| 1446 | 705 | PHE0003320_3539 | 1 | Arabidopsis PDK1 like 1 |
| 1447 | 706 | PHE0003344_3562 | 1 | corn ADC like-1 |
| 1448 | 707 | PHE0003347_3565 | 1 | Arabidopsis GCN5 |
| 1449 | 708 | PHE0003354_3573 | 1 | corn G571 long splice form A196P, A197P |
| 1450 | 709 | PHE0003380_3603 | 1 | putative laccase |
| 1451 | 710 | PHE0003388_3611 | 4 | Caffeic acid 3-O-methyltransferase |
| 1452 | 711 | PHE0003395_3618 | 4 | hypothetical protein4 |
| 1453 | 712 | PHE0003397_3620 | 1 | hypothetical protein5 |
| 1454 | 713 | PHE0003403_3626 | 16 | potato twin LOV protein |
| 1455 | 714 | PHE0003411_3634 | 1 | Putative NAM protein |
| 1456 | 715 | PHE0003414_3654 | 19 | Streptococcus mutans gtfA (dicot codon |
| | | | | modified) |
| 1457 | 716 | PHE0003415_3655 | 18 | Synechococcus sp. PCC 7942 IctB with |
| | | | | RuBisCO small subunit 1b CTP |
| 1458 | 717 | PHE0003431_3639 | 4 | Streptomyces coelicolor trehalose synthase 1 |
| 1459 | 718 | PHE0003434_3643 | 1 | corn dehalogenase-phosphatase 2 |
| 1460 | 719 | PHE0003436_3645 | 1 | Nostoc sp. PCC 7120 dehalogenase- |
| | | | | phosphatase |
| 1461 | 720 | PHE0003437_3646 | 1 | yeast dehalogenase-phosphatase |
| 1462 | 721 | PHE0003447_3678 | 1 | soy DUF296 |
| 1463 | 722 | PHE0003483_3729 | 1 | soy G2035 like1 |
| 1464 | 723 | PHE0003519_3765 | 1 | corn G2505 like2 |
| 1465 | 724 | PHE0003582_3828 | 1 | soy G2999 like1 |
| 1466 | 725 | PHE0003586_3832 | 1 | Brassica G2763 like1 |
| 1467 | 726 | PHE0003588_3834 | 1 | soy G2776 like1 |
| 1468 | 727 | PHE0003598_3844 | 1 | soy G2981 like1 |
| 1469 | 728 | PHE0003606_3852 | 1 | soy G2898 like1 |
| 1470 | 729 | PHE0003613_3860 | 1 | corn GAD1-1 |
| 1471 | 730 | PHE0003617_3866 | 1 | Brassica G2839 like1 |
| 1472 | 731 | PHE0003632_3890 | 1 | rice G2982 like 1 |
| 1473 | 732 | PHE0003636_3894 | 1 | soy G2992 like1 |
| 1474 | 733 | PHE0003676_3934 | 1 | soy G1052 like2 |
| 1475 | 734 | PHE0003682_3943 | 4 | wheat wpk4 |
| 1476 | 735 | PHE0003788_4122 | 4 | corn NAC1-like 1 |
| 1477 | 736 | PHE0003899_4284 | 17 | CGPG2101 Arabidopsis PHD-finger protein |
| 1478 | 737 | PHE0003948_4528 | 17 | Arabidopsis CGPG3676 |
| 1479 | 738 | PHE0003981_4568 | 4 | corn AfMONFEED000388 pyruvate kinase |
| 1480 | 739 | PHE0003984_4571 | 4 | corn AfMONFEED000668 unknown protein |
| 1481 | 740 | PHE0003998_4584 | 4 | corn AfMONFEED000499 putative indole-3- |
| | | | | acetic acid-regulated protein |
| 1482 | 741 | PHE0004008_4594 | 4 | corn AfMONFEED000474 serine protease- |
| | | | | like protein |

Selection Methods for Transgenic Plants with Enhanced Agronomic Trait

[0063] Within a population of transgenic plants regenerated from plant cells transformed with the recombinant DNA many plants that survive to fertile transgenic plants that produce seeds and progeny plants will not exhibit an enhanced agronomic trait. Selection from the population is necessary to identify one or more transgenic plant cells that can provide plants with the enhanced trait. Transgenic plants having enhanced traits are selected from populations of plants regenerated or derived from plant cells transformed as described herein by evaluating the plants in a variety of assays to detect an enhanced trait, e.g. enhanced water use efficiency, enhanced cold tolerance, increased yield, enhanced nitrogen use efficiency, enhanced seed protein and enhanced seed oil. These assays also may take many forms including, but not limited to, direct screening for the trait in a greenhouse or field trial or by screening for a surrogate trait. Such analyses can be directed to detecting changes in the chemical composition, biomass, physiological properties, morphology of the plant. Changes in chemical compositions such as nutritional composition of grain can be detected by analysis of the seed composition and content of protein, free amino acids, oil, free fatty acids, starch or tocopherols. Changes in biomass characteristics can be made on greenhouse or field grown plants and can include plant height, stem diameter, root and shoot dry weights; and, for corn plants, ear length and diameter. Changes in physiological properties can be identified by evaluating responses to stress conditions, for example assays using imposed stress conditions such as water deficit, nitrogen deficiency, cold growing conditions, pathogen or insect attack or light deficiency, or increased plant density. Changes in morphology can be measured by visual observation of tendency of a transformed plant with an enhanced agronomic trait to also appear to be a normal plant as compared to changes toward bushy, taller, thicker, narrower leaves, striped leaves, knotted trait, chlorosis, albino, anthocyanin production, or altered tassels, ears or roots. Other selection properties include days to pollen shed, days to silking, leaf extension rate, chlorophyll content, leaf temperature, stand, seedling vigor, internode length, plant height, leaf number, leaf area, tillering, brace roots, stay green, stalk lodging, root lodging, plant health, barreness/prolificacy, green snap, and pest resistance. In addition, phenotypic characteristics of harvested grain may be evaluated, including number of kernels per row on the ear, number of rows of kernels on the ear, kernel abortion, kernel weight, kernel size, kernel density and physical grain quality. Although the plant cells and methods of this invention can be applied to any plant cell, plant, seed or pollen, e.g. any fruit, vegetable, grass, tree or ornamental plant, the various aspects of the invention are preferably applied to corn, soybean, cotton, canola, alfalfa, wheat and rice plants. In many cases the invention is applied to corn plants that are inherently resistant to disease from the Mal de Rio Cuarto virus or the Puccina sorghi fungus or both.

[0064] The following examples are included to demonstrate aspects of the invention, those of skill in the art should, in light of the present disclosure, appreciate that many changes can be made in the specific aspects which are disclosed and still obtain a like or similar results without departing from the spirit and scope of the invention.

### Example 1

### Plant Expression Constructs

### A. Plant Expression Constructs for Corn Transformation

[0065] This example illustrates the construction of plasmids for transferring recombinant DNA into plant cells which can be regenerated into transgenic plants of this invention.

[0066] A base plant transformation vector pMON65154, as set forth in SEQ ID NO: 52768 was fabricated for use in preparing recombinant DNA for transformation into corn tissue using GATEWAY™ Destination plant expression vector systems (available from Invitrogen Life Technologies, Carlsbad, Calif.). With reference to the elements described in Table 3 below, pMON65154 comprises a selectable marker expression cassette and a template recombinant DNA expression cassette. The marker expression cassette comprises a CaMV 35S promoter operably linked to a gene encoding neomycin phosphotransferase II (nptII) followed by a 3′ region of an Agrobacterium tumefaciens nopaline synthase gene (nos). The template recombinant DNA expression cassette is positioned tail to tail with the marker expression cassette. The template recombinant DNA expression cassette comprises 5′ regulatory DNA including a rice actin 1 promoter, exon and intron, followed by a GATEWAY™ insertion site for recombinant DNA, followed by a 3′ region of a potato proteinase inhibitor II (pinII) gene. Once recombinant DNA has been inserted into the insertion site, the plasmid is useful for plant transformation, e.g. by microprojectile bombardment.

TABLE 3

| FUNCTION | ELEMENT | REFERENCE |
|---|---|---|
| Plant gene of interest | Rice actin 1 promoter | U.S. Pat. No. 5,641,876 |
| expression cassette | Rice actin 1 exon 1, intron 1 | U.S. Pat. No. 5,641,876 |
| | enhancer | |
| Gene of interest | AttR1 | GATEWAY ™ Cloning Technology |
| insertion site | | Instruction Manual |
| | CmR gene | GATEWAY ™ Cloning Technology |
| | | Instruction Manual |
| | ccdA, ccdB genes | GATEWAY ™ Cloning Technology |
| | | Instruction Manual |
| | attR2 | GATEWAY ™ Cloning Technology |
| | | Instruction Manual |
| Plant gene of interest | Potato pinII 3′ region | An et al. (1989) Plant Cell 1: 115-122 |
| expression cassette | | |
| Plant selectable | CaMV 35S promoter | U.S. Pat. No. 5,858,742 |
| marker expression | nptII selectable marker | U.S. Pat. No. 5,858,742 |
| cassette | nos 3′ region | U.S. Pat. No. 5,858,742 |
| Maintenance in E. coli | ColE1 origin of replication | |
| | F1 origin of replication | |
| | Bla ampicillin resistance | |

[0067] A similar base vector plasmid pMON72472 (SEQ ID NO: 52769) was constructed for use in Agrobacterium-mediated methods of plant transformation similar to pMON65154 except (a) the 5′ regulatory DNA in the template recombinant DNA expression cassette was a rice actin promoter and a rice actin intron, (b) left and right T-DNA border sequences from Agrobacterium are added with the right border sequence is located 5′ to the rice actin 1 promoter and the left border sequence is located 3′ to the ³⁵S promoter and (c) DNA is added to facilitate replication of the plasmid in both E. coli and Agrobacterium tumefaciens. The DNA added to the plasmid outside of the T-DNA border sequences includes an oriV wide host range origin of DNA replication functional in Agrobacterium, a pBR322 origin of replication functional in E. coli, and a spectinomycin/streptomycin resistance gene for selection in both E. coli and Agrobacterium.

[0068] Other base vectors similar to those described above were also constructed as listed in Table 4. See Table 4 for a summary of base vector plasmids and base vector ID's which are referenced in Table 1. Also see Table 5 for a summary of regulatory elements used in the gene expression cassette for these base vectors and SEQ ID NOs for elements.

TABLE 4

| Base Vector ID | |
|---|---|
| | Base Vector |
| | for Corn |
| 1 | pMON72472 |
| 2 | pMON65154 |
| 3 | pMON84109 |
| 4 | pMON82060 |
| 5 | pMON74430 |
| 6 | pMON84107 |
| 7 | pMON81244 |
| 8 | pMON76274 |
| 9 | pMON74575 |
| 10 | pMON92667 |
| 11 | pMON84108 |
| 12 | pMON74582 |
| 13 | pMON74579 |
| 14 | pMON74577 |
| | Base Vector |
| | for Soybean |
| 15 | pMON74552 |
| 16 | pMON74532 |
| 17 | pMON82053 |
| 18 | pMON74537 |
| 19 | pMON74536 |
| 20 | pMON74548 |

TABLE 5

| | | SEQ | | SEQ | | SEQ | | SEQ | | SEQ |
|---|---|---|---|---|---|---|---|---|---|---|
| Vector | promoter | ID NO | leader | ID NO | intron | ID NO | transit peptide | ID NO | terminator | ID NO |
| pMON65154 | P-Os.Act1- | 52789 | L-Os.Act1-1:1:3 | 52777 | I-Os.Act1-1:1:40 | 52772 | NONE | / | T-St.Pis4-1:4:3 | 52801 |
| | 1:4:27 | | | | | | | | | |
| pMON72472 | P-Os.Act1- | 52788 | L-Os.Act1-1:1:5 | 52778 | I-Os.Act1-1:1:3 | 52771 | NONE | / | T-St.Pis4-1:4:1 | 52800 |
| | 1:1:8 | | | | | | | | | |
| pMON74577 | P-Hv.Per1- | 52787 | L-Hv.Per1-1:1:1 | 52776 | I-Zm.DnaK-1:1:1 | 52773 | NONE | / | T-St.Pis4-1:4:1 | 52800 |
| | 1:1:7 | | | | | | | | | |
| pMON74579 | P-Zm.NAS2- | 52793 | L-Zm.NAS2- | 52781 | I-Zm.DnaK-1:1:1 | 52773 | NONE | / | T-St.Pis4-1:4:1 | 52800 |
| | 1:1:1 | | 1:1:1 | | | | | | | |
| pMON74582 | P- | 52795 | L-Zm.PPDK- | 52782 | I-Zm.DnaK-1:1:1 | 52773 | NONE | / | T-St.Pis4-1:4:1 | 52800 |
| | Zm.PPDK- | 1:1:2 | | | | | | | | |
| | 1:1:12 | | | | | | | | | |
| pMON76274 | P-Os.GT1- | 52790 | L-Os.GT1-1:1:3 | 52779 | I-Zm.DnaK-1:1:1 | 52773 | NONE | / | T-St.Pis4-1:4:1 | 52800 |
| | 1:1:10 | | | | | | | | | |
| pMON81244 | P- | 52794 | L-Zm.PPDK- | 52782 | I-Zm.DnaK-1:1:1 | 52773 | NONE | / | T-St.Pis4-1:4:3 | 52801 |
| | Zm.PPDK- | | 1:1:2 | | | | | | | |
| | 1:1:10 | | | | | | | | | |
| pMON82060 | P-Os.Act1- | 52788 | L-Os.Act1-1:1:5 | 52778 | I-Os.Act1-1:1:3 | 52771 | NONE | / | T-St.Pis4-1:4:1 | 52800 |
| | 1:1:8 | | | | | | | | | |
| pMON84109 | P-Os.Act1- | 52788 | L-Os.Act1-1:1:5 | 52778 | I-Os.Act1-1:1:3 | 52771 | TS-At.ShkG- | 52799 | T-St.Pis4-1:4:1 | 52800 |
| | 1:1:8 | | | | | | CTP2-1:1:1 | | | |
| pMON74430 | P-Os.Act1- | 52788 | L-Os.Act1-1:1:5 | 52778 | I-Os.Act1-1:1:3 | 52771 | TS-At.ShkG- | 52799 | T-St.Pis4-1:4:1 | 52800 |
| | 1:1:8 | | | | | | CTP2-1:1:1 | | | |
| pMON84107 | P-Os.GT1- | 52791 | NONE | | I-Zm.DnaK-1:1:1 | 52773 | NONE | / | T-St.Pis4-1:4:1 | 52800 |
| | 1:1:18 | | | | | | | | | |
| pMON74575 | P-Zm.FDA- | 52792 | L-Zm.FDA-1:1:1 | 52780 | I-Zm.DnaK-1:1:1 | 52773 | NONE | / | T-St.Pis4-1:4:1 | 52800 |
| | 1:1:5 | | | | | | | | | |
| pMON92667 | P- | 52797 | L-Zm.SceinC1- | 52783 | I-Zm.DnaK-1:1:1 | 52773 | NONE | / | T-St.Pis4-1:4:1 | 52800 |
| | Zm.SzeinC1- | | 1:1:1 | | | | | | | |
| | 1:1:1 | | | | | | | | | |
| pMON74532 | P- | 52786 | NONE | / | NONE | / | NONE | | T-Gb.E6-3b:1:1 | 52798 |
| | CaMV.35S- | | | | | | | | | |
| | enh- | | | | | | | | | |
| | 1:1:11 | | | | | | | | | |
| pMON74552 | P- | 52786 | NONE | / | NONE | / | TS-At.ShkG- | 52799 | T-Gb.E6-3b:1:1 | 52798 |
| | CaMV.35S- | | | | | | CTP2-1:1:1 | | | |
| | enh-1:1:11 | | | | | | | | | |
| pMON82053 | P- | 52786 | NONE | / | NONE | / | NONE | / | T-Gb.E6-3b:1:1 | 52798 |
| | CaMV.35S- | | | | | | | | | |
| | enh- | | | | | | | | | |
| | 1:1:11 | | | | | | | | | |
| pMON74537 | P- | 52784 | L-At.RbcS4-1:1:3 | 52774 | NONE | / | NONE | / | T-Gb.E6-3b:1:1 | 52798 |
| | At.RbcS4- | | | | | | | | | |
| | 1:1:2 | | | | | | | | | |
| pMON74536 | P-Br.Snap2- | 52785 | L-Br.Snap2-1:1:1 | 52775 | NONE | / | NONE | / | T-Gb.E6-3b:1:1 | 52798 |
| | 1:1:1 | | | | | | | | | |
| pMON74548 | P- | 52796 | L-Gm.Sphas1- | 52802 | NONE | / | NONE | / | T-Gb.E6-3b:1:1 | 52798 |
| | Gm.Sphas1- | | 1:1:1 | | | | | | | |
| | 1:1:1 | | | | | | | | | |
| pMON74539 | P-At.RbcS4- | 52784 | L-At.RbcS4-1:1:3 | 52774 | NONE | / | TS-At.ShkG- | 52799 | T-Gb.E6-3b:1:1 | 52798 |
| | 1:1:2 | | | | | | CTP2-1:1:1 | | | |

[0069] Plasmids for use in transformation of soybean were also prepared. Elements of an exemplary common expression vector plasmid pMON74532 are shown in Table 6 below.

TABLE 6

| Function | Element | Reference |
|---|---|---|
| Agro transformation | B-ARGtu.right border | Depicker, A. et al (1982) |
| | | Mol Appl Genet 1: 561-573 |
| Antibiotic resistance | CR-Ec.aadA-SPC/STR | |
| Repressor of primers from the ColE1 | CR-Ec.rop | |
| plasmid | | |
| Origin of replication | OR-Ec.oriV-RK2 | |
| Agro transformation | B-ARGtu.left border | Barker, R. F. et al (1983) |
| | | Plant Mol Biol 2: 335-350 |
| Plant selectable marker expression | Promoter with intron and | McDowell et al. (1996) |
| cassette | 5′UTR of Arabidopsis act 7 | Plant Physiol. 111: 699-711. |
| | gene (AtAct7) | |
| | 5′ UTR of Arabidopsis act 7 | |
| | gene | |
| | Intron in 5′UTR of AtAct7 | |
| | Transit peptide region of | Klee, H. J. et al (1987) |
| | Arabidopsis EPSPS | MGG 210: 437-442 |
| | Synthetic CP4 coding region | |
| | with dicot preferred codon | |
| | usage | |
| | A 3′ UTR of the nopaline | U.S. Pat. No. 5,858,742 |
| | synthase gene of | |
| | Agrobacterium tumefaciens | |
| | Ti plasmid | |
| Plant gene of interest expression | Promoter for 35S RNA from | U.S. Pat. No. 5,322,938 |
| cassette | CaMV containing a | |
| | duplication of the −90 to −350 | |
| | region | |
| | Gene of interest insertion site | |
| | Cotton E6 3′ end | GenBank accession |
| | | U30508 |

[0070] Primers for PCR amplification of protein coding nucleotides of recombinant DNA were designed at or near the start and stop codons of the coding sequence, in order to eliminate most of the 5′ and 3′ untranslated regions. Each recombinant DNA coding for a protein identified in Table 1 was amplified by PCR prior to insertion into the insertion site of one of the base vectors as referenced in Table 1.

### Example 2

### Corn Transformation

[0071] This example illustrates plant cell transformation methods useful in producing transgenic corn plant cells, plants, seeds and pollen of this invention and the production and identification of transgenic corn plants and seed with an enhanced trait, i.e. enhanced water use efficiency, enhanced cold tolerance, increased yield, enhanced nitrogen use efficiency, enhanced seed protein and enhanced seed oil. Plasmid vectors were prepared by cloning DNA identified in Table 1 in the identified base vectors for use in corn transformation of corn plant cells to produce transgenic corn plants and progeny plants, seed and pollen.

[0072] For Agrobacterium-mediated transformation of corn embryo cells corn plants of a readily transformable line (designated LH59) is grown in the greenhouse and ears harvested when the embryos are 1.5 to 2.0 mm in length. Ears are surface sterilized by spraying or soaking the ears in 80% ethanol, followed by air drying. Immature embryos are isolated from individual kernels on surface sterilized ears. Prior to inoculation of maize cells, Agrobacterium cells are grown overnight at room temperature. Immature maize embryo cells are inoculated with Agrobacterium shortly after excision, and incubated at room temperature with Agrobacterium for 5-20 minutes. Immature embryo plant cells are then co-cultured with Agrobacterium for 1 to 3 days at 23° C. in the dark. Co-cultured embryos are transferred to selection media and cultured for approximately two weeks to allow embryogenic callus to develop. Embryogenic callus is transferred to culture medium containing 100 mg/L paromomycin and subcultured at about two week intervals. Transformed plant cells are recovered 6 to 8 weeks after initiation of selection.

[0073] For Agrobacterium-mediated transformation of maize callus immature embryos are cultured for approximately 8-21 days after excision to allow callus to develop. Callus is then incubated for about 30 minutes at room temperature with the Agrobacterium suspension, followed by removal of the liquid by aspiration. The callus and Agrobacterium are co-cultured without selection for 3-6 days followed by selection on paromomycin for approximately 6 weeks, with biweekly transfers to fresh media, and paromomycin resistant callus identified as containing the recombinant DNA in an expression cassette.

[0074] For transformation by microprojectile bombardment immature maize embryos are isolated and cultured 3-4 days prior to bombardment. Prior to microprojectile bombardment, a suspension of gold particles is prepared onto which the desired recombinant DNA expression cassettes are precipitated. DNA is introduced into maize cells as described in U.S. Pat. Nos. 5,550,318 and 6,399,861 using the electric discharge particle acceleration gene delivery device. Following microprojectile bombardment, tissue is cultured in the dark at 27 degrees C. Additional transformation methods and materials for making transgenic plants of this invention, for example, various media and recipient target cells, transformation of immature embryos and subsequence regeneration of fertile transgenic plants are disclosed in U.S. Pat. Nos. 6,194,636 and 6,232,526 and U.S. patent application Ser. No. 09/757,089, which are incorporated herein by reference.

[0075] To regenerate transgenic corn plants a callus of transgenic plant cells resulting from transformation is placed on media to initiate shoot development in plantlets which are transferred to potting soil for initial growth in a growth chamber at 26 degrees C. followed by a mist bench before transplanting to 5 inch pots where plants are grown to maturity. The regenerated plants are self fertilized and seed is harvested for use in one or more methods to select seed, seedlings or progeny second generation transgenic plants (R2 plants) or hybrids, e.g. by selecting transgenic plants exhibiting an enhanced trait as compared to a control plant.

[0076] Transgenic corn plant cells are transformed with recombinant DNA from each of the genes identified in Table 1. Progeny transgenic plants and seed of the transformed plant cells are screened for enhanced water use efficiency, enhanced cold tolerance, increased yield, enhanced nitrogen use efficiency, enhanced seed protein and enhanced seed oil as reported in Example 5.

### Example 3

### Soybean Transformation

[0077] This example illustrates plant transformation useful in producing the transgenic soybean plants of this invention and the production and identification of transgenic seed for transgenic soybean having enhanced water use efficiency, enhanced cold tolerance, increased yield, enhanced nitrogen use efficiency, enhanced seed protein and enhanced seed oil.

[0078] For Agrobacterium mediated transformation, soybean seeds are germinated overnight and the meristem explants excised. The meristems and the explants are placed in a wounding vessel. Soybean explants and induced Agrobacterium cells from a strain containing plasmid DNA with the gene of interest cassette and a plant selectable marker cassette are mixed no later than 14 hours from the time of initiation of seed germination and wounded using sonication. Following wounding, explants are placed in co-culture for 2-5 days at which point they are transferred to selection media for 6-8 weeks to allow selection and growth of transgenic shoots. Trait positive shoots are harvested approximately 6-8 weeks and placed into selective rooting media for 2-3 weeks. Shoots producing roots are transferred to the greenhouse and potted in soil. Shoots that remain healthy on selection, but do not produce roots are transferred to non-selective rooting media for an additional two weeks. Roots from any shoots that produce roots off selection are tested for expression of the plant selectable marker before they are transferred to the greenhouse and potted in soil. Additionally, a DNA construct can be transferred into the genome of a soybean cell by particle bombardment and the cell regenerated into a fertile soybean plant as described in U.S. Pat. No. 5,015,580, herein incorporated by reference.

[0079] Transgenic soybean plant cells are transformed with recombinant DNA from each of the genes identified in Table 1. Progeny transgenic plants and seed of the transformed plant cells are screened for enhanced water use efficiency, enhanced cold tolerance, increased yield, enhanced nitrogen use efficiency, enhanced seed protein and enhanced seed oil as reported in Example 5.

### Example 4

### Homolog Identification

[0080] This example illustrates the identification of homologs of proteins encoded by the DNA identified in Table 1 which is used to provide transgenic seed and plants having enhanced agronomic traits. From the sequence of the homologs, homologous DNA sequence can be identified for preparing additional transgenic seeds and plants of this invention with enhanced agronomic traits.

[0081] An “All Protein Database” was constructed of known protein sequences using a proprietary sequence database and the National Center for Biotechnology Information (NCBI) non-redundant amino acid database (nr.aa). For each organism from which a polynucleotide sequence provided herein was obtained, an “Organism Protein Database” was constructed of known protein sequences of the organism; it is a subset of the All Protein Database based on the NCBI taxonomy ID for the organism.

[0082] The All Protein Database was queried using amino acid sequences provided herein as SEQ ID NO: 142 through SEQ ID NO:1482 using NCBI “blastp” program with E-value cutoff of 1e-8. Up to 1000 top hits were kept, and separated by organism names. For each organism other than that of the query sequence, a list was kept for hits from the query organism itself with a more significant E-value than the best hit of the organism. The list contains likely duplicated genes of the polynucleotides provided herein, and is referred to as the Core List. Another list was kept for all the hits from each organism, sorted by E-value, and referred to as the Hit List.

[0083] The Organism Protein Database was queried using polypeptide sequences provided herein as SEQ ID NO: 142 through SEQ ID NO:1482 using NCBI “blastp” program with E-value cutoff of 1e-4. Up to 1000 top hits were kept. A BLAST searchable database was constructed based on these hits, and is referred to as “SubDB”. SubDB was queried with each sequence in the Hit List using NCBI “blastp” program with E-value cutoff of 1e-8. The hit with the best E-value was compared with the Core List from the corresponding organism. The hit is deemed a likely ortholog if it belongs to the Core List, otherwise it is deemed not a likely ortholog and there is no further search of sequences in the Hit List for the same organism. Homologs from a large number of distinct organisms were identified and are reported by amino acid sequences of SEQ ID NO: 1483 through SEQ ID NO: 52767. These relationship of proteins of SEQ ID NO: 742 through 166 and homologs of SEQ ID NO:1482 through 52767 is identified in Table 2. The source organism for each homolog is found in the Sequence Listing.

### Example 5

### Selection of Transgenic Plants with Enhanced Agronomic Trait(s)

[0084] This example illustrates identification of plant cells of the invention by screening derived plants and seeds for enhanced trait. Transgenic corn seed and plants with recombinant DNA identified in Table 1 were prepared by plant cells transformed with DNA that was stably integrated into the genome of the corn cell. The transgenic seed, plantlets and progeny plants were selected using the methods that measure Transgenic corn plant cells were transformed with recombinant DNA from each of the genes identified in Table 1. Progeny transgenic plants and seed of the transformed plant cells were screened for enhanced water use efficiency, enhanced cold tolerance, increased yield, enhanced nitrogen use efficiency, enhanced seed protein and enhanced seed oil as compared to control plants.

### A. Selection for Enhanced Nitrogen Use Efficiency

[0085] The physiological efficacy of transgenic corn plants (tested as hybrids) can be tested for nitrogen use efficiency (NUE) traits in a high-throughput nitrogen (N) selection method. The collected data are compared to the measurements from wildtype controls using a statistical model to determine if the changes are due to the transgene. Raw data were analyzed by SAS software. Results shown herein are the comparison of transgenic plants relative to the wildtype controls.

### (1) Media Preparation for Planting a NUE Protocol

[0086] Planting materials used: Metro Mix 200 (vendor: Hummert) Cat. # 10-0325, Scotts Micro Max Nutrients (vendor: Hummert) Cat. # 07-6330, OS 4⅓″×3⅞″ pots (vendor: Hummert) Cat. # 16-1415, OS trays (vendor: Hummert) Cat. # 16-1515, Hoagland's macronutrients solution, Plastic 5″ stakes (vendor: Hummert) yellow Cat. # 49-1569, white Cat. # 49-1505, Labels with numbers indicating material contained in pots. Fill 500 pots to rim with Metro Mix 200 to a weight of ˜140 g/pot. Pots are filled uniformly by using a balancer. Add 0.4 g of Micro Max nutrients to each pot. Stir ingredients with spatula to a depth of 3 inches while preventing material loss.

### (2) Planting a NUE Selection in the Greenhouse

[0087] (a) Seed Germination—Each pot is lightly watered twice using reverse osmosis purified water. The first watering is scheduled to occur just before planting; and the second watering, after the seed has been planted in the pot. Ten Seeds of each entry (1 seed per pot) are planted to select eight healthy uniform seedlings. Additional wild type controls are planted for use as border rows. Alternatively, 15 seeds of each entry (1 seed per pot) are planted to select 12 healthy uniform seedlings (this larger number of plantings is used for the second, or confirmation, planting). Place pots on each of the 12 shelves in the Conviron growth chamber for seven days. This is done to allow more uniform germination and early seedling growth. The following growth chamber settings are 25° C./day and 22° C./night, 14 hours light and ten hours dark, humidity ˜80%, and light intensity ˜350 mmol/m²/s (at pot level). Watering is done via capillary matting similar to greenhouse benches with duration of ten minutes three times a day.

[0088] (b) Seedling transfer—After seven days, the best eight or 12 seedlings for the first or confirmation pass runs, respectively, are chosen and transferred to greenhouse benches. The pots are spaced eight inches apart (center to center) and are positioned on the benches using the spacing patterns printed on the capillary matting. The Vattex matting creates a 384-position grid, randomizing all range, row combinations. Additional pots of controls are placed along the outside of the experimental block to reduce border effects.

[0089] Plants are allowed to grow for 28 days under the low N run or for 23 days under the high N run. The macronutrients are dispensed in the form of a macronutrient solution (see composition below) containing precise amounts of N added (2 mM NH₄NO₃ for limiting N selection and 20 mM NH₄NO₃ for high N selection runs). Each pot is manually dispensed 100 ml of nutrient solution three times a week on alternate days starting at eight and ten days after planting for high N and low N runs, respectively. On the day of nutrient application, two 20 min waterings at 05:00 and 13:00 are skipped. The vattex matting should be changed every third run to avoid N accumulation and buildup of root matter. Table 7 shows the amount of nutrients in the nutrient solution for either the low or high nitrogen selection.

TABLE 7

| | 2 mM NH₄NO₃ | 20 mM NH₄NO₃ (high |
|---|---|---|
| | (Low Nitrogen Growth | Nitrogen Growth |
| | Condition, Low N) | Condition, High N) |
| Nutrient Stock | mL/L | mL/L |
| 1M NH₄N0₃ | 2 | 20 |
| 1M KH₂PO₄ | 0.5 | 0.5 |
| 1M MgSO₄•7H₂O | 2 | 2 |
| 1M CaCl₂ | 2.5 | 2.5 |
| 1M K₂SO₄ | 1 | 1 |

Note:
Adjust pH to 5.6 with HCl or KOH

[0090] (c) Harvest Measurements and Data Collection—After 28 days of plant growth for low N runs and 23 days of plant growth for high N runs, the following measurements are taken (phenocodes in parentheses): total shoot fresh mass (g) (SFM) measured by Sartorius electronic balance, V6 leaf chlorophyll measured by Minolta SPAD meter (relative units) (LC), V6 leaf area (cm²) (LA) measured by a Li-Cor leaf area meter, V6 leaf fresh mass (g) (LFM) measured by Sartorius electronic balance, and V6 leaf dry mass (g) (LDM) measured by Sartorius electronic balance. Raw data were analyzed by SAS software. Results shown are the comparison of transgenic plants relative to the wildtype controls.

[0091] To take a leaf reading, samples were excised from the V6 leaf. Since chlorophyll meter readings of corn leaves are affected by the part of the leaf and the position of the leaf on the plant that is sampled, SPAD meter readings were done on leaf six of the plants. Three measurements per leaf were taken, of which the first reading was taken from a point one-half the distance between the leaf tip and the collar and halfway from the leaf margin to the midrib while two were taken toward the leaf tip. The measurements were restricted in the area from ½ to ¾ of the total length of the leaf (from the base) with approximately equal spacing between them. The average of the three measurements was taken from the SPAD machine.

[0092] Leaf fresh mass is recorded for an excised V6 leaf, the leaf is placed into a paper bag. The paper bags containing the leaves are then placed into a forced air oven at 80° C. for 3 days. After 3 days, the paper bags are removed from the oven and the leaf dry mass measurements are taken.

[0093] From the collected data, two derived measurements are made: (1) Leaf chlorophyll area (LCA), which is a product of V6 relative chlorophyll content and its leaf area (relative units). Leaf chlorophyll area=leaf chlorophyll X leaf area. This parameter gives an indication of the spread of chlorophyll over the entire leaf area; (2) specific leaf area (LSA) is calculated as the ratio of V6 leaf area to its dry mass (cm²/g dry mass), a parameter also recognized as a measure of NUE. The data are shown in Table 8.

### Nitrogen Use Field Efficacy Assay

[0094] Level I. Transgenic plants provided by the present invention are planted in field without any nitrogen source being applied. Transgenic plants and control plants are grouped by genotype and construct with controls arranged randomly within genotype blocks. Each type of transgenic plants are tested by 3 replications and across 5 locations. Nitrogen levels in the fields are analyzed in early April pre-planting by collecting 30 sample soil cores from 0-24″ and 24 to 48″ soil layer. Soil samples are analyzed for nitrate-nitrogen, phosphorus (P), Potassium (K), organic matter and pH to provide baseline values. P, K and micronutrients are applied based upon soil test recommendations.
Level II. Transgenic plants provided by the present invention are planted in field with three levels of nitrogen (N) fertilizer being applied, i.e. low level (0 N), medium level (80 lb/ac) and high level (180 lb/ac). Liquid 28% or 32% UAN (Urea, Ammonium Nitrogen) are used as the N source and apply by broadcast boom and incorporate with a field cultivator with rear rolling basket in the same direction as intended crop rows. Although there is no N applied to the 0 N treatment the soil should still be disturbed in the same fashion as the treated area. Transgenic plants and control plants are grouped by genotype and construct with controls arranged randomly within genotype blocks. Each type of transgenic plants is tested by 3 replications and across 4 locations. Nitrogen levels in the fields are analyzed in early April pre-planting by collecting 30 sample soil cores from 0-24″ and 24 to 48″ soil layer. Soil samples are analyzed for nitrate-nitrogen, phosphorus (P), Potassium (K), organic matter and pH to provide baseline values. P, K and micronutrients are applied based upon soil test recommendations.

### B. Selection for Increased Yield

[0095] Many transgenic plants of this invention exhibit improved yield as compared to a control plant. Improved yield can result from enhanced seed sink potential, i.e. the number and size of endosperm cells or kernels and/or enhanced sink strength, i.e. the rate of starch biosynthesis. Sink potential can be established very early during kernel development, as endosperm cell number and size are determined within the first few days after pollination.

[0096] Much of the increase in corn yield of the past several decades has resulted from an increase in planting density. During that period, corn yield has been increasing at a rate of 2.1 bushels/acre/year, but the planting density has increased at a rate of 250 plants/acre/year. A characteristic of modern hybrid corn is the ability of these varieties to be planted at high density. Many studies have shown that a higher than current planting density should result in more biomass production, but current germplasm does not perform well at these higher densities. One approach to increasing yield is to increase harvest index (HI), the proportion of biomass that is allocated to the kernel compared to total biomass, in high density plantings.

[0097] Effective yield selection of enhanced yielding transgenic corn events uses hybrid progeny of the transgenic event over multiple locations with plants grown under optimal production management practices, and maximum pest control. A useful target for improved yield is a 5% to 10% increase in yield as compared to yield produced by plants grown from seed for a control plant. Selection methods may be applied in multiple and diverse geographic locations, for example up to 16 or more locations, over one or more plating seasons, for example at least two planting seasons to statistically distinguish yield improvement from natural environmental effects. It is to plant multiple transgenic plants, positive and negative control plants, and pollinator plants in standard plots, for example 2 row plots, 20 feet long by 5 feet wide with 30 inches distance between rows and a 3 foot alley between ranges. Transgenic events can be grouped by recombinant DNA constructs with groups randomly placed in the field. A pollinator plot of a high quality corn line is planted for every two plots to allow open pollination when using male sterile transgenic events. A useful planting density is about 30,000 plants/acre. High planting density is greater than 30,000 plants/acre, preferably about 40,000 plants/acre, more preferably about 42,000 plants/acre, most preferably about 45,000 plants/acre. Surrogate indicators for yield improvement include source capacity (biomass), source output (sucrose and photosynthesis), sink components (kernel size, ear size, starch in the seed), development (light response, height, density tolerance), maturity, early flowering trait and physiological responses to high density planting, for example at 45,000 plants per acre, for example as illustrated in Table 10 and 11.

TABLE 8

| Timing | Evaluation | Description | comments |
|---|---|---|---|
| V2-3 | Early stand | Can be taken any time after | |
| | | germination and prior to | |
| | | removal of any plants. | |
| Pollen shed | GDU to 50% shed | GDU to 50% plants shedding | |
| | | 50% tassel. | |
| Silking | GDU to 50% silk | GDU to 50% plants showing | |
| | | silks. | |
| Maturity | Plant height | Height from soil surface to | 10 plants per plot - Yield |
| | | flag leaf attachment (inches). | team assistance |
| Maturity | Ear height | Height from soil surface to | 10 plants per plot - Yield |
| | | primary ear attachment node. | team assistance |
| Maturity | Leaves above ear | visual scores: erect, size, | |
| | | rolling | |
| Maturity | Tassel size | Visual scores +/− vs. WT | |
| Pre-Harvest | Final Stand | Final stand count prior to | |
| | | harvest, exclude tillers | |
| Pre-Harvest | Stalk lodging | No. of stalks broken below | |
| | | the primary ear attachment. | |
| | | Exclude leaning tillers | |
| Pre-Harvest | Root lodging | No. of stalks leaning >45° | |
| | | angle from perpendicular. | |
| Pre-Harvest | Stay green | After physiological maturity | |
| | | and when differences among | |
| | | genotypes are evident: Scale | |
| | | 1 (90-100% tissue green) - 9 | |
| | | (0-19% tissue green). | |
| Harvest | Grain Yield | Grain yield/plot (Shell | |
| | | weight) | |

TABLE 9

| Timing | Evaluation | Description |
|---|---|---|
| V8-V12 | Chlorophyll | |
| V12-VT | Ear leaf area | |
| V15-15DAP | Chl fluorescence | |
| V15-15DAP | CER | |
| 15-25 DAP | Carbohydrates | sucrose, starch |
| Pre-Harvest | 1st internode diameter | |
| Pre-Harvest | Base 3 internode diameter | |
| Pre-Harvest | Ear internode diameter | |
| Maturity | Ear traits | diameter, length, kernel |
| | | number, kernel weight |

[0098] Electron transport rates (ETR) and CO2 exchange rates (CER): ETR and CER are measured with Li6400LCF (Licor, Lincoln, Nebr.) around V9-R1 stages. Leaf chlorophyll fluorescence is a quick way to monitor the source activity and is reported to be highly correlated with CO₂ assimilation under varies conditions (Photosyn Research, 37: 89-102). The youngest fully expanded leaf or 2 leaves above the ear leaf is measured with actinic light 1500 (with 10% blue light) micromol m⁻²s⁻¹, 28° C., CO₂ levels 450 ppm. Ten plants are measured in each event. There were 2 readings for each plant.

[0099] A hand-held chlorophyll meter SPAD-502 (Minolta—Japan) is used to measure the total chlorophyll level on live transgenic plants and the wild type counterparts a. Three trifoliates from each plant are analyzed, and each trifoliate were analyzed three times. Then 9 data points are averaged to obtain the chlorophyll level. The number of analyzed plants of each genotype ranges from 5 to 8.

[0100] When selecting for yield improvement a useful statistical measurement approach comprises three components, i.e. modeling spatial autocorrelation of the test field separately for each location, adjusting traits of recombinant DNA events for spatial dependence for each location, and conducting an across location analysis. The first step in modeling spatial autocorrelation is estimating the covariance parameters of the semivariogram. A spherical covariance model is assumed to model the spatial autocorrelation. Because of the size and nature of the trial, it is likely that the spatial autocorrelation may change. Therefore, anisotropy is also assumed along with spherical covariance structure. The following set of equations describes the statistical form of the anisotropic spherical covariance model.

$$C ( h ; θ ) = vI ( h = 0 ) + {σ}^{2} ( 1 - \frac{3}{2} h + \frac{1}{2} {h}^{3} ) I ( h < 1 ) ,$$

where
[0101] I(•) is the indicator function, h=\sqrt{\dot{x}²+\dot{y}²}, and
[0102] \dot{x}=[cos(ρπ/180)(x₁−x₂)−sin(ρπ/180)(y₁−y₂)]/ωₓ
[0103] \dot{y}=[sin(ρπ/180)(x₁−x₂)+cos(ρπ/180)(y₁−y₂)]/ω_{y}
   where s₁=(x₁, y₁) are the spatial coordinates of one location and s₂=(x₂, y₂) are the spatial coordinates of the second location. There are 5 covariance parameters, θ=(ν,σ²,ρ,ωₙ,ωⱼ), where ν is the nugget effect, σ² is the partial sill, ρ is a rotation in degrees clockwise from north, ωₙ is a scaling parameter for the minor axis and ωⱼ is a scaling parameter for the major axis of an anisotropical ellipse of equal covariance. The five covariance parameters that defines the spatial trend will then be estimated by using data from heavily replicated pollinator plots via restricted maximum likelihood approach. In a multi-location field trial, spatial trend are modeled separately for each location.

[0104] After obtaining the variance parameters of the model, a variance-covariance structure is generated for the data set to be analyzed. This variance-covariance structure contains spatial information required to adjust yield data for spatial dependence. In this case, a nested model that best represents the treatment and experimental design of the study is used along with the variance-covariance structure to adjust the yield data. During this process the nursery or the seed batch effects can also be modeled and estimated to adjust the yields for any yield parity caused by seed batch differences. After spatially adjusted data from different locations are generated, all adjusted data is combined and analyzed assuming locations as replications. In this analysis, intra and inter-location variances are combined to estimate the standard error of yield from transgenic plants and control plants. Relative mean comparisons are used to indicate statistically significant yield improvements.

### C. Selection for Enhanced Water Use Efficiency (WUE)

[0105] Described in this example is a high-throughput method for greenhouse selection of transgenic corn plants to wild type corn plants (tested as inbreds or hybrids) for water use efficiency. This selection process imposes 3 drought/re-water cycles on plants over a total period of 15 days after an initial stress free growth period of 11 days. Each cycle consists of 5 days, with no water being applied for the first four days and a water quenching on the 5th day of the cycle. The primary phenotypes analyzed by the selection method are the changes in plant growth rate as determined by height and biomass during a vegetative drought treatment. The hydration status of the shoot tissues following the drought is also measured. The plant height are measured at three time points. The first is taken just prior to the onset drought when the plant is 11 days old, which is the shoot initial height (SIH). The plant height is also measured halfway throughout the drought/re-water regimen, on day 18 after planting, to give rise to the shoot mid-drought height (SMH). Upon the completion of the final drought cycle on day 26 after planting, the shoot portion of the plant is harvested and measured for a final height, which is the shoot wilt height (SWH) and also measured for shoot wilted biomass (SWM). The shoot is placed in water at 40 degree Celsius in the dark. Three days later, the shoot is weighted to give rise to the shoot turgid weight (STM). After drying in an oven for four days, the shoots are weighted for shoot dry biomass (SDM). The shoot average height (SAH) is the mean plant height across the 3 height measurements. The procedure described above may be adjusted for +/−˜one day for each step given the situation.

[0106] To correct for slight differences between plants, a size corrected growth value is derived from SIH and SWH. This is the Relative Growth Rate (RGR). Relative Growth Rate (RGR) is calculated for each shoot using the formula [RGR %=(SWH−SIH)/((SWH+SIH)/2)*100]. Relative water content (RWC) is a measurement of how much (%) of the plant was water at harvest. Water Content (RWC) is calculated for each shoot using the formula [RWC %=(SWM−SDM)/(STM−SDM)*100]. Fully watered corn plants of this age run around 98% RWC.

### D. Selection for Growth Under Cold Stress

[0107] (1) Cold germination assay—Three sets of seeds are used for the assay. The first set consists of positive transgenic events (F1 hybrid) where the genes of the present invention are expressed in the seed. The second seed set is nontransgenic, wild-type negative control made from the same genotype as the transgenic events. The third set consisted of two cold tolerant and one cold sensitive commercial check lines of corn. All seeds are treated with a fungicide “Captan” (MAESTRO® 80DF Fungicide, Arvesta Corporation, San Francisco, Calif., USA). 0.43 mL Captan is applied per 45 g of corn seeds by mixing it well and drying the fungicide prior to the experiment.

[0108] Corn kernels are placed embryo side down on blotter paper within an individual cell (8.9×8.9 cm) of a germination tray (54×36 cm). Ten seeds from an event are placed into one cell of the germination tray. Each tray can hold 21 transgenic events and 3 replicates of wildtype (LH244SDms+LH59), which is randomized in a complete block design. For every event there are five replications (five trays). The trays are placed at 9.7 C for 24 days (no light) in a Convrion growth chamber (Conviron Model PGV36, Controlled Environments, Winnipeg, Canada). Two hundred and fifty milliliters of deionized water are added to each germination tray. Germination counts are taken 10th, 11th, 12th, 13th, 14th, 17th, 19th, 21st, and 24th day after start date of the experiment. Seeds are considered germinated if the emerged radicle size is 1 cm. From the germination counts germination index is calculated.

[0109] The germination index is calculated as per:

Germination index=(Σ([T+1−nᵢ]*[Pᵢ−Pᵢ₋₁]))/T

[0110] Where T is the total number of days for which the germination assay is performed. The number of days after planting is defined by n. “i” indicated the number of times the germination had been counted, including the current day. P is the percentage of seeds germinated during any given rating. Statistical differences are calculated between transgenic events and wild type control. After statistical analysis, the events that show a statistical significance at the p level of less than 0.1 relative to wild-type controls will advance to a secondary cold selection. The secondary cold screen is conducted in the same manner of the primary selection only increasing the number of repetitions to ten. Statistical analysis of the data from the secondary selection is conducted to identify the events that show a statistical significance at the p level of less than 0.05 relative to wild-type controls.

[0111] (2) Cold Shock assay—The experimental set-up for the cold shock assay is the same as described in the above cold germination assay except seeds were grown in potted media for the cold shock assay.

[0112] The desired numbers of 2.5″ square plastic pots are placed on flats (n=32, 4×8). Pots were filled with Metro Mix 200 soil-less media containing 19:6:12 fertilizer (6 lbs/cubic yard) (Metro Mix, Pots and Flat are obtained from Hummert International, Earth City, Mo.). After planting seeds, pots are placed in a growth chamber set at 23° C., relative humidity of 65% with 12 hour day and night photoperiod (300 uE/m2-min). Planted seeds are watered for 20 minute every other day by sub-irrigation and flats were rotated every third day in a growth chamber for growing corn seedlings.

[0113] On the 10^{th} day after planting the transgenic positive and wild-type negative (WT) plants are positioned in flats in an alternating pattern. Chlorophyll fluorescence of plants is measured on the 10^{th} day during the dark period of growth by using a PAM-2000 portable fluorometer as per the manufacturer's instructions (Walz, Germany). After chlorophyll measurements, leaf samples from each event are collected for confirming the expression of genes of the present invention. For expression analysis six V1 leaf tips from each selection are randomly harvested. The flats are moved to a growth chamber set at 5° C. All other conditions such as humidity, day/night cycle and light intensity are held constant in the growth chamber. The flats are sub-irrigated every day after transfer to the cold temperature. On the 4^{th} day chlorophyll fluorescence is measured. Plants are transferred to normal growth conditions after six days of cold shock treatment and allowed to recover for the next three days. During this recovery period the length of the V3 leaf is measured on the 1′ and 3^{rd} days. After two days of recovery V2 leaf damage is determined visually by estimating percent of green V2 leaf.

[0114] Statistical differences in V3 leaf growth, V2 leaf necrosis and fluorescence during pre-shock and cold shock can be used for estimation of cold shock damage on corn plants.

[0115] (3) Early seedling growth assay—Three sets of seeds are used for the experiment. The first set consists of positive transgenic events (F1 hybrid) where the genes of the present invention are expressed in the seed. The second seed set is nontransgenic, wild-type negative control made from the same genotype as the transgenic events. The third seed set consists of two cold tolerant and two cold sensitive commercial check lines of corn. All seeds are treated with a fungicide “Captan”, (3a,4,7,a-tetrahydro-2-[(trichloromethly)thio]-1H-isoindole-1,3(2H)-dione, Drex Chemical Co. Memphis, Tenn.). Captan (0.43 mL) was applied per 45 g of corn seeds by mixing it well and drying the fungicide prior to the experiment.

[0116] Seeds are grown in germination paper for the early seedling growth assay. Three 12″×18″ pieces of germination paper (Anchor Paper #SD7606) are used for each entry in the test (three repetitions per transgenic event). The papers are wetted in a solution of 0.5% KNO₃ and 0.1% Thyram.

[0117] For each paper fifteen seeds are placed on the line evenly spaced down the length of the paper. The fifteen seeds are positioned on the paper such that the radical would grow downward, for example longer distance to the paper's edge. The wet paper is rolled up starting from one of the short ends. The paper is rolled evenly and tight enough to hold the seeds in place. The roll is secured into place with two large paper clips, one at the top and one at the bottom. The rolls are incubated in a growth chamber at 23° C. for three days in a randomized complete block design within an appropriate container. The chamber is set for 65% humidity with no light cycle. For the cold stress treatment the rolls are then incubated in a growth chamber at 12° C. for twelve days. The chamber is set for 65% humidity with no light cycle.

[0118] After the cold treatment the germination papers are unrolled and the seeds that did not germinate are discarded. The lengths of the radicle and coleoptile for each seed are measured through an automated imaging program that automatically collects and processes the images. The imaging program automatically measures the shoot length, root length, and whole seedling length of every individual seedling and then calculates the average of each roll.

[0119] After statistical analysis, the events that show a statistical significance at the p level of less than 0.1 relative to wild-type controls will advance to a secondary cold selection. The secondary cold selection is conducted in the same manner of the primary selection only increasing the number of repetitions to five. Statistical analysis of the data from the secondary selection is conducted to identify the events that show a statistical significance at the p level of less than 0.05 relative to wild-type controls.

### 4. Cold Field Efficacy Trial

[0120] This example sets forth a cold field efficacy trial to identify gene constructs that confer enhanced cold vigor at germination and early seedling growth under early spring planting field conditions in conventional-till and simulated no-till environments. Seeds are planted into the ground around two weeks before local farmers are beginning to plant corn so that a significant cold stress is exerted onto the crop, named as cold treatment. Seeds also are planted under local optimal planting conditions such that the crop has little or no exposure to cold condition, named as normal treatment. The cold field efficacy trials are carried out in five locations, including Glyndon Minn., Mason Mich., Monmouth Ill., Dayton Iowa, Mystic Conn. At each location, seeds are planted under both cold and normal conditions with 3 repetitions per treatment, 20 kernels per row and single row per plot. Seeds are planted 1.5 to 2 inch deep into soil to avoid muddy conditions. Two temperature monitors are set up at each location to monitor both air and soil temperature daily.

[0121] Seed emergence is defined as the point when the growing shoot breaks the soil surface. The number of emerged seedling in each plot is counted everyday from the day the earliest plot begins to emerge until no significant changes in emergence occur. In addition, for each planting date, the latest date when emergence is 0 in all plots is also recorded. Seedling vigor is also rated at V3-V4 stage before the average of corn plant height reaches 10 inches, with 1=excellent early growth, 5=Average growth and 9=poor growth. Days to 50% emergence, maximum percent emergence and seedling vigor are calculated using SAS software for the data within each location or across all locations.

E. Screens for Transgenic Plant Seeds with Increased Protein and/or Oil Levels

[0122] This example sets forth a high-throughput selection for identifying plant seeds with improvement in seed composition using the Infratec 1200 series Grain Analyzer, which is a near-infrared transmittance spectrometer used to determine the composition of a bulk seed sample. Near infrared analysis is a non-destructive, high-throughput method that can analyze multiple traits in a single sample scan. An NIR calibration for the analytes of interest is used to predict the values of an unknown sample. The NIR spectrum is obtained for the sample and compared to the calibration using a complex chemometric software package that provides a predicted values as well as information on how well the sample fits in the calibration.

[0123] Infratec Model 1221, 1225, or 1227 with transport module by Foss North America is used with cuvette, item # 1000-4033, Foss North America or for small samples with small cell cuvette, Foss standard cuvette modified by Leon Girard Co. Corn and soy check samples of varying composition maintained in check cell cuvettes are supplied by Leon Girard Co. NIT collection software is provided by Maximum Consulting Inc. Software. Calculations are performed automatically by the software. Seed samples are received in packets or containers with barcode labels from the customer. The seed is poured into the cuvettes and analyzed as received.

TABLE 10

| | |
|---|---|
| Typical sample(s): | Whole grain corn and soybean seeds |
| Analytical time to run method: | Less than 0.75 min per sample |
| Total elapsed time per run: | 1.5 minute per sample |
| Typical and minimum sample | Corn typical: 50 cc; minimum 30 cc |
| size: | Soybean typical: 50 cc; minimum 5 cc |
| Typical analytical range: | Determined in part by the specific |
| | calibration. |
| | Corn - moisture 5-15%, oil 5-20%, |
| | protein 5-30%, starch 50-75%, and |
| | density 1.0-1.3%. |
| | Soybean - moisture 5-15%, oil 15-25%, |
| | and protein 35-50%. |

### Example 6

### Consensus Sequence

[0124] This example illustrates the identification of consensus amino acid sequence for the proteins and homologs encoded by DNA that is used to prepare the transgenic seed and plants of this invention having enhanced agronomic traits.

[0125] ClustalW program was selected for multiple sequence alignments of the amino acid sequence of SEQ ID NO: 1205 and its 12 homologs. Three major factors affecting the sequence alignments dramatically are (1) protein weight matrices; (2) gap open penalty; (3) gap extension penalty. Protein weight matrices available for ClustalW program include Blosum, Pam and Gonnet series. Those parameters with gap open penalty and gap extension penalty were extensively tested. On the basis of the test results, Blosum weight matrix, gap open penalty of 10 and gap extension penalty of 1 were chosen for multiple sequence alignment. FIG. 2 shows the sequences of SEQ ID NO: 1205, its homologs and the consensus sequence (SEQ ID NO: 52803) at the end. The symbols for consensus sequence are (1) uppercase letters for 100% identity in all positions of multiple sequence alignment output; (2) lowercase letters for >=70% identity; symbol; (3) “X” indicated <70% identity; (4) dashes “-” meaning that gaps were in >=70% sequences.

[0126] The consensus amino acid sequence can be used to identify DNA corresponding to the full scope of this invention that is useful in providing transgenic plants, for example corn and soybean plants with enhanced agronomic traits, for example improved nitrogen use efficiency, improved yield, improved water use efficiency and/or improved growth under cold stress, due to the expression in the plants of DNA encoding a protein with amino acid sequence identical to the consensus amino acid sequence.

### Example 7

### Identification of Amino Acid Domain by Pfam Analysis

[0127] The amino acid sequence of the expressed proteins that were shown to be associated with an enhanced trait were analyzed for Pfam protein family against the current Pfam collection of multiple sequence alignments and hidden Markov models using the HMMER software in the appended computer listing. The Pfam protein families for the proteins of SEQ ID NO: 742 through 1482 are shown in Table 11. The Hidden Markov model databases for the identified patent families are also in the appended computer listing allowing identification of other homologous proteins and their cognate encoding DNA to enable the full breadth of the invention for a person of ordinary skill in the art. Certain proteins are identified by a single Pfam domain and others by multiple Pfam domains. For instance, the protein with amino acids of SEQ ID NO: 817 is characterized by two Pfam domains, i.e. GTP_EFTU, GTP_EFTU_D2 and GTP_EFTU_D3.

TABLE 11

| PEP | | | | | | | |
|---|---|---|---|---|---|---|---|
| SEQ | NUC | | | | | | |
| ID | SEQ | | | | | | |
| NO | ID NO | GENE ID | Pfam domain name | begin | stop | score | E-value |
| 816 | 75 | PHE0000035_61 | bZIP_1 | 15 | 79 | 41.9 | 2.00E−09 |
| 816 | 75 | PHE0000035_61 | bZIP_2 | 15 | 69 | 42.8 | 1.10E−09 |
| 817 | 76 | PHE0000036_62 | GTP_EFTU | 5 | 227 | 359.5 | 4.70E−105 |
| 817 | 76 | PHE0000036_62 | GTP_EFTU_D2 | 248 | 315 | 91.9 | 1.70E−24 |
| 817 | 76 | PHE0000036_62 | GTP_EFTU_D3 | 322 | 430 | 207.6 | 2.60E−59 |
| 818 | 77 | PHE0000130_220 | Jacalin | 185 | 318 | 84.5 | 3.00E−22 |
| 1177 | 436 | PHE0000132_222 | PCI | 63 | 159 | 44.2 | 4.00E−10 |
| 819 | 78 | PHE0000134_224 | LEA_5 | 1 | 113 | 151.2 | 2.40E−42 |
| 820 | 79 | PHE0000135_225 | PP2C | 39 | 281 | 226.2 | 6.60E−65 |
| 821 | 80 | PHE0000136_226 | Hist_deacetyl | 31 | 344 | 579.9 | 2.20E−171 |
| 822 | 81 | PHE0000139_229 | peroxidase | 19 | 227 | 239.9 | 4.80E−69 |
| 823 | 82 | PHE0000141_231 | Thioredoxin | 184 | 295 | −0.9 | 2.00E−05 |
| 824 | 83 | PHE0000142_232 | Ras | 11 | 179 | 280.2 | 3.60E−81 |
| 825 | 84 | PHE0000146_236 | Ras | 13 | 174 | 335 | 1.10E−97 |
| 826 | 85 | PHE0000148_238 | Pkinase | 12 | 267 | 323.2 | 3.90E−94 |
| 826 | 85 | PHE0000148_238 | Pkinase_Tyr | 12 | 265 | 70.9 | 3.70E−18 |
| 826 | 85 | PHE0000148_238 | NAF | 310 | 369 | 116.1 | 9.20E−32 |
| 827 | 86 | PHE0000149_239 | AP2 | 29 | 92 | 128.5 | 1.70E−35 |
| 828 | 87 | PHE0000150_240 | Lectin_legB | 23 | 212 | 8 | 2.60E−11 |
| 828 | 87 | PHE0000150_240 | Lectin_legA | 221 | 265 | 37.6 | 3.80E−08 |
| 828 | 87 | PHE0000150_240 | Pkinase | 344 | 496 | −11.1 | 2.00E−07 |
| 829 | 88 | PHE0000189_282 | HSP20 | 49 | 152 | 169.6 | 7.30E−48 |
| 830 | 89 | PHE0000200_293 | PP2C | 22 | 317 | 296.5 | 4.30E−86 |
| 831 | 90 | PHE0000211_304 | Pkinase | 30 | 288 | 384.1 | 1.90E−112 |
| 832 | 91 | PHE0000213_306 | Pkinase | 64 | 322 | 348.7 | 8.50E−102 |
| 1178 | 437 | PHE0000285_375 | bZIP_1 | 27 | 91 | 50.9 | 3.80E−12 |
| 1178 | 437 | PHE0000285_375 | bZIP_2 | 27 | 81 | 40.8 | 4.00E−09 |
| 833 | 92 | PHE0000368_459 | bZIP_1 | 21 | 85 | 51.2 | 3.10E−12 |
| 833 | 92 | PHE0000368_459 | bZIP_2 | 21 | 75 | 38.5 | 2.00E−08 |
| 834 | 93 | PHE0000369_460 | Pkinase | 17 | 269 | 375.3 | 8.50E−110 |
| 834 | 93 | PHE0000369_460 | Pkinase_Tyr | 17 | 267 | 78.6 | 1.70E−20 |
| 834 | 93 | PHE0000369_460 | UBA | 291 | 330 | 23.4 | 0.0007 |
| 834 | 93 | PHE0000369_460 | KA1 | 459 | 507 | 89.8 | 7.20E−24 |
| 835 | 94 | PHE0000370_461 | Pkinase | 4 | 260 | 298.7 | 9.60E−87 |
| 1340 | 599 | PHE0000667_770 | Acyltransferase | 174 | 337 | 127.2 | 4.00E−35 |
| 1179 | 438 | PHE0000668_771 | Acyltransferase | 207 | 367 | 167.4 | 3.10E−47 |
| 836 | 95 | PHE0000780_853 | SRF-TF | 9 | 59 | 119.7 | 7.20E−33 |
| 836 | 95 | PHE0000780_853 | K-box | 74 | 173 | 147.6 | 3.00E−41 |
| 837 | 96 | PHE0000782_855 | SRF-TF | 9 | 59 | 113.7 | 4.80E−31 |
| 837 | 96 | PHE0000782_855 | K-box | 73 | 174 | 151 | 2.80E−42 |
| 838 | 97 | PHE0000783_856 | SRF-TF | 9 | 59 | 120.2 | 5.30E−33 |
| 838 | 97 | PHE0000783_856 | K-box | 74 | 174 | 145.6 | 1.20E−40 |
| 1341 | 600 | PHE0000784_857 | K-box | 4 | 103 | 147.6 | 3.00E−41 |
| 839 | 98 | PHE0000785_858 | SRF-TF | 9 | 59 | 119.7 | 7.20E−33 |
| 839 | 98 | PHE0000785_858 | K-box | 74 | 173 | 147.6 | 3.00E−41 |
| 1294 | 553 | PHE0000788_861 | SRF-TF | 9 | 59 | 113.7 | 4.80E−31 |
| 1294 | 553 | PHE0000788_861 | K-box | 73 | 174 | 151 | 2.80E−42 |
| 1295 | 554 | PHE0000789_862 | SRF-TF | 9 | 59 | 113.7 | 4.80E−31 |
| 1180 | 439 | PHE0000790_863 | K-box | 4 | 103 | 150.5 | 4.10E−42 |
| 840 | 99 | PHE0000791_864 | SRF-TF | 9 | 59 | 121 | 2.90E−33 |
| 840 | 99 | PHE0000791_864 | K-box | 74 | 173 | 150.5 | 4.10E−42 |
| 841 | 100 | PHE0000792_865 | SRF-TF | 9 | 59 | 121 | 2.90E−33 |
| 842 | 101 | PHE0000794_867 | SRF-TF | 9 | 59 | 120.2 | 5.30E−33 |
| 842 | 101 | PHE0000794_867 | K-box | 74 | 174 | 145.6 | 1.20E−40 |
| 1296 | 555 | PHE0000795_868 | SRF-TF | 9 | 59 | 120.2 | 5.30E−33 |
| 843 | 102 | PHE0000821_896 | DUF6 | 16 | 153 | 32 | 1.90E−06 |
| 843 | 102 | PHE0000821_896 | DUF6 | 190 | 319 | 45.4 | 1.80E−10 |
| 1342 | 601 | PHE0000880_963 | HAMP | 193 | 262 | 64.2 | 3.90E−16 |
| 1342 | 601 | PHE0000880_963 | PAS | 276 | 388 | 36.7 | 7.30E−08 |
| 1342 | 601 | PHE0000880_963 | HisKA | 397 | 465 | 94.4 | 3.00E−25 |
| 1342 | 601 | PHE0000880_963 | HATPase_c | 510 | 629 | 143.2 | 6.10E−40 |
| 1297 | 556 | PHE0000881_964 | HAMP | 200 | 269 | 65.7 | 1.30E−16 |
| 1297 | 556 | PHE0000881_964 | PAS | 283 | 413 | 29.7 | 9.10E−06 |
| 1297 | 556 | PHE0000881_964 | HisKA | 422 | 490 | 95.9 | 1.00E−25 |
| 1297 | 556 | PHE0000881_964 | HATPase_c | 535 | 655 | 138.8 | 1.40E−38 |
| 1343 | 602 | PHE0000883_966 | Response_reg | 276 | 397 | 106.2 | 8.60E−29 |
| 844 | 103 | PHE0001051_1141 | zf-C2H2 | 54 | 76 | 25.1 | 0.00022 |
| 844 | 103 | PHE0001051_1141 | zf-C2H2 | 130 | 152 | 19.2 | 0.014 |
| 845 | 104 | PHE0001053_4292 | NAM | 24 | 155 | 282.4 | 7.60E−82 |
| 846 | 105 | PHE0001054_1144 | KH_1 | 133 | 220 | 13.4 | 0.017 |
| 847 | 106 | PHE0001055_1145 | CBS | 140 | 285 | 37.6 | 3.90E−08 |
| 847 | 106 | PHE0001055_1145 | CBS | 316 | 447 | 48 | 2.80E−11 |
| 849 | 108 | PHE0001057_1147 | Gamma-thionin | 32 | 80 | 77.6 | 3.50E−20 |
| 1344 | 603 | PHE0001063_1153 | CBS | 35 | 175 | 29.2 | 1.30E−05 |
| 1344 | 603 | PHE0001063_1153 | CBS | 193 | 318 | 80.8 | 3.80E−21 |
| 850 | 109 | PHE0001064_1154 | AMPKBI | 304 | 416 | 208.7 | 1.20E−59 |
| 1345 | 604 | PHE0001065_1155 | AMPKBI | 298 | 412 | 210.9 | 2.50E−60 |
| 804 | 63 | PHE0001066_1156 | AMPKBI | 734 | 852 | 209.3 | 7.70E−60 |
| 1346 | 605 | PHE0001069_1159 | bZIP_2 | 78 | 135 | 40.6 | 4.90E−09 |
| 1346 | 605 | PHE0001069_1159 | bZIP_1 | 82 | 142 | 47.6 | 3.70E−11 |
| 851 | 110 | PHE0001071_1161 | AP2 | 68 | 131 | 149.2 | 9.50E−42 |
| 852 | 111 | PHE0001073_1163 | Myb_DNA-binding | 14 | 61 | 44.4 | 3.30E−10 |
| 852 | 111 | PHE0001073_1163 | Myb_DNA-binding | 67 | 112 | 55.5 | 1.60E−13 |
| 1181 | 440 | PHE0001074_1164 | NAM | 19 | 146 | 255.1 | 1.30E−73 |
| 853 | 112 | PHE0001075_1165 | Myb_DNA-binding | 22 | 69 | 47.5 | 4.10E−11 |
| 853 | 112 | PHE0001075_1165 | Myb_DNA-binding | 75 | 120 | 51 | 3.50E−12 |
| 1347 | 606 | PHE0001076_1166 | NAM | 9 | 138 | 293.9 | 2.70E−85 |
| 854 | 113 | PHE0001077_1167 | Myb_DNA-binding | 227 | 278 | 44.3 | 3.60E−10 |
| 1182 | 441 | PHE0001078_1168 | NAM | 8 | 137 | 304.2 | 2.10E−88 |
| 1183 | 442 | PHE0001079_1169 | NAM | 14 | 142 | 309 | 7.60E−90 |
| 1348 | 607 | PHE0001080_1170 | AP2 | 135 | 198 | 137.8 | 2.50E−38 |
| 1184 | 443 | PHE0001082_1172 | NAM | 13 | 143 | 299 | 7.80E−87 |
| 855 | 114 | PHE0001083_1173 | AP2 | 23 | 86 | 147.7 | 2.70E−41 |
| 1185 | 444 | PHE0001085_1175 | HLH | 381 | 430 | 50.8 | 4.10E−12 |
| 1349 | 608 | PHE0001087_1177 | Homeobox | 73 | 127 | 74.6 | 2.90E−19 |
| 1349 | 608 | PHE0001087_1177 | HALZ | 128 | 172 | 81.3 | 2.70E−21 |
| 742 | 1 | PHE0001089_1179 | NAM | 14 | 140 | 289.7 | 4.90E−84 |
| 1350 | 609 | PHE0001094_1184 | zf-C2H2 | 106 | 128 | 19.6 | 0.0097 |
| 856 | 115 | PHE0001095_1185 | bZIP_1 | 23 | 87 | 36.4 | 8.90E−08 |
| 856 | 115 | PHE0001095_1185 | bZIP_2 | 23 | 77 | 28.9 | 1.60E−05 |
| 857 | 116 | PHE0001096_1186 | MFMR | 1 | 201 | 374.1 | 1.90E−109 |
| 857 | 116 | PHE0001096_1186 | bZIP_1 | 303 | 367 | 91.7 | 2.00E−24 |
| 857 | 116 | PHE0001096_1186 | bZIP_2 | 303 | 357 | 31 | 3.80E−06 |
| 858 | 117 | PHE0001097_1187 | bZIP_1 | 42 | 95 | 22.7 | 0.00044 |
| 858 | 117 | PHE0001097_1187 | bZIP_2 | 42 | 92 | 19.3 | 0.0073 |
| 859 | 118 | PHE0001098_1188 | GATA | 160 | 195 | 65.5 | 1.50E−16 |
| 860 | 119 | PHE0001099_1189 | MFMR | 1 | 182 | 333.5 | 3.20E−97 |
| 860 | 119 | PHE0001099_1189 | bZIP_1 | 257 | 321 | 95.2 | 1.80E−25 |
| 860 | 119 | PHE0001099_1189 | bZIP_2 | 257 | 311 | 38.9 | 1.60E−08 |
| 1351 | 610 | PHE0001100_1190 | bZIP_1 | 187 | 245 | 46 | 1.20E−10 |
| 1351 | 610 | PHE0001100_1190 | bZIP_2 | 188 | 241 | 44.6 | 2.90E−10 |
| 861 | 120 | PHE0001101_1191 | GATA | 181 | 216 | 65.5 | 1.50E−16 |
| 862 | 121 | PHE0001107_1197 | Myb_DNA-binding | 24 | 69 | 53.4 | 6.60E−13 |
| 863 | 122 | PHE0001108_1198 | Aminotran_1_2 | 69 | 470 | 61.3 | 2.90E−15 |
| 864 | 123 | PHE0001109_1199 | Aminotran_1_2 | 84 | 469 | 51.8 | 2.00E−12 |
| 865 | 124 | PHE0001110_1200 | Aminotran_1_2 | 61 | 462 | 47.4 | 4.40E−11 |
| 1352 | 611 | PHE0001112_1202 | Aminotran_1_2 | 98 | 491 | 46.2 | 9.80E−11 |
| 1186 | 445 | PHE0001113_1203 | Aminotran_5 | 20 | 363 | 28.9 | 2.40E−09 |
| 866 | 125 | PHE0001115_1205 | Aminotran_1_2 | 92 | 459 | 285.3 | 1.00E−82 |
| 866 | 125 | PHE0001115_1205 | Cys_Met_Meta_PP | 104 | 339 | −275.1 | 0.0034 |
| 867 | 126 | PHE0001120_1210 | Histone | 62 | 137 | 48.9 | 1.50E−11 |
| 867 | 126 | PHE0001120_1210 | CBFD_NFYB_HMF | 68 | 132 | 88.1 | 2.40E−23 |
| 868 | 127 | PHE0001123_1213 | Histone | 92 | 167 | 50.1 | 6.50E−12 |
| 868 | 127 | PHE0001123_1213 | CBFD_NFYB_HMF | 98 | 162 | 89.4 | 1.00E−23 |
| 869 | 128 | PHE0001125_1215 | Histone | 94 | 169 | 51.5 | 2.50E−12 |
| 869 | 128 | PHE0001125_1215 | CBFD_NFYB_HMF | 100 | 164 | 92.7 | 1.00E−24 |
| 870 | 129 | PHE0001126_1216 | Myb_DNA-binding | 123 | 170 | 44.8 | 2.50E−10 |
| 871 | 130 | PHE0001127_1217 | BURP | 299 | 519 | 131.7 | 1.80E−36 |
| 872 | 131 | PHE0001128_1218 | Homeobox | 48 | 103 | 67.3 | 4.40E−17 |
| 872 | 131 | PHE0001128_1218 | HALZ | 104 | 148 | 41.8 | 2.10E−09 |
| 873 | 132 | PHE0001130_1220 | IlvN | 50 | 233 | 112.8 | 9.00E−31 |
| 873 | 132 | PHE0001130_1220 | IlvC | 237 | 522 | 375.3 | 8.50E−110 |
| 1353 | 612 | PHE0001131_1221 | IlvN | 74 | 244 | 189.2 | 8.90E−54 |
| 1353 | 612 | PHE0001131_1221 | IlvC | 248 | 395 | 236.5 | 5.20E−68 |
| 874 | 133 | PHE0001132_1222 | Aminotran_1_2 | 33 | 401 | 489.3 | 4.00E−144 |
| 743 | 2 | PHE0001133_1223 | Aminotran_1_2 | 44 | 419 | 339.8 | 4.20E−99 |
| 744 | 3 | PHE0001134_1224 | Aminotran_1_2 | 44 | 441 | 408.3 | 9.70E−120 |
| 745 | 4 | PHE0001135_1225 | Aminotran_1_2 | 26 | 392 | 492.5 | 4.40E−145 |
| 1187 | 446 | PHE0001136_1226 | Aminotran_1_2 | 31 | 399 | 484.3 | 1.30E−142 |
| 875 | 134 | PHE0001138_1228 | SapB_1 | 59 | 98 | 21.7 | 0.0023 |
| 875 | 134 | PHE0001138_1228 | SapB_2 | 100 | 133 | 23 | 0.00093 |
| 875 | 134 | PHE0001138_1228 | SapB_1 | 145 | 183 | 27.3 | 4.90E−05 |
| 875 | 134 | PHE0001138_1228 | SapB_2 | 186 | 220 | 29.4 | 1.10E−05 |
| 1188 | 447 | PHE0001142_1232 | Methyltransf_3 | 66 | 278 | 415.7 | 5.90E−122 |
| 1354 | 613 | PHE0001143_1233 | HMA | 10 | 70 | 43.3 | 7.20E−10 |
| 876 | 135 | PHE0001145_1235 | F-box | 51 | 104 | 33.3 | 7.30E−07 |
| 877 | 136 | PHE0001146_1236 | Pkinase | 67 | 321 | 269.3 | 6.90E−78 |
| 878 | 137 | PHE0001147_1237 | DUF641 | 22 | 159 | 217.4 | 2.90E−62 |
| 879 | 138 | PHE0001148_1238 | Myb_DNA-binding | 221 | 272 | 48 | 2.80E−11 |
| 1355 | 614 | PHE0001149_1239 | B12D | 2 | 87 | 225.8 | 8.70E−65 |
| 880 | 139 | PHE0001151_1241 | BURP | 355 | 575 | 127.6 | 3.00E−35 |
| 881 | 140 | PHE0001152_1242 | Histone | 58 | 134 | 151.1 | 2.60E−42 |
| 882 | 141 | PHE0001153_1243 | Pkinase | 34 | 292 | 329.8 | 4.30E−96 |
| 883 | 142 | PHE0001154_1244 | Histone | 55 | 127 | 104.9 | 2.10E−28 |
| 885 | 144 | PHE0001157_1247 | DUF760 | 6 | 416 | 592.5 | 3.50E−175 |
| 886 | 145 | PHE0001158_1248 | DUF250 | 243 | 388 | 179.6 | 6.90E−51 |
| 887 | 146 | PHE0001159_1249 | DnaJ | 67 | 134 | 103.9 | 4.20E−28 |
| 888 | 147 | PHE0001167_1257 | YL1 | 11 | 236 | 211.9 | 1.30E−60 |
| 888 | 147 | PHE0001167_1257 | YL1_C | 264 | 293 | 64 | 4.30E−16 |
| 1356 | 615 | PHE0001169_1259 | Chromo | 108 | 158 | 73.2 | 7.20E−19 |
| 889 | 148 | PHE0001171_1261 | Chromo | 62 | 112 | 79.8 | 7.50E−21 |
| 890 | 149 | PHE0001172_1262 | Chromo | 111 | 161 | 73.7 | 5.10E−19 |
| 1357 | 616 | PHE0001176_1266 | Heme_oxygenase | 3 | 205 | 448.6 | 7.40E−132 |
| 1358 | 617 | PHE0001177_1267 | Heme_oxygenase | 3 | 206 | 384.9 | 1.10E−112 |
| 891 | 150 | PHE0001179_1269 | AUX_IAA | 10 | 229 | 299.1 | 7.10E−87 |
| 746 | 5 | PHE0001181_1271 | AUX_IAA | 10 | 228 | 296.6 | 4.10E−86 |
| 1359 | 618 | PHE0001184_1274 | AUX_IAA | 50 | 273 | 324.3 | 1.90E−94 |
| 892 | 151 | PHE0001198_1288 | WRKY | 209 | 267 | 151.2 | 2.40E−42 |
| 892 | 151 | PHE0001198_1288 | WRKY | 381 | 440 | 155.7 | 1.10E−43 |
| 893 | 152 | PHE0001199_1289 | WRKY | 97 | 155 | 144.9 | 1.90E−40 |
| 893 | 152 | PHE0001199_1289 | WRKY | 272 | 331 | 151.5 | 2.00E−42 |
| 894 | 153 | PHE0001208_1298 | AP2 | 119 | 183 | 147.3 | 3.60E−41 |
| 895 | 154 | PHE0001211_1301 | AP2 | 81 | 142 | 117.4 | 3.70E−32 |
| 895 | 154 | PHE0001211_1301 | B3 | 209 | 330 | 110.8 | 3.50E−30 |
| 896 | 155 | PHE0001212_1302 | SAM_2 | 17 | 84 | 65.9 | 1.10E−16 |
| 896 | 155 | PHE0001212_1302 | SAM_1 | 18 | 82 | 36.6 | 7.60E−08 |
| 896 | 155 | PHE0001212_1302 | Pkinase_Tyr | 415 | 710 | 109.7 | 7.70E−30 |
| 896 | 155 | PHE0001212_1302 | Pkinase | 415 | 712 | 292.2 | 8.50E−85 |
| 897 | 156 | PHE0001214_1304 | Pkinase | 400 | 656 | 303.4 | 3.80E−88 |
| 897 | 156 | PHE0001214_1304 | Pkinase_Tyr | 400 | 656 | 147.4 | 3.40E−41 |
| 899 | 158 | PHE0001220_1310 | Pkinase | 40 | 324 | 310.4 | 2.90E−90 |
| 900 | 159 | PHE0001221_1311 | Pkinase | 63 | 347 | 307.5 | 2.10E−89 |
| 901 | 160 | PHE0001225_1315 | Catalase | 18 | 402 | 937.9 | 3.70E−279 |
| 1298 | 557 | PHE0001226_1316 | Catalase | 18 | 401 | 937.7 | 4.30E−279 |
| 747 | 6 | PHE0001227_1317 | Catalase | 27 | 432 | 595.4 | 4.70E−176 |
| 748 | 7 | PHE0001228_1318 | PBD | 336 | 394 | 103.4 | 6.00E−28 |
| 748 | 7 | PHE0001228_1318 | Pkinase | 620 | 871 | 372 | 8.20E−109 |
| 748 | 7 | PHE0001228_1318 | Pkinase_Tyr | 620 | 869 | 109 | 1.30E−29 |
| 902 | 161 | PHE0001238_1328 | Metallothio_2 | 1 | 76 | 138.7 | 1.40E−38 |
| 903 | 162 | PHE0001239_1329 | Pkinase | 67 | 351 | 309.7 | 4.70E−90 |
| 1190 | 449 | PHE0001240_1330 | H_PPase | 9 | 687 | 1072.7 | 0 |
| 904 | 163 | PHE0001241_1331 | YTH | 492 | 582 | 205.8 | 9.10E−59 |
| 905 | 164 | PHE0001242_1332 | Thioredoxin | 31 | 138 | 174.5 | 2.40E−49 |
| 905 | 164 | PHE0001242_1332 | Thioredoxin | 149 | 257 | 187 | 4.20E−53 |
| 905 | 164 | PHE0001242_1332 | ERp29 | 271 | 365 | 172 | 1.30E−48 |
| 1191 | 450 | PHE0001243_1333 | F-box | 53 | 106 | 36.2 | 1.00E−07 |
| 1191 | 450 | PHE0001243_1333 | Tub | 117 | 313 | 182.1 | 1.20E−51 |
| 906 | 165 | PHE0001244_1334 | LIM | 9 | 66 | 54.4 | 3.40E−13 |
| 906 | 165 | PHE0001244_1334 | LIM | 110 | 167 | 66 | 1.10E−16 |
| 907 | 166 | PHE0001245_1335 | W2 | 243 | 319 | 66.1 | 9.70E−17 |
| 908 | 167 | PHE0001246_1337 | zf-C3HC4 | 262 | 302 | 43.2 | 8.10E−10 |
| 749 | 8 | PHE0001247_1338 | Cyclin_N | 67 | 196 | 145.4 | 1.40E−40 |
| 749 | 8 | PHE0001247_1338 | Cyclin_C | 198 | 325 | 52 | 1.80E−12 |
| 1360 | 619 | PHE0001256_1347 | Trypsin | 114 | 309 | 18.9 | 1.80E−05 |
| 1193 | 452 | PHE0001257_1348 | Fer4 | 116 | 139 | 30.6 | 4.90E−06 |
| 1193 | 452 | PHE0001257_1348 | Fer4 | 155 | 178 | 38.5 | 2.10E−08 |
| 910 | 169 | PHE0001258_1349 | Fer4 | 117 | 140 | 28.5 | 1.10E−05 |
| 910 | 169 | PHE0001258_1349 | Fer4 | 156 | 179 | 38.5 | 2.10E−08 |
| 911 | 170 | PHE0001259_1350 | Fer4 | 116 | 139 | 28.6 | 1.00E−05 |
| 911 | 170 | PHE0001259_1350 | Fer4 | 155 | 178 | 38.5 | 2.10E−08 |
| 1362 | 621 | PHE0001265_1356 | efhand | 70 | 98 | 17.9 | 0.034 |
| 1195 | 454 | PHE0001266_1357 | efhand | 77 | 105 | 30.3 | 6.20E−06 |
| 1363 | 622 | PHE0001268_1359 | DUF788 | 1 | 169 | 339.1 | 6.90E−99 |
| 1364 | 623 | PHE0001270_1361 | ERO1 | 64 | 414 | 748.4 | 4.10E−222 |
| 752 | 11 | PHE0001275_1336 | zf-C3HC4 | 257 | 297 | 34.6 | 3.00E−07 |
| 912 | 171 | PHE0001279_1369 | Cystatin | 41 | 129 | 107.9 | 2.60E−29 |
| 913 | 172 | PHE0001280_1370 | Cystatin | 49 | 137 | 80.5 | 4.70E−21 |
| 914 | 173 | PHE0001282_1372 | Chal_sti_synt_C | 342 | 486 | 13.2 | 0.00012 |
| 1196 | 455 | PHE0001283_1373 | ArfGap | 4 | 120 | 173.7 | 4.00E−49 |
| 915 | 174 | PHE0001284_1374 | ArfGap | 4 | 120 | 175.1 | 1.60E−49 |
| 916 | 175 | PHE0001285_1375 | ArfGap | 6 | 122 | 184.5 | 2.30E−52 |
| 1197 | 456 | PHE0001286_1376 | IPK | 17 | 274 | 413.1 | 3.50E−121 |
| 917 | 176 | PHE0001291_1381 | Aa_trans | 27 | 433 | 115.1 | 1.80E−31 |
| 917 | 176 | PHE0001291_1381 | Trp_Tyr_perm | 27 | 368 | −211.7 | 6.50E−05 |
| 918 | 177 | PHE0001292_1382 | Aa_trans | 40 | 446 | 166 | 8.30E−47 |
| 918 | 177 | PHE0001292_1382 | Trp_Tyr_perm | 40 | 443 | −201.1 | 2.20E−05 |
| 919 | 178 | PHE0001297_1387 | DNA_photolyase | 15 | 188 | 237.1 | 3.40E−68 |
| 919 | 178 | PHE0001297_1387 | FAD_binding_7 | 219 | 497 | 502.9 | 3.20E−148 |
| 920 | 179 | PHE0001299_1389 | DNA_photolyase | 5 | 176 | 224 | 2.90E−64 |
| 920 | 179 | PHE0001299_1389 | FAD_binding_7 | 212 | 490 | 464.5 | 1.20E−136 |
| 1198 | 457 | PHE0001301_1391 | Ras | 30 | 192 | 290 | 3.90E−84 |
| 921 | 180 | PHE0001303_1393 | PRA1 | 50 | 203 | 227.8 | 2.20E−65 |
| 1199 | 458 | PHE0001304_1394 | PRA1 | 47 | 197 | 221 | 2.30E−63 |
| 922 | 181 | PHE0001306_1396 | PRA1 | 26 | 177 | 171.5 | 1.90E−48 |
| 1365 | 624 | PHE0001311_1401 | NUDIX | 24 | 160 | 78.9 | 1.50E−20 |
| 923 | 182 | PHE0001312_1402 | NUDIX | 22 | 153 | 62.1 | 1.60E−15 |
| 924 | 183 | PHE0001313_1403 | NUDIX | 19 | 165 | 65 | 2.10E−16 |
| 925 | 184 | PHE0001314_1404 | NUDIX | 19 | 159 | 71.7 | 2.00E−18 |
| 1200 | 459 | PHE0001316_1406 | NUDIX | 20 | 150 | 69.9 | 7.40E−18 |
| 1201 | 460 | PHE0001317_1407 | NUDIX | 19 | 165 | 64.4 | 3.30E−16 |
| 926 | 185 | PHE0001332_1423 | Pkinase | 17 | 272 | 336.5 | 4.00E−98 |
| 926 | 185 | PHE0001332_1423 | NAF | 330 | 389 | 64.3 | 3.50E−16 |
| 927 | 186 | PHE0001333_1424 | Pkinase | 19 | 274 | 341.8 | 1.00E−99 |
| 927 | 186 | PHE0001333_1424 | Pkinase_Tyr | 19 | 274 | 70.1 | 6.30E−18 |
| 927 | 186 | PHE0001333_1424 | NAF | 309 | 369 | 108.9 | 1.30E−29 |
| 928 | 187 | PHE0001334_1425 | Pkinase | 14 | 266 | 382.4 | 6.10E−112 |
| 928 | 187 | PHE0001334_1425 | Pkinase_Tyr | 14 | 264 | 86.3 | 8.10E−23 |
| 928 | 187 | PHE0001334_1425 | UBA | 288 | 327 | 22.3 | 0.0016 |
| 928 | 187 | PHE0001334_1425 | KA1 | 456 | 504 | 101.5 | 2.20E−27 |
| 1300 | 559 | PHE0001335_1426 | Pkinase | 46 | 300 | 359.6 | 4.60E−105 |
| 1300 | 559 | PHE0001335_1426 | NAF | 383 | 440 | 103 | 8.00E−28 |
| 929 | 188 | PHE0001337_1428 | AMPKBI | 190 | 277 | 111.5 | 2.20E−30 |
| 930 | 189 | PHE0001339_1430 | AMPKBI | 194 | 281 | 123.1 | 7.10E−34 |
| 931 | 190 | PHE0001343_1434 | Pkinase | 13 | 268 | 341.6 | 1.20E−99 |
| 931 | 190 | PHE0001343_1434 | NAF | 307 | 367 | 124.7 | 2.30E−34 |
| 932 | 191 | PHE0001346_1437 | Pkinase | 12 | 266 | 351.8 | 1.00E−102 |
| 932 | 191 | PHE0001346_1437 | Pkinase_Tyr | 12 | 264 | 72 | 1.70E−18 |
| 932 | 191 | PHE0001346_1437 | NAF | 313 | 374 | 99.9 | 7.00E−27 |
| 933 | 192 | PHE0001347_1438 | Pkinase | 15 | 269 | 345.1 | 1.00E−100 |
| 933 | 192 | PHE0001347_1438 | Pkinase_Tyr | 15 | 267 | 80.1 | 6.10E−21 |
| 933 | 192 | PHE0001347_1438 | NAF | 319 | 378 | 108.3 | 2.10E−29 |
| 934 | 193 | PHE0001349_1440 | Pkinase | 13 | 268 | 341 | 1.80E−99 |
| 934 | 193 | PHE0001349_1440 | Pkinase_Tyr | 13 | 266 | 74 | 4.30E−19 |
| 934 | 193 | PHE0001349_1440 | NAF | 308 | 369 | 112.8 | 8.60E−31 |
| 935 | 194 | PHE0001350_1441 | Pkinase | 13 | 268 | 334.8 | 1.30E−97 |
| 935 | 194 | PHE0001350_1441 | NAF | 307 | 367 | 132.7 | 8.80E−37 |
| 936 | 195 | PHE0001354_1445 | Pkinase | 21 | 276 | 331.7 | 1.10E−96 |
| 936 | 195 | PHE0001354_1445 | Pkinase_Tyr | 21 | 276 | 65.1 | 8.60E−17 |
| 936 | 195 | PHE0001354_1445 | NAF | 310 | 370 | 94.3 | 3.20E−25 |
| 937 | 196 | PHE0001355_1446 | Pkinase | 17 | 272 | 325.1 | 1.10E−94 |
| 937 | 196 | PHE0001355_1446 | NAF | 300 | 368 | 57.7 | 3.40E−14 |
| 938 | 197 | PHE0001356_1447 | Pkinase | 22 | 283 | 325.8 | 6.90E−95 |
| 938 | 197 | PHE0001356_1447 | NAF | 326 | 385 | 100.6 | 4.10E−27 |
| 939 | 198 | PHE0001357_1448 | Pkinase | 16 | 269 | 302.2 | 8.40E−88 |
| 939 | 198 | PHE0001357_1448 | NAF | 309 | 370 | 98.4 | 1.90E−26 |
| 940 | 199 | PHE0001358_1449 | Pkinase | 14 | 266 | 380.4 | 2.40E−111 |
| 940 | 199 | PHE0001358_1449 | Pkinase_Tyr | 14 | 264 | 84.4 | 3.10E−22 |
| 940 | 199 | PHE0001358_1449 | UBA | 288 | 327 | 22.8 | 0.0011 |
| 940 | 199 | PHE0001358_1449 | KA1 | 454 | 502 | 94.9 | 2.20E−25 |
| 941 | 200 | PHE0001359_1450 | Pkinase_Tyr | 17 | 267 | 72.7 | 1.00E−18 |
| 941 | 200 | PHE0001359_1450 | Pkinase | 17 | 269 | 366.1 | 5.00E−107 |
| 941 | 200 | PHE0001359_1450 | UBA | 291 | 330 | 20.9 | 0.0042 |
| 941 | 200 | PHE0001359_1450 | KA1 | 460 | 508 | 84.8 | 2.40E−22 |
| 942 | 201 | PHE0001360_1451 | CAF1 | 15 | 248 | 399.9 | 3.30E−117 |
| 943 | 202 | PHE0001361_1452 | AP2 | 21 | 84 | 135.2 | 1.60E−37 |
| 944 | 203 | PHE0001362_1453 | GATA | 220 | 255 | 68.2 | 2.30E−17 |
| 945 | 204 | PHE0001363_1455 | NAM | 11 | 135 | 260.6 | 2.80E−75 |
| 946 | 205 | PHE0001364_1456 | CBS | 48 | 262 | 43.1 | 8.40E−10 |
| 946 | 205 | PHE0001364_1456 | CBS | 285 | 422 | 99.1 | 1.20E−26 |
| 947 | 206 | PHE0001375_1467 | WD40 | 159 | 196 | 50.2 | 6.30E−12 |
| 947 | 206 | PHE0001375_1467 | WD40 | 201 | 238 | 34.4 | 3.40E−07 |
| 947 | 206 | PHE0001375_1467 | WD40 | 243 | 280 | 41.8 | 2.10E−09 |
| 947 | 206 | PHE0001375_1467 | WD40 | 285 | 322 | 34.1 | 4.30E−07 |
| 947 | 206 | PHE0001375_1467 | WD40 | 327 | 363 | 15.4 | 0.19 |
| 947 | 206 | PHE0001375_1467 | WD40 | 369 | 405 | 10.4 | 1.4 |
| 947 | 206 | PHE0001375_1467 | WD40 | 419 | 455 | 15.4 | 0.18 |
| 948 | 207 | PHE0001377_1469 | Pkinase | 91 | 407 | 238.5 | 1.30E−68 |
| 949 | 208 | PHE0001380_1472 | HEAT | 82 | 117 | 18.3 | 0.025 |
| 949 | 208 | PHE0001380_1472 | HEAT | 158 | 194 | 23.5 | 0.00069 |
| 949 | 208 | PHE0001380_1472 | HEAT | 197 | 233 | 18.6 | 0.02 |
| 949 | 208 | PHE0001380_1472 | HEAT | 236 | 272 | 32.2 | 1.60E−06 |
| 949 | 208 | PHE0001380_1472 | HEAT | 275 | 311 | 29.8 | 8.50E−06 |
| 949 | 208 | PHE0001380_1472 | HEAT | 314 | 350 | 26.6 | 8.00E−05 |
| 949 | 208 | PHE0001380_1472 | HEAT | 353 | 389 | 28.8 | 1.70E−05 |
| 949 | 208 | PHE0001380_1472 | HEAT | 392 | 428 | 26.4 | 9.20E−05 |
| 949 | 208 | PHE0001380_1472 | HEAT | 431 | 467 | 20 | 0.0074 |
| 949 | 208 | PHE0001380_1472 | HEAT | 470 | 506 | 18 | 0.03 |
| 949 | 208 | PHE0001380_1472 | HEAT | 509 | 545 | 21.7 | 0.0023 |
| 949 | 208 | PHE0001380_1472 | HEAT | 548 | 584 | 22.1 | 0.0018 |
| 1301 | 560 | PHE0001381_1473 | SRF-TF | 9 | 59 | 99.2 | 1.10E−26 |
| 1301 | 560 | PHE0001381_1473 | K-box | 75 | 172 | 79.2 | 1.20E−20 |
| 754 | 13 | PHE0001382_1474 | GRAS | 162 | 502 | 266.8 | 3.80E−77 |
| 950 | 209 | PHE0001385_1477 | Cation_efflux | 1 | 415 | 239.1 | 8.30E−69 |
| 951 | 210 | PHE0001386_1478 | Peptidase_M20 | 107 | 424 | 213.2 | 5.10E−61 |
| 951 | 210 | PHE0001386_1478 | M20_dimer | 214 | 318 | 30.6 | 4.90E−06 |
| 952 | 211 | PHE0001389_1481 | CN_hydrolase | 42 | 219 | 182.1 | 1.20E−51 |
| 953 | 212 | PHE0001392_1484 | Pkinase_Tyr | 89 | 373 | 133.9 | 3.80E−37 |
| 953 | 212 | PHE0001392_1484 | Pkinase | 96 | 373 | 170.8 | 3.10E−48 |
| 954 | 213 | PHE0001394_1486 | SRF-TF | 9 | 59 | 116.9 | 5.10E−32 |
| 954 | 213 | PHE0001394_1486 | K-box | 71 | 174 | 89 | 1.30E−23 |
| 955 | 214 | PHE0001397_1489 | Ran_BP1 | 37 | 158 | 159 | 1.10E−44 |
| 956 | 215 | PHE0001398_1490 | Ran_BP1 | 39 | 160 | 185.6 | 1.10E−52 |
| 957 | 216 | PHE0001405_1497 | NifU_N | 33 | 160 | 273.5 | 3.80E−79 |
| 958 | 217 | PHE0001411_1503 | PSI_PsaF | 49 | 227 | 452.8 | 3.90E−133 |
| 959 | 218 | PHE0001416_1508 | PA | 70 | 171 | 52.7 | 1.10E−12 |
| 959 | 218 | PHE0001416_1508 | Peptidase_A22B | 238 | 524 | 429.6 | 3.80E−126 |
| 960 | 219 | PHE0001417_1509 | NAC | 35 | 92 | 94.3 | 3.20E−25 |
| 962 | 221 | PHE0001421_1513 | ELFV_dehydrog_N | 31 | 161 | 201.2 | 2.10E−57 |
| 962 | 221 | PHE0001421_1513 | ELFV_dehydrog | 176 | 408 | 391.9 | 8.40E−115 |
| 963 | 222 | PHE0001426_1518 | GATA | 91 | 126 | 65.1 | 2.00E−16 |
| 964 | 223 | PHE0001436_1528 | Meth_synt_1 | 2 | 319 | 594.5 | 8.70E−176 |
| 964 | 223 | PHE0001436_1528 | Meth_synt_2 | 433 | 757 | 753.8 | 9.50E−224 |
| 966 | 225 | PHE0001442_1534 | Ubie_methyltran | 40 | 256 | −109 | 0.00017 |
| 966 | 225 | PHE0001442_1534 | CMAS | 42 | 295 | −155.1 | 0.00012 |
| 966 | 225 | PHE0001442_1534 | Methyltransf_11 | 105 | 203 | 105.4 | 1.50E−28 |
| 966 | 225 | PHE0001442_1534 | Methyltransf_12 | 105 | 201 | 49.4 | 1.10E−11 |
| 968 | 227 | PHE0001452_1544 | ADH_N | 30 | 111 | 82.8 | 9.30E−22 |
| 968 | 227 | PHE0001452_1544 | ADH_zinc_N | 142 | 283 | 134 | 3.70E−37 |
| 969 | 228 | PHE0001463_1555 | Homeobox | 18 | 74 | 86.2 | 9.20E−23 |
| 969 | 228 | PHE0001463_1555 | START | 232 | 456 | 280 | 4.20E−81 |
| 805 | 64 | PHE0001471_1563 | Ammonium_transp | 36 | 460 | 578.1 | 7.80E−171 |
| 970 | 229 | PHE0001477_1569 | Myb_DNA-binding | 15 | 62 | 49.1 | 1.30E−11 |
| 970 | 229 | PHE0001477_1569 | Myb_DNA-binding | 68 | 113 | 50.6 | 4.70E−12 |
| 971 | 230 | PHE0001481_1573 | GAF | 195 | 339 | 35.3 | 1.90E−07 |
| 971 | 230 | PHE0001481_1573 | HisKA | 375 | 440 | 36.4 | 8.90E−08 |
| 971 | 230 | PHE0001481_1573 | Response_reg | 641 | 762 | 14.8 | 2.80E−05 |
| 972 | 231 | PHE0001483_1575 | Glyco_hydro_16 | 29 | 210 | 416.9 | 2.60E−122 |
| 972 | 231 | PHE0001483_1575 | XET_C | 234 | 284 | 99.8 | 7.30E−27 |
| 973 | 232 | PHE0001516_1607 | SelR | 87 | 209 | 274.8 | 1.50E−79 |
| 1367 | 626 | PHE0001519_1610 | WD40 | 9 | 47 | 29.3 | 1.20E−05 |
| 1367 | 626 | PHE0001519_1610 | WD40 | 52 | 89 | 34.3 | 3.70E−07 |
| 1367 | 626 | PHE0001519_1610 | WD40 | 94 | 131 | 49.1 | 1.30E−11 |
| 1367 | 626 | PHE0001519_1610 | WD40 | 136 | 173 | 53 | 9.00E−13 |
| 1367 | 626 | PHE0001519_1610 | WD40 | 178 | 215 | 48.8 | 1.60E−11 |
| 1367 | 626 | PHE0001519_1610 | WD40 | 220 | 256 | 8.1 | 2.7 |
| 1302 | 561 | PHE0001521_1612 | Xan_ur_permease | 36 | 443 | 195.6 | 1.00E−55 |
| 974 | 233 | PHE0001522_1613 | Xan_ur_permease | 52 | 463 | 201.3 | 2.10E−57 |
| 1368 | 627 | PHE0001523_1614 | Xan_ur_permease | 31 | 438 | 183.8 | 3.70E−52 |
| 1369 | 628 | PHE0001527_1618 | ELFV_dehydrog_N | 44 | 174 | 245.7 | 8.50E−71 |
| 1369 | 628 | PHE0001527_1618 | ELFV_dehydrog | 190 | 423 | 397.4 | 1.80E−116 |
| 1370 | 629 | PHE0001528_1619 | ELFV_dehydrog_N | 47 | 177 | 253.2 | 4.80E−73 |
| 1370 | 629 | PHE0001528_1619 | ELFV_dehydrog | 193 | 426 | 385.5 | 7.00E−113 |
| 806 | 65 | PHE0001530_1621 | ELFV_dehydrog_N | 43 | 173 | 299.9 | 4.10E−87 |
| 806 | 65 | PHE0001530_1621 | ELFV_dehydrog | 188 | 456 | 446 | 4.50E−131 |
| 755 | 14 | PHE0001531_1622 | ELFV_dehydrog_N | 45 | 178 | 267.3 | 2.70E−77 |
| 755 | 14 | PHE0001531_1622 | ELFV_dehydrog | 194 | 425 | 426.5 | 3.20E−125 |
| 756 | 15 | PHE0001532_1623 | ELFV_dehydrog_N | 39 | 169 | 250.4 | 3.40E−72 |
| 756 | 15 | PHE0001532_1623 | ELFV_dehydrog | 184 | 451 | 456.3 | 3.40E−134 |
| 1371 | 630 | PHE0001533_1624 | ELFV_dehydrog_N | 73 | 203 | 271.9 | 1.20E−78 |
| 1371 | 630 | PHE0001533_1624 | ELFV_dehydrog | 219 | 462 | 480.3 | 2.00E−141 |
| 757 | 16 | PHE0001535_1626 | ELFV_dehydrog_N | 55 | 185 | 277.2 | 3.00E−80 |
| 757 | 16 | PHE0001535_1626 | ELFV_dehydrog | 200 | 443 | 486.1 | 3.80E−143 |
| 758 | 17 | PHE0001536_1627 | ELFV_dehydrog_N | 67 | 197 | 286.3 | 5.10E−83 |
| 758 | 17 | PHE0001536_1627 | ELFV_dehydrog | 213 | 456 | 481.2 | 1.10E−141 |
| 759 | 18 | PHE0001538_1629 | ELFV_dehydrog_N | 33 | 163 | 239.1 | 8.20E−69 |
| 759 | 18 | PHE0001538_1629 | ELFV_dehydrog | 179 | 420 | 400.7 | 1.90E−117 |
| 975 | 234 | PHE0001539_1630 | ELFV_dehydrog_N | 229 | 359 | 216.8 | 4.40E−62 |
| 975 | 234 | PHE0001539_1630 | ELFV_dehydrog | 375 | 622 | 247.2 | 3.10E−71 |
| 1372 | 631 | PHE0001541_1632 | ELFV_dehydrog_N | 245 | 375 | 242.3 | 8.90E−70 |
| 1372 | 631 | PHE0001541_1632 | ELFV_dehydrog | 391 | 638 | 255.7 | 8.70E−74 |
| 1206 | 465 | PHE0001564_1663 | GATase_2 | 2 | 165 | 47 | 1.30E−14 |
| 1206 | 465 | PHE0001564_1663 | Asn_synthase | 214 | 458 | 366.1 | 4.80E−107 |
| 1373 | 632 | PHE0001567_1666 | GATase_2 | 2 | 164 | −6.7 | 1.50E−10 |
| 1373 | 632 | PHE0001567_1666 | Asn_synthase | 241 | 531 | 383.2 | 3.40E−112 |
| 1374 | 633 | PHE0001568_1667 | GATase_2 | 2 | 166 | −20.1 | 1.60E−09 |
| 1374 | 633 | PHE0001568_1667 | Asn_synthase | 249 | 553 | 422.6 | 4.80E−124 |
| 976 | 235 | PHE0001577_1676 | CBS | 48 | 241 | 36.5 | 8.40E−08 |
| 976 | 235 | PHE0001577_1676 | CBS | 264 | 402 | 88.1 | 2.40E−23 |
| 760 | 19 | PHE0001593_1699 | Transketolase_N | 7 | 339 | 846.6 | 1.10E−251 |
| 760 | 19 | PHE0001593_1699 | Transket_pyr | 356 | 533 | 240 | 4.60E−69 |
| 760 | 19 | PHE0001593_1699 | Transketolase_C | 546 | 656 | 73.3 | 6.90E−19 |
| 761 | 20 | PHE0001593_1700 | Transketolase_N | 7 | 339 | 846.6 | 1.10E−251 |
| 761 | 20 | PHE0001593_1700 | Transket_pyr | 356 | 533 | 240 | 4.60E−69 |
| 761 | 20 | PHE0001593_1700 | Transketolase_C | 546 | 656 | 73.3 | 6.90E−19 |
| 977 | 236 | PHE0001602_1713 | Ras | 8 | 179 | 262.7 | 6.60E−76 |
| 978 | 237 | PHE0001604_1715 | Ras | 8 | 179 | 266.7 | 4.10E−77 |
| 979 | 238 | PHE0001605_1716 | Ras | 10 | 181 | 268.9 | 8.80E−78 |
| 980 | 239 | PHE0001606_1717 | Ras | 12 | 183 | 262.9 | 5.60E−76 |
| 981 | 240 | PHE0001610_1721 | WD40 | 7 | 47 | 8.3 | 2.6 |
| 981 | 240 | PHE0001610_1721 | WD40 | 52 | 89 | 30.2 | 6.60E−06 |
| 981 | 240 | PHE0001610_1721 | WD40 | 93 | 130 | 25.8 | 0.00014 |
| 981 | 240 | PHE0001610_1721 | WD40 | 136 | 174 | 10.8 | 1.3 |
| 981 | 240 | PHE0001610_1721 | WD40 | 179 | 214 | 14.7 | 0.3 |
| 981 | 240 | PHE0001610_1721 | WD40 | 219 | 256 | 3.5 | 10 |
| 981 | 240 | PHE0001610_1721 | WD40 | 261 | 298 | 42.6 | 1.20E−09 |
| 1375 | 634 | PHE0001611_1722 | WD40 | 1 | 38 | 12.3 | 0.83 |
| 1375 | 634 | PHE0001611_1722 | WD40 | 43 | 80 | 42.8 | 1.10E−09 |
| 1375 | 634 | PHE0001611_1722 | WD40 | 137 | 174 | 27.1 | 5.60E−05 |
| 1375 | 634 | PHE0001611_1722 | WD40 | 182 | 219 | 27.7 | 3.70E−05 |
| 1375 | 634 | PHE0001611_1722 | WD40 | 279 | 316 | 29.5 | 1.10E−05 |
| 982 | 241 | PHE0001617_1728 | Zip | 60 | 378 | 324.9 | 1.20E−94 |
| 983 | 242 | PHE0001624_1735 | CorA | 16 | 382 | 554.7 | 8.40E−164 |
| 1376 | 635 | PHE0001632_1743 | Na_Ca_ex | 53 | 215 | 62.9 | 9.20E−16 |
| 1376 | 635 | PHE0001632_1743 | Na_Ca_ex | 377 | 531 | 83.8 | 4.60E−22 |
| 985 | 244 | PHE0001642_1753 | zf-C2H2 | 35 | 57 | 17.2 | 0.052 |
| 985 | 244 | PHE0001642_1753 | zf-C2H2 | 84 | 106 | 17.3 | 0.051 |
| 986 | 245 | PHE0001649_1760 | zf-B_box | 2 | 47 | 59.1 | 1.30E−14 |
| 986 | 245 | PHE0001649_1760 | zf-B_box | 54 | 99 | 44.6 | 2.90E−10 |
| 987 | 246 | PHE0002017_2128 | zf-C3HC4 | 332 | 372 | 26.9 | 6.30E−05 |
| 988 | 247 | PHE0002023_2134 | zf-C3HC4 | 336 | 376 | 39.6 | 9.90E−09 |
| 989 | 248 | PHE0002024_2135 | zf-C3HC4 | 338 | 378 | 34.5 | 3.20E−07 |
| 990 | 249 | PHE0002027_2138 | Gln-synt_N | 17 | 98 | 132.2 | 1.20E−36 |
| 990 | 249 | PHE0002027_2138 | Gln-synt_C | 103 | 355 | 330.1 | 3.30E−96 |
| 1377 | 636 | PHE0002029_2140 | DUF246 | 113 | 455 | 712 | 3.70E−211 |
| 991 | 250 | PHE0002041_2151 | ubiquitin | 1 | 74 | 151.2 | 2.50E−42 |
| 991 | 250 | PHE0002041_2151 | Ribosomal_S27 | 101 | 148 | 112.4 | 1.20E−30 |
| 992 | 251 | PHE0002042_2152 | HSP20 | 48 | 152 | 180.1 | 4.80E−51 |
| 993 | 252 | PHE0002049_2159 | RuBisCO_small | 58 | 166 | 249.7 | 5.50E−72 |
| 994 | 253 | PHE0002052_2162 | Lig_chan | 1 | 234 | 179.4 | 7.80E−51 |
| 995 | 254 | PHE0002054_2164 | CN_hydrolase | 31 | 220 | 227.7 | 2.20E−65 |
| 996 | 255 | PHE0002055_2165 | Tic22 | 18 | 280 | 219.3 | 7.70E−63 |
| 997 | 256 | PHE0002067_2177 | Myb_DNA-binding | 14 | 61 | 47.5 | 4.00E−11 |
| 997 | 256 | PHE0002067_2177 | Myb_DNA-binding | 67 | 112 | 55.4 | 1.70E−13 |
| 998 | 257 | PHE0002068_2178 | Myb_DNA-binding | 14 | 61 | 47.5 | 4.00E−11 |
| 998 | 257 | PHE0002068_2178 | Myb_DNA-binding | 67 | 112 | 51.1 | 3.40E−12 |
| 762 | 21 | PHE0002070_2180 | Myb_DNA-binding | 14 | 61 | 47.2 | 5.00E−11 |
| 762 | 21 | PHE0002070_2180 | Myb_DNA-binding | 67 | 112 | 51.9 | 1.90E−12 |
| 999 | 258 | PHE0002071_2181 | Myb_DNA-binding | 14 | 61 | 44.3 | 3.60E−10 |
| 999 | 258 | PHE0002071_2181 | Myb_DNA-binding | 67 | 112 | 54 | 4.30E−13 |
| 1378 | 637 | PHE0002078_2188 | SecY | 108 | 493 | −75.3 | 1.10E−08 |
| 1305 | 564 | PHE0002079_2189 | SecY | 77 | 461 | −18.1 | 2.30E−11 |
| 1000 | 259 | PHE0002080_4290 | SecY | 77 | 461 | −19.2 | 2.60E−11 |
| 1001 | 260 | PHE0002081_2191 | SecY | 77 | 462 | −25.3 | 5.00E−11 |
| 1379 | 638 | PHE0002084_2194 | Ion_trans | 123 | 389 | 69 | 1.30E−17 |
| 1379 | 638 | PHE0002084_2194 | cNMP_binding | 488 | 590 | 40.9 | 4.00E−09 |
| 1002 | 261 | PHE0002088_2198 | UPF0057 | 7 | 58 | 86.8 | 5.70E−23 |
| 1380 | 639 | PHE0002089_2199 | UPF0057 | 29 | 79 | 81.1 | 3.10E−21 |
| 1381 | 640 | PHE0002090_2200 | UPF0057 | 1 | 51 | 104.1 | 3.70E−28 |
| 1207 | 466 | PHE0002094_2204 | Pkinase | 78 | 352 | 113.2 | 6.60E−31 |
| 1207 | 466 | PHE0002094_2204 | Pkinase_Tyr | 78 | 352 | 96.1 | 9.60E−26 |
| 1003 | 262 | PHE0002095_2205 | efhand | 12 | 40 | 41 | 3.60E−09 |
| 1003 | 262 | PHE0002095_2205 | efhand | 48 | 76 | 38.9 | 1.60E−08 |
| 1003 | 262 | PHE0002095_2205 | efhand | 85 | 113 | 42.1 | 1.70E−09 |
| 1003 | 262 | PHE0002095_2205 | efhand | 121 | 149 | 43.2 | 8.10E−10 |
| 1004 | 263 | PHE0002096_2206 | efhand | 12 | 40 | 41 | 3.60E−09 |
| 1004 | 263 | PHE0002096_2206 | efhand | 48 | 76 | 38.9 | 1.60E−08 |
| 1004 | 263 | PHE0002096_2206 | efhand | 85 | 113 | 42.1 | 1.70E−09 |
| 1004 | 263 | PHE0002096_2206 | efhand | 121 | 149 | 43.2 | 8.10E−10 |
| 1005 | 264 | PHE0002099_2209 | efhand | 274 | 302 | 19.3 | 0.013 |
| 1006 | 265 | PHE0002103_2213 | Pkinase | 81 | 358 | 164.6 | 2.20E−46 |
| 1006 | 265 | PHE0002103_2213 | Pkinase_Tyr | 81 | 358 | 129.8 | 6.50E−36 |
| 1208 | 467 | PHE0002121_2229 | Myb_DNA-binding | 76 | 123 | 45.7 | 1.40E−10 |
| 1208 | 467 | PHE0002121_2229 | Myb_DNA-binding | 129 | 174 | 47.2 | 4.90E−11 |
| 1007 | 266 | PHE0002123_2231 | PEPcase | 11 | 966 | 2512.3 | 0 |
| 1008 | 267 | PHE0002125_2233 | PEPcase | 13 | 967 | 2535.1 | 0 |
| 1009 | 268 | PHE0002127_2235 | PEPcase | 11 | 967 | 2556.7 | 0 |
| 763 | 22 | PHE0002128_2236 | PEPcase | 1 | 883 | 767 | 1.00E−227 |
| 1011 | 270 | PHE0002148_2256 | p450 | 38 | 502 | 285.3 | 1.00E−82 |
| 1012 | 271 | PHE0002163_2270 | Yippee | 1 | 104 | 207.1 | 3.60E−59 |
| 1013 | 272 | PHE0002164_2271 | Yippee | 1 | 108 | 207.4 | 2.90E−59 |
| 1014 | 273 | PHE0002183_2290 | HSP20 | 53 | 156 | 186.9 | 4.20E−53 |
| 1306 | 565 | PHE0002185_2292 | HSP20 | 46 | 149 | 183 | 6.50E−52 |
| 1015 | 274 | PHE0002189_2296 | AA_kinase | 15 | 260 | 199.6 | 6.60E−57 |
| 1383 | 642 | PHE0002194_2301 | Aldedh | 52 | 511 | 791.1 | 5.70E−235 |
| 1016 | 275 | PHE0002202_2309 | Annexin | 14 | 80 | 101.3 | 2.60E−27 |
| 1016 | 275 | PHE0002202_2309 | Annexin | 86 | 152 | 89.2 | 1.20E−23 |
| 1016 | 275 | PHE0002202_2309 | Annexin | 169 | 235 | 65.2 | 1.90E−16 |
| 1016 | 275 | PHE0002202_2309 | Annexin | 244 | 310 | 96.1 | 9.50E−26 |
| 1017 | 276 | PHE0002203_2310 | Annexin | 13 | 79 | 99.8 | 7.10E−27 |
| 1017 | 276 | PHE0002203_2310 | Annexin | 85 | 150 | 72.3 | 1.40E−18 |
| 1017 | 276 | PHE0002203_2310 | Annexin | 167 | 233 | 51.8 | 2.00E−12 |
| 1017 | 276 | PHE0002203_2310 | Annexin | 242 | 308 | 85.3 | 1.70E−22 |
| 1018 | 277 | PHE0002204_2311 | Annexin | 14 | 80 | 85.9 | 1.10E−22 |
| 1018 | 277 | PHE0002204_2311 | Annexin | 86 | 153 | 42.1 | 1.70E−09 |
| 1018 | 277 | PHE0002204_2311 | Annexin | 170 | 237 | 101.9 | 1.70E−27 |
| 1018 | 277 | PHE0002204_2311 | Annexin | 246 | 312 | 99.3 | 9.90E−27 |
| 1019 | 278 | PHE0002210_2317 | Kunitz_legume | 33 | 199 | 96.7 | 6.00E−26 |
| 1020 | 279 | PHE0002224_2331 | Di19 | 18 | 236 | 151.1 | 2.60E−42 |
| 1210 | 469 | PHE0002226_2333 | Gamma-thionin | 32 | 80 | 77.6 | 3.50E−20 |
| 1021 | 280 | PHE0002227_2334 | Gamma-thionin | 32 | 78 | 77.9 | 2.90E−20 |
| 1307 | 566 | PHE0002229_2336 | Gamma-thionin | 34 | 80 | 100.7 | 3.90E−27 |
| 1022 | 281 | PHE0002232_2339 | bZIP_2 | 298 | 352 | 48.7 | 1.80E−11 |
| 1022 | 281 | PHE0002232_2339 | bZIP_1 | 298 | 360 | 39.5 | 1.00E−08 |
| 1023 | 282 | PHE0002233_2340 | bZIP_2 | 245 | 299 | 38.7 | 1.80E−08 |
| 1023 | 282 | PHE0002233_2340 | bZIP_1 | 249 | 306 | 39 | 1.40E−08 |
| 1024 | 283 | PHE0002238_2345 | Epimerase | 10 | 253 | 62 | 1.70E−15 |
| 1024 | 283 | PHE0002238_2345 | 3Beta_HSD | 11 | 277 | −51.4 | 2.80E−09 |
| 1024 | 283 | PHE0002238_2345 | NAD_binding_4 | 12 | 237 | 2.9 | 7.20E−09 |
| 1025 | 284 | PHE0002239_2346 | adh_short | 6 | 148 | −26.5 | 0.00023 |
| 1025 | 284 | PHE0002239_2346 | Epimerase | 8 | 253 | 56.9 | 6.00E−14 |
| 1025 | 284 | PHE0002239_2346 | 3Beta_HSD | 9 | 279 | −27.1 | 4.40E−11 |
| 1025 | 284 | PHE0002239_2346 | NAD_binding_4 | 10 | 266 | −24.8 | 4.50E−07 |
| 1026 | 285 | PHE0002240_2347 | adh_short | 3 | 157 | −5.1 | 8.50E−06 |
| 1026 | 285 | PHE0002240_2347 | Epimerase | 5 | 250 | 75.3 | 1.70E−19 |
| 1026 | 285 | PHE0002240_2347 | Polysacc_synt_2 | 5 | 251 | −175.5 | 0.0049 |
| 1026 | 285 | PHE0002240_2347 | 3Beta_HSD | 6 | 276 | −39.5 | 3.70E−10 |
| 1026 | 285 | PHE0002240_2347 | NAD_binding_4 | 7 | 263 | −23.5 | 3.70E−07 |
| 1027 | 286 | PHE0002242_2349 | Epimerase | 7 | 251 | 59 | 1.40E−14 |
| 1027 | 286 | PHE0002242_2349 | NmrA | 7 | 225 | −83.8 | 0.0022 |
| 1027 | 286 | PHE0002242_2349 | 3Beta_HSD | 8 | 273 | −22.7 | 2.10E−11 |
| 1027 | 286 | PHE0002242_2349 | NAD_binding_4 | 9 | 235 | −15.3 | 1.10E−07 |
| 1028 | 287 | PHE0002244_2351 | HSF_DNA-bind | 5 | 178 | 300.9 | 2.10E−87 |
| 1029 | 288 | PHE0002246_2353 | PP2C | 104 | 390 | 288.9 | 8.50E−84 |
| 1030 | 289 | PHE0002254_2361 | adh_short | 22 | 191 | 94.5 | 2.80E−25 |
| 764 | 23 | PHE0002258_69 | PAS | 116 | 230 | 22.8 | 0.0011 |
| 764 | 23 | PHE0002258_69 | PAS | 390 | 504 | 10.5 | 0.036 |
| 764 | 23 | PHE0002258_69 | Pkinase | 582 | 870 | 287.7 | 2.00E−83 |
| 765 | 24 | PHE0002259_68 | PAS | 116 | 230 | 22.8 | 0.0011 |
| 765 | 24 | PHE0002259_68 | PAS | 390 | 504 | 10.5 | 0.036 |
| 765 | 24 | PHE0002259_68 | Pkinase | 582 | 870 | 288.7 | 9.90E−84 |
| 766 | 25 | PHE0002260_70 | PAS | 116 | 230 | 22.8 | 0.0011 |
| 766 | 25 | PHE0002260_70 | PAS | 390 | 504 | 10.5 | 0.036 |
| 766 | 25 | PHE0002260_70 | Pkinase | 582 | 870 | 287.7 | 2.00E−83 |
| 1031 | 290 | PHE0002268_2371 | Pkinase | 30 | 288 | 384.1 | 1.90E−112 |
| 1031 | 290 | PHE0002268_2371 | efhand | 335 | 363 | 39.3 | 1.10E−08 |
| 1031 | 290 | PHE0002268_2371 | efhand | 371 | 399 | 29.9 | 7.90E−06 |
| 1031 | 290 | PHE0002268_2371 | efhand | 407 | 435 | 31.6 | 2.40E−06 |
| 1031 | 290 | PHE0002268_2371 | efhand | 441 | 469 | 33.1 | 8.90E−07 |
| 1032 | 291 | PHE0002269_2372 | Pkinase | 79 | 337 | 343.7 | 2.80E−100 |
| 1032 | 291 | PHE0002269_2372 | efhand | 384 | 412 | 28 | 2.90E−05 |
| 1032 | 291 | PHE0002269_2372 | efhand | 456 | 484 | 23.8 | 0.00056 |
| 1032 | 291 | PHE0002269_2372 | efhand | 490 | 518 | 36.7 | 7.20E−08 |
| 1033 | 292 | PHE0002272_2375 | Pkinase | 73 | 331 | 321.7 | 1.10E−93 |
| 1033 | 292 | PHE0002272_2375 | efhand | 448 | 476 | 25.2 | 0.00021 |
| 1033 | 292 | PHE0002272_2375 | efhand | 482 | 510 | 36 | 1.10E−07 |
| 1211 | 470 | PHE0002293_2395 | Inhibitor_I29 | 36 | 92 | 87.7 | 3.10E−23 |
| 1211 | 470 | PHE0002293_2395 | Peptidase_C1 | 119 | 343 | 408 | 1.20E−119 |
| 1034 | 293 | PHE0002298_2400 | Dehydrin | 21 | 286 | 140 | 5.80E−39 |
| 1035 | 294 | PHE0002299_2401 | Ribonuclease_T2 | 32 | 218 | 96.1 | 9.70E−26 |
| 1036 | 295 | PHE0002321_2422 | Di19 | 9 | 182 | 62.8 | 9.80E−16 |
| 1037 | 296 | PHE0002331_2432 | MIP | 29 | 264 | 432.6 | 4.90E−127 |
| 1212 | 471 | PHE0002338_2439 | MIP | 16 | 237 | 232.5 | 8.10E−67 |
| 1038 | 297 | PHE0002340_2441 | MIP | 31 | 263 | 445.8 | 5.20E−131 |
| 1039 | 298 | PHE0002354_2455 | GST_N | 4 | 77 | 102.5 | 1.10E−27 |
| 1039 | 298 | PHE0002354_2455 | GST_C | 93 | 201 | 107.2 | 4.20E−29 |
| 1041 | 300 | PHE0002361_2462 | PARP | 252 | 445 | −1.5 | 5.00E−07 |
| 1042 | 301 | PHE0002362_2463 | Glycos_transf_2 | 37 | 234 | 90.2 | 5.70E−24 |
| 1043 | 302 | PHE0002364_2465 | Pyr_redox_2 | 23 | 339 | 224.3 | 2.40E−64 |
| 1043 | 302 | PHE0002364_2465 | Pyr_redox | 201 | 293 | 114.9 | 2.10E−31 |
| 1043 | 302 | PHE0002364_2465 | Pyr_redox_dim | 369 | 479 | 170.2 | 4.70E−48 |
| 1044 | 303 | PHE0002365_2466 | HI0933_like | 37 | 358 | −252.7 | 0.0036 |
| 1044 | 303 | PHE0002365_2466 | DAO | 38 | 437 | −32 | 0.0011 |
| 1044 | 303 | PHE0002365_2466 | GIDA | 38 | 362 | −203.5 | 9.40E−05 |
| 1044 | 303 | PHE0002365_2466 | Pyr_redox_2 | 38 | 352 | 244.9 | 1.50E−70 |
| 1044 | 303 | PHE0002365_2466 | Pyr_redox | 209 | 306 | 124.1 | 3.40E−34 |
| 1044 | 303 | PHE0002365_2466 | Pyr_redox_dim | 381 | 490 | 206.4 | 5.80E−59 |
| 1045 | 304 | PHE0002367_2468 | Pyr_redox_2 | 24 | 340 | 235.9 | 8.00E−68 |
| 1045 | 304 | PHE0002367_2468 | Pyr_redox | 202 | 294 | 108.1 | 2.30E−29 |
| 1045 | 304 | PHE0002367_2468 | Pyr_redox_dim | 370 | 480 | 167.2 | 3.60E−47 |
| 1046 | 305 | PHE0002370_2471 | GSHPx | 8 | 117 | 248.2 | 1.50E−71 |
| 1047 | 306 | PHE0002372_2473 | GSHPx | 9 | 118 | 241 | 2.20E−69 |
| 1048 | 307 | PHE0002373_2474 | GSHPx | 11 | 120 | 216.8 | 4.40E−62 |
| 1049 | 308 | PHE0002383_2484 | Cpn60_TCP1 | 40 | 534 | 618.6 | 4.70E−183 |
| 1050 | 309 | PHE0002390_2491 | PMSR | 28 | 181 | 264.3 | 2.30E−76 |
| 1308 | 567 | PHE0002392_2493 | HMA | 6 | 67 | 62.5 | 1.20E−15 |
| 1309 | 568 | PHE0002410_2510 | Pyridoxal_deC | 33 | 383 | 596.4 | 2.30E−176 |
| 1310 | 569 | PHE0002411_2511 | Pyridoxal_deC | 37 | 383 | 354.1 | 2.00E−103 |
| 1051 | 310 | PHE0002414_2514 | Pyridoxal_deC | 33 | 380 | 519.7 | 2.80E−153 |
| 1052 | 311 | PHE0002431_2531 | Rubrerythrin | 133 | 266 | 200.1 | 4.70E−57 |
| 1053 | 312 | PHE0002447_2547 | HSF_DNA-bind | 72 | 234 | 213.5 | 4.20E−61 |
| 1054 | 313 | PHE0002449_2549 | HSF_DNA-bind | 22 | 218 | 162.4 | 1.00E−45 |
| 1055 | 314 | PHE0002459_2559 | F-box | 12 | 57 | 37.3 | 4.60E−08 |
| 1056 | 315 | PHE0002461_2561 | HSF_DNA-bind | 19 | 195 | 351 | 1.70E−102 |
| 1057 | 316 | PHE0002462_2562 | HSF_DNA-bind | 8 | 206 | 179.6 | 6.70E−51 |
| 1058 | 317 | PHE0002464_2564 | HSF_DNA-bind | 9 | 193 | 187.1 | 3.90E−53 |
| 1059 | 318 | PHE0002470_2570 | HSP20 | 50 | 153 | 169.4 | 8.10E−48 |
| 1060 | 319 | PHE0002471_2571 | HSP20 | 49 | 152 | 177.8 | 2.40E−50 |
| 1384 | 643 | PHE0002483_2583 | F-box | 27 | 72 | 22.8 | 0.0011 |
| 1384 | 643 | PHE0002483_2583 | LRR_2 | 182 | 206 | 14.2 | 0.16 |
| 1061 | 320 | PHE0002484_2584 | Sucrose_synth | 6 | 551 | 1368.2 | 0 |
| 1061 | 320 | PHE0002484_2584 | Glycos_transf_1 | 554 | 743 | 100.9 | 3.30E−27 |
| 1311 | 570 | PHE0002485_2585 | Aa_trans | 39 | 424 | 234.8 | 1.70E−67 |
| 1062 | 321 | PHE0002486_2586 | B56 | 64 | 476 | 999.5 | 1.10E−297 |
| 1063 | 322 | PHE0002489_2589 | Cyclin_N | 65 | 197 | 153.6 | 4.80E−43 |
| 1063 | 322 | PHE0002489_2589 | Cyclin_C | 199 | 318 | 33.6 | 6.30E−07 |
| 1064 | 323 | PHE0002490_2590 | Cyclin_N | 61 | 187 | 140.9 | 3.20E−39 |
| 1064 | 323 | PHE0002490_2590 | Cyclin_C | 189 | 312 | 83.5 | 5.70E−22 |
| 1065 | 324 | PHE0002490_3963 | Cyclin_N | 42 | 168 | 140.9 | 3.20E−39 |
| 1065 | 324 | PHE0002490_3963 | Cyclin_C | 170 | 293 | 83.5 | 5.70E−22 |
| 1066 | 325 | PHE0002491_2591 | Cyclin_N | 168 | 293 | 225.4 | 1.10E−64 |
| 1066 | 325 | PHE0002491_2591 | Cyclin_C | 295 | 422 | 168.5 | 1.50E−47 |
| 1385 | 644 | PHE0002494_2594 | Cu-oxidase_3 | 43 | 160 | 228.5 | 1.30E−65 |
| 1385 | 644 | PHE0002494_2594 | Cu-oxidase | 169 | 337 | 251 | 2.10E−72 |
| 1385 | 644 | PHE0002494_2594 | Cu-oxidase_2 | 426 | 564 | 167 | 4.10E−47 |
| 1312 | 571 | PHE0002496_2596 | Aminotran_3 | 83 | 409 | 249.7 | 5.50E−72 |
| 1067 | 326 | PHE0002498_2598 | Pkinase | 139 | 412 | 110.1 | 5.80E−30 |
| 1067 | 326 | PHE0002498_2598 | Pkinase_Tyr | 139 | 412 | 135.1 | 1.70E−37 |
| 1068 | 327 | PHE0002502_2602 | Cpn10 | 54 | 145 | 139.7 | 7.10E−39 |
| 1068 | 327 | PHE0002502_2602 | Cpn10 | 152 | 245 | 150.7 | 3.30E−42 |
| 1069 | 328 | PHE0002506_2606 | Reticulon | 81 | 264 | 295.7 | 7.80E−86 |
| 1070 | 329 | PHE0002507_2607 | Myb_DNA-binding | 49 | 100 | 47.5 | 4.10E−11 |
| 1386 | 645 | PHE0002509_2609 | HSP20 | 46 | 156 | 135.2 | 1.60E−37 |
| 1071 | 330 | PHE0002514_2614 | E1_dh | 150 | 450 | 428.7 | 7.30E−126 |
| 1072 | 331 | PHE0002515_2615 | Hydrolase | 15 | 233 | 45.9 | 1.20E−10 |
| 1387 | 646 | PHE0002523_2623 | Thioredoxin | 104 | 206 | 6.4 | 4.00E−06 |
| 1213 | 472 | PHE0002524_2624 | Thioredoxin | 88 | 195 | 24.7 | 7.30E−08 |
| 1388 | 647 | PHE0002527_2627 | cobW | 11 | 187 | 308.1 | 1.50E−89 |
| 1388 | 647 | PHE0002527_2627 | CobW_C | 228 | 322 | 144.8 | 2.10E−40 |
| 1073 | 332 | PHE0002530_2630 | zf-Dof | 40 | 102 | 137.4 | 3.40E−38 |
| 1074 | 333 | PHE0002532_2632 | Ribosomal_L1 | 9 | 211 | 224.6 | 1.90E−64 |
| 1075 | 334 | PHE0002536_2636 | B3 | 146 | 251 | 105.3 | 1.60E−28 |
| 1075 | 334 | PHE0002536_2636 | Auxin_resp | 273 | 354 | 186.6 | 5.50E−53 |
| 1076 | 335 | PHE0002540_2640 | B3 | 123 | 228 | 108.8 | 1.40E−29 |
| 1076 | 335 | PHE0002540_2640 | Auxin_resp | 250 | 331 | 194 | 3.10E−55 |
| 1076 | 335 | PHE0002540_2640 | AUX_IAA | 593 | 779 | −73.6 | 0.0003 |
| 1389 | 648 | PHE0002546_2646 | DSPc | 36 | 131 | 9.7 | 1.70E−05 |
| 1077 | 336 | PHE0002547_2647 | Abhydrolase_1 | 152 | 377 | 42.4 | 1.40E−09 |
| 1079 | 338 | PHE0002552_2652 | ComA | 20 | 289 | 347 | 2.90E−101 |
| 1390 | 649 | PHE0002557_2657 | AP2 | 15 | 79 | 144.1 | 3.40E−40 |
| 1080 | 339 | PHE0002565_2664 | Metallothio_2 | 2 | 82 | 77.3 | 4.40E−20 |
| 1391 | 650 | PHE0002566_2665 | Ribosomal_L39 | 9 | 51 | 100.6 | 4.20E−27 |
| 1081 | 340 | PHE0002581_2680 | Cpn60_TCP1 | 57 | 561 | 638.5 | 4.90E−189 |
| 1082 | 341 | PHE0002582_2681 | Cpn60_TCP1 | 56 | 559 | 617.9 | 8.00E−183 |
| 1083 | 342 | PHE0002583_2682 | Cpn60_TCP1 | 78 | 582 | 643.9 | 1.20E−190 |
| 1084 | 343 | PHE0002586_2685 | Cpn60_TCP1 | 66 | 570 | 637.4 | 1.10E−188 |
| 1085 | 344 | PHE0002588_2687 | Usp | 6 | 161 | 79 | 1.40E−20 |
| 1086 | 345 | PHE0002591_2690 | DUF393 | 65 | 183 | 109.6 | 8.00E−30 |
| 1087 | 346 | PHE0002596_2695 | Myb_DNA-binding | 59 | 104 | 53.9 | 4.70E−13 |
| 1088 | 347 | PHE0002604_2703 | NPH3 | 213 | 497 | 406 | 4.90E−119 |
| 1215 | 474 | PHE0002607_2706 | Sigma70_r2 | 283 | 356 | 51.5 | 2.50E−12 |
| 1215 | 474 | PHE0002607_2706 | Sigma70_r3 | 359 | 440 | 74.8 | 2.50E−19 |
| 1215 | 474 | PHE0002607_2706 | Sigma70_r4 | 452 | 505 | 75.7 | 1.30E−19 |
| 1089 | 348 | PHE0002608_2707 | Sigma70_r1_2 | 257 | 293 | 34.3 | 3.70E−07 |
| 1089 | 348 | PHE0002608_2707 | Sigma70_r2 | 336 | 406 | 84.7 | 2.60E−22 |
| 1089 | 348 | PHE0002608_2707 | Sigma70_r3 | 410 | 492 | 100.9 | 3.50E−27 |
| 1089 | 348 | PHE0002608_2707 | Sigma70_r4 | 504 | 557 | 90.6 | 4.30E−24 |
| 1216 | 475 | PHE0002609_2708 | Sigma70_r2 | 263 | 333 | 75.4 | 1.50E−19 |
| 1216 | 475 | PHE0002609_2708 | Sigma70_r3 | 337 | 418 | 61.5 | 2.40E−15 |
| 1216 | 475 | PHE0002609_2708 | Sigma70_r4 | 436 | 488 | 41.9 | 2.00E−09 |
| 1313 | 572 | PHE0002611_2710 | Sigma70_r1_2 | 253 | 289 | 29 | 1.50E−05 |
| 1313 | 572 | PHE0002611_2710 | Sigma70_r2 | 332 | 402 | 84.3 | 3.40E−22 |
| 1313 | 572 | PHE0002611_2710 | Sigma70_r3 | 406 | 488 | 96.5 | 7.20E−26 |
| 1313 | 572 | PHE0002611_2710 | Sigma70_r4 | 500 | 553 | 97 | 5.00E−26 |
| 1392 | 651 | PHE0002614_2713 | VQ | 45 | 75 | 43.6 | 5.80E−10 |
| 1090 | 349 | PHE0002615_2714 | VQ | 38 | 68 | 49.3 | 1.10E−11 |
| 1314 | 573 | PHE0002616_2723 | Aa_trans | 26 | 422 | 391.8 | 9.30E−115 |
| 1091 | 350 | PHE0002622_2739 | Myb_DNA-binding | 155 | 205 | 44.2 | 3.90E−10 |
| 1217 | 476 | PHE0002625_2744 | Glycos_transf_1 | 382 | 561 | 50.5 | 5.10E−12 |
| 1092 | 351 | PHE0002629_2748 | Glyco_transf_20 | 77 | 562 | 782.7 | 1.90E−232 |
| 1092 | 351 | PHE0002629_2748 | Trehalose_PPase | 611 | 846 | 311.9 | 1.00E−90 |
| 1093 | 352 | PHE0002634_2753 | Hydrolase | 15 | 204 | 105.6 | 1.30E−28 |
| 1094 | 353 | PHE0002639_2758 | GH3 | 19 | 576 | 880.4 | 7.40E−262 |
| 1095 | 354 | PHE0002640_2759 | GH3 | 8 | 565 | 952 | 2.10E−283 |
| 1096 | 355 | PHE0002643_2762 | GH3 | 12 | 572 | 1048.2 | 0 |
| 1097 | 356 | PHE0002644_2763 | GH3 | 22 | 574 | 1140.9 | 0 |
| 767 | 26 | PHE0002645_2764 | GH3 | 23 | 585 | 1378.6 | 0 |
| 1393 | 652 | PHE0002648_2767 | SRF-TF | 9 | 59 | 109.1 | 1.10E−29 |
| 1393 | 652 | PHE0002648_2767 | K-box | 69 | 169 | 86.4 | 7.90E−23 |
| 1098 | 357 | PHE0002649_2768 | SRF-TF | 9 | 59 | 105.2 | 1.70E−28 |
| 1098 | 357 | PHE0002649_2768 | K-box | 73 | 172 | 120.3 | 5.00E−33 |
| 1394 | 653 | PHE0002652_2771 | NTP_transferase | 9 | 231 | 52.2 | 1.40E−13 |
| 1394 | 653 | PHE0002652_2771 | Hexapep | 294 | 311 | 5.4 | 28 |
| 1394 | 653 | PHE0002652_2771 | Hexapep | 312 | 329 | 15.4 | 0.18 |
| 1394 | 653 | PHE0002652_2771 | Hexapep | 335 | 352 | 13 | 1 |
| 1099 | 358 | PHE0002661_2781 | NTP_transferase | 5 | 275 | 397.9 | 1.40E−116 |
| 1100 | 359 | PHE0002664_2787 | NTP_transferase | 50 | 325 | 377.3 | 2.10E−110 |
| 1315 | 574 | PHE0002670_2793 | NTP_transferase | 3 | 275 | 317 | 3.10E−92 |
| 1101 | 360 | PHE0002688_2821 | Tubulin | 45 | 244 | 380.4 | 2.50E−111 |
| 1101 | 360 | PHE0002688_2821 | Tubulin_C | 246 | 383 | 267.9 | 1.80E−77 |
| 1102 | 361 | PHE0002689_2822 | Tubulin | 49 | 246 | 341.7 | 1.10E−99 |
| 1102 | 361 | PHE0002689_2822 | Tubulin_C | 248 | 393 | 268.1 | 1.60E−77 |
| 1103 | 362 | PHE0002690_2823 | Pkinase | 185 | 469 | 303 | 4.80E−88 |
| 1105 | 364 | PHE0002710_2843 | Ldh_1_N | 6 | 155 | 152.8 | 8.30E−43 |
| 1105 | 364 | PHE0002710_2843 | Ldh_1_C | 157 | 331 | 160.5 | 3.80E−45 |
| 1106 | 365 | PHE0002715_2848 | Thiolase_N | 48 | 306 | 392.7 | 4.90E−115 |
| 1106 | 365 | PHE0002715_2848 | Thiolase_C | 313 | 437 | 235.9 | 7.60E−68 |
| 1107 | 366 | PHE0002717_2850 | EF1_GNE | 140 | 229 | 183.2 | 5.60E−52 |
| 1108 | 367 | PHE0002721_2854 | Glycolytic | 11 | 355 | 936.1 | 1.30E−278 |
| 1109 | 368 | PHE0002724_2859 | Ribosomal_L19e | 2 | 149 | 320.1 | 3.50E−93 |
| 1316 | 575 | PHE0002727_2860 | Sucrose_synth | 11 | 559 | 1379.9 | 0 |
| 1316 | 575 | PHE0002727_2860 | Glycos_transf_1 | 562 | 748 | 111.4 | 2.40E−30 |
| 1110 | 369 | PHE0002728_2861 | MFS_1 | 53 | 486 | 33 | 9.40E−07 |
| 1111 | 370 | PHE0002729_2863 | Ribosomal_L10e | 1 | 176 | 473.5 | 2.30E−139 |
| 1112 | 371 | PHE0002733_2866 | Ribosomal_S17 | 74 | 143 | 147.1 | 4.20E−41 |
| 1113 | 372 | PHE0002734_2867 | Ribosomal_L7Ae | 25 | 120 | 104.7 | 2.50E−28 |
| 1114 | 373 | PHE0002749_2882 | Suc_Fer-like | 55 | 269 | 353.9 | 2.30E−103 |
| 1115 | 374 | PHE0002751_2884 | Ribosomal_S11 | 28 | 146 | 251.9 | 1.20E−72 |
| 1116 | 375 | PHE0002752_2885 | Ribosomal_S2 | 36 | 202 | 314.6 | 1.60E−91 |
| 1117 | 376 | PHE0002771_2904 | Dirigent | 3 | 152 | 37.5 | 3.10E−09 |
| 1117 | 376 | PHE0002771_2904 | Jacalin | 171 | 305 | 116.9 | 5.20E−32 |
| 1118 | 377 | PHE0002790_2925 | p450 | 77 | 520 | 236.7 | 4.40E−68 |
| 1395 | 654 | PHE0002791_2926 | p450 | 73 | 514 | 228.6 | 1.20E−65 |
| 1119 | 378 | PHE0002846_2981 | Trehalose_PPase | 119 | 352 | 316.7 | 3.60E−92 |
| 1396 | 655 | PHE0002849_2984 | UDPGT | 20 | 493 | −63 | 1.70E−07 |
| 1397 | 656 | PHE0002855_2990 | ABC1 | 161 | 279 | 196.7 | 4.80E−56 |
| 1398 | 657 | PHE0002856_2991 | ABC1 | 165 | 283 | 190 | 4.90E−54 |
| 1120 | 379 | PHE0002864_2999 | Pkinase | 4 | 287 | 402 | 7.70E−118 |
| 1121 | 380 | PHE0002869_3004 | Pkinase | 23 | 304 | 338.1 | 1.40E−98 |
| 1122 | 381 | PHE0002875_3010 | DUF581 | 94 | 148 | 82.7 | 1.00E−21 |
| 1399 | 658 | PHE0002886_3021 | DSPc | 30 | 168 | 155.8 | 1.00E−43 |
| 1400 | 659 | PHE0002888_3023 | DSPc | 46 | 179 | 113.5 | 5.40E−31 |
| 1123 | 382 | PHE0002889_3024 | DSPc | 23 | 161 | 152.4 | 1.00E−42 |
| 1401 | 660 | PHE0002893_3028 | DSPc | 159 | 301 | 90.6 | 4.20E−24 |
| 1124 | 383 | PHE0002896_3031 | DSPc | 46 | 184 | 172.7 | 8.00E−49 |
| 1402 | 661 | PHE0002901_3036 | GATA | 472 | 507 | 71.1 | 3.20E−18 |
| 1403 | 662 | PHE0002906_3041 | GATA | 163 | 198 | 62.4 | 1.30E−15 |
| 1404 | 663 | PHE0002910_3045 | Pkinase | 173 | 526 | 105.9 | 1.00E−28 |
| 1125 | 384 | PHE0002918_3053 | Sugar_tr | 65 | 500 | 316.2 | 5.20E−92 |
| 1125 | 384 | PHE0002918_3053 | MFS_1 | 69 | 460 | 62.3 | 1.40E−15 |
| 1405 | 664 | PHE0002923_3058 | VHS | 14 | 161 | 264.6 | 1.70E−76 |
| 1405 | 664 | PHE0002923_3058 | GAT | 231 | 325 | −6 | 0.0035 |
| 1405 | 664 | PHE0002923_3058 | Alpha_adaptinC2 | 437 | 555 | 154.6 | 2.30E−43 |
| 1406 | 665 | PHE0002928_3065 | JmjN | 11 | 63 | 106.6 | 6.40E−29 |
| 1406 | 665 | PHE0002928_3065 | JmjC | 191 | 307 | 184.6 | 2.20E−52 |
| 1406 | 665 | PHE0002928_3065 | zf-C2H2 | 828 | 851 | 24 | 0.00048 |
| 1406 | 665 | PHE0002928_3065 | zf-C2H2 | 857 | 882 | 20.6 | 0.0051 |
| 1218 | 477 | PHE0002939_3089 | Pro_dh | 125 | 474 | 209.4 | 7.10E−60 |
| 807 | 66 | PHE0002940_3090 | Pro_dh | 113 | 464 | 472.4 | 4.80E−139 |
| 1126 | 385 | PHE0002946_3096 | Sugar_tr | 16 | 478 | 52.2 | 1.60E−12 |
| 1126 | 385 | PHE0002946_3096 | MFS_1 | 25 | 444 | 74.4 | 3.20E−19 |
| 1408 | 667 | PHE0002947_3097 | Sugar_tr | 28 | 361 | −47.7 | 1.70E−05 |
| 1408 | 667 | PHE0002947_3097 | MFS_1 | 36 | 382 | 31.8 | 2.20E−06 |
| 1409 | 668 | PHE0002948_3098 | FGGY_N | 22 | 305 | 21.6 | 1.80E−11 |
| 808 | 67 | PHE0002957_3107 | MIP | 339 | 585 | 194.9 | 1.70E−55 |
| 809 | 68 | PHE0002961_3111 | RRM_1 | 197 | 268 | 62.6 | 1.20E−15 |
| 809 | 68 | PHE0002961_3111 | RRM_1 | 542 | 633 | 45.7 | 1.40E−10 |
| 810 | 69 | PHE0002962_3112 | DSPc | 59 | 193 | 198.9 | 1.10E−56 |
| 1127 | 386 | PHE0002963_3113 | DSPc | 1 | 185 | 116 | 9.40E−32 |
| 1128 | 387 | PHE0002966_3116 | DSPc | 696 | 838 | 93.6 | 5.40E−25 |
| 768 | 27 | PHE0002976_3126 | Pkinase | 39 | 351 | 197.5 | 2.90E−56 |
| 1129 | 388 | PHE0002984_3134 | Pkinase | 57 | 323 | 288.3 | 1.30E−83 |
| 1410 | 669 | PHE0002987_3137 | GFO_IDH_MocA | 4 | 127 | 147 | 4.30E−41 |
| 1410 | 669 | PHE0002987_3137 | GFO_IDH_MocA_C | 139 | 251 | 62.5 | 1.20E−15 |
| 1318 | 577 | PHE0002997_3147 | WD40 | 166 | 204 | 6.4 | 4.5 |
| 1318 | 577 | PHE0002997_3147 | WD40 | 235 | 272 | 14.8 | 0.29 |
| 1318 | 577 | PHE0002997_3147 | WD40 | 278 | 316 | 30.9 | 3.90E−06 |
| 1318 | 577 | PHE0002997_3147 | WD40 | 385 | 423 | 38.1 | 2.70E−08 |
| 769 | 28 | PHE0002999_3149 | ADH_N | 26 | 160 | 151.9 | 1.50E−42 |
| 769 | 28 | PHE0002999_3149 | ADH_zinc_N | 189 | 332 | 148 | 2.20E−41 |
| 770 | 29 | PHE0003000_3150 | Aminotran_3 | 29 | 367 | 504.4 | 1.20E−148 |
| 771 | 30 | PHE0003001_3151 | Glyco_hydro_38 | 290 | 560 | 451.7 | 8.40E−133 |
| 771 | 30 | PHE0003001_3151 | Glyco_hydro_38C | 670 | 1080 | 441.3 | 1.20E−129 |
| 772 | 31 | PHE0003002_3152 | TPP_enzyme_N | 25 | 219 | 111.4 | 2.30E−30 |
| 772 | 31 | PHE0003002_3152 | TPP_enzyme_M | 243 | 396 | −7.1 | 0.00019 |
| 772 | 31 | PHE0003002_3152 | TPP_enzyme_C | 443 | 610 | 20.7 | 4.20E−08 |
| 773 | 32 | PHE0003004_3154 | Citrate_synt | 83 | 460 | 749.8 | 1.60E−222 |
| 774 | 33 | PHE0003006_3156 | Aldo_ket_red | 14 | 293 | 471 | 1.30E−138 |
| 775 | 34 | PHE0003007_3157 | PGAM | 11 | 249 | 143.7 | 4.60E−40 |
| 776 | 35 | PHE0003008_3158 | HSP20 | 96 | 207 | 135.9 | 9.80E−38 |
| 1319 | 578 | PHE0003011_3161 | Pro_CA | 45 | 213 | 79.8 | 7.60E−21 |
| 777 | 36 | PHE0003012_3162 | Trehalase_Ca-bi | 106 | 135 | 57.8 | 3.20E−14 |
| 777 | 36 | PHE0003012_3162 | Trehalase | 163 | 721 | 1035.9 | 0 |
| 1411 | 670 | PHE0003017_3167 | Transketolase_N | 7 | 339 | 804.4 | 5.50E−239 |
| 1411 | 670 | PHE0003017_3167 | Transket_pyr | 356 | 533 | 245 | 1.40E−70 |
| 1411 | 670 | PHE0003017_3167 | Transketolase_C | 546 | 657 | 61 | 3.40E−15 |
| 1412 | 671 | PHE0003018_3168 | ubiquitin | 1 | 74 | 149.1 | 1.00E−41 |
| 1412 | 671 | PHE0003018_3168 | ubiquitin | 77 | 150 | 149.1 | 1.00E−41 |
| 1412 | 671 | PHE0003018_3168 | ubiquitin | 153 | 226 | 149.1 | 1.00E−41 |
| 1412 | 671 | PHE0003018_3168 | ubiquitin | 229 | 302 | 149.1 | 1.00E−41 |
| 1412 | 671 | PHE0003018_3168 | ubiquitin | 305 | 378 | 149.1 | 1.00E−41 |
| 779 | 38 | PHE0003022_3172 | Transaldolase | 25 | 329 | 613.5 | 1.60E−181 |
| 1413 | 672 | PHE0003023_3173 | Carb_kinase | 35 | 305 | 496 | 3.80E−146 |
| 1414 | 673 | PHE0003025_3175 | Mpv17_PMP22 | 114 | 184 | 158.9 | 1.20E−44 |
| 1416 | 675 | PHE0003027_3177 | YjeF_N | 24 | 204 | 272.2 | 9.20E−79 |
| 1417 | 676 | PHE0003028_3178 | 2-Hacid_dh | 25 | 113 | 31.6 | 2.50E−06 |
| 1417 | 676 | PHE0003028_3178 | 2-Hacid_dh_C | 124 | 327 | 266.2 | 5.90E−77 |
| 1418 | 677 | PHE0003030_3180 | Asp | 66 | 428 | 180.4 | 4.10E−51 |
| 780 | 39 | PHE0003031_3181 | AMP-binding | 101 | 586 | 262.8 | 6.00E−76 |
| 781 | 40 | PHE0003035_3185 | Hexokinase_1 | 12 | 230 | 456.7 | 2.60E−134 |
| 781 | 40 | PHE0003035_3185 | Hexokinase_2 | 243 | 500 | 501.6 | 8.20E−148 |
| 782 | 41 | PHE0003037_3187 | Aldo_ket_red | 7 | 308 | 501.5 | 8.80E−148 |
| 783 | 42 | PHE0003044_3194 | Pkinase | 47 | 309 | 309.5 | 5.30E−90 |
| 783 | 42 | PHE0003044_3194 | Pkinase_Tyr | 47 | 307 | 91.2 | 2.90E−24 |
| 784 | 43 | PHE0003056_3206 | Pkinase | 352 | 672 | 250.4 | 3.40E−72 |
| 784 | 43 | PHE0003056_3206 | Pkinase_C | 690 | 748 | 33.9 | 4.80E−07 |
| 1219 | 478 | PHE0003057_3207 | Pkinase | 93 | 392 | 231.2 | 1.90E−66 |
| 1219 | 478 | PHE0003057_3207 | Pkinase_C | 410 | 461 | 36.1 | 1.10E−07 |
| 1130 | 389 | PHE0003061_3211 | MatE | 38 | 198 | 128.2 | 2.10E−35 |
| 1130 | 389 | PHE0003061_3211 | MatE | 259 | 422 | 133.6 | 5.00E−37 |
| 1419 | 678 | PHE0003062_3212 | bZIP_1 | 196 | 249 | 28.4 | 2.30E−05 |
| 1419 | 678 | PHE0003062_3212 | bZIP_2 | 196 | 246 | 31.7 | 2.20E−06 |
| 1131 | 390 | PHE0003074_3224 | NTF2 | 10 | 126 | 113.9 | 4.10E−31 |
| 1131 | 390 | PHE0003074_3224 | RRM_1 | 306 | 376 | 39.7 | 8.90E−09 |
| 1420 | 679 | PHE0003088_3240 | Pkinase | 134 | 389 | 335.4 | 8.90E−98 |
| 1420 | 679 | PHE0003088_3240 | Pkinase_C | 409 | 454 | 46.2 | 9.80E−11 |
| 1421 | 680 | PHE0003089_3237 | Pkinase | 140 | 395 | 337.7 | 1.80E−98 |
| 1421 | 680 | PHE0003089_3237 | Pkinase_C | 415 | 460 | 44.2 | 3.90E−10 |
| 1422 | 681 | PHE0003090_3238 | Pkinase | 150 | 406 | 331.2 | 1.60E−96 |
| 1422 | 681 | PHE0003090_3238 | Pkinase_C | 426 | 468 | 33.6 | 5.90E−07 |
| 1423 | 682 | PHE0003091_3239 | Pkinase | 152 | 408 | 324 | 2.40E−94 |
| 1423 | 682 | PHE0003091_3239 | Pkinase_C | 428 | 471 | 48.1 | 2.70E−11 |
| 1133 | 392 | PHE0003101_76 | Globin | 13 | 152 | 113.4 | 5.90E−31 |
| 1132 | 391 | PHE0003101_3969 | Globin | 13 | 152 | 113.4 | 5.90E−31 |
| 1424 | 683 | PHE0003102_3244 | PfkB | 3 | 310 | 292.3 | 8.00E−85 |
| 1425 | 684 | PHE0003102_3579 | PfkB | 3 | 310 | 292.3 | 8.00E−85 |
| 1426 | 685 | PHE0003121_3267 | p450 | 31 | 482 | 286.9 | 3.40E−83 |
| 1134 | 393 | PHE0003124_3270 | APS_kinase | 29 | 184 | 365 | 1.00E−106 |
| 1427 | 686 | PHE0003130_3276 | UDPGT | 9 | 451 | −16.7 | 7.80E−10 |
| 1428 | 687 | PHE0003134_3280 | CH | 15 | 115 | 52.2 | 1.60E−12 |
| 1428 | 687 | PHE0003134_3280 | EB1 | 217 | 264 | 93.1 | 7.50E−25 |
| 1135 | 394 | PHE0003138_3292 | PfkB | 7 | 313 | 371.2 | 1.40E−108 |
| 1136 | 395 | PHE0003139_3295 | PfkB | 18 | 324 | 363.5 | 3.00E−106 |
| 785 | 44 | PHE0003166_3368 | Alpha-amylase | 8 | 429 | −32.5 | 7.70E−08 |
| 1220 | 479 | PHE0003182_3341 | Glycogen_syn | 18 | 661 | 1833.8 | 0 |
| 1137 | 396 | PHE0003190_3389 | HLH | 100 | 151 | 58.5 | 2.00E−14 |
| 786 | 45 | PHE0003191_3390 | HLH | 109 | 160 | 65.5 | 1.50E−16 |
| 1429 | 688 | PHE0003194_3393 | Sina | 130 | 329 | 442 | 6.90E−130 |
| 1430 | 689 | PHE0003195_3394 | Sina | 104 | 303 | 445.2 | 7.60E−131 |
| 1138 | 397 | PHE0003196_3395 | Sina | 105 | 304 | 433.5 | 2.60E−127 |
| 1139 | 398 | PHE0003198_3397 | Sina | 96 | 295 | 414.3 | 1.50E−121 |
| 1431 | 690 | PHE0003199_3398 | Sina | 95 | 294 | 417.1 | 2.10E−122 |
| 1321 | 580 | PHE0003200_3399 | Sina | 102 | 301 | 457.1 | 2.00E−134 |
| 1432 | 691 | PHE0003201_3400 | Sina | 103 | 302 | 434.6 | 1.20E−127 |
| 1433 | 692 | PHE0003208_3410 | DUF250 | 247 | 391 | 172.4 | 1.00E−48 |
| 1140 | 399 | PHE0003211_3417 | H_PPase | 9 | 756 | 1731.2 | 0 |
| 1141 | 400 | PHE0003211_3967 | H_PPase | 9 | 756 | 1731.2 | 0 |
| 1434 | 693 | PHE0003213_3419 | AA_permease | 86 | 546 | 479.9 | 2.80E−141 |
| 1142 | 401 | PHE0003217_3423 | Myb_DNA-binding | 14 | 61 | 49.1 | 1.30E−11 |
| 1142 | 401 | PHE0003217_3423 | Myb_DNA-binding | 67 | 112 | 38.4 | 2.10E−08 |
| 1436 | 695 | PHE0003222_3428 | AA_kinase | 49 | 279 | 234.3 | 2.40E−67 |
| 1436 | 695 | PHE0003222_3428 | PUA | 318 | 392 | 93.1 | 7.60E−25 |
| 1143 | 402 | PHE0003224_3432 | DUF1423 | 102 | 586 | 778.3 | 4.10E−231 |
| 1322 | 581 | PHE0003227_3443 | Histone | 64 | 139 | 44.2 | 4.00E−10 |
| 1322 | 581 | PHE0003227_3443 | CBFD_NFYB_HMF | 70 | 134 | 87.3 | 4.10E−23 |
| 1144 | 403 | PHE0003228_3444 | adh_short | 18 | 186 | 104.4 | 3.00E−28 |
| 1145 | 404 | PHE0003229_3445 | adh_short | 18 | 186 | 103 | 7.70E−28 |
| 1222 | 481 | PHE0003234_3450 | Glycolytic | 11 | 358 | 895.8 | 1.70E−266 |
| 1437 | 696 | PHE0003238_3454 | Glycolytic | 11 | 358 | 927.6 | 4.80E−276 |
| 1223 | 482 | PHE0003239_3455 | FHA | 33 | 108 | 48.2 | 2.40E−11 |
| 1147 | 406 | PHE0003240_3456 | FHA | 32 | 107 | 47.5 | 4.10E−11 |
| 1438 | 697 | PHE0003242_3458 | ABC_tran | 1 | 147 | 111.7 | 2.00E−30 |
| 1148 | 407 | PHE0003243_3459 | ABC_tran | 47 | 233 | 240.5 | 3.20E−69 |
| 1439 | 698 | PHE0003251_3468 | DUF1530 | 110 | 209 | 211.9 | 1.30E−60 |
| 1150 | 409 | PHE0003257_3474 | GRIM-19 | 16 | 141 | 106.8 | 5.50E−29 |
| 1225 | 484 | PHE0003259_3476 | MAP1_LC3 | 14 | 117 | 279.2 | 7.00E−81 |
| 1440 | 699 | PHE0003260_3477 | MAP1_LC3 | 14 | 117 | 274.9 | 1.40E−79 |
| 1323 | 582 | PHE0003261_3478 | MAP1_LC3 | 14 | 117 | 285.4 | 9.50E−83 |
| 787 | 46 | PHE0003266_3485 | ARID | 37 | 146 | 63 | 8.70E−16 |
| 787 | 46 | PHE0003266_3485 | HMG_box | 238 | 305 | 43.6 | 6.20E−10 |
| 1226 | 485 | PHE0003267_3486 | WHEP-TRS | 55 | 107 | 23.7 | 2.60E−05 |
| 1226 | 485 | PHE0003267_3486 | tRNA-synt_2b | 149 | 450 | 262.1 | 9.70E−76 |
| 1226 | 485 | PHE0003267_3486 | HGTP_anticodon | 617 | 705 | 86.2 | 8.80E−23 |
| 1152 | 411 | PHE0003276_3495 | E1_dh | 89 | 393 | 468.9 | 5.60E−138 |
| 1325 | 584 | PHE0003277_3496 | E1_dh | 87 | 392 | 472.3 | 5.20E−139 |
| 815 | 74 | PHE0003280_3499 | DUF6 | 156 | 286 | 34.5 | 3.30E−07 |
| 1153 | 412 | PHE0003282_3501 | DUF6 | 21 | 154 | 47.8 | 3.30E−11 |
| 1153 | 412 | PHE0003282_3501 | DUF6 | 195 | 324 | 31.2 | 3.20E−06 |
| 1229 | 488 | PHE0003285_3504 | PCI | 265 | 364 | 95.1 | 1.90E−25 |
| 1154 | 413 | PHE0003286_3505 | CTP_synth_N | 1 | 287 | 674.4 | 7.50E−200 |
| 1154 | 413 | PHE0003286_3505 | GATase | 311 | 548 | 271.2 | 1.90E−78 |
| 1155 | 414 | PHE0003287_3506 | CTP_synth_N | 1 | 287 | 671.4 | 6.20E−199 |
| 1155 | 414 | PHE0003287_3506 | GATase | 311 | 548 | 264.9 | 1.40E−76 |
| 1156 | 415 | PHE0003304_3524 | BAH | 36 | 156 | 27.2 | 5.00E−05 |
| 1156 | 415 | PHE0003304_3524 | RRM_1 | 366 | 440 | 15.2 | 0.00061 |
| 1444 | 703 | PHE0003308_3527 | Yippee | 1 | 108 | 209.4 | 7.20E−60 |
| 1157 | 416 | PHE0003309_3528 | Yippee | 1 | 108 | 207.1 | 3.70E−59 |
| 1231 | 490 | PHE0003311_3530 | F-box | 25 | 71 | 23.8 | 0.00053 |
| 1231 | 490 | PHE0003311_3530 | FBA_1 | 215 | 418 | 300.3 | 3.10E−87 |
| 1158 | 417 | PHE0003312_3531 | PTR2 | 96 | 499 | 504.3 | 1.20E−148 |
| 1445 | 704 | PHE0003315_3534 | FHA | 32 | 107 | 45.7 | 1.40E−10 |
| 1446 | 705 | PHE0003320_3539 | Pkinase | 45 | 312 | 296.6 | 4.10E−86 |
| 1159 | 418 | PHE0003321_3540 | Pkinase | 44 | 311 | 297.1 | 2.90E−86 |
| 1160 | 419 | PHE0003327_3546 | Pkinase | 4 | 257 | 288.5 | 1.20E−83 |
| 1161 | 420 | PHE0003328_3547 | Pkinase | 4 | 258 | 236.2 | 6.40E−68 |
| 1162 | 421 | PHE0003330_3549 | IF4E | 1 | 198 | 283.9 | 2.70E−82 |
| 1163 | 422 | PHE0003333_3552 | IF4E | 13 | 237 | 411.1 | 1.40E−120 |
| 1164 | 423 | PHE0003333_4250 | IF4E | 13 | 237 | 411.1 | 1.40E−120 |
| 1165 | 424 | PHE0003336_3555 | IF4E | 6 | 235 | 485.9 | 4.10E−143 |
| 1447 | 706 | PHE0003344_3562 | Orn_Arg_deC_N | 73 | 368 | 275.8 | 7.70E−80 |
| 1447 | 706 | PHE0003344_3562 | Orn_DAP_Arg_deC | 371 | 551 | 62.3 | 1.40E−15 |
| 1448 | 707 | PHE0003347_3565 | Acetyltransf_1 | 265 | 343 | 56.1 | 1.10E−13 |
| 1448 | 707 | PHE0003347_3565 | Bromodomain | 460 | 548 | 122.8 | 8.90E−34 |
| 1326 | 585 | PHE0003352_3571 | GAF | 158 | 307 | 90.9 | 3.50E−24 |
| 1326 | 585 | PHE0003352_3571 | HisKA | 343 | 408 | 87.5 | 3.70E−23 |
| 1326 | 585 | PHE0003352_3571 | HATPase_c | 455 | 586 | 123.4 | 5.50E−34 |
| 1166 | 425 | PHE0003353_3572 | Sina | 96 | 295 | 414.3 | 1.50E−121 |
| 1449 | 708 | PHE0003354_3573 | bZIP_1 | 181 | 246 | 21.4 | 0.00062 |
| 789 | 48 | PHE0003358_3581 | p450 | 51 | 492 | 111.4 | 2.30E−30 |
| 1232 | 491 | PHE0003360_3583 | ketoacyl-synt | 126 | 371 | 291.6 | 1.30E−84 |
| 1232 | 491 | PHE0003360_3583 | Ketoacyl-synt_C | 379 | 537 | 218.4 | 1.40E−62 |
| 1167 | 426 | PHE0003361_3584 | malic | 119 | 307 | 392.3 | 6.40E−115 |
| 1167 | 426 | PHE0003361_3584 | Malic_M | 309 | 562 | 459.7 | 3.40E−135 |
| 1168 | 427 | PHE0003362_3585 | Hexokinase_1 | 2 | 203 | 248.6 | 1.20E−71 |
| 1168 | 427 | PHE0003362_3585 | Hexokinase_2 | 210 | 454 | 254.1 | 2.60E−73 |
| 1169 | 428 | PHE0003364_3587 | Aminotran_3 | 1 | 160 | −78.8 | 1.00E−07 |
| 1233 | 492 | PHE0003365_3588 | Rieske | 220 | 317 | 106.9 | 5.30E−29 |
| 1327 | 586 | PHE0003366_3589 | Transaldolase | 78 | 417 | 264.8 | 1.60E−76 |
| 1170 | 429 | PHE0003369_3592 | Gp_dh_N | 4 | 154 | 304.8 | 1.40E−88 |
| 1170 | 429 | PHE0003369_3592 | Gp_dh_C | 159 | 316 | 384.5 | 1.50E−112 |
| 1328 | 587 | PHE0003370_3593 | Cyclotide | 54 | 83 | 48.3 | 2.20E−11 |
| 1171 | 430 | PHE0003373_3596 | Metallophos | 168 | 366 | 87.7 | 3.10E−23 |
| 1234 | 493 | PHE0003374_3597 | Glyco_hydro_16 | 39 | 248 | 321.5 | 1.30E−93 |
| 1234 | 493 | PHE0003374_3597 | XET_C | 280 | 335 | 72.3 | 1.30E−18 |
| 1235 | 494 | PHE0003375_3598 | Trp_syntA | 94 | 347 | 486.6 | 2.60E−143 |
| 1236 | 495 | PHE0003378_3601 | MtN3_slv | 13 | 100 | 138.3 | 1.80E−38 |
| 1236 | 495 | PHE0003378_3601 | MtN3_slv | 134 | 220 | 124 | 3.70E−34 |
| 1450 | 709 | PHE0003380_3603 | Cu-oxidase_3 | 35 | 151 | 248.1 | 1.60E−71 |
| 1450 | 709 | PHE0003380_3603 | Cu-oxidase | 161 | 313 | 207.9 | 2.10E−59 |
| 1450 | 709 | PHE0003380_3603 | Cu-oxidase_2 | 420 | 556 | 190.6 | 3.50E−54 |
| 1172 | 431 | PHE0003381_3604 | F-box | 96 | 141 | 13 | 0.33 |
| 1172 | 431 | PHE0003381_3604 | Kelch_1 | 181 | 223 | 6.9 | 0.59 |
| 1172 | 431 | PHE0003381_3604 | Kelch_1 | 225 | 270 | 44.2 | 3.90E−10 |
| 1172 | 431 | PHE0003381_3604 | Kelch_2 | 225 | 270 | 18.4 | 0.023 |
| 1172 | 431 | PHE0003381_3604 | Kelch_1 | 272 | 319 | 36 | 1.20E−07 |
| 1173 | 432 | PHE0003385_3608 | 3_5_exonuc | 75 | 268 | 75.9 | 1.10E−19 |
| 1173 | 432 | PHE0003385_3608 | KH_1 | 318 | 378 | 41.4 | 2.70E−09 |
| 1239 | 498 | PHE0003387_3610 | DUF125 | 45 | 208 | 196 | 8.10E−56 |
| 1451 | 710 | PHE0003388_3611 | Methyltransf_2 | 1 | 87 | −62.5 | 2.00E−06 |
| 1174 | 433 | PHE0003391_3614 | Pkinase_Tyr | 154 | 428 | 123.4 | 5.60E−34 |
| 1174 | 433 | PHE0003391_3614 | Pkinase | 154 | 428 | 125 | 1.90E−34 |
| 1175 | 434 | PHE0003392_3615 | Lipase_GDSL | 68 | 390 | 191 | 2.50E−54 |
| 1176 | 435 | PHE0003393_3616 | FAD_binding_3 | 68 | 416 | −75.2 | 2.80E−06 |
| 1176 | 435 | PHE0003393_3616 | DAO | 70 | 327 | −18.3 | 0.00014 |
| 1240 | 499 | PHE0003401_3624 | Steroid_dh | 116 | 262 | 187.2 | 3.60E−53 |
| 1456 | 715 | PHE0003414_3654 | Alpha-amylase | 10 | 396 | −67.3 | 8.70E−06 |
| 1457 | 716 | PHE0003415_3655 | Wzy_C | 367 | 433 | 72.1 | 1.50E−18 |
| 790 | 49 | PHE0003416_3656 | UbiA | 106 | 392 | 59.7 | 8.40E−15 |
| 1241 | 500 | PHE0003417_3657 | Myb_DNA-binding | 24 | 73 | 33.8 | 5.40E−07 |
| 1241 | 500 | PHE0003417_3657 | Myb_DNA-binding | 124 | 171 | 46.9 | 6.20E−11 |
| 1242 | 501 | PHE0003418_3658 | ICL | 21 | 551 | 1223.9 | 0 |
| 1458 | 717 | PHE0003431_3639 | Alpha-amylase | 31 | 433 | 275 | 1.30E−79 |
| 1243 | 502 | PHE0003433_3642 | Hydrolase | 7 | 220 | 56.6 | 7.10E−14 |
| 1459 | 718 | PHE0003434_3643 | Hydrolase | 76 | 274 | 119.6 | 8.00E−33 |
| 1460 | 719 | PHE0003436_3645 | Hydrolase | 4 | 214 | 80.7 | 4.20E−21 |
| 1461 | 720 | PHE0003437_3646 | Hydrolase | 21 | 239 | 54.8 | 2.50E−13 |
| 1462 | 721 | PHE0003447_3678 | AT_hook | 41 | 53 | 7.4 | 1.1 |
| 1462 | 721 | PHE0003447_3678 | DUF296 | 68 | 185 | 198.9 | 1.10E−56 |
| 1244 | 503 | PHE0003450_3681 | WRKY | 106 | 165 | 119.4 | 8.80E−33 |
| 791 | 50 | PHE0003457_3688 | Remorin_C | 393 | 504 | 145.6 | 1.20E−40 |
| 1245 | 504 | PHE0003458_3689 | Remorin_C | 402 | 512 | 145 | 1.80E−40 |
| 1246 | 505 | PHE0003459_3690 | zf-C3HC4 | 166 | 207 | 41.3 | 3.00E−09 |
| 1247 | 506 | PHE0003476_3707 | zf-B_box | 3 | 47 | 47.2 | 5.00E−11 |
| 1463 | 722 | PHE0003483_3729 | Ank | 43 | 76 | 17.6 | 0.041 |
| 1463 | 722 | PHE0003483_3729 | Ank | 77 | 107 | 23.3 | 0.00079 |
| 1463 | 722 | PHE0003483_3729 | Ank | 111 | 144 | 26.2 | 0.0001 |
| 1248 | 507 | PHE0003484_3730 | Ank | 28 | 61 | 24.9 | 0.00026 |
| 1249 | 508 | PHE0003491_3737 | SRF-TF | 25 | 75 | 82.8 | 9.50E−22 |
| 1250 | 509 | PHE0003499_3745 | RWP-RK | 526 | 577 | 110.1 | 5.70E−30 |
| 1250 | 509 | PHE0003499_3745 | PB1 | 744 | 827 | 72.3 | 1.30E−18 |
| 792 | 51 | PHE0003502_3748 | zf-C3HC4 | 145 | 186 | 37.6 | 3.70E−08 |
| 793 | 52 | PHE0003506_3752 | Myb_DNA-binding | 65 | 110 | 58.6 | 1.90E−14 |
| 1251 | 510 | PHE0003518_3764 | NAM | 9 | 138 | 304.2 | 2.10E−88 |
| 1464 | 723 | PHE0003519_3765 | NAM | 10 | 139 | 292.4 | 7.70E−85 |
| 794 | 53 | PHE0003522_3768 | NAM | 8 | 143 | 161.4 | 2.10E−45 |
| 1252 | 511 | PHE0003524_3770 | NAM | 18 | 147 | 246.2 | 6.30E−71 |
| 1329 | 588 | PHE0003526_3772 | B3 | 85 | 190 | 110.6 | 4.10E−30 |
| 1329 | 588 | PHE0003526_3772 | Auxin_resp | 255 | 338 | 159.5 | 7.50E−45 |
| 1253 | 512 | PHE0003570_3816 | GRAS | 3 | 352 | 324.6 | 1.50E−94 |
| 1254 | 513 | PHE0003576_3822 | AP2 | 5 | 68 | 129.4 | 9.20E−36 |
| 1330 | 589 | PHE0003581_3827 | F-box | 52 | 105 | 19.8 | 0.0086 |
| 1330 | 589 | PHE0003581_3827 | Tub | 116 | 403 | 582.4 | 3.70E−172 |
| 1465 | 724 | PHE0003582_3828 | ZF-HD_dimer | 179 | 238 | 135.5 | 1.30E−37 |
| 1255 | 514 | PHE0003583_3829 | Myb_DNA-binding | 212 | 263 | 46.2 | 9.90E−11 |
| 1467 | 726 | PHE0003588_3834 | HLH | 146 | 195 | 41.8 | 2.10E−09 |
| 795 | 54 | PHE0003592_3838 | AP2 | 141 | 204 | 126.4 | 7.10E−35 |
| 796 | 55 | PHE0003595_3841 | AP2 | 147 | 211 | 150.9 | 2.90E−42 |
| 1468 | 727 | PHE0003598_3844 | E2F_TDP | 67 | 150 | 145.7 | 1.10E−40 |
| 1257 | 516 | PHE0003599_3845 | E2F_TDP | 5 | 91 | 124.2 | 3.20E−34 |
| 1258 | 517 | PHE0003600_3846 | HLH | 418 | 467 | 51.9 | 1.90E−12 |
| 1469 | 728 | PHE0003606_3852 | HMG_box | 62 | 131 | 73.6 | 5.70E−19 |
| 1470 | 729 | PHE0003613_3860 | Pyridoxal_deC | 33 | 381 | 534.6 | 9.30E−158 |
| 1471 | 730 | PHE0003617_3866 | zf-C2H2 | 80 | 102 | 17.9 | 0.033 |
| 1259 | 518 | PHE0003630_3888 | JmjC | 132 | 240 | 55.4 | 1.70E−13 |
| 1472 | 731 | PHE0003632_3890 | E2F_TDP | 92 | 180 | 149.3 | 9.00E−42 |
| 797 | 56 | PHE0003633_3891 | HLH | 69 | 121 | 58.3 | 2.20E−14 |
| 798 | 57 | PHE0003635_3893 | zf-C2H2 | 209 | 232 | 22 | 0.0019 |
| 1473 | 732 | PHE0003636_3894 | ZF-HD_dimer | 54 | 115 | 134 | 3.60E−37 |
| 1260 | 519 | PHE0003641_3899 | ZF-HD_dimer | 69 | 128 | 136.1 | 8.70E−38 |
| 1261 | 520 | PHE0003644_3902 | HLH | 127 | 178 | 57.7 | 3.40E−14 |
| 1262 | 521 | PHE0003650_3908 | zf-C2H2 | 47 | 69 | 18.7 | 0.018 |
| 1262 | 521 | PHE0003650_3908 | zf-C2H2 | 95 | 117 | 19.7 | 0.0093 |
| 799 | 58 | PHE0003663_3921 | zf-C3HC4 | 329 | 369 | 26 | 0.00012 |
| 800 | 59 | PHE0003670_3928 | AP2 | 20 | 84 | 142.2 | 1.20E−39 |
| 801 | 60 | PHE0003672_3930 | WRKY | 155 | 214 | 135.4 | 1.40E−37 |
| 802 | 61 | PHE0003675_3933 | Response_reg | 16 | 136 | 92.2 | 1.40E−24 |
| 802 | 61 | PHE0003675_3933 | Myb_DNA-binding | 204 | 254 | 48.5 | 2.10E−11 |
| 1474 | 733 | PHE0003676_3934 | bZIP_1 | 192 | 256 | 30.2 | 6.30E−06 |
| 1474 | 733 | PHE0003676_3934 | bZIP_2 | 192 | 246 | 38.6 | 1.90E−08 |
| 1263 | 522 | PHE0003678_3936 | bZIP_1 | 154 | 218 | 31.8 | 2.10E−06 |
| 1263 | 522 | PHE0003678_3936 | bZIP_2 | 154 | 208 | 37.1 | 5.50E−08 |
| 1331 | 590 | PHE0003681_3942 | AP2 | 13 | 77 | 140.4 | 4.20E−39 |
| 1475 | 734 | PHE0003682_3943 | Pkinase | 46 | 300 | 341.2 | 1.60E−99 |
| 1475 | 734 | PHE0003682_3943 | Pkinase_Tyr | 46 | 298 | 66.5 | 7.00E−17 |
| 1475 | 734 | PHE0003682_3943 | NAF | 385 | 442 | 100.7 | 3.70E−27 |
| 1332 | 591 | PHE0003683_3944 | Sugar_tr | 37 | 468 | −65.4 | 6.40E−05 |
| 1332 | 591 | PHE0003683_3944 | MFS_1 | 40 | 463 | 26.4 | 8.80E−05 |
| 1333 | 592 | PHE0003683_3945 | Sugar_tr | 37 | 468 | −65.4 | 6.40E−05 |
| 1333 | 592 | PHE0003683_3945 | MFS_1 | 40 | 463 | 26.4 | 8.80E−05 |
| 1264 | 523 | PHE0003686_3961 | NDK | 80 | 214 | 341.1 | 1.70E−99 |
| 1265 | 524 | PHE0003740_4042 | CBFD_NFYB_HMF | 33 | 98 | 132.1 | 1.40E−36 |
| 1266 | 525 | PHE0003742_4044 | adh_short | 7 | 144 | −11.7 | 2.40E−05 |
| 1266 | 525 | PHE0003742_4044 | RmlD_sub_bind | 8 | 338 | −163.7 | 0.0018 |
| 1266 | 525 | PHE0003742_4044 | Epimerase | 9 | 273 | 266 | 6.90E−77 |
| 1266 | 525 | PHE0003742_4044 | Polysacc_synt_2 | 9 | 330 | −161.6 | 0.0008 |
| 1266 | 525 | PHE0003742_4044 | 3Beta_HSD | 10 | 297 | −69.9 | 6.60E−08 |
| 1266 | 525 | PHE0003742_4044 | NAD_binding_4 | 11 | 251 | −54.1 | 3.60E−05 |
| 1267 | 526 | PHE0003743_4046 | adh_short | 7 | 176 | −21 | 9.70E−05 |
| 1267 | 526 | PHE0003743_4046 | RmlD_sub_bind | 8 | 338 | −131 | 2.10E−05 |
| 1267 | 526 | PHE0003743_4046 | Epimerase | 9 | 273 | 257.7 | 2.10E−74 |
| 1267 | 526 | PHE0003743_4046 | Polysacc_synt_2 | 9 | 323 | −159.7 | 0.00063 |
| 1267 | 526 | PHE0003743_4046 | 3Beta_HSD | 10 | 297 | −57.4 | 7.80E−09 |
| 1267 | 526 | PHE0003743_4046 | NAD_binding_4 | 11 | 248 | −56.6 | 5.20E−05 |
| 1476 | 735 | PHE0003788_4122 | NAM | 2 | 97 | 164.2 | 3.10E−46 |
| 1334 | 593 | PHE0003815_4288 | HAMP | 200 | 269 | 65.7 | 1.30E−16 |
| 1334 | 593 | PHE0003815_4288 | PAS | 283 | 413 | 29.7 | 9.10E−06 |
| 1334 | 593 | PHE0003815_4288 | HisKA | 422 | 490 | 95.9 | 1.00E−25 |
| 1334 | 593 | PHE0003815_4288 | HATPase_c | 535 | 655 | 141.9 | 1.60E−39 |
| 1268 | 527 | PHE0003825_4192 | NAM | 14 | 140 | 297 | 3.10E−86 |
| 1269 | 528 | PHE0003839_4208 | zf-LSD1 | 27 | 51 | 45.6 | 1.50E−10 |
| 1269 | 528 | PHE0003839_4208 | zf-LSD1 | 66 | 90 | 54.8 | 2.50E−13 |
| 1269 | 528 | PHE0003839_4208 | zf-LSD1 | 104 | 128 | 58.4 | 2.10E−14 |
| 1270 | 529 | PHE0003885_4266 | Globin | 14 | 154 | 96.2 | 8.90E−26 |
| 1271 | 530 | PHE0003886_4267 | Globin | 13 | 152 | 113.7 | 4.70E−31 |
| 1477 | 736 | PHE0003899_4284 | PHD | 180 | 227 | 60.2 | 6.20E−15 |
| 1272 | 531 | PHE0003927_4321 | PAD_porph | 14 | 368 | 694.5 | 6.70E−206 |
| 803 | 62 | PHE0003945_4522 | zf-C3HC4 | 146 | 187 | 39.2 | 1.20E−08 |
| 1478 | 737 | PHE0003948_4528 | MFS_1 | 84 | 520 | 28.5 | 2.00E−05 |
| 1273 | 532 | PHE0003959_4544 | Response_reg | 79 | 202 | 93.9 | 4.30E−25 |
| 1273 | 532 | PHE0003959_4544 | CCT | 695 | 736 | 57.3 | 4.60E−14 |
| 1274 | 533 | PHE0003961_4662 | ketoacyl-synt | 47 | 295 | 266.4 | 4.90E−77 |
| 1274 | 533 | PHE0003961_4662 | Ketoacyl-synt_C | 303 | 458 | 209.1 | 9.40E−60 |
| 1275 | 534 | PHE0003965_4553 | bZIP_1 | 277 | 335 | 39.8 | 8.10E−09 |
| 1275 | 534 | PHE0003965_4553 | bZIP_2 | 277 | 334 | 40.9 | 3.80E−09 |
| 1276 | 535 | PHE0003966_4554 | FAE_3-kCoA_syn1 | 20 | 365 | 699 | 3.10E−207 |
| 1277 | 536 | PHE0003977_4565 | HEM4 | 56 | 285 | 85.7 | 1.30E−22 |
| 1479 | 738 | PHE0003981_4568 | PK | 22 | 368 | 809.5 | 1.60E−240 |
| 1479 | 738 | PHE0003981_4568 | PK_C | 382 | 513 | 221.1 | 2.20E−63 |
| 1280 | 539 | PHE0003993_4579 | Na_Ca_ex | 147 | 280 | 119.1 | 1.10E−32 |
| 1338 | 597 | PHE0003995_4581 | Succ_DH_flav_C | 6 | 136 | 265.6 | 8.60E−77 |
| 1283 | 542 | PHE0003997_4583 | Epimerase | 12 | 226 | −40 | 0.001 |
| 1283 | 542 | PHE0003997_4583 | NmrA | 12 | 309 | 475.3 | 6.50E−140 |
| 1481 | 740 | PHE0003998_4584 | Auxin_inducible | 1 | 86 | 77.5 | 3.60E−20 |
| 1287 | 546 | PHE0004003_4589 | Transferase | 22 | 447 | 254.6 | 1.80E−73 |
| 1290 | 549 | PHE0004006_4592 | Abhydrolase_1 | 164 | 425 | 36.8 | 6.60E−08 |
| 1482 | 741 | PHE0004008_4594 | Trypsin | 112 | 272 | 16.7 | 2.50E−05 |
| 1292 | 551 | PHE0004010_4596 | Myb_DNA-binding | 347 | 392 | 43.1 | 8.40E−10 |
| 1339 | 598 | PHE0004022_4657 | PHD | 202 | 252 | 55.9 | 1.20E−13 |

TABLE 12

| | accession | gathering | |
|---|---|---|---|
| Pfam domain name | number | cutoff | domain description |
| 2-Hacid_dh | PF00389.18 | 13.2 | D-isomer specific 2-hydroxyacid |
| | | | dehydrogenase, catalytic domain |
| 2-Hacid_dh_C | PF02826.6 | −75.7 | D-isomer specific 2-hydroxyacid |
| | | | dehydrogenase, NAD binding domain |
| 3Beta_HSD | PF01073.8 | −135.9 | 3-beta hydroxysteroid |
| | | | dehydrogenase/isomerase family |
| 3_5_exonuc | PF01612.10 | −32 | 3′-5′ exonuclease |
| AAA | PF00004.17 | 10 | ATPase family associated with various |
| | | | cellular activities (AAA) |
| AA_kinase | PF00696.16 | −40 | Amino acid kinase family |
| AA_permease | PF00324.10 | −120.8 | Amino acid permease |
| ABC1 | PF03109.6 | −27.6 | ABC1 family |
| ABC_tran | PF00005.14 | 8.6 | ABC transporter |
| ADH_N | PF08240.1 | −14.5 | Alcohol dehydrogenase GroES-like |
| | | | domain |
| ADH_zinc_N | PF00107.15 | 23.8 | Zinc-binding dehydrogenase |
| AMP-binding | PF00501.15 | 0 | AMP-binding enzyme |
| AMPKBI | PF04739.4 | 25 | 5′-AMP-activated protein kinase, beta |
| | | | subunit, complex-interacting region |
| AP2 | PF00847.9 | 0 | AP2 domain |
| APS_kinase | PF01583.9 | 25 | Adenylylsulphate kinase |
| ARID | PF01388.10 | −8 | ARID/BRIGHT DNA binding domain |
| AT_hook | PF02178.7 | 14.2 | AT hook motif |
| AUX_IAA | PF02309.6 | −83 | AUX/IAA family |
| Aa_trans | PF01490.7 | −128.4 | Transmembrane amino acid transporter |
| | | | protein |
| Abhydrolase_1 | PF00561.9 | 5.5 | alpha/beta hydrolase fold |
| Acetyltransf_1 | PF00583.12 | 18.6 | Acetyltransferase (GNAT) family |
| Acyltransferase | PF01553.10 | 6 | Acyltransferase |
| Aldedh | PF00171.11 | −295 | Aldehyde dehydrogenase family |
| Aldo_ket_red | PF00248.10 | −97 | Aldo/keto reductase family |
| Alpha-amylase | PF00128.11 | −93 | Alpha amylase, catalytic domain |
| Alpha_adaptinC2 | PF02883.9 | −12 | Adaptin C-terminal domain |
| Aminotran_1_2 | PF00155.9 | −57.5 | Aminotransferase class I and II |
| Aminotran_3 | PF00202.10 | −207.6 | Aminotransferase class-III |
| Aminotran_5 | PF00266.8 | −92.9 | Aminotransferase class-V |
| Ammonium_transp | PF00909.10 | −144 | Ammonium Transporter Family |
| Ank | PF00023.17 | 21.6 | Ankyrin repeat |
| Annexin | PF00191.8 | 8 | Annexin |
| ArfGap | PF01412.8 | −17 | Putative GTPase activating protein for Arf |
| Asn_synthase | PF00733.10 | −52.8 | Asparagine synthase |
| Asp | PF00026.13 | −186.1 | Eukaryotic aspartyl protease |
| Auxin_inducible | PF02519.4 | −15 | Auxin responsive protein |
| Auxin_resp | PF06507.3 | 25 | Auxin response factor |
| B12D | PF06522.1 | 25 | B12D protein |
| B3 | PF02362.11 | 26.5 | B3 DNA binding domain |
| B56 | PF01603.8 | −210 | Protein phosphatase 2A regulatory B |
| | | | subunit (B56 family) |
| BAH | PF01426.6 | 7 | BAH domain |
| BRO1 | PF03097.6 | 25 | BRO1-like domain |
| BURP | PF03181.5 | −52 | BURP domain |
| Bromodomain | PF00439.13 | 8.9 | Bromodomain |
| CAF1 | PF04857.8 | −100.5 | CAF1 family ribonuclease |
| CBFD_NFYB_HMF | PF00808.12 | 18.4 | Histone-like transcription factor (CBF/NF- |
| | | | Y) and archaeal histone |
| CBS | PF00571.16 | 15.8 | CBS domain pair |
| CCT | PF06203.3 | 25 | CCT motif |
| CH | PF00307.18 | 22.5 | Calponin homology (CH) domain |
| CMAS | PF02353.9 | −177.9 | Cyclopropane-fatty-acyl-phospholipid |
| | | | synthase |
| CN_hydrolase | PF00795.11 | −13.9 | Carbon-nitrogen hydrolase |
| CTP_synth_N | PF06418.2 | 25 | CTP synthase N-terminus |
| CTP_transf_2 | PF01467.15 | −11.8 | Cytidylyltransferase |
| Carb_kinase | PF01256.7 | −66.3 | Carbohydrate kinase |
| Catalase | PF00199.8 | −229 | Catalase |
| Cation_efflux | PF01545.10 | −95.7 | Cation efflux family |
| Chal_sti_synt_C | PF02797.5 | −6.1 | Chalcone and stilbene synthases, C- |
| | | | terminal domain |
| Chromo | PF00385.11 | 27.5 | ‘chromo’ (CHRromatin Organisation |
| | | | MOdifier) domain |
| Citrate_synt | PF00285.10 | −101.5 | Citrate synthase |
| CobW_C | PF07683.3 | 18 | Cobalamin synthesis protein cobW C- |
| | | | terminal domain |
| ComA | PF02679.5 | 25 | (2R)-phospho-3-sulfolactate synthase |
| | | | (ComA) |
| CorA | PF01544.8 | −61.3 | CorA-like Mg2+ transporter protein |
| Cpn10 | PF00166.11 | −7.8 | Chaperonin 10 Kd subunit |
| Cpn60_TCP1 | PF00118.13 | −223.4 | TCP-1/cpn60 chaperonin family |
| Cu-oxidase | PF00394.11 | −18.9 | Multicopper oxidase |
| Cu-oxidase_2 | PF07731.3 | −5.8 | Multicopper oxidase |
| Cu-oxidase_3 | PF07732.4 | 10 | Multicopper oxidase |
| Cyclin_C | PF02984.7 | −13 | Cyclin, C-terminal domain |
| Cyclin_N | PF00134.12 | −14.7 | Cyclin, N-terminal domain |
| Cyclotide | PF03784.3 | 25 | Cyclotide family |
| Cys_Met_Meta_PP | PF01053.9 | −278.4 | Cys/Met metabolism PLP-dependent |
| | | | enzyme |
| Cystatin | PF00031.10 | 17.5 | Cystatin domain |
| DAO | PF01266.11 | −36.5 | FAD dependent oxidoreductase |
| DNA_photolyase | PF00875.7 | −10 | DNA photolyase |
| DSPc | PF00782.9 | −21.8 | Dual specificity phosphatase, catalytic |
| | | | domain |
| DUF125 | PF01988.8 | −10.1 | Integral membrane protein DUF125 |
| DUF1423 | PF07227.1 | 25 | Protein of unknown function (DUF1423) |
| DUF1530 | PF07060.1 | 25 | ProFAR isomerase associated |
| DUF1685 | PF07939.1 | 25 | Protein of unknown function (DUF1685) |
| DUF246 | PF03138.4 | −15 | Plant protein family |
| DUF250 | PF03151.6 | 125 | Domain of unknown function, DUF250 |
| DUF296 | PF03479.4 | −11 | Domain of unknown function (DUF296) |
| DUF393 | PF04134.2 | 25 | Protein of unknown function, DUF393 |
| DUF581 | PF04570.4 | −3.1 | Protein of unknown function (DUF581) |
| DUF6 | PF00892.9 | 30 | Integral membrane protein DUF6 |
| DUF641 | PF04859.2 | 25 | Plant protein of unknown function |
| | | | (DUF641) |
| DUF760 | PF05542.1 | 25 | Protein of unknown function (DUF760) |
| DUF788 | PF05620.1 | 25 | Protein of unknown function (DUF788) |
| Dehydrin | PF00257.8 | −4.4 | Dehydrin |
| Di19 | PF05605.2 | 25 | Drought induced 19 protein (Di19) |
| Dirigent | PF03018.4 | 25 | Dirigent-like protein |
| DnaJ | PF00226.18 | −8 | DnaJ domain |
| E1_dh | PF00676.9 | −90 | Dehydrogenase E1 component |
| E2F_TDP | PF02319.9 | 17 | E2F/DP family winged-helix DNA- |
| | | | binding domain |
| EB1 | PF03271.6 | 25 | EB1-like C-terminal motif |
| EF1_GNE | PF00736.8 | 20 | EF-1 guanine nucleotide exchange domain |
| ELFV_dehydrog | PF00208.10 | −27 | Glutamate/Leucine/Phenylalanine/Valine |
| | | | dehydrogenase |
| ELFV_dehydrog_N | PF02812.7 | 31.8 | Glu/Leu/Phe/Val dehydrogenase, |
| | | | dimerisation domain |
| ERO1 | PF04137.5 | −179.5 | Endoplasmic Reticulum Oxidoreductin 1 |
| | | | (ERO1) |
| ERp29 | PF07749.2 | 10.5 | Endoplasmic reticulum protein ERp29, C- |
| | | | terminal domain |
| Epimerase | PF01370.10 | −46.3 | NAD dependent epimerase/dehydratase |
| | | | family |
| F-box | PF00646.20 | 12.4 | F-box domain |
| FAD_binding_3 | PF01494.8 | −136.6 | FAD binding domain |
| FAD_binding_4 | PF01565.12 | −8.1 | FAD binding domain |
| FAD_binding_7 | PF03441.3 | 25 | FAD binding domain of DNA photolyase |
| FAE_3-kCoA_syn1 | PF07168.1 | 25 | Fatty acid elongase 3-ketoacyl-CoA |
| | | | synthase 1 |
| FA_desaturase | PF00487.13 | −46 | Fatty acid desaturase |
| FBA_1 | PF07734.2 | −39.4 | F-box associated |
| FBPase | PF00316.9 | −170.3 | Fructose-1-6-bisphosphatase |
| FGGY_N | PF00370.10 | −104.7 | FGGY family of carbohydrate kinases, N- |
| | | | terminal domain |
| FHA | PF00498.13 | 25 | FHA domain |
| Fer4 | PF00037.14 | 8 | 4Fe—4S binding domain |
| GAF | PF01590.14 | 23 | GAF domain |
| GAT | PF03127.4 | −7 | GAT domain |
| GATA | PF00320.15 | 28.5 | GATA zinc finger |
| GATase | PF00117.15 | −38.1 | Glutamine amidotransferase class-I |
| GATase_2 | PF00310.10 | −106.2 | Glutamine amidotransferases class-II |
| GFO_IDH_MocA | PF01408.11 | −7.2 | Oxidoreductase family, NAD-binding |
| | | | Rossmann fold |
| GFO_IDH_MocA_C | PF02894.7 | 6 | Oxidoreductase family, C-terminal |
| | | | alpha/beta domain |
| GH3 | PF03321.3 | −336 | GH3 auxin-responsive promoter |
| GIDA | PF01134.11 | −226.7 | Glucose inhibited division protein A |
| GRAS | PF03514.4 | −78 | GRAS family transcription factor |
| GRIM-19 | PF06212.1 | 25 | GRIM-19 protein |
| GSHPx | PF00255.9 | −16 | Glutathione peroxidase |
| GST_C | PF00043.13 | 22.3 | Glutathione S-transferase, C-terminal |
| | | | domain |
| GST_N | PF02798.8 | 14.6 | Glutathione S-transferase, N-terminal |
| | | | domain |
| GTP_EFTU | PF00009.14 | 8 | Elongation factor Tu GTP binding domain |
| GTP_EFTU_D2 | PF03144.13 | 25 | Elongation factor Tu domain 2 |
| GTP_EFTU_D3 | PF03143.6 | 14.3 | Elongation factor Tu C-terminal domain |
| Gamma-thionin | PF00304.10 | 9.6 | Gamma-thionin family |
| Gln-synt_C | PF00120.13 | −124 | Glutamine synthetase, catalytic domain |
| Gln-synt_N | PF03951.8 | 9 | Glutamine synthetase, beta-Grasp domain |
| Globin | PF00042.11 | −8.8 | Globin |
| Glyco_hydro_1 | PF00232.8 | −301.8 | Glycosyl hydrolase family 1 |
| Glyco_hydro_14 | PF01373.7 | −231.4 | Glycosyl hydrolase family 14 |
| Glyco_hydro_16 | PF00722.9 | −65 | Glycosyl hydrolases family 16 |
| Glyco_hydro_38 | PF01074.11 | −125.3 | Glycosyl hydrolases family 38 N-terminal |
| | | | domain |
| Glyco_hydro_38C | PF07748.2 | −93.1 | Glycosyl hydrolases family 38 C-terminal |
| | | | domain |
| Glyco_transf_20 | PF00982.9 | −243.6 | Glycosyltransferase family 20 |
| Glycogen_syn | PF05693.2 | −492.3 | Glycogen synthase |
| Glycolytic | PF00274.8 | −158 | Fructose-bisphosphate aldolase class-I |
| Glycos_transf_1 | PF00534.9 | −7.3 | Glycosyl transferases group 1 |
| Glycos_transf_2 | PF00535.14 | 17.6 | Glycosyl transferase family 2 |
| Glyoxalase | PF00903.14 | 12.1 | Glyoxalase/Bleomycin resistance |
| | | | protein/Dioxygenase superfamily |
| Got1 | PF04178.2 | 25 | Got1-like family |
| Gp_dh_C | PF02800.8 | −64.1 | Glyceraldehyde 3-phosphate |
| | | | dehydrogenase, C-terminal domain |
| Gp_dh_N | PF00044.11 | −74.2 | Glyceraldehyde 3-phosphate |
| | | | dehydrogenase, NAD binding domain |
| HALZ | PF02183.7 | 17 | Homeobox associated leucine zipper |
| HAMP | PF00672.13 | 17 | HAMP domain |
| HATPase_c | PF02518.13 | 22.4 | Histidine kinase-, DNA gyrase B-, and |
| | | | HSP90-like ATPase |
| HEAT | PF02985.9 | 17.6 | HEAT repeat |
| HEM4 | PF02602.5 | −12 | Uroporphyrinogen-III synthase HemD |
| HGTP_anticodon | PF03129.9 | −2 | Anticodon binding domain |
| HI0933_like | PF03486.4 | −255.8 | HI0933-like protein |
| HLH | PF00010.15 | 8.2 | Helix-loop-helix DNA-binding domain |
| HMA | PF00403.14 | 17.4 | Heavy-metal-associated domain |
| HMG_box | PF00505.8 | 4.1 | HMG (high mobility group) box |
| HSF_DNA-bind | PF00447.7 | −70 | HSF-type DNA-binding |
| HSP20 | PF00011.9 | 13 | Hsp20/alpha crystallin family |
| H_PPase | PF03030.5 | −377 | Inorganic H+ pyrophosphatase |
| Heme_oxygenase | PF01126.10 | −58 | Heme oxygenase |
| Hexapep | PF00132.11 | 20 | Bacterial transferase hexapeptide (three |
| | | | repeats) |
| Hexokinase_1 | PF00349.10 | −110.3 | Hexokinase |
| Hexokinase_2 | PF03727.5 | −131.3 | Hexokinase |
| HisKA | PF00512.13 | 10.2 | His Kinase A (phosphoacceptor) domain |
| Hist_deacetyl | PF00850.9 | −71 | Histone deacetylase domain |
| Histone | PF00125.12 | 17.4 | Core histone H2A/H2B/H3/H4 |
| Homeobox | PF00046.17 | −4.1 | Homeobox domain |
| Hpt | PF01627.11 | 25 | Hpt domain |
| Hydrolase | PF00702.13 | 13.6 | haloacid dehalogenase-like hydrolase |
| ICL | PF00463.9 | −234 | Isocitrate lyase family |
| IF4E | PF01652.8 | −35 | Eukaryotic initiation factor 4E |
| IPK | PF03770.6 | 25 | Inositol polyphosphate kinase |
| IlvC | PF01450.8 | −33.8 | Acetohydroxy acid isomeroreductase, |
| | | | catalytic domain |
| IlvN | PF07991.1 | −75.8 | Acetohydroxy acid isomeroreductase, |
| | | | catalytic domain |
| Inhibitor_I29 | PF08246.1 | 4.9 | Cathepsin propeptide inhibitor domain |
| | | | (I29) |
| Ion_trans | PF00520.18 | −4.5 | Ion transport protein |
| Isoamylase_N | PF02922.7 | −6.5 | Isoamylase N-terminal domain |
| Jacalin | PF01419.6 | 20 | Jacalin-like lectin domain |
| JmjC | PF02373.11 | −8 | JmjC domain |
| JmjN | PF02375.6 | 25 | jmjN domain |
| K-box | PF01486.7 | 0 | K-box region |
| KA1 | PF02149.9 | 25 | Kinase associated domain 1 |
| KH_1 | PF00013.17 | 8.1 | KH domain |
| Kelch_1 | PF01344.13 | 20 | Kelch motif |
| Kelch_2 | PF07646.4 | 20 | Kelch motif |
| Ketoacyl-synt_C | PF02801.10 | −54.9 | Beta-ketoacyl synthase, C-terminal |
| | | | domain |
| Kunitz_legume | PF00197.8 | −32 | Trypsin and protease inhibitor |
| LEA_5 | PF00477.7 | 25 | Small hydrophilic plant seed protein |
| LIM | PF00412.10 | 0 | LIM domain |
| LRR_2 | PF07723.2 | 8.7 | Leucine Rich Repeat |
| Lactamase_B | PF00753.15 | 22.3 | Metallo-beta-lactamase superfamily |
| Ldh_1_C | PF02866.6 | −13 | lactate/malate dehydrogenase, alpha/beta |
| | | | C-terminal domain |
| Ldh_1_N | PF00056.11 | −31.3 | lactate/malate dehydrogenase, NAD |
| | | | binding domain |
| Lectin_legA | PF00138.7 | 19 | Legume lectins alpha domain |
| Lectin_legB | PF00139.9 | −77 | Legume lectins beta domain |
| Lig_chan | PF00060.16 | 8.2 | Ligand-gated ion channel |
| Lipase_GDSL | PF00657.11 | 10.9 | GDSL-like Lipase/Acylhydrolase |
| M20_dimer | PF07687.3 | 12 | Peptidase dimerisation domain |
| MAP1_LC3 | PF02991.5 | −18.8 | Microtubule associated protein 1A/1B, |
| | | | light chain 3 |
| MFMR | PF07777.1 | −46.7 | G-box binding protein MFMR |
| MFS_1 | PF07690.4 | 23.5 | Major Facilitator Superfamily |
| MIP | PF00230.8 | −62 | Major intrinsic protein |
| Malic_M | PF03949.4 | −143.9 | Malic enzyme, NAD binding domain |
| MatE | PF01554.8 | 59.6 | MatE |
| Metallophos | PF00149.16 | 22 | Calcineurin-like phosphoesterase |
| Metallothio_2 | PF01439.7 | −3 | Metallothionein |
| Meth_synt_1 | PF08267.1 | −167.8 | Cobalamin-independent synthase, N- |
| | | | terminal domain |
| Meth_synt_2 | PF01717.7 | −155 | Cobalamin-independent synthase, |
| | | | Catalytic domain |
| Methyltransf_11 | PF08241.1 | 17.1 | Methyltransferase domain |
| Methyltransf_12 | PF08242.1 | 21.4 | Methyltransferase domain |
| Methyltransf_2 | PF00891.7 | −103.8 | O-methyltransferase |
| Methyltransf_3 | PF01596.7 | −120.6 | O-methyltransferase |
| Mpv17_PMP22 | PF04117.2 | −5.4 | Mpv17/PMP22 family |
| MtN3_slv | PF03083.5 | −0.8 | MtN3/saliva family |
| Myb_DNA-binding | PF00249.18 | 19.1 | Myb-like DNA-binding domain |
| NAC | PF01849.6 | 0 | NAC domain |
| NAD_binding_4 | PF07993.1 | −87.7 | Male sterility protein |
| NAF | PF03822.4 | 25 | NAF domain |
| NAM | PF02365.5 | −19 | No apical meristem (NAM) protein |
| NDK | PF00334.8 | −59.9 | Nucleoside diphosphate kinase |
| NIF | PF03031.7 | −81 | NLI interacting factor-like phosphatase |
| NPH3 | PF03000.4 | 25 | NPH3 family |
| NTF2 | PF02136.10 | 6 | Nuclear transport factor 2 (NTF2) domain |
| NTP_transferase | PF00483.12 | −90.5 | Nucleotidyl transferase |
| NUDIX | PF00293.16 | 0 | NUDIX domain |
| Na_Ca_ex | PF01699.12 | 25 | Sodium/calcium exchanger protein |
| NifU_N | PF01592.6 | −13 | NifU-like N terminal domain |
| NmrA | PF05368.2 | −90.6 | NmrA-like family |
| Orn_Arg_deC_N | PF02784.6 | −76 | Pyridoxal-dependent decarboxylase, |
| | | | pyridoxal binding domain |
| Orn_DAP_Arg_deC | PF00278.11 | −34.9 | Pyridoxal-dependent decarboxylase, C- |
| | | | terminal sheet domain |
| Oxidored_FMN | PF00724.8 | −147.7 | NADH:flavin oxidoreductase/NADH |
| | | | oxidase family |
| PA | PF02225.10 | 13 | PA domain |
| PAD_porph | PF04371.4 | −180.8 | Porphyromonas-type peptidyl-arginine |
| | | | deiminase |
| PARP | PF00644.9 | −55.5 | Poly(ADP-ribose) polymerase catalytic |
| | | | domain |
| PAS | PF00989.12 | 20 | PAS fold |
| PB1 | PF00564.12 | 12.1 | PB1 domain |
| PBD | PF00786.16 | 12.1 | P21-Rho-binding domain |
| PCI | PF01399.14 | 25 | PCI domain |
| PDZ | PF00595.11 | 12.1 | PDZ domain (Also known as DHR or |
| | | | GLGF) |
| PEP-utilizers | PF00391.12 | 10 | PEP-utilising enzyme, mobile domain |
| PEP-utilizers_C | PF02896.7 | −173 | PEP-utilising enzyme, TIM barrel domain |
| PEPcase | PF00311.7 | 25 | Phosphoenolpyruvate carboxylase |
| PGAM | PF00300.11 | −3 | Phosphoglycerate mutase family |
| PHD | PF00628.16 | 25.9 | PHD-finger |
| PK | PF00224.10 | −244 | Pyruvate kinase, barrel domain |
| PK_C | PF02887.5 | −44 | Pyruvate kinase, alpha/beta domain |
| PMSR | PF01625.9 | −62 | Peptide methionine sulfoxide reductase |
| PP2C | PF00481.10 | −44 | Protein phosphatase 2C |
| PPDK_N | PF01326.8 | −87 | Pyruvate phosphate dikinase, |
| | | | PEP/pyruvate binding domain |
| PRA1 | PF03208.8 | 25 | PRA1 family protein |
| PSI_PsaF | PF02507.5 | 25 | Photosystem I reaction centre subunit III |
| PTR2 | PF00854.11 | −50 | POT family |
| PUA | PF01472.8 | 2.2 | PUA domain |
| Peptidase_A22B | PF04258.3 | −137.3 | Signal peptide peptidase |
| Peptidase_C1 | PF00112.11 | −115.8 | Papain family cysteine protease |
| Peptidase_C15 | PF01470.7 | −100 | Pyroglutamyl peptidase |
| Peptidase_M20 | PF01546.16 | −14.4 | Peptidase family M20/M25/M40 |
| Peptidase_S10 | PF00450.11 | −198 | Serine carboxypeptidase |
| Peptidase_S41 | PF03572.7 | −25.8 | Peptidase family S41 |
| PfkB | PF00294.12 | −67.8 | pfkB family carbohydrate kinase |
| Phytochrome | PF00360.9 | 11 | Phytochrome region |
| Pkinase | PF00069.14 | −70.8 | Protein kinase domain |
| Pkinase_C | PF00433.11 | 14 | Protein kinase C terminal domain |
| Pkinase_Tyr | PF07714.4 | 65 | Protein tyrosine kinase |
| Polysacc_synt_2 | PF02719.5 | −176 | Polysaccharide biosynthesis protein |
| Pro_CA | PF00484.8 | −45 | Carbonic anhydrase |
| Pro_dh | PF01619.7 | −120.5 | Proline dehydrogenase |
| Pyr_redox | PF00070.16 | 5 | Pyridine nucleotide-disulphide |
| | | | oxidoreductase |
| Pyr_redox_2 | PF07992.2 | −20 | Pyridine nucleotide-disulphide |
| | | | oxidoreductase |
| Pyr_redox_dim | PF02852.11 | −13 | Pyridine nucleotide-disulphide |
| | | | oxidoreductase, dimerisation domain |
| Pyridoxal_deC | PF00282.8 | −158.6 | Pyridoxal-dependent decarboxylase |
| | | | conserved domain |
| RHD3 | PF05879.2 | 25 | Root hair defective 3 GTP-binding protein |
| | | | (RHD3) |
| RIO1 | PF01163.11 | −89.1 | RIO1 family |
| RRM_1 | PF00076.10 | 15.2 | RNA recognition motif. (a.k.a. RRM, |
| | | | RBD, or RNP domain) |
| RTC | PF01137.11 | −36.9 | RNA 3′-terminal phosphate cyclase |
| RTC_insert | PF05189.3 | 25 | RNA 3′-terminal phosphate cyclase |
| | | | (RTC), insert domain |
| RWP-RK | PF02042.5 | 25 | RWP-RK domain |
| Ran_BP1 | PF00638.8 | −38 | RanBP1 domain |
| Ras | PF00071.11 | 18 | Ras family |
| Remorin_C | PF03763.3 | 25 | Remorin, C-terminal region |
| Response_reg | PF00072.11 | −14.4 | Response regulator receiver domain |
| Reticulon | PF02453.7 | −40 | Reticulon |
| Ribonuclease_T2 | PF00445.8 | −53 | Ribonuclease T2 family |
| Ribosomal_L1 | PF00687.10 | −101 | Ribosomal protein L1p/L10e family |
| Ribosomal_L10e | PF00826.7 | 25 | Ribosomal L10 |
| Ribosomal_L12 | PF00542.8 | 25 | Ribosomal protein L7/L12 C-terminal |
| | | | domain |
| Ribosomal_L19e | PF01280.9 | −28 | Ribosomal protein L19e |
| Ribosomal_L39 | PF00832.9 | 25 | Ribosomal L39 protein |
| Ribosomal_L7Ae | PF01248.13 | 6 | Ribosomal protein |
| | | | L7Ae/L30e/S12e/Gadd45 family |
| Ribosomal_S11 | PF00411.7 | −4 | Ribosomal protein S11 |
| Ribosomal_S17 | PF00366.9 | 1.7 | Ribosomal protein S17 |
| Ribosomal_S2 | PF00318.9 | −22 | Ribosomal protein S2 |
| Ribosomal_S27 | PF01599.8 | 50 | Ribosomal protein S27a |
| Rieske | PF00355.15 | −7 | Rieske [2Fe—2S] domain |
| RmlD_sub_bind | PF04321.6 | −171.8 | RmlD substrate binding domain |
| RuBisCO_small | PF00101.9 | −20.1 | Ribulose bisphosphate carboxylase, small |
| | | | chain |
| Rubrerythrin | PF02915.7 | −4.8 | Rubrerythrin |
| SAM_1 | PF00536.17 | 11.3 | SAM domain (Sterile alpha motif) |
| SAM_2 | PF07647.5 | 20 | SAM domain (Sterile alpha motif) |
| SPC25 | PF06703.1 | 25 | Microsomal signal peptidase 25 kDa |
| | | | subunit (SPC25) |
| SPX | PF03105.9 | −20 | SPX domain |
| SRF-TF | PF00319.8 | 11 | SRF-type transcription factor (DNA- |
| | | | binding and dimerisation domain) |
| START | PF01852.8 | 25 | START domain |
| SapB_1 | PF05184.4 | 20 | Saposin-like type B, region 1 |
| SapB_2 | PF03489.5 | 20 | Saposin-like type B, region 2 |
| SecY | PF00344.9 | −210 | eubacterial secY protein |
| SelR | PF01641.8 | −66.5 | SelR domain |
| Sigma70_r1_2 | PF00140.9 | 25 | Sigma-70 factor, region 1.2 |
| Sigma70_r2 | PF04542.3 | 11 | Sigma-70 region 2 |
| Sigma70_r3 | PF04539.4 | 10 | Sigma-70 region 3 |
| Sigma70_r4 | PF04545.5 | 20.7 | Sigma-70, region 4 |
| Sina | PF03145.6 | −48.4 | Seven in absentia protein family |
| Steroid_dh | PF02544.6 | −44.7 | 3-oxo-5-alpha-steroid 4-dehydrogenase |
| Suc_Fer-like | PF06999.2 | −42.4 | Sucrase/ferredoxin-like |
| Succ_DH_flav_C | PF02910.9 | −42 | Fumarate reductase/succinate |
| | | | dehydrogenase flavoprotein C-terminal |
| | | | domain |
| Sucrose_synth | PF00862.9 | −134 | Sucrose synthase |
| Sugar_tr | PF00083.12 | −85 | Sugar (and other) transporter |
| Synaptobrevin | PF00957.9 | 25 | Synaptobrevin |
| TPP_enzyme_C | PF02775.9 | 19.7 | Thiamine pyrophosphate enzyme, C- |
| | | | terminal TPP binding domain |
| TPP_enzyme_M | PF00205.11 | −23.9 | Thiamine pyrophosphate enzyme, central |
| | | | domain |
| TPP_enzyme_N | PF02776.7 | −70 | Thiamine pyrophosphate enzyme, N- |
| | | | terminal TPP binding domain |
| Thiolase_C | PF02803.6 | −30.7 | Thiolase, C-terminal domain |
| Thiolase_N | PF00108.11 | −129.5 | Thiolase, N-terminal domain |
| Thioredoxin | PF00085.8 | −25.7 | Thioredoxin |
| Tic22 | PF04278.2 | 25 | Tic22-like family |
| Transaldolase | PF00923.8 | −49 | Transaldolase |
| Transferase | PF02458.5 | −161.2 | Transferase family |
| Transket_pyr | PF02779.12 | −50 | Transketolase, pyridine binding domain |
| Transketolase_C | PF02780.9 | −15.5 | Transketolase, C-terminal domain |
| Transketolase_N | PF00456.10 | −98 | Transketolase, thiamine diphosphate |
| | | | binding domain |
| Trehalase | PF01204.8 | 25 | Trehalase |
| Trehalase_Ca-bi | PF07492.1 | 20 | Neutral trehalase Ca2+ binding domain |
| Trehalose_PPase | PF02358.6 | −49.4 | Trehalose-phosphatase |
| Trp_Tyr_perm | PF03222.3 | −232.6 | Tryptophan/tyrosine permease family |
| Trp_syntA | PF00290.10 | −149.8 | Tryptophan synthase alpha chain |
| Trypsin | PF00089.13 | −33.2 | Trypsin |
| Tub | PF01167.7 | −98 | Tub family |
| Tubulin | PF00091.14 | −55.7 | Tubulin/FtsZ family, GTPase domain |
| Tubulin_C | PF03953.6 | −10 | Tubulin/FtsZ family, C-terminal domain |
| UBA | PF00627.18 | 20.5 | UBA/TS-N domain |
| UDPGP | PF01704.7 | −265.2 | UTP--glucose-1-phosphate |
| | | | uridylyltransferase |
| UDPGT | PF00201.8 | −151 | UDP-glucoronosyl and UDP-glucosyl |
| | | | transferase |
| UPF0057 | PF01679.7 | 25 | Uncharacterized protein family UPF0057 |
| UbiA | PF01040.8 | −45 | UbiA prenyltransferase family |
| Ubie_methyltran | PF01209.8 | −117 | ubiE/COQ5 methyltransferase family |
| Usp | PF00582.15 | 25.7 | Universal stress protein family |
| VHS | PF00790.8 | −13.2 | VHS domain |
| VQ | PF05678.3 | 25 | VQ motif |
| W2 | PF02020.7 | 25 | eIF4-gamma/eIF5/eIF2-epsilon |
| WD40 | PF00400.19 | 21.4 | WD domain, G-beta repeat |
| WHEP-TRS | PF00458.9 | 10 | WHEP-TRS domain |
| WRKY | PF03106.5 | 25 | WRKY DNA-binding domain |
| Wzy_C | PF04932.4 | 25 | O-Antigen Polymerase |
| XET_C | PF06955.2 | 11.4 | Xyloglucan endo-transglycosylase (XET) |
| | | | C-terminus |
| Xan_ur_permease | PF00860.10 | −151.2 | Permease family |
| YL1 | PF05764.3 | 25 | YL1 nuclear protein |
| YL1_C | PF08265.1 | 18.6 | YL1 nuclear protein C-terminal domain |
| YTH | PF04146.5 | 25 | YT521-B-like family |
| Yippee | PF03226.4 | 25 | Yippee putative zinc-binding protein |
| YjeF_N | PF03853.3 | 25 | YjeF-related protein N-terminus |
| ZF-HD_dimer | PF04770.2 | 25 | ZF-HD protein dimerisation region |
| Zip | PF02535.10 | −28 | ZIP Zinc transporter |
| adh_short | PF00106.13 | −46.6 | short chain dehydrogenase |
| bZIP_1 | PF00170.10 | 16.5 | bZIP transcription factor |
| bZIP_2 | PF07716.4 | 15 | Basic region leucine zipper |
| cNMP_binding | PF00027.17 | 20.6 | Cyclic nucleotide-binding domain |
| cobW | PF02492.8 | −10 | CobW/HypB/UreG, nucleotide-binding |
| | | | domain |
| efhand | PF00036.19 | 17.5 | EF hand |
| ketoacyl-synt | PF00109.14 | −73.6 | Beta-ketoacyl synthase, N-terminal |
| | | | domain |
| malic | PF00390.8 | 25 | Malic enzyme, N-terminal domain |
| p450 | PF00067.11 | −105 | Cytochrome P450 |
| peroxidase | PF00141.12 | −10 | Peroxidase |
| tRNA-synt_2b | PF00587.14 | −40.5 | tRNA synthetase class II core domain (G, |
| | | | H, P, S and T) |
| ubiquitin | PF00240.12 | 19.4 | Ubiquitin family |
| zf-B_box | PF00643.13 | 11.1 | B-box zinc finger |
| zf-C2H2 | PF00096.14 | 19 | Zinc finger, C2H2 type |
| zf-C3HC4 | PF00097.12 | 16.9 | Zinc finger, C3HC4 type (RING finger) |
| zf-Dof | PF02701.5 | 25 | Dof domain, zinc finger |
| zf-LSD1 | PF06943.2 | 25 | LSD1 zinc finger |

### Example 8

### Selection of Transgenic Plants with Enhanced Agronomic Trait(s)

[0128] This example illustrates the preparation and identification by selection of transgenic seeds and plants derived from transgenic plant cells of this invention where the plants and seed are identified by screening a having an enhanced agronomic trait imparted by expression of a protein selected from the group including the homologous proteins identified in Example 4. Transgenic plant cells of corn, soybean, cotton, canola, wheat and rice are transformed with recombinant DNA for expressing each of the homologs identified in Example 4. Plants are regenerated from the transformed plant cells and used to produce progeny plants and seed that are screened for enhanced water use efficiency, enhanced cold tolerance, increased yield, enhanced nitrogen use efficiency, enhanced seed protein and enhanced seed oil. Plants are identified exhibiting enhanced traits imparted by expression of the homologous proteins.

The application's sequence listing, which the Patent Office published only in electronic form, follows.

SEQUENCE LISTING (52803 sequences)

SEQ ID NO: 1 - DNA, 951 bp, Arabidopsis thaliana
atgggtctccaagagcttgacccgttagcccaattgagcttaccgccgggttttcggttttatccgactgacgaagagctgatggttgaatatctctgtagaaaagccgccggtcacgacttctctctccagctcatagctgaaatcgatctctacaagtttgatccatgggttttaccaagtaaggcgttattcggtgaaaaagaatggtattttttcagcccgagggataggaagtatccaaacgggtcaaggcctaatcgggttgccgggtcgggttattggaaagccaccggtacggataaagttatctcgacggagggaagaagagttggtatcaagaaagctttggtgttttacattggaaaagctccaaaaggaaccaaaaccaattggattatgcatgagtaccgtctcatcgaaccctctcgtcgaaatggaagcaccaagcttgatgattgggttttatgtcgaatatacaaaaagcaaacaagcgcacaaaaacaagcttacaataatctaatgacgagtggtcgtgaatacagcaacaatggttcgtcgacatcttcttcgtctcatcaatacgacgacgttctcgagtcgttgcatgagattgacaacagaagtttggggtttgccgccggttcatcaaacgcgctgcctcatagtcatagaccggttttaaccaatcataaaaccgggtttcagggtttagccagggagccaagttttgattgggcgaatttgattggacagaactcggtcccggaactcggactgagtcataacgttccgagtattcgttacggtgacggtggaacgcagcaacaaactgaggggattcctcggtttaataataactcggacgtctcggctaatcagggttttagtgttgacccggttaacggatttgggtactcgggtcaacaatctagtgggttcgggtttatt

SEQ ID NO: 2 - DNA, 1299 bp, Saccharomyces cerevisiae
atgaacaaaagaacacaggaatacaagaacacaagagcgataatgtctgccactctgttcaataacatcgaattgctgccccctgatgccctttttggtattaagcaaaggtacgggcaagatcaacgtgctaccaaggtcgacttgggtatcggggcctacagagacgacaacggtaaaccatgggtcttgccaagtgttaaagccgccgaaaagctaattcataacgacagctcctacaaccatgaatacctcggtattaccggtctgccaagtttgacatctaacgccgccaagatcatcttcggtacgcaatccgatgcctttcaggaagacagagtaatctcagtacaatcactgtctggtacgggtgctcttcatatatctgcgaagtttttttcaaaattcttcccagataaactggtctatttgtctaagcctacttgggccaaccacatggccatttttgagaatcaaggcttgaaaacggcgacttacccttactgggccaacgaaactaagtctttggacctaaacggctttctaaatgctattcaaaaagctccagagggctccattttcgttctgcactcttgcgcccataacccaactggtctggaccctactagtgaacaatgggttcaaatcgttgatgctatcgcctcaaagaaccacatcgccttatttgacaccgcctaccaagggtttgccactggagatttggacaaggatgcctatgctgtgcgtctaggtgtggagaagctttcaacggtctctcccgtctttgtctgtcagtcctttgccaagaacgccggtatgtacggtgagcgtgtaggttgtttccatctagcacttacaaaacaagctcaaaacaaaactataaagcctgctgttacatctcaattggccaaaatcattcgtagtgaagtgtccaacccacccgcctacggcgctaagattgtcgctaaactgttggaaacgccagaattaacggaacagtggcacaaggatatggttaccatgtcctccagaattacgaaaatgaggcacgcattaagagaccatttagtcaagttgggcactcctggcaactgggatcatatagtaaatcaatgcgggatgttctcctttacaggattgactcctcaaatggttaaacgacttgaagaaacccacgcagtttacttggttgcctcaggtagagcttctattgctggattgaatcaaggaaacgtggaatacgtggctaaagccattgatgaagtggtgcgcttctatactattgaagctaaattgtag

SEQ ID NO: 3 - DNA, 1356 bp, Saccharomyces cerevisiae
atgttgaggacgaggcttactaattgcagtctatggaggccctactacacgtcatcgcttagtagagtaccaagagcacctccagataaagtcttggggttatctgaacacttcaaaaaggtaaaaaatgttaacaaaattgacctgaccgtaggaatatataaagatggttggggcaaagtgacgacgtttccctccgttgcaaaagctcaaaaattgattgaatctcatttagagttgaataagaatctttcatatttaccaataacaggttccaaagaatttcaggaaaacgttatgaaatttttgttcaaggaatcatgtccgcagtttgggccattttatttagcccatgatagaatcagctttgttcagactttgagtggtacaggcgccctagctgtagcagctaaattcttggcattatttatttcaagagatatttggatacctgacccatcatgggcaaatcataagaacatttttcagaacaatggttttgaaaatatttaccggtattcctattataaggacggtcagatagacatcgacggatggattgagcaattgaaaacctttgcatataacaaccagcaagaaaacaataagaacccaccttgcataatcttgcatgcgtgttgtcacaaccctacaggtctcgacccaactaaagagcaatgggaaaagattatagatactatatatgagctaaaaatggtacccattgttgatatggcttatcagggtttagagtctggtaacttactaaaggacgcatatttattgaggctatgtctcaatgtaaataaatatccaaattggagtaacggtatctttctttgtcaatcttttgccaagaacatgggcctttatggtgaacgagttggttccttaagcgttatcacgccggcaactgcgaacaatggaaagttcaaccctctacaacagaaaaactcattgcagcaaaatattgactcccaattaaaaaagattgtcagaggtatgtattcttctccaccaggatacggttctcgtgtggtaaatgtagtattatcagatttcaaattgaaacagcaatggttcaaggatgttgatttcatggttcagagattgcatcacgtcagacaggagatgtttgaccgtctagggtggccggatcttgtaaatttcgcacaacagcacggtatgttttactatacaaggtttagtccaaagcaagtcgaaatattgagaaacaattacttcgtctatttaacaggtgatggtagattgtcgcttagcggagtcaatgattcgaacgttgattacttatgtgaatctcttgaagcagtctcgaaaatggacaaactcgcatag

SEQ ID NO: 4 - DNA, 1241 bp, Escherichia coli
aaaaaagcaggctcctgcaggaccatgtttgagaacattaccgccgctcctgccgacccgattctgggcctggccgatctgtttcgtgccgatgaacgtcccggcaaaattaacctcgggattggtgtctataaagatgagacgggcaaaaccccggtactgaccagcgtgaaaaaggctgaacagtatctgctcgaaaatgaaaccaccaaaaattacctcggcattgacggcatccctgaatttggtcgctgcactcaggaactgctgtttggtaaaggtagcgccctgatcaatgacaaacgtgctcgcacggcacagactccggggggcactggcgcactacgcgtggctgccgatttcctggcaaaaaataccagcgttaagcgtgtgtgggtgagcaacccaagctggccgaaccataagagcgtctttaactctgcaggtctggaagttcgtgaatacgcttattatgatgcggaaaatcacactcttgacttcgatgcactgattaacagcctgaatgaagctcaggctggcgacgtagtgctgttccatggctgctgccataacccaaccggtatcgaccctacgctggaacaatggcaaacactggcacaactctccgttgagaaaggctggttaccgctgtttgacttcgcttaccagggttttgcccgtggtctggaagaagatgctgaaggactgcgcgctttcgcggctatgcataaagagctgattgttgccagttcctactctaaaaactttggcctgtacaacgagcgtgttggcgcttgtactctggttgctgccgacagtgaaaccgttgatcgcgcattcagccaaatgaaagcggcgattcgcgctaactactctaacccaccagcacacggcgcttctgttgttgccaccatcctgagcaacgatgcgttacgtgcgatttgggaacaagagctgactgatatgcgccagcgtattcagcgtatgcgtcagttgttcgtcaatacgctgcaggaaaaaggcgcaaaccgcgacttcagctttatcatcaaacagaacggcatgttctccttcagtggcctgacaaaagaacaagtgctgcgtctgcgcgaagagtttggcgtatatgcggttgcttctggtcgcgtaaatgtggccgggatgacaccagataacatggctccgctgtgcgaagcgattgtggcagtgctgtagctcgagacccagctttcttgtacaaa

SEQ ID NO: 5 - DNA, 801 bp, Oryza sativa
acaagtttgtacaaaaaagcaggctcctgcaggaccggctgctgcgatggccggcgccgacgtggacgtcgggacggagctccggctggggctgcccggaggtggcggcggcgccgccgaggcggcggccaaggccgcgaagaggggcttcgaggagaccattgacctgaagctgaagctgcccaccgccggcatggaggaggccgccgccggcaaggcggaggcgccggccgccgagaaggccaagaggccggcggaggccgccgccgccgacgccgagaagccacctgctcccaaggcgcaggcagtgggttggccaccagttcggtcgttccgcaggaacatcatgaccgtccagtcagtgaagagcaagaaggaagaggaagctgacaagcagcagcagcagcccgctgccaatgccagcggcagcaacagctctgccttcgtgaaggtcagcatggacggggcaccctacctgcgcaaggtggacctgaagatgtacaacagctacaaggacctctcccttgctctgcagaagatgttcggcaccttcaccgcaactgggaacaatatgaatgaggtgaatggctctgatgctgttacaacttatgaagacaaggatggtgactggatgcttgttggagatgtcccgtggcagatgtttgtcgagtcatgcaaacgcttgaggatcatgaagggttccgaagccattggtcttgcaccaagagcaaaggacaagtacaagaacaagagctgaaaatgttgcatagctcgagacccagctttcttgtacaaagtggt

SEQ ID NO: 6 - DNA, 1757 bp, Saccharomyces cerevisiae
atgccaataagatcaatcagctcagcttcacaaatgaacgtgttcggtaaaaaagaagaaaagcaagaaaaagtttactctctacaaaacggttttccgtactctcatcacccatacgcttctcaatactcaagaccagacggccctatcttactgcaagacttccatctgctggaaaatattgcaagtttcgatagagaaagagttccggagcgtgtagtccatgccaaaggtggtggttgtagactggagttcgaactaacagattctttgagtgatattacatacgccgctccataccagaatgtgggttacaaatgtcctggtcttgttcgtttttccaccgttggtggtgaaagtggtacaccagacactgcaagagacccaagaggtgtttcttttaaattctataccgagtgggggaaccatgactgggtcttcaacaatactcccgtcttcttcctcagagacgctattaagtttcccgtatttattcattcgcaaaagagagaccctcagtctcatctgaatcagtttcaggacactaccatatactgggattatctaacattgaatccggaatcaatccatcaaataacttacatgtttggtgatagaggtactcctgcttcgtgggctagtatgaacgcgtactctggtcattccttcatcatggtcaacaaagaaggtaaggacacatatgtgcaattccacgtcttgtcggatactggttttgaaaccttgactggagataaggctgctgaactgtcaggctcccaccctgattataatcaggcaaagctgttcactcaattgcaaaatggcgaaaagccaaaatttaactgttatgtgcaaacaatgacacccgaacaagcaactaagttcaggtattcggtaaatgacctaacgaaaatatggccacacaaggaattccctttgagaaaatttggtaccatcaccctaacggagaatgttgacaattatttccaagaaattgaacaagttgcattcagtccaacgaacacttgtatcccaggtattaagccttctaatgattccgttctacaagccagacttttctcctatccagacactcaacgtcatagattgggagccaactatcagcaattgcccgtcaacagaccaagaaacttgggatgtccatactccaaaggtgattcccaatacactgccgaacagtgtccatttaaagcagtgaacttccaaagggacggcccaatgagttactacaatttcggtcctgagccaaattatatttccagtttaccaaatcaaactctgaaattcaaaaatgaagacaacgacgaagtatctgataagttcaaagggatagttcttgacgaagtaacagaagtttctgtgagaaaacaggaacaagaccaaatcagaaacgagcatattgttgatgccaaaattaatcaatattactacgtttatggtattagtccactagacttcgaacagccaagagctctatatgaaaaggtatacaacgatgaacagaagaaattattcgttcataacgttgtttgccacgcttgtaagatcaaagatcctaaagtcaaaaagagagttacgcaatactttggtttgctaaacgaagatttgggtaaagtcattgcagaatgcttgggagttccttgggaacctgttgaccttgaaggttatgccaagacttggtccattgcaagtgccaattagctcgagcctgcagggacccagctttattgtacaaa

SEQ ID NO: 7 - DNA, 2855 bp, Saccharomyces cerevisiae
atgagcaatgatccatctgctgtatcggaactaccagacaaggacagtcttgataacggtatcagcaatgacaatgaaagggccatgggcggcaatggcgatggcggcgatggattacgattaccaaggaccactggaactttgaacgtcaatgccttacaaaaaggcactaatgctgcccatgaagctggtggatacaaatccatggatcctgcgaagaacgcggagacaaccaatgatgatgacaataatgtcgtttcactagatgatcctattcaatttacccgagtatcttcctcctctgtcatcagtggaatgtcttcatccatgagtcctcattctaacatcgatgaaaccaaatctctagaagcagtcactccaaacataaataccagcaatataaccccggatcattctgctgacaacacattttctaccataaatgcgtccgagtcagatcaccagtttaatgacactttactatcaaaactgtcgttaacagattctacagaaactatagaaaataacgcgacagtgaagcaccagcagccagttgcatcttccacagtaaactcgaataagagctccactgatatacgaagggctacaccagtgtccactcccgttatctctaaaccatcgatgacaaccacgccaagacagatcaattcagcttcccattcgctttcgaaccctaagcataagcaacataaaccaaaagttaaaccgtccaagcctgaagcaaaaagtaaaccggtttctgtgaaaaaaagctttccttcgaaaaatcctttaaaaaactcctctccacctaaaaagcaaacagaaaaatcgtattattcttcctcttcgaaaaaaaggaaaagcggttcaaatagtggtacactaagaatgaaagatgtctttacgtcctttgtacagaatataaagagaaattctcaggatgataaaagggcctcatcgtcgtccaataattcttcctcatcttctataaccaccgctttgaggatatctacgccatacaatgccaagcatatccaccatgtgggcgtggactccaagactggtgagtacacaggtttgccggaggaatgggaaaaattgttgacttctagtggtatttccaaaagagaacaacagcaaaacatgcaagcagtcatggatattgtcaaattctatcaggatgtcacggaaacaaacggtgaagataaaatgttcaagactttcaacacaaccacaggattgccgggaagtcctcaagtttcaacaccgcctgcaaactcattcaataaatttcctccgtcgacaagtgattcgcacaattacggttccagaacaggtacaccaatgtccaatcacgtcatgtctccaaccttaaatacagattctagttcagcaaacgggaaattcataccaagtagaccggctcctaagcccccatcttctgcgtccgcttcagctccaattataaaatcacccgtcatgaattctgccgccaatgtttcgcccttgaagcagactcatgcacctacaactccgaacaggaccagcccaaacaggtcctcaatatcaagaaatgccactttaaaaaaagaggagcagccactaccaccaatacctccaaccaaatccaaaacgtctccaatcatctccacagctcacacaccacagcaagttgctcaatcgccaaaagcgccggcgcaagagacggtaacgacacctacttcgaagccagctcaagcaagaagcttgtctaaagaattaaatgagaaaaagagagaggaaagggaaagacgtaaaaaacaactatatgccaaattgaacgaaatttgctcagacggtgacccaagtacaaaatatgccaatttagtaaaaattggtcaaggtgcatcaggtggtgtttatactgcttatgaaataggtacgaatgtctcagtggccattaagcaaatgaatctcgaaaagcaaccaaaaaaggagctaatcatcaatgagattctggtcatgaagggtagcaaacaccctaatatagttaatttcattgattcttacgttttaaaaggcgacctttgggtcattatggaatacatggaaggtggctccttaactgatgtggtcacccattgtattttgacagaaggtcaaattggtgccgtttgtagagaaactttgagtgggttggaatttttacattctaaaggtgttcttcacagagatatcaaatccgataacatcctattgtccatggaaggggatattaagttaacggatttcggtttttgcgctcaaatcaatgaattgaacttgaaaagaactactatggtgggaacgccttattggatggcgcctgaagtggtttctaggaaagaatatggcccaaaagtagatatctggtcgttgggtatcatgatcattgaaatgatcgagggggagcctccatatttaaatgaaaccccgctaagagcactgtatttaattgctacaaatggtacacccaagttaaaggaacccgagaatctatcgtcaagcttgaaaaaattccttgattggtgtttatgtgtggagcccgaagatagagcaagcgctacggaattgcttcatgatgaatatatcacggagatagctgaagccaattcctcattggccccgctagtcaagttagcaagattgaagaaagtagctgagaacatggatgctgatgaagataatgacgacgataacgacaacgagcatattaataagacaaacaattgtgacgacaataacgatagcaaagaaaccgtaaatttggacgtaactgaagatgataaacaaaagtagctcgagcctgcagggacccagctttcttgtacaaa

SEQ ID NO: 8 - DNA, 1139 bp, Arabidopsis thaliana
atggctttggagaaagaggaagaagcgtcacaaaacggtgcgttttgtgtccttgatgggctctattgcgaggaagaaaccgggtttgtggaggacgatcttgatgacgatggagatttagattttctcgagaaatctgatgagagtgttgtaaagtttcagtttttacctcttttggatatgttcttatgggatgacgatgagattctgagtttgatttcaaaggaaaacgaaacgaatccatgttttggggaacaaatcttagatggctttttggtttcttgtaggaaagaggctttagattgggttcttagggttaaatctcattatgggtttacttcattgacggctatacttgctgtgaactacttcgataggtttatgacaagtataaagcttcagactgataagccatggatgtctcagcttgttgctgtggcttctttgtctttagctgctaaagttgaagagattcaagttccattgctcttagacctccaagtggaagaagcaagatatctctttgaagctaagacgattcaaagaatggagcttttgattctttctactcttcaatggagaatgcaccctgtgactccaatctctttctttgatcacattatccggcgatttggctctaaatggcaccagcaattagacttctgtaggaagtgtgagcgtcttctgatctctgttattgctgatacgaggtttatgaggtacttcccttctgtcttagctactgcaataatgatccttgtcttcgaggaattgaagccatgtgatgaagttgaataccaatctcaaataacgactctactcaaagtcaatcaggagaaagtaaatgaatgctatgaactgttgttggagcacaatccaagcaagaagaggatgatgaatttggttgatcaggacagtccaagtggtgtattagactttgatgacagctcaaatagctcctggaatgtctccactactgcttcagtgtcctcatcatcttcgtctccagagcctctgctcaagagaagaagagttcaggagcagcaaatgagattgccctcaataaaccgtatgtttctcgatgtgcttagtagtcctcgctagctcgagcctgcagggacccagctttcttgtacaaa

SEQ ID NO: 9 - DNA, 431 bp, Arabidopsis thaliana
atggctttttccaaatctctagtgtttgttcttctcgctgctcttttgatttcttccgcagtggctcaatctccggctccagctccatctaacgtcggaggtagacggatctcaccggctccttcacctaagaagatgactgctcctgctcctgcacctgaagtttctccttctccttctccggcagccgcattgactccagaatcctctgcttcaccaccatcgccgcctctagctgattctcctaccgctgactccccggctttgtctccatctgcgatctccgattctccgactgaagctcctggtcctgctcagggcggcgccgtttcgaacaaattcgccagtttcggatctgtggcggttatgttaactgctgccgttttggttatctagctcgagcctgcagggacccagctttcttgtacaaa

SEQ ID NO: 10 - DNA, 338 bp, Arabidopsis thaliana
atggtttcttcgcttcttatgtcatttgctccggccaccgtgagggtttacgccacaagcacaaagggaggttcaggcggcccaaaggaggagaagaatcccatcgactttgttcttgggtttatgacaaaacaagatcagttctatgagactaatccacttctaaagaaggtggatgagaaagaaggcaccaccaccggaggccgaggaaccgttcgcggtggtaaaaactcagctccgacgcctgtgccgaagaagagcgagggtggatttggtggcttaggaagcctcttcaagaaatagctcgagcctgcagggacccagctttcttgtacaaa

SEQ ID NO: 11 - DNA, 1040 bp, Arabidopsis thaliana
atgtccgatgctccgtcgtcttccccggatgccacggcgtcgcactggtgctatcactgcaacaaacgcgtcgtcgttgaaaccttagatgactttgtcgtgtgctgcgaatgtaacaaaggtttcgtcgagtcaattcaaccgactcccgccgcttattcatcgccggcgccaccgcagccactttccccagatctgaatgtagaagactccagtattggctcgcatttcctccagatgctccgcttgttagcccacgcgccttctcagcgttcaccaccacgacaccttgatgttttatcttacgaagatgatttcttcaggttggagctcaatagtagaaacgaaatcgacgatgacgaagacgaagatgaagatgatggagatgaagaagaagaggatgaggaagagaatttaaccgtcaacgacgaagaagacgaagaagatgatctgaggaggagaaatcgttttcctctcacgacgacgcagtcgagaaccggaagaaacagaattctcgattgggctgagattttgatgggaatcgaagacaattcgattgagttccgtatggaatcagatcgatacgcaggaaatccggctgattacatagacgatgcagccggatacgaagctttgctacagaatttagcagaaggagatggtggtggtggcggaggaaggagaggcgcaccaccggctgcgaaatcggcaatagaggcattggagactttcgaggttagttcttcggagggagagatggttatggtttgtgctgtgtgtaaagatggaatggtgatgggagaaactggtaagaagttaccgtgtggacattgttaccacggagattgtattgtgccatggttaggaacaaggaactcttgtcctgtctgtagattccagcttgagactgatgatgctgaatatgaggaagagaggaaaaaaagaacttctaccgtgtcagattctgctgctgcttcttcttcttcttcaacttctcgttactagctcgagcctgcagggacccagctttcttgtacaaa

SEQ ID NO: 12 - DNA, 861 bp, Arabidopsis thaliana
atggagctactcacaagcttgaccaactggttaactccgacgactctcttcctcctcctcaatttcacgatcgccaccattttcatcaccaaccggttcagttcctgttcaagaaaacacaaccaacatcaagatggttacgggtcgtcgggtcatgaccaaaatcaggcacggtttggcagacctccttcgctcatagacagagtaaagtccatcaacttccatctgtacaattctccttcaccagaatccgagatccactactccgggtcggatcctaacccgaacccacctccttctctcttgcaacgggtcaaatccatcaacatgccttacttcaagttcccacaacacaattctgaaggagattacgctgcttacgagctcatgacccaacccgacgagactaaccgggtcgacccgatcgacaagatcccggaggatgacgtcacgaccgaacctagattcggagctccatcactcttgcagcgggtgaaatccataaagcttccttctttatacagatccgacccagatccaacaccagaagtgcaaacacatacgaggacgaagtcggagtcgagtaaaccggcgacgaagaagaagaagaaagctacaaagaagatgatgaaatctgctagcgagagacacatcggccgggaagaggaggagacagttgaggccgtggagaagagaaggccggagacgatgagagttgagagaacgacgtcgataggagacggaggagaagaaggtgtcgacgataaagcttcaaatttcatcaacaagtttaagcaacagcttaagctacagaggctagattcgtttctaaggtacagagagatgctcaagaacgattag

SEQ ID NO: 13 - DNA, 1879 bp, Oryza sativa
acaagtttgtacaaaaaagcaggctcctgcaggaccatggataccctcttcaggttggttagcctccaccaccatcaccaccaccagcacgcggcctcaccgtcgccgccggaccagccgcacaagtcgtacccctcctcgcgagggagcaccagctccccctcctcccaccacacccacaaccacacctactaccaccactcccactcccactacaacaataatagcaacaccaactactattaccagggtggtggaggcggcggcggagggtactactacgcggaggagcagcagccggcggcgtacctagaagaatgcggcaacggccaccagttttacatggatgaagacttctcctcctcgtcttcctcccgccagttccactcgggaacgggcgcgccgtcgtcggcgccggtgcctcctcctccgtcggcgacgacgtcgtccgcgggcgggcacgggctgtttgaggcggcggacttctcgttcccgcaggttgatatcagcctcgacttcggcggctctccggccgttccgtcgtcgtccggtgctggcgccggcgccggggcagcgccgtcgtcgtcggggaggtgggcggcgcagctgctgatggagtgcgcgcgcgcggtggcggggcgcgacagccagcgcgtgcagcagctcatgtggatgctcaacgagctggcctcgccgtacggcgacgtcgaccagaagctggcctcctacttcctgcagggcctcttcgcgcggctcaccacctccggcccgcgcacgctgcggacgctcgccaccgcgtcggaccggaacgcgtcgttcgactccacgcgccgcacggcgctcaagttccaggagctcagcccgtggacgccgttcgggcacgtcgccgccaacggcgccatactcgagtcgttcctggaggccgcggcggcgggcgccgccgcctcctcctcctcgtcgtcttcatcgtcgacgccgccgacgcggctgcacatcctcgacctgagcaacacgttctgcacgcagtggccgaccctcctggaggcgctggccacccggtcctcggacgacacgccgcacctgtccatcaccaccgtcgtgcccacggcggcgccgtcggcggccgcgcagcgcgtgatgcgggagatcgggcagcgcctcgagaagttcgcgcggctgatgggcgtcccgttcagcttccgcgccgtgcaccactcgggggacctggccgacctcgacctcgccgcgctggacctccgcgagggcggcgccaccgccgcgctcgccgtcaactgcgtaaacgcgctgcgcggggtcgcgcgggggcgcgacgcgttcgtggcgtcgctccggcgcctggagccgcgcgtggtcaccgtcgtggaggaggaggccgacctggcggcgccggaggcggacgcgtcgtcggaggccgacaccgacgccgcgttcgtcaaggtgttcggcgagggcctccgcttcttctcggcgtacatggactcgctggaggagagcttccccaagacaagcaacgagaggctgtcactggagagggcggtcggccgtgccatcgtcgacctcgtgtcatgcccggcctcccagtccgccgagcgccgggagaccgccgcgtcgtgggcgcggcgcatgcggtcggcggggttctcgccggcggcattcagcgaggacgtcgccgacgacgtgcggtcgcttctccggcggtacaaggagggctggtcgatgcgggacgccggcggtgccacggacgacgccgccggcgccgctgctgccggagcgttccttgcgtggaaggagcagcctgtcgtgtgggcgagcgcgtggaagccatagctcgagacccagctttcttgtacaaagtggt

SEQ ID NO: 14 - DNA, 1334 bp, Bacillus subtilis
aaaaaagcaggctcctgcaggaccatggcagccgatcgaaacaccggtcatacagaagaggacaaacttgatgtattaaaatcaacccaaaccgtaatacataaggctctggaaaaattgggatatcccgaagaggtatacgaattgttaaaagagccgatgagattattaacggtaaaaatacctgttcgtatggacgacggttcagtaaagattttcacaggatatcgtgcgcagcacaatgactctgtcggtccaacgaaaggcgggatacgttttcacccgaacgtaacagaaaaagaggtgaaggcggtgaaggcgctttcaatttggatgagtttaaaatgcggcataattgatcttccatatggcggtggtaaaggcggaattgtttgtgatccaagggatatgtcgtttagagagctggagcgtctgagcagagggtatgtcagagcgatcagccaaattgtcggcccgacaaaagacgtgccggcaccggatgtatttacaaactcacaaatcatggcttggatgatggatgagtattcaagaattgatgaatttaattcgcctggatttattacaggcaaaccgcttgtgcttggcggatctcacgggagagaatctgcgacagcaaaaggtgttaccatctgtattaaagaagcggctaagaagagaggcatcgatattaaaggtgcgcgtgtcgttgtccaaggcttcggaaacgcgggaagctatttggcaaaatttatgcatgatgcgggggcaaaagttgtcggcatctcagatgcgtatggcggactttatgatccggaaggccttgatatcgattatttactcgaccgacgcgacagcttcggtaccgtaacaaagcttttcaacgataccattaccaaccaagagctgctggagctggattgtgatattctcgttcctgctgcgattgaaaatcaaattacagaagaaaatgcccataatatccgggctaaaattgtcgttgaagcagcgaacggaccaacaacgcttgaaggaacaaaaattctttcagaccgggacattctgcttgtaccagacgtgctggcaagtgccggtggcgtaacagtttcttattttgaatgggttcagaataaccaaggcttctactggagtgaagaagaggtagaagaaaaattagaaaaaatgatggtcaaatcatttaacaatatttacgaaatggctaacaaccgaagaattgacatgaggctcgctgcatatatggtcggcgttcgcaaaatggctgaagcttcgcgttttagaggctggatatagctcgagacccagctttcttgtacaaa

SEQ ID NO: 15 - DNA, 1415 bp, Saccharomyces cerevisiae
aaaaaagcaggctcctgcaggaccatgtcagagccagaatttcaacaagcttacgaagaagttgtctcctctttggaagactctactcttttcgaacaacacccggaatacagaaaggttttgccaattgtttctgttccagaaagaatcatacaattcagagtcacctgggaaaatgacaagggtgaacaagaagttgctcaaggttacagagtgcaatataactccgccaagggtccatacaagggtggtctacgtttccatccttccgtgaacttgtctatcttgaaattcttgggtttcgaacaaatcttcaagaactccttgaccggcctagacatgggtggtggtaaaggtggtctatgtgtggacttgaagggaagatctaataacgaaatcagaagaatctgttatgctttcatgagagaattgagcagacacattggtcaagacactgacgtgccagctggtgatatcggtgttggtggtcgtgaaattggttacctgttcggtgcttacagatcatacaagaactcctgggaaggtgtcttaaccggtaagggtttgaactggggtggttctttgatcagaccagaagccactggttacggtttagtttactatactcaagctatgatcgactatgccacaaacggtaaggaatctttcgaaggtaagcgcgtcaccatctctggtagtggtaacgttgctcaatacgctgccttgaaggttattgagctaggtggtactgtcgtttccctatctgactccaagggttgtatcatctctgaaactggtatcacctccgaacaagtcgctgatatttccagtgctaaggtcaacttcaagtccttggaacaaatcgtcaacgaatactctactttctccgaaaacaaagtgcaatacattgctggtgctcgtccatggacccacgtccaaaaggtcgacattgctttgccatgtgccacccaaaatgaagtcagcggtgaagaagccaaggccttggttgctcaaggtgtcaagtttattgccgaaggttccaacatgggttccactccagaagctattgccgtctttgaaactgctcgttccaccgccactggaccaagcgaagctgtttggtacggtccaccaaaggctgctaacttgggtggtgttgctgtttctggtttagaaatggcacaaaactctcaaagaatcacatggactagcgaaagagttgaccaagagttgaagagaattatgatcaactgtttcaatgaatgtatcgactatgccaagaagtacactaaggacggtaaggtcttgccatctttggtcaaaggtgctaatatcgcaagtttcatcaaggtctctgatgctatgtttgaccaaggtgatgtattttagctcgagacccagctttcttgtacaaa

SEQ ID NO: 16 - DNA, 1388 bp, Pseudomonas fluorescens
aaaaaagcaggctcctgcaggaccatgatcgaatccgtcgaatccttcctcgcccgtctgaaaaaacgcgatccggatcaacccgaattccaccaggccgtcgaagaagtcctgcgcagtctgtggccgtttctcgaggccaatccgcactatctgacctcgggaattctggagcgtatctgcgagccggagcgggcggtggtgttccgagtgtcgtgggtcgacgatcagggcagggtccaggtcaatcgcggtttccgcatccagatgaacagcgccattggcccctacaagggcggtttgcgtttccatccttcggtgaatctgggcgtgttgaaattcctcgccttcgagcagaccttcaagaattccctgacctcgctgcccatgggcggaggcaagggtggctcggacttcgatccgaagggcaagagcgacgccgaagtcatgcgtttttgccaggcattcatgagcgagctgtaccgccacatcggtgccgacgtggacgtcccggccggtgatatcggtgtcggcgcacgggaaatcggtttcctgttcggccagtacaaacgcctgagcaaccagttcaccagcgtgctgaccggcaagggcatgacctacggcggcagcttgattcgccccgaagccaccggtttcggttgcgtgtacttcgccgaggaaatgctcaagcgtcgcgagcagaccgtcgaaggcaaacgcgtggcgatctccggttccggcaacgttgcgcaatacgcggctcgcaaagtgatggatctgggcggcaaggtgatttccctctccgactccgaaggcacgctgtattgcgaggcgggcctgagcgaagaacagtggttggcgctgctggaactgaagaacgtcaagcgtgggcggatcagcgaattggcgtctgccttcggtctggagttccgcgccggtcagttgccatggtcgttgccgtgcgacattgcgctgccatgcgcgacccagaacgaacttgacgcggaatccgcccgcaccttgctgcgcaacggctgcgtctgcgtggccgaaggcgcgaacatgccgaccacccttgaggctgtggatatctttatcgaagcgggcattctgttcgcgccgggcaaggcctcgaatgccggcggcgtagcggtcagtgggctggagatgtcgcagaacgccatgcgcctgctgtggacgggcggcgaggtggacagcaagctgcacgggatcatgcagtcgatccaccacgcctgcgtgcattacggtgaggaaaacggccggatcaactacgtcaaaggcgcgaacatcgccggcttcgtcaaggtcgccgacgcgatgctcgcccaaggcgtggtttagctcgagacccagctttcttgtacaaa

SEQ ID NO: 17 - DNA, 1426 bp, Bacillus halodurans
aaaaaagcaggctcctgcaggaccatgacaacattggtaagagagaaacaaacgtatgacgttcagtattatgtacagcacgtatacgaaaccgtgaaacgacgtaatccgaatgaacatgaatttcatcaagcggttaaggaagtgtttgattcgttactacctgtccttgtgaagcatcctcaatatgttaagcaagcgatactcgaaagaatcgtagaaccggaaagagttatttcctttcgagtcccttgggtggatgatcaaggaaacgtccaagtgaatcgtgggtttcgtgtacaatttaacagtgctctcggaccgtataaaggtggtttgcggtttcatccttctgttaatgcaagcatcattaaatttctcggatttgagcaaatatttaaaaacgctttaacaggtcaaccaattggcggtggcaaaggcggctccgattttgacccaaaaggaaagagcgacggtgaaatcatgcgttttagccaaagcttcatgtcagagcttagcaactatattggaccggatatagatgttcctgcaggagatatcggtgtgggcgccaaggaaattggctatatgttcgggcagtataaaaaaatgcgtggcggctttgaggccggagtgctgactggaaaaggcattggctacggcggaagtcttgccagaaaagaagcgactggctacggcacggtgtattttgtagaagaaatgatcaaagatcacggcttcagctttgctgggagtacggttgttgtatcgggatcgggaaatgtctcgatttacgccatggaaaaagcgatgcagctcggtgcaaaagtggtagcatgcagcgattctggaggctacgtctacgacaaaaacggcatcgatttacagacggtcaagcgtttgaaagaagtcgaaagaaaacggatcagcgaatacgtaaacgaacatccccatgctcattatgttcaaggttgctcaggtatatggtctgttccgtgcgacattgccttgccttgtgcaacacaaaatgaactcgatgaagcggctgcaacgatgttaatcgctaacggtgtgaaagcagtcggtgaaggagccaatatgccttccacacttcaagctgtccatacctttcaagagcatggagtactgtttgcgcctgcgaaagcggcgaatgcaggcggtgtttccgtgtctgctttggaaatggcacaaaacagcacaagattagcgtggacttttgaggaagtggatgccaagctgtatgagataatgaaaaacatttatcgcgaaagcataaaggcggcggagttgtatgaggcttctggaaatcttgtggtcggcgccaacattgctggattcgtgaaagttgcagatgccatgatttcccacggggtcgtctagctcgagaccagctttcttgtacaaa

SEQ ID NO: 18 - DNA, 1337 bp, Synechocystis sp. PCC 6803
aaaaaagcaggctcctgcaggaccatggctggatcactgtttgccgatgccagtaaaagattagaaaaagccctgaaatatgtggccatttccgacgatgccggggaaaggctgaaatatcccaaaaccagtctcagtgtttccattccggtgcggatggacgatggctctttaaaaatctttcccggttaccgagtgcgctacgacgacaccagggggccaggcaaagggggcgtgcgctaccatcccaacgtcaccatggatgaggtgcaatccttagccttttggatgacctttaaatgtgccctgttaaatttgcccttcggaggagctaaggggggcatcaccctcaatcccaaagaactcagccgagcagaattggagcgtttaagtcggggttacatcgaggcgatcgccgattttattggcccggacatcgacattttagccccggatgtttacaccaatgaaatgatgatgggctggatgatggaccaatacagcatcattcgccgcaaaattagtcccgctgtggtcaccggcaaacccgtcaccatggggggcagtcaaggtcgcaacacggccaccggcactggagctttttacatcatgcagggcatgctacccaagtttgaccaatatcccgaaaataccaccgttgctgtccagggtttcggtaatgcgggtatggtggtagccgaatgtttataccaagatggctacaaagtggtggccatcagtgattcccaggggggcatttataacgaacaaggcatcgatattcccgctgtgattgattacaaacaacggcatcgcactttagcgggtatgtactgtgaccaagccatctgcgatttaggggaaaatcaacaaatcagtaatgccgagttactagctctggacgtggacgtgctcattcccgccgccttggaaaatcaaattacccgcgacaatgcagaccaagtcagagctcgctacatttttgaagttgctaatgggcccaccaccaccgccgccgatgatattttggctagcaaaggtatctatgttttccccgatattttggtcaatgctgggggggtgacggtgagctactttgaatgggtacagaaccgcagtggactttattggagcgccaaggaagttaacgatcgcctgaaggaaaaaatggtggaggaagcggaacatgtgtggaacattacccaggaattggatgtgaatgtgcgcactgcagcctatatccacgcccttaaccgcctgagcgaagctatggatgctaaggggactagggattattaccaggacagctagctcgagacccagctttcttgtacaaa

SEQ ID NO: 19 - DNA, 2110 bp, Saccharomyces cerevisiae
acaagtttgtacaaaaaagcaggctcctgcaggaccatgactcaattcactgacattgataagctagccgtctccaccataagaattttggctgtggacaccgtatccaaggccaactcaggtcacccaggtgctccattgggtatggcaccagctgcacacgttctatggagtcaaatgcgcatgaacccaaccaacccagactggatcaacagagatagatttgtcttgtctaacggtcacgcggtcgctttgttgtattctatgctacatttgactggttacgatctgtctattgaagacttgaaacagttcagacagttgggttccagaacaccaggtcatcctgaatttgagttgccaggtgttgaagttactaccggtccattaggtcaaggtatctccaacgctgttggtatggccatggctcaagctaacctggctgccacttacaacaagccgggctttaccttgtctgacaactacacctatgttttcttgggtgacggttgtttgcaagaaggtatttcttcagaagcttcctccttggctggtcatttgaaattgggtaacttgattgccatctacgatgacaacaagatcactatcgatggtgctaccagtatctcattcgatgaagatgttgctaagagatacgaagcctacggttgggaagttttgtacgtagaaaatggtaacgaagatctagccggtattgccaaggctattgctcaagctaagttatccaaggacaaaccaactttgatcaaaatgaccacaaccattggttacggttccttgcatgccggctctcactctgtgcacggtgccccattgaaagcagatgatgttaaacaactaaagagcaaattcggtttcaacccagacaagtcctttgttgttccacaagaagtttacgaccactaccaaaagacaattttaaagccaggtgtcgaagccaacaacaagtggaacaagttgttcagcgaataccaaaagaaattcccagaattaggtgctgaattggctagaagattgagcggccaactacccgcaaattgggaatctaagttgccaacttacaccgccaaggactctgccgtggccactagaaaattatcagaaactgttcttgaggatgtttacaatcaattgccagagttgattggtggttctgccgatttaacaccttctaacttgaccagatggaaggaagcccttgacttccaacctccttcttccggttcaggtaactactctggtagatacattaggtacggtattagagaacacgctatgggtgccataatgaacggtatttcagctttcggtgccaactacaaaccatacggtggtactttcttgaacttcgtttcttatgctgctggtgccgttagattgtccgctttgtctggccacccagttatttgggttgctacacatgactctatcggtgtcggtgaagatggtccaacacatcaacctattgaaactttagcacacttcagatccctaccaaacattcaagtttggagaccagctgatggtaacgaagtttctgccgcctacaagaactctttagaatccaagcatactccaagtatcattgctttgtccagacaaaacttgccacaattggaaggtagctctattgaaagcgcttctaagggtggttacgtactacaagatgttgctaacccagatattattttagtggctactggttccgaagtgtctttgagtgttgaagctgctaagactttggccgcaaagaacatcaaggctcgtgttgtttctctaccagatttcttcacttttgacaaacaacccctagaatacagactatcagtcttaccagacaacgttccaatcatgtctgttgaagttttggctaccacatgttggggcaaatacgctcatcaatccttcggtattgacagatttggtgcctccggtaaggcaccagaagtcttcaagttcttcggtttcaccccagaaggtgttgctgaaagagctcaaaagaccattgcattctataagggtgacaagctaatttctcctttgaaaaaagctttctagctcgagacccagctttcttgtacaaagtggt

SEQ ID NO: 20 - DNA, 2093 bp, Saccharomyces cerevisiae
aaaaaagcaggctcctgcaggaccatgactcaattcactgacattgataagctagccgtctccaccataagaattttggctgtggacaccgtatccaaggccaactcaggtcacccaggtgctccattgggtatggcaccagctgcacacgttctatggagtcaaatgcgcatgaacccaaccaacccagactggatcaacagagatagatttgtcttgtctaacggtcacgcggtcgctttgttgtattctatgctacatttgactggttacgatctgtctattgaagacttgaaacagttcagacagttgggttccagaacaccaggtcatcctgaatttgagttgccaggtgttgaagttactaccggtccattaggtcaaggtatctccaacgctgttggtatggccatggctcaagctaacctggctgccacttacaacaagccgggctttaccttgtctgacaactacacctatgttttcttgggtgacggttgtttgcaagaaggtatttcttcagaagcttcctccttggctggtcatttgaaattgggtaacttgattgccatctacgatgacaacaagatcactatcgatggtgctaccagtatctcattcgatgaagatgttgctaagagatacgaagcctacggttgggaagttttgtacgtagaaaatggtaacgaagatctagccggtattgccaaggctattgctcaagctaagttatccaaggacaaaccaactttgatcaaaatgaccacaaccattggttacggttccttgcatgccggctctcactctgtgcacggtgccccattgaaagcagatgatgttaaacaactaaagagcaaattcggtttcaacccagacaagtcctttgttgttccacaagaagtttacgaccactaccaaaagacaattttaaagccaggtgtcgaagccaacaacaagtggaacaagttgttcagcgaataccaaaagaaattcccagaattaggtgctgaattggctagaagattgagcggccaactacccgcaaattgggaatctaagttgccaacttacaccgccaaggactctgccgtggccactagaaaattatcagaaactgttcttgaggatgtttacaatcaattgccagagttgattggtggttctgccgatttaacaccttctaacttgaccagatggaaggaagcccttgacttccaacctccttcttccggttcaggtaactactctggtagatacattaggtacggtattagagaacacgctatgggtgccataatgaacggtatttcagctttcggtgccaactacaaaccatacggtggtactttcttgaacttcgtttcttatgctgctggtgccgttagattgtccgctttgtctggccacccagttatttgggttgctacacatgactctatcggtgtcggtgaagatggtccaacacatcaacctattgaaactttagcacacttcagatccctaccaaacattcaagtttggagaccagctgatggtaacgaagtttctgccgcctacaagaactctttagaatccaagcatactccaagtatcattgctttgtccagacaaaacttgccacaattggaaggtagctctattgaaagcgcttctaagggtggttacgtactacaagatgttgctaacccagatattattttagtggctactggttccgaagtgtctttgagtgttgaagctgctaagactttggccgcaaagaacatcaaggctcgtgttgtttctctaccagatttcttcacttttgacaaacaacccctagaatacagactatcagtcttaccagacaacgttccaatcatgtctgttgaagttttggctaccacatgttggggcaaatacgctcatcaatccttcggtattgacagatttggtgcctccggtaaggcaccagaagtcttcaagttcttcggtttcaccccagaaggtgttgctgaaagagctcaaaagaccattgcattctataagggtgacaagctaatttctcctttgaaaaaagctttctagctcgagacccagctttcttgtacaaa

SEQ ID NO: 21 - DNA, 931 bp, Oryza sativa
acaagtttgtacaaaaaagcaggctcctgcaggaccatggggaggtcgccatgctgcgagaaggcgcacacgaacaagggggcgtggacgaaggaggaggaccagcggctgatcgcctacatcaaggcgcacggcgagggttgctggcggtcgctgcccaaggcggcggggctcctccgctgcggcaagagctgccgcctccgctggatgaactacctccgccccgacctcaagcgcggcaacttcaccgacgacgacgacgagctcatcatcaagctccacgcccttctcggcaacaagtggtcgttgattgcggggcagctgccggggaggacggacaacgagatcaagaactactggaacacgcacatcaagcgcaagctcctgagccggggcatcgacccgcagacgcaccggccggtcagcgccgggagcagcgccgccgcggcgagcgggctgaccacgacggccagcaccgccgcctttccgtcccttgcgccggcgccgccgccgcagcagcacaggctacacaacccggtgcacgccgcggcgccgagcaatgcgagcttcgccaggtccgcggcgtccccgccgtcggaggacggccacagcagcagcggcggcagctcggacgcgccgcggtgccccgacctcaacctcgacctcgacctcgacctgtccatgagcctgccgagctcgccgcccaagacgccggccgccgcgtcgtccacgaccgcgtcgcgccaccatcaccaccagcagcagaagaccatctgcctctgctaccacctcggcgtccgcaacggcgacgtctgcagctgcaaggcggccgcgccatcgccggccggcccacgcgcgttccggtttctcaggccactggaggagggccagtacatatagctcgagacccagctttcttgtacaaagtggt

SEQ ID NO: 22 - DNA, 2719 bp, Escherichia coli
acaagtttgtacaaaaaagcaggctcctgcaggaccatgaacgaacaatattccgcattgcgtagtaatgtcagtatgctcggcaaagtgctgggagaaaccatcaaggatgcgttgggagaacacattcttgaacgcgtagaaactatccgtaagttgtcgaaatcttcacgcgctggcaatgatgctaaccgccaggagttgctcaccaccttacaaaatttgtcgaacgacgagctgctgcccgttgcgcgtgcgtttagtcagttcctgaacctggccaacaccgccgagcaataccacagcatttcgccgaaaggcgaagctgccagcaacccggaagtgatcgcccgcaccctgcgtaaactgaaaaaccagccggaactgagcgaagacaccatcaaaaaagcagtggaatcgctgtcgctggaactggtcctcacggctcacccaaccgaaattacccgtcgtacactgatccacaaaatggtggaagtgaacgcctgtttaaaacagctcgataacaaagatatcgctgactacgaacacaaccagctgatgcgtcgcctgcgccagttgatcgcccagtcatggcataccgatgaaatccgtaagctgcgtccaagcccggtagatgaagccaaatggggctttgccgtagtggaaaacagcctgtggcaaggcgtaccaaattacctgcgcgaactgaacgaacaactggaagagaacctcggctacaaactgcccgtcgaatttgttccggtccgttttacttcgtggatgggcggcgaccgcgacggcaacccgaacgtcactgccgatatcacccgccacgtcctgctactcagccgctggaaagccaccgatttgttcctgaaagatattcaggtgctggtttctgaactgtcgatggttgaagcgacccctgaactgctggcgctggttggcgaagaaggtgccgcagaaccgtatcgctatctgatgaaaaacctgcgttctcgcctgatggcgacacaggcatggctggaagcgcgcctgaaaggcgaagaactgccaaaaccagaaggcctgctgacacaaaacgaagaactgtgggaaccgctctacgcttgctaccagtcacttcaggcgtgtggcatgggtattatcgccaacggcgatctgctcgacaccctgcgccgcgtgaaatgtttcggcgtaccgctggtccgtattgatatccgtcaggagagcacgcgtcataccgaagcgctgggcgagctgacccgctacctcggtatcggcgactacgaaagctggtcagaggccgacaaacaggcgttcctgatccgcgaactgaactccaaacgtccgcttctgccgcgcaactggcaaccaagcgccgaaacgcgcgaagtgctcgatacctgccaggtgattgccgaagcaccgcaaggctccattgccgcctacgtgatctcgatggcgaaaacgccgtccgacgtactggctgtccacctgctgctgaaagaagcgggtatcgggtttgcgatgccggttgctccgctgtttgaaaccctcgatgatctgaacaacgccaacgatgtcatgacccagctgctcaatattgactggtatcgtggcctgattcagggcaaacagatggtgatgattggctattccgactcagcaaaagatgcgggagtgatggcagcttcctgggcgcaatatcaggcacaggatgcattaatcaaaacctgcgaaaaagcgggtattgagctgacgttgttccacggtcgcggcggttccattggtcgcggcggcgcacctgctcatgcggcgctgctgtcacaaccgccaggaagcctgaaaggcggcctgcgcgtaaccgaacagggcgagatgatccgctttaaatatggtctgccagaaatcaccgtcagcagcctgtcgctttataccggggcgattctggaagccaacctgctgccaccgccggagccgaaagagagctggcgtcgcattatggatgaactgtcagtcatctcctgcgatgtctaccgcggctacgtacgtgaaaacaaagattttgtgccttacttccgctccgctacgccggaacaagaactgggcaaactgccgttgggttcacgtccggcgaaacgtcgcccaaccggcggcgtcgagtcactacgcgccattccgtggatcttcgcctggacgcaaaaccgtctgatgctccccgcctggctgggtgcaggtacggcgctgcaaaaagtggtcgaagacggcaaacagagcgagctggaggctatgtgccgcgattggccattcttctcgacgcgtctcggcatgctggagatggtcttcgccaaagcagacctgtggctggcggaatactatgaccaacgcctggtagacaaagcactgtggccgttaggtaaagagttacgcaacctgcaagaagaagacatcaaagtggtgctggcgattgccaacgattcccatctgatggccgatctgccgtggattgcagagtctattcagctacggaatatttacaccgacccgctgaacgtattgcaggccgagttgctgcaccgctcccgccaggcagaaaaagaaggccaggaaccggatcctcgcgtcgaacaagcgttaatggtcactattgccgggattgcggcaggtatgcgtaataccggctagctcgagacccagctttcttgtacaaagtggt

SEQ ID NO: 23 - DNA, 2683 bp, Zea mays
atggctttcaaaggactcccgcgtgattcccgagggtccctcgaagtcttcaatccagacgctcctgtttcagatcgagcaacgacctccccgtttctcctccctcctgcggtcgcgtcccatcccagcctcctcgccgccggagatggcggcgatgctgacgtgggtcgggcgacacagagggccgccgagtggggcctcgtcctccagaccgacgagcacaccggccgcccccagggtgtcgtcgcccgcccctccggttccaaccgcaccagcgagagtggcaactccatcgacgagagggccgccgccgccggtgctggtagagctctcccccgggtgtcggaggagcttcgcgccgcgctctcagcgttccagcagaccttcgtcgtgtccgatgccacccgccctgaccaccccatcctctacgccagcgctggattcttcaacatgacgggctactcctccaatgaggttgtcggaaggaactgccgcttccttcaaggttctgggaccgaccccgtagagatttccaagatcagacaggctctcgcagctgggtcaaattactgtggccgtatcctcaactacaagaaggatggtaccccattctggaacctcctaaccgttgcccccataaaggatgaggatggcagggtcctcaagttcattgggatgcaagtggaagtaagtaagtacacggaaggtaacaaagatactgctcttcgtccaaatggattgccagagtcactcatcaaatatgatgcaaggcagaaggatcatgctcgtagctcagtctcggagctcctacttgccctgaaggatccacggtcattgtcagaatcaagaaacaataccttaaaaaggaaatcacaggaatcagcaggttcagctctagttcccggcaagagaagctccgaaactggatcccgtcgtaactcacatagtggaatgagaaactctctacaaaaaatcagtgaggtgcctgaaggagggaataagaccaggaaatctggtttgcgttcttttatgggccttattggtatgggacatgggaatgtagagaagaacattctaaaaccaagggaagatcccctacttgatagcgatgatgagagaccagatagcttcgatgacgatttcaggaagaaagaaatgagaaagggcatagatttggctaccacacttgaacgtattgaaaagaattttgtcatcaccgacccgaggttaccagataatccaattatatttgcatcggatagctttttgcgtttgacagagtattgccgcgaagaaatattgggaagaaactgcaggtttcttcaaggacctgaaactgaccgtgggacagtaaagaagataagagatgccatagataaccaaacagaagttactgttcagctgataaattatacaaagagcggtaagaaattctggaacctctttcacttgcagcctatgcgtgatcagaagggtgatgttcaatacttcattggggttcaattggatggaactgagcgtgttcgagaggctgctgcaaaagatggtgccatactggttaagaaaactgcagacaatattgatgaggctgcaaaggagcttccggatgctaatttgagacctgaggatctatgggctaatcactcaaaaccagtcttgccaaagccacatatgaaggatactgcatcgtggagagccatccaaaaggttcttgagaacggtgaaagcattgatttgaaacatttcagaccagtaaggcctttaggatctggtgatactggcagtgtccacttggtggagttgcttggcacaggtgaatactttgccatgaaagctatggataaaagtgtcatgcttaaccgaaacaaggtccatagagctaccgctgaacgacaaatccttgatatgttggaccacccattccttccgacattgtatgcatcatttcagacaaagacacatatatgtcttattgttgactattgtgctggtggggaactctttatgctccttgataggcaacctatgaaggttctgaaggaggatgcggtcaggttctatgctgcagaagtggtcacagcacttgaatacctacattgccaaggtataatctacagagacttaaagccagagaacattttacttcatagagatgggcacatttcattgacagactttgatttgtcttgcttgacatcctgccgaccacaagtgtttcttccacacgatattgataagaagaaaaagaggaggaagagcaggagtaatcccatattttttgctgaaccaatgcgagcagataatgattttgttggtacagaggagtacattgcaccggagattattaccggagctggccatacgagtgctgtagattggtgggcgctaggaattcttctatatgagatgttatatggttatacacccttcagagggaaaacaagacaaaggacatttgctaatattctgcacaaggatatcagatttcctgcgagcatacaggtgagcctggcggcaaggcagctgatataccggttgctacaccgagaccctgcaaataggctgggttcctatgagggcgctatggagatcaaacaacaccccttctttcgtggcataaactgggctctagttcgtgccgccacgcccccagagctggaggctcccctccaggatacattgg

SEQ ID NO: 24 - DNA, 2736 bp, Zea mays
atggctttcaaaggactcccgcgtgattcccgagggtccctcgaagtcttcaatccagacgctcctgtttcagatcgagcaacgacctccccgtttctcctccctcctgcggtcgcgtcccatcccagcctcctcgccgccggagatggcggcgatgctgacgtgggtcgggcgacacagagggccgccgagtggggcctcgtcctccagaccgacgagcacaccggccgcccccagggtgtcgtcgcccgcccctccggttccaaccgcaccagcgagagtggcaactccatcgacgagagggccgccgccgccggtgctggtagagctctcccccgggtgtcggaggagcttcgcgccgcgctctcagcgttccagcagaccttcgtcgtgtccgatgccacccgccctgaccaccccatcctctacgccagcgctggattcttcaacatgacgggctactcctccaatgaggttgtcggaaggaactgccgcttccttcaaggttctgggaccgaccccgtagagatttccaagatcagacaggctctcgcagctgggtcaaattactgtggccgtatcctcaactacaagaaggatggtaccccattctggaacctcctaaccgttgcccccataaaggatgaggatggcagggtcctcaagttcattgggatgcaagtggaagtaagtaagtacacggaaggtaacaaagatactgctcttcgtccaaatggattgccagagtcactcatcaaatatgatgcaaggcagaaggatcatgctcgtagctcagtctcggagctcctacttgccctgaaggatccacggtcattgtcagaatcaagaaacaataccttaaaaaggaaatcacaggaatcagcaggttcagctctagttcccggcaagagaagctccgaaactggatcccgtcgtaactcacatagtggaatgagaaactctctacaaaaaatcagtgaggtgcctgaaggagggaataagaccaggaaatctggtttgcgttcttttatgggccttattggtatgggacatgggaatgtagagaagaacattctaaaaccaagggaagatcccctacttgatagcgatgatgagagaccagatagcttcgatgacgatttcaggaagaaagaaatgagaaagggcatagatttggctaccacacttgaacgtattgaaaagaattttgtcatcaccgacccgaggttaccagataatccaattatatttgcatcggatagctttttgcgtttgacagagtattgccgcgaagaaatattgggaagaaactgcaggtttcttcaaggacctgaaactgaccgtgggacagtaaagaagataagagatgccatagataaccaaacagaagttactgttcagctgataaattatacaaagagcggtaagaaattctggaacctctttcacttgcagcctatgcgtgatcagaagggtgatgttcaatacttcattggggttcaattggatggaactgagcgtgttcgagaggctgctgcaaaagatggtgccatactggttaagaaaactgcagacaatattgatgaggctgcaaaggagcttccggatgctaatttgagacctgaggatctatgggctaatcactcaaaaccagtcttgccaaagccacatatgaaggatactgcatcgtggagagccatccaaaaggttcttgagaacggtgaaagcattgatttgaaacatttcagaccagtaaggcctttaggatctggtgatactggcagtgtccacttggtggagttgcttggcacaggtgaatactttgccatgaaagctatggataaaagtgtcatgcttaaccgaaacaaggtccatagagctaccgctgaacgacaaatccttgatatgttggaccacccattccttccgacattgtatgcatcatttcagacaaagacacatatatgtcttattgttgactattgtgctggtggggaactctttatgctccttgataggcaacctatgaaggttctgaaggaggatgcggtcaggttctatgctgcagaagtggtcacagcacttgaatacctacattgccaaggtataatctacagagacttaaagccagagaacattttacttcatagagatgggcacatttcattgacagactttgatttgtcttgcttgacatcctgccgaccacaagtgtttcttccacacgatattgataagaagaaaaagaggaggaagagcaggagtaatcccatattttttgctgaaccaatgcgagcagataattcttttgttggtacagaggagtacattgcaccggagattattaccggagctggccatacgagtgctgtagattggtgggcgctaggaattcttctatatgagatgttatatggttatacacccttcagagggaaaacaagacaaaggacatttgctaatattctgcacaaggatatcagatttcctgcgagcatacaggtgagcctggcggcaaggcagctgatataccggttgctacaccgagaccctgcaaataggctgggttcctatgagggcgctatggagatcaaacaacaccccttctttcgtggcataaactgggctctagttcgtgccgccacgcccccagagctggaggctcccctccaggatacattggaggccacactgcctcctcctgcagctgatggggctcacaccgatatgttctga

SEQ ID NO: 25 - DNA, 2736 bp, Zea mays
atggctttcaaaggactcccgcgtgattcccgagggtccctcgaagtcttcaatccagacgctcctgtttcagatcgagcaacgacctccccgtttctcctccctcctgcggtcgcgtcccatcccagcctcctcgccgccggagatggcggcgatgctgacgtgggtcgggcgacacagagggccgccgagtggggcctcgtcctccagaccgacgagcacaccggccgcccccagggtgtcgtcgcccgcccctccggttccaaccgcaccagcgagagtggcaactccatcgacgagagggccgccgccgccggtgctggtagagctctcccccgggtgtcggaggagcttcgcgccgcgctctcagcgttccagcagaccttcgtcgtgtccgatgccacccgccctgaccaccccatcctctacgccagcgctggattcttcaacatgacgggctactcctccaatgaggttgtcggaaggaactgccgcttccttcaaggttctgggaccgaccccgtagagatttccaagatcagacaggctctcgcagctgggtcaaattactgtggccgtatcctcaactacaagaaggatggtaccccattctggaacctcctaaccgttgcccccataaaggatgaggatggcagggtcctcaagttcattgggatgcaagtggaagtaagtaagtacacggaaggtaacaaagatactgctcttcgtccaaatggattgccagagtcactcatcaaatatgatgcaaggcagaaggatcatgctcgtagctcagtctcggagctcctacttgccctgaaggatccacggtcattgtcagaatcaagaaacaataccttaaaaaggaaatcacaggaatcagcaggttcagctctagttcccggcaagagaagctccgaaactggatcccgtcgtaactcacatagtggaatgagaaactctctacaaaaaatcagtgaggtgcctgaaggagggaataagaccaggaaatctggtttgcgttcttttatgggccttattggtatgggacatgggaatgtagagaagaacattctaaaaccaagggaagatcccctacttgatagcgatgatgagagaccagatagcttcgatgacgatttcaggaagaaagaaatgagaaagggcatagatttggctaccacacttgaacgtattgaaaagaattttgtcatcaccgacccgaggttaccagataatccaattatatttgcatcggatagctttttgcgtttgacagagtattgccgcgaagaaatattgggaagaaactgcaggtttcttcaaggacctgaaactgaccgtgggacagtaaagaagataagagatgccatagataaccaaacagaagttactgttcagctgataaattatacaaagagcggtaagaaattctggaacctctttcacttgcagcctatgcgtgatcagaagggtgatgttcaatacttcattggggttcaattggatggaactgagcgtgttcgagaggctgctgcaaaagatggtgccatactggttaagaaaactgcagacaatattgatgaggctgcaaaggagcttccggatgctaatttgagacctgaggatctatgggctaatcactcaaaaccagtcttgccaaagccacatatgaaggatactgcatcgtggagagccatccaaaaggttcttgagaacggtgaaagcattgatttgaaacatttcagaccagtaaggcctttaggatctggtgatactggcagtgtccacttggtggagttgcttggcacaggtgaatactttgccatgaaagctatggataaaagtgtcatgcttaaccgaaacaaggtccatagagctaccgctgaacgacaaatccttgatatgttggaccacccattccttccgacattgtatgcatcatttcagacaaagacacatatatgtcttattgttgactattgtgctggtggggaactctttatgctccttgataggcaacctatgaaggttctgaaggaggatgcggtcaggttctatgctgcagaagtggtcacagcacttgaatacctacattgccaaggtataatctacagagacttaaagccagagaacattttacttcatagagatgggcacatttcattgacagactttgatttgtcttgcttgacatcctgccgaccacaagtgtttcttccacacgatattgataagaagaaaaagaggaggaagagcaggagtaatcccatattttttgctgaaccaatgcgagcagataatgattttgttggtacagaggagtacattgcaccggagattattaccggagctggccatacgagtgctgtagattggtgggcgctaggaattcttctatatgagatgttatatggttatacacccttcagagggaaaacaagacaaaggacatttgctaatattctgcacaaggatatcagatttcctgcgagcatacaggtgagcctggcggcaaggcagctgatataccggttgctacaccgagaccctgcaaataggctgggttcctatgagggcgctatggagatcaaacaacaccccttctttcgtggcataaactgggctctagttcgtgccgccacgcccccagagctggaggctcccctccaggatacattggaggccacactgcctcctcctgcagctgatggggctcacaccgatatgttctga

SEQ ID NO: 26 - DNA, 1906 bp, Arabidopsis thaliana
acaagtttgtacaaaaaagcaggctcctgcaggaccatgcctgaggcaccaaagaaagaatctttagaggttttcgatctgacgcttgaccaaaaaaacaagcaaaagcttcagttgatcgaagaactcacctctaacgccgaccaagtccaaagacaagtcttggaggagatcttgacccgcaatgctgacgtggagtatctcaggcgacacgacctcaacggtcgcactgaccgtgagactttcaaaaacatcatgcccgttatcacctacgaagatattgagcctgagatcaacaggatcgctaatggtgataaatcacctatcctctcttccaaacccatctctgagttcctcacaagctctgggacatctggtggggagaggaagctaatgccaacaatcgaagaggagctagacaggagatcactcctctacagtctcttgatgcctgtgatgagccagttcgttcctggtctcgaaaacggcaaaggaatgtatttcttgttcatcaagtccgaatccaagactccaggaggcctccctgctcgtcctgtcttaaccagttactacaaatcttcccatttcaaagaaagaccctatgatccttacaccaactacacaagccctaacgagaccatcctttgctctgactcttaccagagcatgtactctcagatgctttgtggcttatgtcaacaccaggaggttcttagagtcggcgctgtcttcgcctctggattcatcagagccatcaagtttcttgagaaacactggatcgagttggtccgtgacatcagaaccgggactctaagttccctgatcaccgatccttcagtgcgtgaggcggtcgccaagatccttaaaccgagcccaaagctagctgatttcgtggaatttgagtgcaagaagtcgtcctggcaagggattattactaggctgtggcctaacacaaagtatgtggatgtgattgtgaccgggacaatgtctcaatacattccaactttggactactacagtaatggcttgcctcttgtctgcacaatgtatgcttcctctgagtgttactttggtgtgaatctaaggccactctgcaaaccaagcgaggtctcttacacgctcataccatccatggcttatttcgagttcttgcctgttcatagaaacaacggtgttactaactccatcaaccttcctaaagcactcactgagaaagagcaacaagagcttgttgatctagttgatgtcaagcttggtcaggaatacgagcttgttgtcaccacttacgccgggctttgcagatacagagttggtgatttattgagagtgactggtttcaagaacaaagcgcctcaattcagtttcatatgtcgcaaaaatgtggtcttgagcatagattccgacaagaccgacgaggttgagcttcagaacgcggtgaagaacgcagtgacacaccttgtcccatttgatgcctcactctctgagtacacgagctatgcagacacaagttccatcccaggccattatgtcctgttttgggagctatgtttggatggaaacacaccgatccctccttcggtcttcgaggactgctgcttagctgtagaagagtcattcaacactgtttatagacaaggaagggttagtgacaagtccataggcccgcttgagatcaagattgttgagccagggacattcgataagctcatggattacgcaatcagcttgggagcatcgattaatcagtataagacgccgagatgcgtgaagtttgctccaattatcgagctattgaactcaagggttgttgatagttacttcagccccaagtgtcctaaatgggttcctggtcacaaacagtgggggagtaactagctcgagacccagctttcttgtacaaagtggt

SEQ ID NO: 27 - DNA, 1828 bp, Saccharomyces cerevisiae
acaagtttgtacaaaaaagcaggctcctgcaggaccatgactacagctagttcttctgcttcccagctacaacagcgcctgccggaagaaaaaccttggccgcaactgagtggcagcaatgcagacgctcaaaccttcaaatgtaaatacgtaaccaaccacaactccttgggcgatgggaattttagcgtcgtgaaagaatgtatgaatatacacacaaaggatttgtacgcgatgaagcttattaagaaacaaactgtcaagaacaaaattcaacttattcaaagagagttcgaccttttgaggtcaataagcgagaaaatcagagatatggaaaaaaagaatgaacattctttggacatttttgaggggcatcaccatattttacaacttttcgactattttgagacggcagataacattgtcctgatcactcagctgtgtcagaagggagatttgtatgaaaaaattgttgaaaatcagtgtttagacctcgaaactcaagttacctcgtactgcgcctgtttggtgagcgttctcgagtttttgcattctcaaggtattgttcatagagacttgaaagcagaaaacgtcttattcagattgagagtgaacgaaaacgaaaaaaacctacagggtgaacaccacggagatttcaaatacgatctcttggcacacgacctagttctcgccgattttggtcttgctgctgaatataacacaagtaaggtaaactcgttaaaggagtttgttggaaccatctcgtatattgctccagaaatcgtcaagtgcaaaggtgtcggtgaaatgactcctgatcaagttggcaaactagacaagtatggttgtccggtggatatatgggcccttggtgtactgacatatttcatggccttcggctatacgccctttgactgtaccacagacgacgaaactctggaatgtatttcaaaatgtgactattacgtcgacgaacaaatgatgcacgaccctaaatacgaacaattttggaattttgttcaatgctgttttactattgacccggccgttaggcgttctgctaagaatttgaaacagcatccctttattaaggattattttgctacttcaaattctttgaatactaaggacacgccgaatttctcctttcatccaacaataagaagggtatcttctacagcgtccatgcacacattgaggtctccttccaaatcaagaaagacaactactctagcgtatttaaatatggatggcgggtcctctgaaacttccaccgccttcagcagcaagatggatttgcctgacctttacgttgatagaaccattaattctcgtgaaagatcattgaatagaattcgagacactctgaagaaaacattatccatgacatctcttaagcctgcaggcacattcgactatcttcacgctaacaaaaacggtacttctttatcatcatccaagtcaggcctcgtgaaaaagaattctacttttgtcttggaccctaagccaccaaagaatagcttgatgaacggttgtttcagcaccactccagaatcgcgctcaaatttcaatacccccaaaaccttatcgaggcaaggttcctctactagcgtgaagaaatatgtcaatgaagttgacttacttttaaccccacgtacggcctcgatgagcagcaatgataccacagccattaacgattatgatactactaacgataagaatcctgcaagaaaacacgcagcttcattccaggtgaatgttgatgattctgatggtgatgaaaccatgcagatatagctcgagacccagctttcttgtacaaagtggt

SEQ ID NO: 28 - DNA, 1216 bp, Saccharomyces cerevisiae
acaagtttgtacaaaaaagcaggctcctgcaggaccatgagagctttggcatatttcaagaagggtgatattcacttcactaatgatatccctaggccagaaatccaaaccgacgatgaggttattatcgacgtctcttggtgtgggatttgtggctcggatcttcacgagtacttggatggtccaatcttcatgcctaaagatggagagtgccataaattatccaacgctgctttacctctggcaatgggccatgagatgtcaggaattgtttccaaggttggtcctaaagtgacaaaggtgaaggttggcgaccacgtggtcgttgatgctgccagcagttgtgcggacctgcattgctggccacactccaaattttacaattccaaaccatgtgatgcttgtcagaggggcagtgaaaatctatgtacccacgccggttttgtaggactaggtgtgatcagtggtggctttgctgaacaagtcgtagtctctcaacatcacattatcccggttccaaaggaaattcctctagatgtggctgctttagttgagcctctttctgtcacctggcatgctgttaagatttctggtttcaaaaaaggcagttcagccttggttcttggtgcaggtcccattgggttgtgtaccattttggtacttaagggaatgggggctagtaaaattgtagtgtctgaaattgcagagagaagaatagaaatggccaagaaactgggcgttgaggtgttcaatccctccaagcacggtcataaatctatagagatactacgtggtttgaccaagagccatgatgggtttgattacagttatgattgttctggtattcaagttactttcgaaacctctttgaaggcattaacattcaaggggacagccaccaacattgcagtttggggtccaaaacctgtcccattccaaccaatggatgtgactctccaagagaaagttatgactggttcgatcggctatgttgtcgaagacttcgaagaagttgttcgtgccatccacaacggagacatcgccatggaagattgtaagcaactaatcactggtaagcaaaggattgaggacggttgggaaaagggattccaagagttgatggatcacaaggaatccaacgttaagattctattgacgcctaacaatcacggtgaaatgaagtagctcgagacccagctttcttgtacaaagtggt

SEQ ID NO: 29 - DNA, 1342 bp, Saccharomyces cerevisiae
acaagtttgtacaaaaaagcaggctcctgcaggaccatgtccgaagctaccctctcctccaagcaaaccattgaatgggaaaacaaatactccgcccacaactaccaccccttgcccgtcgtttttcacaaggctaagggcgcacatgtgtgggacccggagggtaagctgtacctcgacttcctgagcgcttattctgccgtcaaccagggccattgccatcctcacatcatcaaggctttgacggagcaagcacaaacactaacattgtcctccagagcgttccacaacgatgtttacgcgcaattcgccaagttcgtgaccgaattcttcgggttcgaaaccgttttgcccatgaacaccggtgcagaagccgtggaaactgctttgaagttggccagaagatgggggtacatgaagaagaacatccctcaagataaagccatcattctgggtgccgagggtaacttccacgggagaaccttcggtgctatcagtttgagtaccgactacgaggactccaagttgcatttcgggcctttcgtgcctaacgttgccagtggtcactccgtgcacaagatcagatacggccacgcagaagatttcgtccctatcttggaatctcctgaaggtaagaacgttgccgccatcattctagagccaattcagggtgaagccggtatcgtcgtgccccccgcagactacttcccaaaggtctccgcattatgccgtaagcacaacgtcctattgatcgttgacgaaattcaaaccggtatcggtagaaccggtgagttgctttgctacgaccactacaaggcagaggccaagcctgatattgttttgttaggtaaggctctctcaggtggtgttcttcccgtctcatgtgttctgtcttctcacgacatcatgtcttgctttaccccaggatctcacggttctactttcggcggtaatcctttggcttcccgcgttgccatcgccgccctcgaggtcatccgcgacgagaagctgtgccaaagagccgcccaactgggtagctctttcatcgcccaattgaaagctctccaagccaaatctaacggtataatctctgaggtgcgtggtatgggactgcttaccgccatcgtaatcgacccatccaaggccaatggtaagaccgcttgggacttgtgtctattgatgaaggatcacggcctcttggctaagcccacccacgaccacatcatcagattggctcctcctttggtcatctccgaagaggacttgcaaaccggtgtcgaaaccattgccaagtgtatcgatctgttatagctcgagacccagctttcttgtacaaagtggt

SEQ ID NO: 30 - DNA, 3319 bp, Saccharomyces cerevisiae
acaagtttgtacaaaaaagcaggctcctgcaggaccatgtcatctgaggatatcatttatgatcctcagttcaaacctgttcagggaatctacgagaatagattaagacaatttattgatactggtggggattaccatgacttaaatttacccaagttttatgataagaagcgcatttcattagatcatgatcacgttaaggtttggtggtaccaggtttcttttgaacgtggatcttcccctgtttcccctgataagaggccatcttggaaatctattattgaacgtgacaagaagggtgaattggagtttagagaagcgaacataaatcagccctttggacccagttggtctaccacttggttcaaggtgaaaatctctttgcctgaagattgggttaaatcaaacgagcaactacttttccaatgggattgttctaacgaaggaattgtcatagacccaaagactctaatccctgtgactgctttttcaggtggtgaaaggactgaatatgttttaccgaaaacatcggatgggaaacatttcttttacatcgaagctggtaataatggtatgtttggctgcggtgcaggatccactataaatccaccagatgataatagattttttcatttgagaaaagctgatatcgtttggcccgatctagatgctcgtgcattgtatatcgatttttggatgctaggggatgctgcaagagagctacctggagactcctggcaaaaacaccaggcaagacaactaggcaatgcagttatgaatctttttgacccgaatgatcgttcaagtgttcgtaaatgtcgtgaattactacaaagggaatactttgactcctttttagaaagcagtaaggtttacgaacaaggtgaatctcaagttttaacaaatgtttatggtatcggcaactgtcatatagatacagcttggctatggccattcgcagaaacaagaaggaaaattgtgagatcttggtcttcccaatgtactttaatggatcgcttcccagagtataaatttgttgcttcacaagcccaacaatttaaatggttattagaagatcatcccgaatttttcaataaagtgttaattccaaaaattcagcaatctcagttttttgctgttggtggtacatgggttgagaatgataccaatattccctcaggggaatcgctggcaaggcaattcttttttggtcaaaggtttttcttgaagcattttggtctcaagtcaaagatattttggttacctgacacctttggttattcttcgcaaatgccacaactttgccgcttatctggtattgataaatttttgactcaaaagctttcctggaataacatcaacagttttccgcatagcacgtttaactgggcagggattgacggttctcaattattgactcacatgcctcctggtaatacgtatacagcagattcacacttcggtgatgttttgcgtactgccaagcagaataagacaccagaatattacggctccggtttaatgttgtacggaaagggtgatggtggtggaggaccaactgaggaaatgctgcaaaaaatgaggcgtattagatccatgaataacagaaatggtaatgttattccaaagttacaagttggtataacggttgatgaattttatgatgacattttgaaaaggactaaccaaggccatgatttacccacatggagtggtgaattgtatttcgaatttcatagggggacatacaccagtcaagctcagaccaaaaaattaatgaggttgtccgaaattaaactacatgatttggaatggatagctgccaaaacatcagttttatatcccgattcgtataaatacccttccaaacagattaacgaactttgggagaatgttttgttatgtcaatttcacgatgttctaccaggatcatgtattgaaatggtatataagtatgaggctgtccctatgttgcacaacgttgtgaaagaatgtacttccttaatagacaaaaccgttcaatttcttcagagtcagagtaaggcagatttggttgagatgagaacattaacttggtcaaaaccagaaaaggtttctgaggagtgctcgttgaacggtagttacacgtcctctgtaaccgggtacgatgactatatagtccttgccaatgggaagttgaaagttatcatttgcaaaaagactggggtgatcacaagcattacggatgaaactttgggggtagaatacctggacacggaacatggcagaaacaaattgggcgccaaccagtttgttatttatgatgataaacctttgggctggcaggcttgggatactgaactttattccgtcaaccaatacaagtatgtaacaaagccgaagaaagttcaagtttcctgcaacacaaaagagaaatgtgctgttgaggtcatttttcaaatttccgaaaaatgcaaaatcaaatcagtgatatcactcaatgcaactgcggtcactgatgctaaattaagtaaagtagacatttctacgacggtagaaaactgggatgctagaaacaaatttttaaaagttgaatttcccgttaatattcggaacgattttgcttcgtatgaaactcaattcgggattaccaaaagaccaacacattataatacctcatgggacgtcgctaaatttgaggtttgccatcacaaatttgctgattattctgaatacagcaagggtgtttcaattttgaacgattgcaaatatgggttttccacacacggtaacttgatgagattatcattattaaggtcaccaaaggctccggatgcgcatgctgatatgggtactcatgagataaaatatgctatctatccacatagaggagcactatcaagcgacactgttaagctcgctcacgaattcaattattgcttcaaatacaaactccccaaagatattggcatgaattttgatgacatcataagcatttccggagatgagaatgtcattttgtctaacataaaaagaggcgaagatgatagtgctgtcaagtccaactattcattaaatccaagggatgaacaaagtattgtggtaagggtttacgaatctcttggcggggaatcttttgcttcactaaataccacactaaatttgaagcgtattgagaaggtcgataacttggagatgaaagtttataagagtttgacagcaacgcgagacgaatcaaatcatgcaataaacagaattcccattaaattgagaccttttgagattgcctcattcaggttgtatttctagctcgagacccagctttcttgtacaaagtggt

SEQ ID NO: 31 - DNA, 2006 bp, Saccharomyces cerevisiae
acaagtttgtacaaaaaagcaggctcctgcaggacctcccttaagcatggcacctgttacaattgaaaagttcgtaaatcaagaagaacgacaccttgtttccaaccgatcagcaacaattccgtttggtgaatacatatttaaaagattgttgtccatcgatacgaaatcagttttcggtgttcctggtgacttcaacttatctctattagaatatctctattcacctagtgttgaatcagctggcctaagatgggtcggcacgtgtaatgaactgaacgccgcttatgcggccgacggatattcccgttactctaataagattggctgtttaataaccacgtatggcgttggtgaattaagcgccttgaacggtatagccggttcgttcgctgaaaatgtcaaagttttgcacattgttggtgtggccaagtccatagattcgcgttcaagtaactttagtgatcggaacctacatcatttggtcccacagctacatgattcaaattttaaagggccaaatcataaagtatatcatgatatggtaaaagatagagtcgcttgctcggtagcctacttggaggatattgaaactgcatgtgaccaagtcgataatgttatccgcgatatttacaagtattctaaacctggttatatttttgttcctgcagattttgcggatatgtctgttacatgtgataatttggttaatgttccacgtatatctcaacaagattgtatagtatacccttctgaaaaccaattgtctgacataatcaacaagattactagttggatatattccagtaaaacacctgcgatccttggagacgtactgactgataggtatggtgtgagtaactttttgaacaagcttatctgcaaaactgggatttggaatttttccactgttatgggaaaatctgtaattgatgagtcaaacccaacttatatgggtcaatataatggtaaagaaggtttaaaacaagtctatgaacattttgaactgtgcgacttggtcttgcattttggagtcgacatcaatgaaattaataatgggcattatacttttacttataaaccaaatgctaaaatcattcaatttcatccgaattatattcgccttgtggacactaggcagggcaatgagcaaatgttcaaaggaatcaattttgcccctattttaaaagaactatacaagcgcattgacgtttctaaactttctttgcaatatgattcaaatgtaactcaatatacgaacgaaacaatgcggttagaagatcctaccaatggacaatcaagcattattacacaagttcacttacaaaagacgatgcctaaatttttgaaccctggtgatgttgtcgtttgtgaaacaggctcttttcaattctctgttcgtgatttcgcgtttccttcgcaattaaaatatatatcgcaaggatttttcctttccattggcatggcccttcctgccgccctaggtgttggaattgccatgcaagaccactcaaacgctcacatcaatggtggcaacgtaaaagaggactatgagccaagattaattttgtttgaaggtgacggtgcagcacagatgacaatccaagaactgagcaccattctgaagtgcaatattccactagaagttatcatttggaacaataacggctacactattgaaagagccatcatgggccctaccaggtcgtataacgacgttatgtcttggaaatggaccaaactatttgaagcattcggagacttcgacggaaagtatactaatagcactctcattcaatgtccctctaaattagcactgaaattggaggagcttaagaattcaaacaaaagaagcgggatagaacttttagaagtcaaattaggcgaattggatttccccgaacagctaaagtgcatggttgaagcagcggcacttaaaagaaataaaaaatagaaacttgtgggcgcaatttagctcgagacccagctttcttgtacaaagtggt

SEQ ID NO: 32 - DNA, 1541 bp, Saccharomyces cerevisiae
acaagtttgtacaaaaaagcaggctcctgcaggaccacgaagatgtcagcgatattatcaacaactagcaaaagtttcttatcaaggggctccacaagacaatgtcaaaatatgcaaaaggctctttttgcactattgaatgctcgccactatagtagcgcctccgaacaaacgttgaaggagagatttgctgaaattatcccagcaaaggcagaagaaattaaaaaattcaagaaagaacacggtaaaaccgttattggtgaagttcttttggagcaagcttatggtggtatgagaggtattaaaggccttgtttgggaaggttccgtgttagaccccgaagaaggtattagatttaggggtcgtactattccagaaattcaaagggaactaccaaaggctgagggtagtacagaacctttgccagaagctttattttggttgcttttgactggtgaaatacctactgacgctcaagttaaagccctttctgctgatttagctgccagatcagaaattccagagcacgttatccaacttttagatagcctcccaaaagatctacatccaatggcgcaattttctattgccgtgactgctttagaaagcgagtctaagtttgccaaagcatatgctcaaggtgtatccaagaaagaatattggagctatacatttgaagattcgttagatctgctgggtaaattacctgttattgcttccaaaatttatcgtaatgtgttcaaggatggtaaaattacttcaaccgatcctaatgctgactatggtaaaaatttggcccaacttttgggctacgaaaacaaggattttattgacttaatgagactatatttaactattcattctgatcatgaaggtggtaacgtttctgcccatactacacatttagtgggttctgccttatcttcgccatacttatctttggccgctggtttgaatggtttagctggcccattacatggtcgtgccaatcaagaagttttagaatggctatttaaattgagagaagaagtgaaaggtgactattcaaaagaaacaattgaaaagtacttgtgggatactttgaacgcagggagagttgttcctggttatggccatgcggttttgagaaaaactgatcctcgttatacggctcaacgtgaattcgcattgaaacatttcccagattacgagttatttaagttggtctccaccatttatgaagttgccccaggggttttaactaagcatggtaaaactaagaacccatggccaaatgttgattcacattccggtgttttattgcaatactatggtctaactgaggcttcgttctacactgtattgtttggtgttgccagagctattggtgtgttaccccaattaatcatcgatagggctgttggtgctccaatcgaaaggccaaaatcattctccaccgaaaaatacaaggagttggtaaagaaaatcgaaagtaagaactaaggaaaatttgatttttgattcagggtagctcgagacccagctttcttgtacaaagtggt

SEQ ID NO: 33 - DNA, 1034 bp, Saccharomyces cerevisiae
acaagtttgtacaaaaaagcaggctcctgcaggaccagaaaaatgcctgctactttacatgattctacgaaaatcctttctctaaatactggagcccaaatccctcaaataggtttaggtacgtggcagtcgaaagagaacgatgcttataaggctgttttaaccgctttgaaagatggctaccgacacattgatactgctgctatttaccgtaatgaagaccaagtcggtcaagccatcaaggattcaggtgttcctcgggaagaaatctttgttactacaaagttatggtgtacacaacaccacgaacctgaagtagcgctggatcaatcactaaagaggttaggattggactacgtagacttatatttgatgcattggcctgccagattagatccagcctacatcaaaaatgaagacatcttgagtgtgccaacaaagaaggatggttctcgtgcagtggatatcaccaattggaatttcatcaaaacctgggaattaatgcaggaactaccaaagactggtaaaactaaggccgttggagtctccaacttttctataaataacctgaaagatctattagcatctcaaggtaataagcttacgccagctgctaaccaagtcgaaatacatccattactacctcaagacgaattgattaatttttgtaaaagtaaaggcattgtggttgaagcttattctccgttaggtagtaccgatgctccactattgaaggaaccggttatccttgaaattgcgaagaaaaataacgttcaacccggacacgttgttattagctggcacgtccaaagaggttatgttgtcttgccaaaatctgtgaatcccgatcgaatcaaaacgaacaggaaaatatttactttgtctactgaggactttgaagctatcaataacatatcgaaggaaaagggcgaaaaaagggttgtacatccaaattggtctcctttcgaagtattcaagtaattgtttttgcgtgttctcgtagctcgagacccagctttcttgtacaaagtggt

SEQ ID NO: 34 - DNA, 1003 bp, Saccharomyces cerevisiae
acaagtttgtacaaaaaagcaggctcctgcaggaccatgactgcaagcacaccatccaatgtcatgacattgttcttgttaaggcatggacaaagtgaattgaatcacgagaatatattctgtggttggattgacgctaagctaaccgaaaaaggtaaagaacaagctcgtcattctgccgagctaatcgaacaatattgtaaagctaataatttgagattaccccagattggttacacctcacgtttaattaggacccaacagaccatagaaacgatgtgtgaagaatttaagttaaagccacaactgcaggttgtttacgactttaataaaatcaaacttggagacgaatttggcagtgatgacaaggataatatgaaaatcccgattcttcaaacttggaggctaaatgaacgtcattacggttcctggcagggccagaggaaaccgaatgttttaaaagaatatggtaaggataaatatatgttcattaggagagattacgagggtaagccaccacctgtagatcttgaccgtgagatgattcaacaagaaaatgagaagggctcttctactgggtacgaattcaaggagccaaacagacaaataaaatatgaattggaatgcagcaatcatgacattgtattaccggattccgaatctcttcgtgaagtggtttatagattgaatccttttctacaaaatgtcatattaaaattagccaatcaatatgatgaatcttcatgcctgattgtgggccatggaagttcagtgagatcgctactgaaaattctggagggtatatcagatgatgacatcaagaatgttgatattccaaatggtatccccttagtcgttgaattagataagaataatggtcttaagtttatcagaaaattctacctagatcctgaatctgctaagatcaatgctgagaaagtccgtaatgagggtttcataaaaaatccttagctcgagacccagctttcttgtacaaagtggt

SEQ ID NO: 35 - DNA, 712 bp, Saccharomyces cerevisiae
acaagtttgtacaaaaaagcaggctcctgcaggaccatgtcatttaacagtccattttttgatttctttgacaacatcaacaacgaagttgatgcctttaacagattgctgggtgaaggcggcttaagaggctacgcaccaagacgtcagttagcaaacacacccgcaaaggattctactggcaaggaagttgctagaccaaataactatgctggcgctctttatgatcccagagatgaaaccttagatgattggttcgacaatgacttgtccctgttcccatctggtttcggtttccctagaagtgtcgcagttccagttgatattttggaccatgacaacaactacgagttgaaagtcgtggttcctggtgtcaaaagcaagaaggacattgatattgagtaccatcaaaacaagaaccaaattttggtttctggtgaaattccatctaccttgaatgaagagagtaaagacaaggtcaaggtcaaggagagcagctctggtaagttcaagagagtcatcactttgccagactacccaggtgtggatgcagacaacattaaagcagactacgcaaatggtgttttgacattaacagttccaaaattgaagcctcagaaggatggtaagaaccacgtcaagaagattgaggtttcttctcaagaatcgtggggtaactagctcgagacccagctttcttgtacaaagtggt

SEQ ID NO: 36 - DNA, 2323 bp, Saccharomyces cerevisiae
acaagtttgtacaaaaaagcaggctcctgcaggaccatgagtcaagttaatacaagccaaggaccggtagcccaaggccgtcaaagaagattatcatcactaagtgaattcaatgatccattttcgaacgcagaagtctactatggccccccaacagacccaagaaagcagaagcaggcaaagcccgctaagatcaaccgtacgaggactatgagtgttttcgataatgtatctcctttcaagaaaactggttttggtaaacttcaacagactagacgtggttctgaggatgacacctattcaagtagtcaaggtaatcgtcgtttctttatcgaagatgtcgataaaacacttaatgaactactggctgctgaggataccgataaaaattatcagatcaccatcgaggataccggtccaaaagttttgaaagtcggtaccgcaaactcctatggctataagcatattaatattaggggtacgtatatgttatccaatttgttgcaggaactaactattgcgaaaagttttggtagacaccaaattttcttagatgaagctcgtataaacgaaaatcccgtcaacagattatcaagattgataaacacacagttctggaactctttgaccaggagagttgatctgaacaacgtaggcgaaattgcaaaagataccaagattgatacgccgggggcaaaaaatccaagaatctatgttccttatgattgtccagaacaatacgaattttatgttcaagcttctcaaatgcatccatctttgaaattagaagttgaatatttaccaaaaaaaataacggcagaatacgtcaaatccgtcaatgatacccccggtttactagcattggctatggaagagcacttcaatccttctactggtgaaaaaactctcattggttacccttatgctgttcctggtggtagattcaatgaattatatggttgggactcctatatgatggcactaggtctcctagaagccaacaagactgatgttgcaagaggtatggtggagcattttatttttgagattaatcactatggaaaaatattgaatgctaacagaagctactatctatgtagatcacagcccccattcttgactgaaatggccttggtagtattcaaaaaacttggtggtaggagtaatcccgatgctgtggatttgttgaaaagagctttccaagcaagcataaaagagtacaaaactgtttggaccgcatctccaaggcttgatcccgaaacaggcttatccaggtaccatcctaacggtctcggtattcctccggaaactgaaagtgatcacttcgataccgttttactaccatatgcatcgaaacacggcgttaccttagacgaatttaagcaactttataacgatggtaagataaaggagcctaaattggatgagttttttcttcatgaccgtggcgttagagaatctggacacgacactacatataggtttgagggcgtatgtgcctacctggccactattgacctgaattctcttctttacaaatacgagattgatattgcagacttcataaaggaattctgcgacgacaaatatgaagatcctttagaccattctataacaacttcagctatgtggaaagaaatggccaaaatcagacaagaaaagattaccaaatatatgtgggatgacgagtcggggtttttctttgactacaacacaaaaatcaagcacagaacgtcatacgaatccgcaactacattctgggcattatgggctggacttgccacgaaggagcaagcacagaaaatggtggagaaagcactacccaagttagagatgcttggaggtttagctgcatgtacggagcgttctcgaggcccaatttctatttcgagaccaattagacaatgggactatccatttggttgggcaccccatcaaattcttgcttgggaaggcctccgttcttatggttatttaactgtaacgaataggctagcttatagatggcttttcatgatgacaaaggcttttgtcgattataatggtattgtggttgaaaaatatgatgtcacaagaggaacagatcctcatcgtgttgaagcagaatacggtaatcaaggtgctgactttaaaggggcagctactgaaggttttggatgggtcaatgccagttacattcttggtttgaagtatatgaacagtcacgcaagaagagcgcttggtgcttgcattccaccaatatcattctttagcagtttaaggcctcaagaaagaaacctctatggactatagctcgagacccagctttcttgtacaaagtggt

SEQ ID NO: 37 - DNA, 1270 bp, Saccharomyces cerevisiae
acaagtttgtacaaaaaagcaggctcctgcaggacccaagcagataaggatgtcatcaagaataattgtcggcagtgcagcattggcagctgccatcacagctagcatcatggtcagagaacagaaggccaagggtcagagaagagagggcaacgtctccgcttactacaacggccaggagtacggcagttcagcacccccacagttgggaaagctacataacataaagcaaggcataaaggaagatgccttgtcgttaaaagacgcgcttctgggcgtatctcaaaaggctagggaagaggctccaaaggtaactaagcgtgtgatatcaccggaagaggatgctcagacacgcaagcagctaggccaaaaagccaaggattcttcctcgcaaagcatcttcaattgggggtttagtgaggctgaaagaaggaaagccatagccatcggggaatttgatactgctaagaagcgtttcgaagaggcagtggatcgtaatgagaaggagctcttgtccacggtgatgagagagaagaaggccgctctggacagagcatccattgagtacgaaaggtacgggagagccagagactttaatgagctttcggacaagctagaccaacaggaaaggaacagtaatcctttgaaacgcctgttgaagaataacacgggtgacgctaatactgaagaagccgctgcaagaagtgtccaaggctggggtgatacggcacaggagtttggtagagaagagttggaggaagccaagagaaatgcttcttcagagccaagcgaggcgcaaaaacgtcttgacgagctgaagaagatcaaggaaaagggctggtttggttacaacaaaggggagcaaagcgagcaacagattgctgaacgggtagccagaggtttagaaggatggggtgaaacagccgctcaactttccaaggacgaaatggacgatttaagatggaattatgagaattcaaagaaacaactggataagaacgtgtccgatgccatggactcgttatctaaggcgaaggaggacttgaaacagtacggcagccactggtggtctggatggacttccaaggtcgacaatgacaagcaggctttaaaagatgaggcccaaaagaagtacgatgaagcgttgaaaaagtacgatgaagccaagaacaaattcaaagaatggaatgataagggtgatggtaaattctggagctcgaaaaaggactagttagatagctcgagacccagctttcttgtacaaagtggt

SEQ ID NO: 38 - DNA, 1069 bp, Saccharomyces cerevisiae
acaagtttgtacaaaaaagcaggctcctgcaggaccatgtcagaaccttcagagaaaaaacaaaaagttgctacctcatctttagaacaattaaaaaaggccgggacccatgtggttgctgattcgggtgattttgaggctatttcgaagtatgaaccacaggattcaacaactaacccttctctgatattggctgcttcaaagttggagaaatatgcgaggtttatcgacgctgccgttgaatatggtagaaagcatggcaaaactgatcatgagaaaatcgagaacgccatggataagattttggtggaattcggcacccagattttgaaggtagtcccaggaagggtttccactgaagtagacgcaaggttatcttttgataagaaggcgacggtgaagaaggctctccacatcatcaaactatataaagatgcgggagtacctaaagaaagagtcttgatcaagatagcttctacgtgggagggtatccaagctgctagagaattggaagtaaagcatggtattcattgtaatatgacattactgttttcctttacgcaagcagtagcctgtgcggaggcaaatgtcacattgatctccccatttgttggaaggattatggacttttacaaggccctttcaggcaaagactatactgcagaaactgatcccggtgttctttctgttaagaagatatacagttactataagaggcatggttatgcaactgaggtaatggcggcttctttcaggaatttagatgaattgaaggcgttagccggtattgataatatgactctcccactgaaccttctagaacagttatatgaatcaacagatcctattgaaaacaaattgaattctgagagtgctaaggaagaaggcgtcgaaaaagtctcttttatcaacgacgagcctcatttcagatatgttttaaacgaagatcaaatggctacagaaaaactatcagatggtatcagaaaattctccgcagacattgaagcactgtacaaactggttgaagaaaaaatgtagctcgagacccagctttcttgtacaaagtggt

SEQ ID NO: 39 - DNA, 2170 bp, Saccharomyces cerevisiae
acaagtttgtacaaaaaagcaggctcctgcaggaccatggttgctcaatataccgttccagttgggaaagccgccaatgagcatgaaactgctccaagaagaaattatcaatgccgcgagaagccgctcgtcagaccgcctaacacaaagtgttccactgtttatgagtttgttctagagtgctttcagaagaacaaaaattcaaatgctatgggttggagggatgttaaggaaattcatgaagaatccaaatcggttatgaaaaaagttgatggcaaggagacttcagtggaaaagaaatggatgtattatgaactatcgcattatcattataattcatttgaccaattgaccgatatcatgcatgaaattggtcgtgggttggtgaaaataggattaaagcctaatgatgatgacaaattacatctttacgcagccacttctcacaagtggatgaagatgttcttaggagcgcagtctcaaggtattcctgtcgtcactgcctacgatactttgggagagaaagggctaattcattctttggtgcaaacggggtctaaggccatttttaccgataactctttattaccatccttgatcaaaccagtgcaagccgctcaagacgtaaaatacataattcatttcgattccatcagttctgaggacaggaggcaaagtggtaagatctatcaatctgctcatgatgccatcaacagaattaaagaagttagacctgatatcaagacctttagctttgacgacatcttgaagctaggtaaagaatcctgtaacgaaatcgatgttcatccacctggcaaggatgatctttgttgcatcatgtatacgtctggttctacaggtgagccaaagggtgttgtcttgaaacattcaaatgttgtcgcaggtgttggtggtgcaagtttgaatgttttgaagtttgtgggcaataccgaccgtgttatctgttttttgccactagctcatatttttgaattggttttcgaactattgtccttttattggggggcctgcattggttatgccaccgtaaaaactttaactagcagctctgtgagaaattgtcaaggtgatttgcaagaattcaagcccacaatcatggttggtgtcgccgctgtttgggaaacagtgagaaaagggatcttaaaccaaattgataatttgcccttcctcaccaagaaaatcttctggaccgcgtataataccaagttgaacatgcaacgtctccacatccctggtggcggcgccttaggaaacttggttttcaaaaaaatcagaactgccacaggtggccaattaagatatttgttaaacggtggttctccaatcagtcgggatgctcaggaattcatcacaaatttaatctgccctatgcttattggttacggtttaaccgagacatgcgctagtaccaccatcttggatcctgctaattttgaactcggcgtcgctggtgacctaacaggttgtgttaccgtcaaactagttgatgttgaagaattaggttattttgctaaaaacaaccaaggtgaagtttggatcacaggtgccaatgtcacgcctgaatattataagaatgaggaagaaacttctcaagctttaacaagcgatggttggttcaagaccggtgacatcggtgaatgggaagcaaatggccatttgaaaataattgacaggaagaaaaacttggtcaaaacaatgaacggtgaatatatcgcactcgagaaattagagtccgtttacagatctaacgaatatgttgctaacatttgtgtttatgccgaccaatctaagactaagccagttggtattattgtaccaaatcatgctccattaacgaagcttgctaaaaagttgggaattatggaacaaaaagacagttcaattaatatcgaaaattatttggaggatgcaaaattgattaaagctgtttattctgatcttttgaagacaggtaaagaccaaggtttggttggcattgaattactagcaggcatagtgttctttgacggcgaatggactccacaaaacggttttgttacgtccgctcagaaattgaaaagaaaagacattttgaatgctgtcaaagataaagttgacgccgtttatagttcgtcttagctcgagacccagctttcttgtacaaagtggt

SEQ ID NO: 40 - DNA, 1589 bp, Saccharomyces cerevisiae
acaagtttgtacaaaaaagcaggctcctgcaggacctcatacacaagatgtcattcgacgacttacacaaagccactgagagagcggtcatccaggccgtggaccagatctgcgacgatttcgaggttacccccgagaagctggacgaattaactgcttacttcatcgaacaaatggaaaaaggtctagctccaccaaaggaaggccacacattggcctcggacaaaggtcttcctatgattccggcgttcgtcaccgggtcacccaacgggacggagcgcggtgttttactagccgccgacctgggtggtaccaatttccgtatatgttctgttaacttgcatggagatcatactttctccatggagcaaatgaagtccaagattcccgatgatttgctagacgatgagaacgtcacatctgacgacctgtttgggtttctagcacgtcgtacactggcctttatgaagaagtatcacccggacgagttggccaagggtaaagacgccaagcccatgaaactggggttcactttctcataccctgtagaccagacctctctaaactccgggacattgatccgttggaccaagggtttccgcatcgcggacaccgtcggaaaggatgtcgtgcaattgtaccaggagcaattaagcgctcagggtatgcctatgatcaaggttgttgcattaaccaacgacaccgtcggaacgtacctatcgcattgctacacgtccgataacacggactcaatgacgtccggagaaatctcggagccggtcatcggatgtattttcggtaccggtaccaatgggtgctatatggaggagatcaacaagatcacgaagttgccacaggagttgcgtgacaagttgataaaggagggtaagacacacatgatcatcaatgtcgaatgggggtccttcgataatgagctcaagcacttgcctactactaagtatgacgtcgtaattgaccagaaactgtcaacgaacccgggatttcacttgtttgaaaaacgtgtctcagggatgttcttgggtgaggtgttgcgtaacattttagtggacttgcactcgcaaggcttgcttttgcaacagtacaggtccaaggaacaacttcctcgccacttgactacacctttccagttgtcatccgaagtgctgtcgcatattgaaattgacgactcgacaggtctacgtgaaacagagttgtcattattacagagtctcagactgcccaccactccaacagagcgtgttcaaattcaaaaattggtgcgcgcgatttctaggagatctgcgtatttagccgccgtgccgcttgccgcgatattgatcaagacaaatgctttgaacaagagatatcatggtgaagtcgagatcggttgtgatggttccgttgtggaatactaccccggtttcagatctatgctgagacacgccttagccttgtcacccttgggtgccgagggtgagaggaaggtgcacttgaagattgccaaggatggttccggagtgggtgccgccttgtgtgcgcttgtagcatgatcttttagctcgagacccagctttcttgtacaaagtggt

SEQ ID NO: 41 - DNA, 1051 bp, Saccharomyces cerevisiae
acaagtttgtacaaaaaagcaggctcctgcaggaccatgtcttcactggttactcttaataacggtctgaaaatgcccctagtcggcttagggtgctggaaaattgacaaaaaagtctgtgcgaatcaaatttatgaagctatcaaattaggctaccgtttattcgatggtgcttgcgactacggcaacgaaaaggaagttggtgaaggtatcaggaaagccatctccgaaggtcttgtttctagaaaggatatatttgttgtttcaaagttatggaacaattttcaccatcctgatcatgtaaaattagctttaaagaagaccttaagcgatatgggacttgattatttagacctgtattatattcacttcccaatcgccttcaaatatgttccatttgaagagaaataccctccaggattctatacgggcgcagatgacgagaagaaaggtcacatcaccgaagcacatgtaccaatcatagatacgtaccgggctctggaagaatgtgttgatgaaggcttgattaagtctattggtgtttccaactttcagggaagcttgattcaagatttattacgtggttgtagaatcaagcccgtggctttgcaaattgaacaccatccttatttgactcaagaacacctagttgagttttgtaaattacacgatatccaagtagttgcttactcctccttcggtcctcaatcattcattgagatggacttacagttggcaaaaaccacgccaactctgttcgagaatgatgtaatcaagaaggtctcacaaaaccatccaggcagtaccacttcccaagtattgcttagatgggcaactcagagaggcattgccgtcattccaaaatcttccaagaaggaaaggttacttggcaacctagaaatcgaaaaaaagttcactttaacggagcaagaattgaaggatatttctgcactaaatgccaacatcagatttaatgatccatggacctggttggatggtaaattccccacttttgcctagctcgagacccagctttcttgtacaaagtggt

SEQ ID NO: 42 - DNA, 1411 bp, Saccharomyces cerevisiae
acaagtttgtacaaaaaagcaggctcctgcaggaccatgcccaaggagtcagaggtcataaattctgaatttcatgtagatgtccaagatccagagcgtctaaacggccaccctgtagcaaaatttatcaataaattaagcggtcaacctgaatcttacgtcaacaggactaattatattttcggtcgaacactgggtgccggttccttcggtgttgtgagacaagccagaaagttgtccacaaatgaagatgttgctataaagatcttattgaagaaggcattgcagggaaacaatgtgcaattacagatgctgtacgaagagctgtccattcttcaaaaattgagtcatccgaacattgtgtcattcaaggattggtttgaatcgaaggataagttctatattgtcactcagctggcaacaggaggtgaattatttgatagaattctgtctagagggaagttcacagaagtggatgctgttgaaatcatagttcagattcttggtgccgtggagtatatgcattccaagaatgttgttcatagggatttgaaacctgagaacgttttgtatgttgataagtcagaaaattcgcctctggtaattgcggacttcggtatagctaaacaattgaagggggaggaggatttgatatacaaagcagccggatcgttgggttatgtggcaccagaagtcctcacacaagatggacatggtaagccttgtgatatatggtccattggtgtgatcacatatactttactgtgcggttattctccttttattgccgaaagcgttgaaggattcatggaggaatgtacagcttcgagatacccggtaaccttccatatgccatattgggataacatatctattgatgttaagcgtttcatcttgaaggcattgagattgaatccagctgacagaccaactgctacggaattgctggacgatccatggattacttcaaagagagttgaaactagtaatattttaccagacgttaagaaagggttttctttgcgtaagaaattacgtgacgctattgaaattgtgaagcttaataatagaattaagaggttaagaaatatgtattcattaggggacgatggcgataacgatatagaagagaattccctcaatgaaagtcttctggacggcgtcacacattcgttggatgatttacgtctgcaatctcagaagaaagggggagaactaacagaagagcaaatgaaattgaagtctgcattaacaaaggatgcctttgttcaaattgtcaaagctgcaacaaagaataaacataaagttttggctggtgaagaggaagacgatagcaagaaaacactgcatgatgatcgggagtcgaagtcagaagactagctcgagacccagctttcttgtacaaagtggt

SEQ ID NO: 43 - DNA, 2338 bp, Saccharomyces cerevisiae
acaagtttgtacaaaaaagcaggctcctgcaggaccatgtataatagcagcaccaatcatcatgagggtgcacctacttcaggacatggctattatatgtcccaacaacaagaccaacagcatcaacaacaacaacaatacgccaacgaaatgaatccgtatcagcaaattcctagaccgcctgctgcaggatttagtagcaactacatgaaagagcaaggctctcatcaatcgttacaagagcatttacaacgtgagacaggtaaccttggcagcggttttacagacgttccagccctgaattatccagccacaccaccaccacataataattacgcagcttcaaatcagatgatcaataccccaccgccgtcgatgggtggtctttatagacataataataattcccagagcatggttcagaacggtaatgggagtgggaatgcacaattaccccaattatcaccgggccaatattctatagagtcagagtacaatcaaaatttaaatggcagttcttctagtagtccgttccaccaaccgcaaacgctacggagcaatgggtcatattcaagcgggttaaggagtgtgaaaagcttccagaggttacaacaagaacaggaaaatgtccaagttcagcaacaactttcccaagcacagcaacaaaattcccggcaacaacagcaacaacttcaataccagcagcagcaacaacaacaacaacaacagcaacatatgcaaatacaacaacaacaacagcagcaacaacagcagcagcaatcacaatctcccgttcagagcggctttaataatggtaccatatcaaactatatgtactttgaaagacgaccagatttgttgactaaaggaacgcaagataaagcagcagctgtaaagttgaagattgagaacttttaccaatcctctgttaaatacgccattgaaagaaatgaaagaagagtggagttagaaacagaactaacttctcataattggtcagaagaaaggaaatctaggcaattgagttctttgggtaaaaaagagtcacaatttttaaggctgcgtagaacgagattatcgttagaagatttccacactgtgaaagtcattggaaaaggggcatttggtgaagtcagactggttcagaagaaagacaccggaaaaatatatgcaatgaaaactttattaaaatccgaaatgtacaaaaaggaccaattagcacacgtcaaggctgaaagggatgttctggctggaagtgattctccatgggtggtttcgctatattactcattccaagatgctcaatacttatatttaatcatggaatttttgcccggtggtgatttgatgaccatgctaatcaggtggcaactatttacagaggatgttactagattttacatggctgagtgtattttggccatcgaaaccattcataaattaggattcattcacagagatattaaaccagataatattttgatcgatattagaggtcatataaaattatctgatttcgggttgtctacggggttccataaaactcacgactcaaactactataaaaagcttttgcaacaagatgaggcaactaatggtatttccaagccaggtacttacaatgcaaatacaaccgatactgcaaataaaaggcaaacaatggttgtggattctattagtctaacaatgtcaaacaggcaacaaattcagacatggagaaaatcacgtcgtttaatggcatattctaccgtaggtacaccagattatattgctcctgagatatttttataccaaggttatgggcaagagtgtgattggtggtcacttggagcaattatgtacgagtgtctgattggttggcctccattctgttccgaaactccacaggaaacgtacagaaaaatcatgaattttgagcaaactctacaatttcctgatgatattcatatctcttatgaagccgaagatctaatccgtcgactattaactcatgcagaccaaagacttggtagacatggtggtgcagatgaaataaaaagtcatccattttttcgcggtgttgattggaatacaatcagacaagtagaagcaccgtatataccaaagttgagctccatcaccgatactaggttcttcccaaccgatgagttggagaatgttccagattccccagctatggcacaagctgccaaacaaagggaacagatgacaaagcaaggtggaagtgcgccagtcaaggaagatttaccttttattggctacacttactccagatttgactatttgacaagaaaaaatgcgttgtagctcgagacccagctttcttgtacaaagtggt

SEQ ID NO: 44 - DNA, 1458 bp, Agrobacterium tumefaciens
atgcaaaacaaagtgcagtttatcacctatgttgaccgcctgaccagaggtggtttcaggcaattgaaggaactggtcgatggcaagttcgctggcctgttcggcggcgtccatgtcttgcctttcttcaatccgatcgatggcgctgatgccggattcgatccaacagatcacacgatcgtcgatccgcgcctcggcgactgggaggatgtgcgggctttgtcgggatccgtggaaatcatggccgatcttatcgtcaaccatgtctcatcgcaatccggcgcattcacggacttcattgccaagggttcggcgtccgaatttgccgacatgttcatgacgttcgataaggtatttcccgatggcgccaccgaagaagaccttctgaggatctatcgaccgcgccccggtttaccgttttcgaaggtgaccctggctgatggtactcagcggatgctctggacaaccttcacaccggagcagatcgacatcgatgtccacagcgccaaaggcacaacctatctcgaaacgatcctcgatcgcttttcggaggcgaatgtgacggcgatccgcctcgacgccgcgggatacgcgatcaagaaagcgggcagcagttgcttcatgatcgacgatacctacgcattcctcgaagaagtggctggaaaggcccgcaaccgcggcatggaggttctggtcgagattcatagttatcatcgtgaccaaatcgagatcgcgaagaaggtcgaccgggtgtacgatttcgcactaccaccgctcatcttgcatgcattgtttacgggagacgccacgccgctggcaaagtggctggcaataagcccccgtaacgcgatcaccgttctcgacacccatgacgggattggcgttatagatgtcggtgcccatagcgacggccgggcgggcctcctcgaaccccaggcgatcgacaatcttgtgggagagatccataggcgatcggatggccagagccgccaggcgacgggggccgctgcatcgaatctggacctttatcaggtaaactgcacctactatgacgcgcttggtcgcaacgataatgattatctcatcgctcgggcaattcagttttttgctccaggaattccgcaagtctattatgtcggtttattgggcggcgtaaacgatatggacctgctcgccaaaacgggcgtggggcgtgacattaaccggcactattacggcaacgacgaaatcggtacggcccttgagacgccgctcttccatcgcctttcaaatctgatccgtttcaggaacacccatcccgccttcggtggagcgctcaaggccaccattgctgatgccggagcgttggtgctttcatggcaacacggcgatgcttttgctgaattgaagatctcatttgccgaccgcaaggcgagcattgccgcatctggtcagagcgagatgcagatcgtcgagtag

SEQ ID NO: 45 - DNA, 1054 bp, Oryza sativa
acaagtttgtacaaaaaagcaggctcctgcaggaccatggcgctggaggcggtggtttactcccacggcggccatttcggcgggtacggcggcgggctgatgggcggcgccccggcggcgccgtgggatgtcttcgcagccgccggtggcggcgggagctgggacgatcccggcctgttcgcggcagaggcgtctcttgatgtgatccagggcgtggatgagtgggaggtggatcaggatcagcatgcttcttcttcttctaaggtggcggcgcggccgcctgtgaaggcggcggcggcggcggggaagagaaagaggcggcgggcgaaggcggcgaagaaccgggaggagatcgagagccagcggatgacccacattgccgtcgagcgaaaccgccgccgccagatgaacgagtacctcgccgtgctccgctccctcatgccaccttcctacgcccaaaggggtgaccaagcatccatagttgggggagcaatcaactacgtgagggaactagagcagctgctccaaacactggaggcgagaaggaccatcaaggaccacatcgacggcggcgccggcgagtctccctcccccttcgccggcttcttcgccttcccacagtactccaccgccacctccggccatggcggcggcggcgatgcacacagcaggatcgtcgtcaagcctgcagagacgacgactacggccgccggtggcggcgccggcgcggcgatcgccgacatcgaggcgagcatggtggagggccacgccagcgtcaaggtgcaggcgcggcggcggccgaggcagctgctcaagctcgtcgccgggctccaccagctagggctcaccaccttgcatctcaacgtcaccaccgtcgccgccatggccatgtactccttcagcctcaaggtggaggatggatgtaagcttgggtctgtggaggagattgcaactgcagtgcatgagattctggagaggatgcaggaggagcaggcttttgctgatgccaaaactagcttgtagctcgagacccagctttcttgtacaaagtggt

SEQ ID NO: 46 - DNA, 1027 bp, Arabidopsis thaliana
acaagtttgtacaaaaaagcaggctcctgcaggaccatgtcgaccgatatttcaccaccctactctcaaactcacgtggagcccgttaatggttatccttctgacaacaagagatgcgacgattcctctgttcctgccaaatatgatgatcttgtccgtaactctgctctcttctgggaaaagctccgagctttcctcggattaaccagcaagactttgaaggttcctactgtgggaggaaacactcttgatctgcatcggcttttcatcgaggttacgtctcgaggtggtatcgaaagggtggtgaaggatcggaaatggaaagaagtgattggtgcattcagttttccgacaacgataacaagtgcatcgtttgtcttgaggaagtattatctcaagtttctttttcagctggaacatgtgtattaccttgaaaaaccggtgtcttcactccaatcaacagatgaagcattgaagagccttgccaatgaatctccaaaccctgaggaaggtattgatgaaccacaagttgggtatgaggttcaaggattcattgatgggaagtttgatagcggctatctggtgacgatgaaattgggttctcaagagctgaaaggtgtcctttaccacattcctcaaacgccaagtcagtctcaacaaaccatggaaacaccttcagccattgtacaatcatcacaacgccggcataggaagaaatcaaagttggctgtagtcgatactcaaaaacccaaatgccacaggagtggctacaacttcttttttgctgagcagtacgcgaggcttaaacctgagtaccatggacaagaacgatccatcactaagaaaataggacacatgtggagcaatctcactgaatctgagaaacaggtttatcaagacaaaggagttaaggatgtggagagatacagaattgagatgttggaatataagtcttcacatgaatcaggagctactgcttctacagtggctcagtagctcgagacccagctttcttgtacaaagtggt

SEQ ID NO: 47 - DNA, 2357 bp, Oryza sativa
gcagtcgctgtcgttaccatggagagcagcagcgaggaggagctggaggaggacttccctggccacgagtggatcaccccgcagtcctccatccgcgccgcctaccagtcgcagaccgagaagggcatcaggaaaatttgctctgagctactggagttgaaggatgctatcgaaaacttgtgcgggaatatgcagtcgaaataccacgctttcctcagaatatctgaggaggttgttgaggcagaacaagaattaattgagttgcagaagcatgtgtctgcccaggggattcttgtgcaagatctaatgagcggtgtgtgccgtgaactcgaaatgtggcaaaaacattgcaaggatgaacatgtggaagagaaagaccttcaaacagaacttgatgaaattttgtcatatgatacccaagattccaaggttagttttctggataaattagatactttgctcgcggagcacaaaatagaggaggcattgcttgctttggaaaccgaagagaagaaatgtatggctacggatgatcctggcaaagaattagatgcagagatttctacctataagacagcactatctaaaaggaaatcaattcttgaggatcagcttgttaggtattcagaacagccttctttatctattaccgagctaaggaaatctttgtctggccttattaagattggcaaaggttctctagcccaccaagtacttctaaaagcttatgggtcacgtcttcagaaaaatgttgaagcatttcttccaacatgttcgatctacacagaaacttactctgcaactttgtcaaagattgttttctcagctatctcaaaggtatccaaagaatctagttcgctatttggggatagccccatgaatttgaaccggattattcagtgggctgaatatgaaatagaaacctttgcgcgtttggttaaggaaaattctcctttgcctgagagcgtatctgcccttcgttctgcctgcatatgcatccaaactagtctcactcactgctcttatctagaatcatatggcctgaaattctcaaatttactaatggtactattgcacccctatgttgaagaagtgcttgagctgaattttagaaggctgagaagaaagattgtagattcagcaaaaaatgatgatattctgcttcccagccctcaagaaggatcacggctctctagttcagttgcaccaaatataatgcttacaagcagtggaaagaagttcatgtccattgtcaatgatgttttggatcaaattaccccaatgactatagttcactttggaggaacgattttgaataaatttgtccagctatttgataaatatgttgaagcactaattgaagtcttaccaggagcttctgaggatgatcatctagtggagtcaaaagagcctatagaatttaaagcagagagtgatgcccagcagattcaactcattggaacagcatacactgtagcagatgaattattgccagcagctgtatccaaattttttgatatccaaaccgagaagaagagaattggtggaacaggcgagggccttggctctggatctatatactccatagaatacaaagagtggaaacgtagtctgcaacattcactggacaaactgagggatcatttttgcctacagtatgtcttatcatttatttacttagaagggaaatcacgactggatgctagaatgtacttggagctgaaaactgatgatcttctttgggagtgtgatccttcaccttctctgcctttccaggcgctgtttgtaaagttacggcagctagctagtgttgctggtgatgtcttactgggtaaagagaagatacagaaggtcttgctctcaaggctaactgaaacggttgtcatgtggctctccaatgaacaggaattctgggatgttttcgaggatcaatccatccaactccggccttcaggactacagcagcttattcttgatatgcacttcgtcgttgagattgctgtctgtggacggtatccacacagacctgttcagcagcttgtgtcggtaatcataactagggcaatcgcagctttctcagtgagaaatgttgacccacaaagttctctacccgaggatgaatggttcctcgacatggccaaggttgcaattaataagcaattagggacttcaggatctgagtccgagcttgaggagcctgtggttgtacatgatgaaatctcggattctgaagagagtagtatttcaagtccatcgacgataggatctgaagattcatttgcttctgcaaacaatgatgatctagaaactcctgtatatttcacggatcccgaggcatagaacccagcggtactcgc

SEQ ID NO: 48 - DNA, 1678 bp, Oryza sativa
ttcatttcatttggagaggaccaggtggtaccggcgcgccaccatggcgtccataaccagcgagctgctcttctttctccccttcatcctccttgccctgctcacgttctacaccaccaccgtggccaaatgccacggcgggcactggtggcgaggtgggacgacgccggcgaagaggaagcggatgaacctgccgcccggcgccgccgggtggccgctcgtcggcgagacgttcggctacctccgcgcccaccccgccacctccgtcggccgcttcatggagcagcacatcgcacggtacgggaagatataccggtcgagcctgttcggggagcggacggtggtgtcggcggacgcggggctcaaccggtacatcctgcagaacgaggggaggctgttcgagtgcagctacccgcgcagcatcggcggcatcctgggcaagtggtccatgctggtcctcgtcggggacccgcaccgcgagatgcgcgccatctccctcaacttcctctcctccgtccgcctccgcgccgtcctcctccccgaggtcgagcgccacaccctcctcgtcctccgcgcctggcccccttcctccaccttctccgctcagcaccaagccaagaagttcacgttcaacctgatggcgaagaacataatgagcatggacccgggggaggaagagacggagcggctgcggcgggagtacatcaccttcatgaagggcgtggtctccgcgccgctcaacctgcccgggacgccctactggaaggctctcaagtcgcgtgctgccattctcggagtaatagagaggaaaatggaagagcgggttgagaagctgagcaaggaggatgcaagcgtagagcaagacgatcttctcggatgggctctgaaacaatctaacctttcaaaagagcaaatcctggacctcttgctgagcttgctcttcgccgggcacgagacgtcgtccatggcgctcgccctcgccatcttcttccttgaaggctgccccaaggctgtccaagaactgagggaggagcatcttgggattgcaaggagacaaaggctaagaggggagtgcaaattgagctgggaagactacaaagagatggttttcacgcaatgtgtcataaacgagacgttgcggctaggaaacgtggtcaggttcctgcaccggaaggtcatcaaggacgtgcactacaagggttatgacattccaagcggatggaagatcctgccggtgttagccgcggtgcatctggactcgtccctgtacgaggacccccagcgcttcaatccctggagatggaagagtagcggatcatccggcggcttggctcagagcagcagcttcatgccgtacggcggcgggacgcggctgtgcgccgggtcggagctcgcgaagctggagatggccgtgttcttgcaccacctggtgctcaacttcaggtgggagctcgccgagccggaccaagccttcgtcttccccttcgtcgacttccccaagggccttcccattagggttcatagaattgcacaggatgatgagcaggagtaggcgatcgcgggccctgatcacctgtcgtacagtatttctacatttgatgtgtgatttgtgaagaacatcaaacaaaacaagcactggctttaatatgatgataagtattatggtaattaattaatt

SEQ ID NO: 49 - DNA, 1207 bp, Arabidopsis thaliana
ggtaccggcgcgccaccatggagtctctgctctctagttcttctcttgtttccgctgctggtgggttttgttggaagaagcagaatctaaagctccactctttatcagaaatccgagttctgcgttgtgattcgagtaaagttgtcgcaaaaccgaagtttaggaacaatcttgttaggcctgatggtcaaggatcttcattgttgttgtatccaaaacataagtcgagatttcgggttaatgccactgcgggtcagcctgaggctttcgactcgaatagcaaacagaagtcttttagagactcgttagatgcgttttacaggttttctaggcctcatacagttattggcacagtgcttagcattttatctgtatctttcttagcagtagagaaggtttctgatatatctcctttacttttcactggcatcttggaggctgttgttgcagctctcatgatgaacatttacatagttgggctaaatcagttgtctgatgttgaaatagataaggttaacaagccctatcttccattggcatcaggagaatattctgttaacaccggcattgcaatagtagcttccttctccatcatgagtttctggcttgggtggattgttggttcatggccattgttctgggctctttttgtgagtttcatgctcggtactgcatactctatcaatttgccacttttacggtggaaaagatttgcattggttgcagcaatgtgtatcctcgctgtccgagctattattgttcaaatcgccttttatctacatattcagacacatgtgtttggaagaccaatcttgttcactaggcctcttattttcgccactgcgtttatgagctttttctctgtcgttattgcattgtttaaggatatacctgatatcgaaggggataagatattcggaatccgatcattctctgtaactctgggtcagaaacgggtgttttggacatgtgttacactacttcaaatggcttacgctgttgcaattctagttggagccacatctccattcatatggagcaaagtcatctcggttgtgggtcatgttatactcgcaacaactttgtgggctcgagctaagtccgttgatctgagtagcaaaaccgaaataacttcatgttatatgttcatatggaagctcttttatgcagagtacttgctgttaccttttttgaagtaggcgatcgc

SEQ ID NO: 50 - DNA, 1600 bp, Oryza sativa
acaagtttgtacaaaaaagcaggctcctgcaggaccatggagtacgagcgcatcgagaagccgttccccacccagggcggtgggttctcgccgaagcggctgcgcgcgatgttgctgggggtggagaagcggcggaaggggcaggaggaggaggaggagggggacgccggggaggtggacgacgagtacggcgcggtgcccaagtcctctgtcagatccgacgccgactccgatgcgcgcagaggaggtagcatgtgcgaagaatacaaggatgtagatgtggtgagcaccatctcagaatcttcatcctcgttggagacagggagtgggcaccgatcgcgtgacacccactccatgggttcacgagtaagggtgcctgaggaggactcctgtgactctgagagtgtggcttcaaactttgagttccataaggagcgaggggcctctgctcggtctgtgacggcggcaatcgttcctccattctcaaagcctgcaccatcaaagtgggacgatgcccagaaatggatcgccagcccgacaacaaaccgtcctggtagggctggtggagtgccacagaggaagatggaaaaaactagctttggtggcgggaggctgccggctacgaaggttgtgttggaggccacagaggagatagatactaagagggttgatccaagccaagagaaaagggaaattgggtggcaaaaagcggtgaattgggccccacctgatccatatccagaagttgagacttgtgcaaagtctgcacttgctgaagaaattacagtagctgattcagctgttacttttagtcgccatgattcatctgccacgcttcagagcgcgacaacatgcatacctcccccaccaacagtccgatcagtgtcaatgagagacatgggtacagaaatgacccctattgcgagccaggagccatcccgaacaggaacaccggtgagagcaacgagtccagattgttctcgcccaactactccacgaaaaacaataggccccaatgcaatcggtgctgttattggccatggtgaatgtagcaacgtggaattaagtgaacaagaattgcaaatgaagactaggagggagataatgctcctcggcactcagcttggtaaaaccaacattgctgcatgggcaagcaacaaggaagaggaaaaagatgcatcactttcgcttaaaggagtgcccatggaccaatctacacagaaggtaacagaaattcgtgcagcagcgtgggaggaggcagagaaggctaaatatttagcaagatttaaacgagaagagattaagatccaagcatgggaagatcatcagagagcaaaaatcgaagctgaaatgagaaaaattgaggtcgacgtggaaaggatgcgagcccgtgcgcaggacaagctgatgagccagctcgcatcggcgagacacactgccgacgagaagcgggccgcggcggagctgaaacggagccgtgcggctgcaaagacggcggagcaggcagaccacatcaggagaaccggcaggatgccgtcctccattggctgctggaactggtgctcgtagctcgagacccagctttcttgtacaaagtggt

SEQ ID NO: 51 - DNA, 1277 bp, Oryza sativa
gcagtcgctgtcgttaccatggggtcgccgcgaggacgccgccgcggcgacaatggccgcctcctcctcctcgccgccgccgccgtcgtcattgcctcgctggtcggcggcggcgcggcgcagccgacgacgtccgggcccggcccgaactacttcaaccccaagagcttcaacccgtccatggccgtcgtgatcgtggtcttggtcaccgccttcttcttcctcgggttcttctcgatctacatccggcgatgcgccggcgggccgttgggtgggcccggggggtatggcgtcggcggcggcggcggtggacgtgtgggtggtgggttcacgtttgcggcggcgcggtcgaggagggtgagggggcttgaccccgccgtgctgggcgcgttcccgaccatggcgtacgccgacgtgaaggcgcacaaggccggcaagggcgcgctcgagtgcgccgtgtgcctcagcgagttcgacgacgacgagacgctccggctgctgcccaggtgctcccacgcgttccacgccgactgcatcgacgcgtggctggcgtcccacgtcacgtgccccgtctgccgcgccaacctcgccttcgacgccggcgtcccgccgccgccgctggcgccgccgcatgcgttgaccaccgggcaagatgttgcggctgcgccgccgcagccggcggcgccagagcaggtgacggtggacgtcgtcgtcgcggatgccgaggagacggaggagaggatcaggagggaggaggcggccgagctgatgcggatcggaagcgtgaagcgcgcgctgcggagcaagtccggccgccggccgccgcagttcccgcggtcgcacaccacggggcactcgctcgccgccgccgccgccgtgcccgccaccgccgacgacgccgcggagcggtacacgctgaggctccccgatcacgtgctccgggaaatcgtcacctcggcgaggctacgccgcacgacgagcctccaatcgttccgcaccaccgccgccgccggcggcggcgcccgcgccgggaggagcgtccggctcggccagtccgggaggtggtccaacgtgtcgtcgctgatgcgcacgttctcggccaggctgccggcgtggggctccgctcgacgcggcgccgaagccgactctccggggaaggacggcgccaaggtcgccggcgactgcaccgcctccgtggagcaacactgcgacggcggcggcggcggcgcgtgcccacgtccacttggtgaccatgtatagaacccagcggtactcgc

SEQ ID NO: 52 - DNA, 1384 bp, Oryza sativa
acaagtttgtacaaaaaagcaggctcctgcaggaccatggcttccatgccgcagctggaggaaaaggattcatccgatttggcaatcaacaaaggcccgtcgctggatcttgtcaaatctcccttgatgatgaatgatgcatctgcaactgtaactgcaatgcagcccaacgaggggatggaggagttccctgtcaaggttcggaagccttacacgatcaccaagcagcgggagaagtggacggaagaagagcacgacaagttccttgaggcattgaagctgtatggtcgctcttggcgtcagatacaagagcacattggcacaaagactgctgtccaaattcggagccatgcccagaagtttttctcaaaggtggtgcgtgagcccggttccaataatgcgattgagatccctccacctaggccaaagagaaaaccacttcatccgtaccctcgaaagtgtgcgaattctggatcggacgcaaatccagcaacagcgcaattgaagcttgctcctggctcatcttcatctggctctgatcaagagaatggttctcctatatcggtgctatctgcgatgcagtcagatgcttttggatcgtcagtatccaatccatcaaccagatgtacctccccagcgtcatctgacgatggaaataacattcccacattcacgagtggggaagataataatgtgccttgtgaaccaacagtgatagatccgtcccagtcccacaaggaaatagaccaagatagaaaagacgtgaataatatgtctgaagaggattcttcagaagaagaggtgcaagaaacaagcttgaagctatttgggaggacagttgtcatcccagatccaaggaagagaagctcctcagatccgaagcatgaaagtgaggagcagatatcacagccttccaatgaagaaatgttgcaggcttcttcatcggttggggagattccagcggcatattgtgcaccaaatggttggtttatgtcatacaattctttcccattccaattcggtgaatcagcggcagatgctagaattccccctttacacgtgtggtggccttactacggttttgctcccattagccatcctagaggactaagcacagtgatgcagcagactgaaggtagtgacgagagtgacggtgtgaagagccactcatccgaatcaagttcggactccggggaaaatgtgcagatgaccgctccccagagctcgagaatagtggaatcacttggagcgatttacgtccgagactcaggttcaagttttgagctaaaaccgagcgcaaattcagcgtttgtaagagtgaagccaagcaacagcggagatgaagagatttagctcgagacccagctttcttgtacaaagtggt

SEQ ID NO: 53 - DNA, 1676 bp, Oryza sativa
acaagtttgtacaaaaaagcaggctcctgcaggaccatggccgacggcggcggccgccgggctcccgggttccgcttctacccgacggaggaggagctgatatgcttctacctccgcaacaagctcgacggcctccgcgacgacatcgagcgcgtcatccccgtcttcgacgtctactccgtcgacccgttgcagctctcagagattcaccacgagatgctgggcggcggcggcgaggagggggagccgtggttctacttctgcccgcggcaggagcgggaggcgcggggcggccggccgagccggaccacgccgtccgggtactggaaggcggcgggcaccccgggggtcgtctactccgccgaccgccggcccatcgggatgaagaagaccatggtgttctaccgcggccgcgcgccgtcgggaaccaagaccgcgtggaagatgaacgagtacagagcattccactaccccgacgcctcctccgcctccgcctccagcgccggcgccgccgcgccaccaaaccatcttcctccgcagctgaggagcgagttcagcctgtgtcgactgtacaccagatcgggaggcatccggcaattcgatcggcggccgctagcgggtggtggtgatgagaacccggggccatccatggctgccgcggcggcgtcacccgaggaaaacgacggatcaggaagttccatgcagcaactggagctgatggatcaaggtggcgccgttgatccggattgggaccagtgggacgacttggccaccttgaccgcacttctgtactggcctagagattagctcgagacccagctttcttgtacaaagtggtacaagtttgtacaaaaaagcaggctcctgcaggaccatggccgacggcggcggccgccgggctcccgggttccgcttctacccgacggaggaggagctgatatgcttctacctccgcaacaagctcgacggcctccgcgacgacatcgagcgcgtcatccccgtcttcgacgtctactccgtcgacccgttgcagctctcagagattcaccacgagatgctgggcggcggcggcgaggagggggagccgtggttctacttctgcccgcggcaggagcgggaggcgcggggcggccggccgagccggaccacgccgtccgggtactggaaggcggcgggcaccccgggggtcgtctactccgccgaccgccggcccatcgggatgaagaagaccatggtgttctaccgcggccgcgcgccgtcgggaaccaagaccgcgtggaagatgaacgagtacagagcattccactaccccgacgcctcctccgcctccgcctccagcgccggcgccgccgcgccaccaaaccatcttcctccgcagctgaggagcgagttcagcctgtgtcgactgtacaccagatcgggaggcatccggcaattcgatcggcggccgctagcgggtggtggtgatgagaacccggggccatccatggctgccgcggcggcgtcacccgaggaaaacgacggatcaggaagttccatgcagcaactggagctgatggatcaaggtggcgccgttgatccggattgggaccagtgggacgacttggccaccttgaccgcacttctgtactggcctagagattagctcgagacccagctttcttgtacaaagtggt

SEQ ID NO: 54 - DNA, 1189 bp, Oryza sativa
acaagtttgtacaaaaaagcaggctcctgcaggaccatggaggaggggtttgtggctctcaagaggacggagcatgtcgaggtgacgtccttggcggtggcggtcgaggcgacgccgtcggcgaaggggggaaaggggaaggttgtggtgggtggtggtggcgccggcggcggcgttgggccgacgagggtgagggtgttctgtgatgacttcgacgcgacggactcgtcgagcgatgaggatgaggaggaggtgaccgcgcggcggagggtgaagcgctacgtgcaggagattcggttacagcgcgcggcggcggtggccgtgccgccggtgaaggtgaagggcgaggaggtgttcccggccgcggtgtcggcgaagatggcggaggccgcgaaggcgagggtggtgttggcggctgggaggaagaggaaggccggcggggtggacggcgccgagccgcggttccgcggcgtgcggaggcggccgtgggggaagtacgcggcggagatccgcgacccgtggaggcgggtgcgggtgtggctcggcacgttcgacaccgccgaggaggccgccaaggtgtacgacacggcggccatccagctacgcggccgcgacgccaccaccaacttcaaccagtccggggactcggcaagcctcgacgtcccacccgaggtcgccgagcgcgtcccgcagccgccgggggcgtccaagaacgcctccccggccacctcctacgactccggcgaggaatcccacgccgcggcggcctccccaacctccgtcctccgttccttccctccctccgccgtcgtcgcgaccgccgacacggccaacaagaagcagccgccgccgccgcctctcgtcgtccgcgagaccgacgagtcggtcgacgtcttcggctgctccttctccgacgacggcggcttcgccggcgagctcccacctctctacaccgacttcgacctcctcgccgacttcccggagcccccgctggacttcttgtccaacctccccgtggagcccttctccctggctcccttctccagcaacaatgggtcaccggacctccacctcgacgacgccccatcgccggcggcggcacaagtggacgacttcttccaagacatcaccgacctgttccagatccccgtcgtctagctcgagacccagctttcttgtacaaagtggt

SEQ ID NO: 55 - DNA, 979 bp, Oryza sativa
acaagtttgtacaaaaaagcaggctcctgcaggaccatgctgcttaatccggcgtcgagagaggtggccgcgctggacagcatccggcaccacctcctggaggaggaggaggagacgccggcgacggcgccggcgccgacgcggcggccggtgtactgccggagctcaagcttcggcagcctcgtggccgaccagtggagcgagtcgctgccgttccggcccaacgacgccgaggacatggtcgtgtacggcgccctccgcgacgccttctcctccggctggctccccgacggctcattcgccgccgtcaagccggagtcgcaggactcctacgacgggtcctccatcggcagcttcctcgcgtcgtcgtcgtccgaggcggggacgcccggggaggtgacgtcgacggaggcgacggtgacgccggggatcagggagggcgagggcgaggccgtggcggtggcgtcgagggggaagcactaccgcggggtgaggcagcggccgtggggcaagttcgcggcggagatcagggacccggccaagaacggcgcgcgcgtgtggctcggcacgttcgactccgccgaggaggccgccgtggcgtacgaccgcgccgcctaccgcatgcgcggctcccgcgcgctcctcaacttcccgctccgcatcggctccgagatcgccgccgcggccgccgccgccgccgcgggcaacaagcggccatatcccgacccggcgagctccggctcttcttccccttcatcctcttcctcctcgtcgtcgtcttcctcctccgggtcaccgaagcggaggaagagaggcgaggccgcggccgcgtccatggccatggcactggttccaccaccgccaccaccggcgcaggcaccggtgcagctcgccctcccggcccagccatggttcgccgccggtccgatccagcagctggtgagctagctcgagacccagctttcttgtacaaagtggt

SEQ ID NO: 56 - DNA, 814 bp, Oryza sativa
acaagtttgtacaaaaaagcaggctcctgcaggaccatggagcagctgttcgtcgacgacccagccttcgcgagcagcatgtcgtcgcttgaggcggacatcttctccggcgccggccagctgccgtcctcgccgtggctggacctagacctcgacgacgatgtccaagacctctccatggcgccgacgacggcgaacgcggtgtcctccggctacggctccggcggatccggctcccacaggaagctcagccacaacgcctacgagcgcgaccgccggaagcagctcaacgagctctactcctccctccgcgctctcctccccgacgccgatcacactaagaagctgagcatcccgacgacggtgtctcgcgtgctcaagtacatacccgagctgcagaagcaggtggagaatctggagaggaagaagaaggagctgacgacgacgagcaccaccaactgcaaaccaggagtgttggggagccagctgatgagcgagggcatggctcccatcgtttcggctacctgcatcaatgacatggagatcatggttcaggtcagcttgttgagcaatgtggcgggttcagttcttcctctctccaagtgtatcaaagtactggagaacgaaggtcttcacttcatcagttcatcgacttcctccggatttgggaacaggacattctacagtatccatcttcagagaagtgaaggaacgatcaacgaggagtgcccagcattttgtgaaaggttggagaaagtcgtcaggaacaaagcaaagctttagctcgagacccagctttcttgtacaaagtggt

SEQ ID NO: 57 - DNA, 1432 bp, Oryza sativa
acaagtttgtacaaaaaagcaggctcctgcaggaccatggcgggcggtggcaggtgcagctcgctgctccgtggcttcgtgtcactcttcttcctcctgttcatccacattggccatgccggttgctgcttctcgacgggatcttccacgcagacgctggaggaagatgacactggacatggggccgacgggaggggcggcggtggcggcggcagcaagaggaggaagatatcgccgctcgcgttctccccgtcggtgtcgtcttctacggtggctgacgagaggtccagagccaggcggaggcaggtgtcgtctctagccaccagcgtccgcttctacctccaccgcatcttctcctactcgtccggagccaagaacggcgctggcgctccagccgcggaggaggaagacgaggcggtgacgacgaccgtgtcgtcgccgctcgcgcagtcgtcgtcgtgcctgcctcagcgccaggcctcgtcgtcggtggtgctgtccacgccgtcgtcgccatgcgcgtcgccgttcctgtccccgctctcgccgcagtctctcagcattactcctgcggtgccgtcgtcgccgcacaacaggcagatccctcaggcgaccaccaggcagtcgtcgttcaggtcgttcgccgcccgcggcgacgtgttcccgtgcaaggtgtgcggcgaggtgctgagcaagccgcagcagctggagctccaccaggcgatgaagcactccctctccgagctctccagcctcgactccagcatgaacatcatccgcatgatcttcctcgccgggtggaagccggccgttatgcccggcgccggcgagccaccgtcggtgcggcgcatcctcaggatccaccacaacccccgcgtgctcacccgcttcgaggagtaccgcgacctcgtccgcgcccgcgccgcccgccgatgcgcgggcgccggcgcggcggcggtggaggagcggtgcgtcgcggacggcaacgagcggctgcggttctactgctccaccatgctctgcaccctgggcgcgggcgtgtgcgggagcccctactgctgcacctgcagcatcctgcgccacgggttcgccgggaagcaggccgacgtggacggcatcgccacctactcctccggccgggccgcgcacgcctctctccccgacgacgtggagcgcgagttcgcgttcctccaggtgcgccgcgccatgctggtgtgccgcgtcgtggccgggcgcgtcggccgcggcgccgcggacgacaaggtggcctacgactccatggttccactactgccaacctcctccttcgctgcagctacccgtggcgacgacgacgtcgagctgctcgtgttcaacccccgtgccgtgctcccatgcttcgtcatcatctacagttgctagctcgagacccagctttcttgtacaaagtggt

SEQ ID NO: 58 - DNA, 1264 bp, Oryza sativa
acaagtttgtacaaaaaagcaggctcctgcaggaccatggaacaaactacaggtgttagtggccatgagcacataattgatattccaagggacagtggtccatctacttcgacttcccatagtgttgctagagaaaaccatggagaaccaaatcctgttgatagatctgcaaccagagcgctagtacctgctttgcaggcaccatcagcagttggtgcacctagtgcaggacatacttcaggtgctagaagaagtgataactatgttcgccggcacagaagccctttgaattctggactctggatttcaatagaagttcttgtcaatgtgagccaaattgtagctgctattgttgtgctttctctttcaagaaaggaacatccgcaagctccattatttgagtgggtcataggttatacagttggttgttttgctacactaccccatctttattggcgctatatacaccgcaatattgtcaatggtgaaaatgagccagcacatacacttcaaggctcctctcagaacaattcaactgagccttctgctagtgcatcagagcgtcgaaggaatgctgcacgaaatgcagtgctcgctaatccaaggattaatgctctttttgaccacttcaagatggccttggattgtttctttgctgtgtggtttgtcgtaggaaatgtgtggatatttggcgggcgttcttctgctgccgatgctccaaacttgtacaggttatgtattgtgttccttacctttagttgtattgggtatgccatgcctttcatcctctgtgcaatgatatgctgctgcctgccctgcatcatatctgttatgggatttagagaagatacaaacaatacaagaggggctacctcagaatccatcaattctcttccaacatacaaattcaaaaccaagaaacgccgtcatagttcaggaaatgaagctgaaggccaagatggtgggatagtagctgcagggactgacaaggagcggtcactatctgctgaggatgctgtttgttgcatctgtcttgcaaagtatgcacacaatgatgagcttcgtgaacttccctgcacacattgtttccacaaggaatgtgttgataaatggctgaagattaatgcactttgcccattgtgcaaatctgagatagcgagctcatctggaacatctgatactcgtcgctctgaccacacagatattcctgtgcaggagattgaaatgcattagctcgagacccagctttcttgtacaaagtggt

SEQ ID NO: 59 - DNA, 478 bp, Oryza sativa
acaagtttgtacaaaaaagcaggctcctgcaggaccatggacggcgacggcggcggcggatgggacgatcagggcaacggcggcggcgagacgaccaagtaccgtggcgtgcgtcgccggccttctggcaagttcgcggcggagatccgtgactccagcaggcagagcgtccgcgtctggctgggaaccttcgacaccgccgaggaggctgcgcgggcttacgaccgcgccgcctacgccatgcgcggccacctcgccgtcctcaacttccctgctgaggcgcgcaactacgtgcggggatcaggctcgtcgtcctcgtcccgacagcatcagcagcggcaggtgatcgagctggagtgcctagacgaccaagtgctgcaagagatgctcaagggtggcgacgatcagtacaggtcagcagctgggagcaagaggaataactactagctcgagacccagctttcttgtacaaagtggt

SEQ ID NO: 60 - DNA, 1256 bp, Oryza sativa
gcagtcgctgtcgttaccatgcaagagagcagagagtattggcgcgacggcggcgatgtcgtcggagaggagctcttgagggagatcctcgatgagaccgccgcggtgcattccaattccaattccaattcaaattcaaattccaattcaaaggaggcggaggaggaggatgagagagaatattttgccgcagctgcagcggatgagcagctgcaggtggaggctccttgcgggcggcggcggcgggagtcgatggtgaacaagctcatctccacggtgtattctgggccaaccatcagcgacatcgagagcgctctctccttcaccgccgccggcgaccatcagctactcgccgacggtcacaatttcgctgcaagtagctgtagcccagtggttttctcgccggagaagacgttgagcaagacgatggagaacaagtacacactgaagatgaaaagctgtgggaataatggtgggctcgcagatgatgggtacaaatggagaaagtatggccagaaatccattaagaacagcccaaaccccaggagctactaccggtgcacgaatccgcggtgcaacgcgaagaagcaggtggagcgagctgtggacgaacccgacactctgatcgtcacctacgagggtctccacctgcactacacctactctcacttcctccactccacttcttcctcctcgtcgtctactaccacccaacaacaactgcagcctcagcctcagatgatgaccaactgcaagaagaagcccaagctgcacctgcacccgctgctgcacgacgacccacccccacccccaccgccgccggaaatgacgaccatgatgataatgcagagcttcagcatccagcaacaacaacatgatgatgatcagctgctgcagcctgctgcagatgatcacttgatggtgcaggctccccccgatgattgttacaatattaacggcagcagcagcagcggcttgatgatgagcttggacgacgacgagcaggccgccggcgccggcgggctactggaggacgtggtgcctctgctggtccgccgcccgccgccgcccatctgcaacaacaacaactactactactcgccggccaccacctgcacctctgacaacgagtacggctcgtcggcgtcggcgtcgccgtcctcctccgtctccgtctccagctggactactcccatgtctccctgcatcgacatggccatactctccaacatcttctagaacccagcggtactcgc

SEQ ID NO: 61 - DNA, 2143 bp, Oryza sativa
acaagtttgtacaaaaaagcaggctcctgcaggaccatggcgccggtggaggatggcggcggggtggagttccccgtggggatgaaggtgctggtggtggacgacgaccctacatgcctcgccgtgctcaagaggatgctcctcgagtgccgctacgacgcgacaacttgttctcaggctacaagagcattaactatgctgcgagagaacaggcgtggttttgatgttataattagcgatgttcatatgcctgatatggacggattcaggttacttgaacttgttggccttgagatggatctcccagttattatgatgtctgctgattcaaggacagatatcgttatgaaaggaataaaacatggagcatgtgactacttaattaaacccgtcagaatggaggagttgaagaacatctggcaacatgttataaggaaaaagtttaatgaaaacaaggagcatgagcattcaggtagcctagatgatacagatcgtaccagaccaaccaataacgataatgagtatgcttcatctgcaaatgatggagctgaaggtagctggaagtctcagaaaaagaaacgggataaagatgatgacgatggtgaattggaaagtggtgacccttcttctacatcaaagaaaccaagagttgtttggtcagttgaactccaccaacaatttgtaaacgcagttaatcatctggggatagacaaagctgttcccaagaaaattttggagttgatgaatgttcctggtttaactagggaaaatgtcgccagccatttgcagaagttcagattgtatctgaagaggattgctcagcatcatgccggaatagctaatccattctgcccgcctgcttctagtggtaaagtaggctcactgggaggacttgatttccaagctttggctgcctcaggtcagatccctcctcaagccctggccgccttgcaggatgagctcctagggcgacctacaaatagtttggtattgcctggaagggaccagtcatctttacggcttgctgcagtcaaaggaaacaagccccatggggagagagaaatagcatttggtcaacctatatacaagtgccagaataatgcatatggggcattccctcaaagcagtccagctgttggaggaatgccttcattttcagcttggcccaataacaaacttggtatggcagactcaaccggcacattgggaggcatgagtaattctcagaatagcaatatagtcttgcatgaattgcaacagcagccagatgccatgctgtcaggaacccttcactctctagatgtcaaaccttctgggatagttatgccttctcagtcattaaatactttctcagccagtgagggtctctcccctaatcaaaataccttgatgatacctgctcagtcatctggttttctagcggccatgcctccatccatgaagcatgaacctgttcttgcaacttctcaaccatcgagtagtctgttaggtggtattgatttggttaatcaagcttcaacaagtcagcccttaataagtgcccatggaggggggaatctttctggccttgtaaatcgtaatccaaatgtagtaccttctcaagggatcagtacttttcatactccaaataatccatatttggttagtccaaattctatgggaatgggctccaaacaaccacctggtgttcttaagacagaaaactctgacgctctgaaccatagctatggttatcttggtggtagcaacccccctatggactctggcttactctcttcacaatcaaaaaatacacagtttggtttactgggtcaggatgacatcactggtagctggtcgcctctgccgaatgttgacagttatggtaatactgttgggctaagccaccctgggtccagttcatctagttttcaaagttctaatgtggctcttgggaaattgcctgatcaagggcgaggaaagaatcatggatttgttggtaaaggtacttgcattccaagccgctttgcagtggatgagattgaatctccaactaacaacttgagtcacagcattggaagcagtggagatattatgagccctgatattttcggatttagtggacagatgtagctcgagacccagctttcttgtacaaagtggt

SEQ ID NO: 62 - DNA, 1259 bp, Arabidopsis thaliana
gcagtcgctgtcgttaccatgtcttcttcttccttgatacttctcttctctactctctctctctttctcaatgtctcactcgcagacaatcacacggcggttgttataacaacctcagatactccaccgccacttcctccgccttctccaccgccacggcataacttcacttcctctctcatgcccggaatcgcagtcgttatcgccgtcctcactgcgtttttctctctcactttcttacttctcctctacgtcaaacactgtaaacgacgaaacggcagcgtttacgtaaaccacccgcagcgtttcgcaatcactagatacggaggaggatattacaacggtggaggagtagtaggaggaaggaaaaactccggtatagaccggtccgtgattgaatctttaccggttttccggtttggtgcattaagcggtcacaaggatggtttagagtgcgccgtgtgtctcgctcggttcgaaccgacggaagttctgaggttattgccgaaatgtaaacacgccttccacgtggaatgtgttgacacgtggcttgacgctcactccacttgcccgctttgccgttaccgggtcgacccggaagatatactcttgatcggtgattgtaactcctggttcgagctccagttctctaaagatgaatcaaacagtgttaataataatcctcccggtttaacccggtttattccggttagtcgaatttccggtcgtcattcctcggctggtgaacgagcgagtcgactcaacgagattagaacatcttcgtcgtataaatcgaatccgatgtcgtttcggagatcactcgatagctctctgaaagttaacgacgccggcgaggagaaatcggaatctgtcgccgttaattgcttggatcgtctacagagaaaagacggattgttgttgattccgaatcgggagagctttgaggggagatttgagcaccggataattatctccggcgggaatcgagacgatcagaggtggagcgaagtaaggccgtcggatcttttgtatttacgatcagagatgatactcagcgattgccggaaattagctgcggcggagggtggcagagatgtaattaacgggagaagtgtgtcggagttaacgggaattgagagacggaggagatggggaggagagccgagacaacgacaagccacggcggtgatctcgaggtggctcgcttggtcccaccgtgcctccgcttccagcattgtttagaacccagcggtactcgc

SEQ ID NO: 63 - DNA, 2641 bp, Saccharomyces cerevisiae
aaaaaagcaggctcctgcaggaccatggtagatatatccgatacaagtggatacctacataaacaaggtgtcttacctagtgtttctttcatttgcacttctttttttgcgtgtggactgacatcttggaaagttgaactgtcatattatatagttgttgcagccgccatgggaaacagtccttctactcaggatccatcgcattcaaccaaaaaggagcatggacatcattttcatgatgcattcaataaagatcgtcagggaagcataacctctcaactgtttaacaataggaagagtactcataagagacgcgccagtcatactagcgaacataatggtgccattccccctagaatgcaattacttgcatctcacgatccatcgacagattgtgatgggcgcatgagcagtgatactactatcgataagggcccgtcccatctattcaaaaaggattattctttgtcctctgccgcagacgtaaatgacactacgttggccaatttgactttaagtgatgatcacgatgtgggtgcacccgaagagcaggtgaaatctccgtcgtttttgagcccaggtccatcaatggccactgtcaaacgaactaaaagtgatctggatgatctgtctactttgaattacaccatggttgacgaaacaacagaaaatgaaagaaacgacaaaccacaccatgaaaggcatcgctcaagcatcatagctttgaaaaaaaatcttttagaaagttcagctactgcttccccttctccaacgaggtcttcatcggtgcattcagcatcacttcccgccttgaccaagacggattccattgatattcctgtaagacaaccctattcaaagaaaccatctatccatgcataccaatatcaatatctcaataacgacgaaacattttctgagaactctcaaatggataaagagggaaacagtgatagtgtagatgcagaagcaggcgtacttcaaagtgaagatatggttttgaaccagtctcttttacaaaatgctttaaaaaaggatatgcaacgtctttcaagggtgaattcctctaattcaatgtatactgcagaaaggataagccacgctaataacaatggaaatattgaaaataacacccgtaacaagggaaacgcgggaggctccaacgacgattttaccgcacctatatctgctactgcaaaaatgatgatgaaactgtacggtgataagaccttgatggaaagagatttaaataagcaccataataagacaaagaaagcccagaataaaaaaataaggtcggtttcaaattcgagaagatcctcatttgcttctttgcattctttacaatcaagaaagagtatcttaacaaacggtttgaatttgcagcctttgcatccactacatccaattattaacgacaatgaaagtcaatactctgcaccgcagcatagagaaatatcgcatcactctaattccatgtcgagtatgtcttcaatatcatcaacaaactccaccgaaaatactttagttgttctaaaatggaaagacgatggtaccgtggctgcaaccacggaagtctttatagtaagcacggatattgcttctgctcttaaagagcaaagagagcttaccttggatgagaatgcaagtttagactcagaaaaacagttaaatcctaggatccgcatggtttatgatgatgtgcataaggaatggtttgttccagatctttttttgcctgcaggaatttatagactgcaattctccatcaatggtatattgactcactcaaattttcttcctacagctacggattcagaaggcaattttgtcaactggtttgaagtattgcccggttatcatacgatcgagccatttagaaacgaagcagacatcgactcgcaagtagagccaacactggatgaagaattgcccaagagaccggaacttaaaagatttccttcttcctctcgaaaatcttcctactattctgctaagggtgttgaaaggccaagtacaccgttttcagattatagaggcttaagtaggtccagttcaataaatatgcgtgactcatttgtacgtctgaaggctagcagtttggatttgatggccgaggtcaagcctgagaggttggtgtattcgaacgaaataccaaatttatttaatataggtgacggctctacgatttctgtaaaaggagattctgatgacgtgcatccccaagaacctcccagctttacacatagagttgttgactgtaatcaagatgatttatttgctactttacagcaaggcggtaatattgatgcagaaacagcagaggcggtttttctaagtagatacccagttcctgacttgcccatatacctgaattcatcctatctgaacagaatactaaaccaaagcaatcagaattcagaatcacatgagagggatgaaggtgcgataaatcatattataccccacgtgaatttgaaccatttactgacaagcagtattagagatgaaataatcagcgtagcttgcactactagatatgaggggaaatttatcactcaagtagtttatgcaccttgttattataaaacacaaaagtctcagatcagtaattagctcgagacccactttcttgtacaaa

SEQ ID NO: 64 - DNA, 1558 bp, Oryza sativa
acaagtttgtacaaaaaagcaggctcctgcaggaccatggcaacgtgcgcggataccctcggcccgctgctgggcacggcggcggcgaacgcgacggactacctgtgcaaccagttcgcggacacgacgtcggccgtggactcgacgtacctgctcttctcggcgtacctcgtgttcgccatgcagctcggcttcgccatgctctgcgccgggtccgtccgcgccaagaacaccatgaacatcatgcttaccaacgtgctcgacgccgccgccggcgcgctcttctactacctcttcggcttcgccttcgccttcggggcgccgtccaatggcttcatcgggaagcacttcttcggcctcaagcaggtcccacaggtcggcttcgactacagcttcttcctcttccagtgggccttcgccatcgccgccgcgggcatcacgtccggctccatcgccgagcggacccagttcgtggcgtacctcatctactccgccttcctcaccggcttcgtctacccggtggtgtcccactggatctggtccgccgacgggtgggcctcggcttcccggacgtcggggtcgctgctcttcgggtccggcgtcatcgacttcgccgggtcaggggttgtccacatggtgggcggcgtggccggactctggggcgccctcatcgagggcccccgcattgggcggttcgaccacgccggccgctcggtggcgctgcgcggccacagcgcgtcgctcgtcgtgctcggcagcttccttctgtggttcgggtggtacgggtttaaccccggctcgttcctcaccatcctcaaatcctacggcccgcccggtagcatccacgggcagtggtcggcggtgggacgcaccgccgtgaccaccaccctcgccggcagcacggcggcgctcacgacgctcttcgggaagaggctccagacggggcactggaacgtgatcgacgtctgcaacggcctcctcggcggcttcgcggcgatcaccgccggttgctccgtcgtcgacccgtgggccgcgatcatctgcgggttcgtctcggcgtgggtgctcatcggcctcaacgcgctggcggcgaggctcaagttcgacgacccgctcgaggcggcgcagctgcacggcgggtgcggcgcgtggggggtcatcttcacggcgctgttcgcgcgcaaggagtacgtggaccagatcttcggccagcccgggcgcccgtacgggctgttcatgggcggcggcggccggctgctcggggcgcacatagtggtcatcctggtcatcgcggcgtgggtgagcttcaccatggcgccgctgttcctggtgctcaacaagctgggcttgctgcgcatctcggccgaggacgagatggccggcatggaccagacgcgccacggcgggttcgcgtacgcgtaccacgacgacgacgcgagcggcaagccggaccgcagcgtcggcgggttcatgctcaagtcggcgcacggcacgcaggtcgccgccgagatgggaggccatgtctagctcgagacccagctttcttgtacaaagtggt

SEQ ID NO: 65 - DNA, 1447 bp, Emericella nidulans
acaagtttgtacaaaaaagcaggctcctgcaggaccatgtctaaccttcccgttgagcccgagttcgagcaggcctacaaggagcttgcgtcgaccctcgagaactccaccctctttgagcagcaccctgaataccgacgggctctccaggtcgtctccgttcccgagcgcgttatccagttccgtgtcgtttgggagaacgacaagggcgaggttcagatcaaccgcggttaccgtgttcagttcaactccgctctcggtccctacaagggtggtctccgtttccacccctccgtcaacctttctatcctgaagttccttggcttcgagcagatcttcaaaaatgctctcacaggactaaacatgggtggtggcaagggtggttccgacttcgaccccaagggcaagtctgactctgaaattcgtcgcttctgtaccgctttcatgactgagctctgcaagcacatcggcgcggacactgacgttcccgctggtgatatcggtgttactggccgtgaggttggtttccttttcggccagtaccgcaggatccgcaaccagtgggagggtgttctcactggcaagggtggcagctggggtggtagcttgatccgccctgaagccactggatacggtgttgtctactacgttgagcacatgatcaagcacgttaccggtggaaaggagtccttcgcaggcaagcgtgtcgccatctccggctccggtaacgttgcccagtacgccgctctcaaggtcatcgagctcggtggttccgttgtctccctttccgactccaagggctctctcattgtcaaggatgagtccgcttctttcacccctgaagagatcgccctcattgccgacctcaaggttgcccgcaagcaactctccgagctcgccacctcctccgctttcgccggcaagttcacctacatccccgatgctcgcccttggaccaacattcccggcaagttcgaggttgctctcccttctgccactcagaacgaagtctccggcgaggaagccgagcacctcatcaagtccggtgtccgctatattgctgagggttccaacatgggttgcacccaggccgccatcgacatctttgaggctcaccgcaacgccaaccccggcgatgccatctggtacgcccctggtaaagccgccaacgctggtggtgtcgccgtctctggtcttgagatggctcagaactctgctcgtctctcctggacatccgaggaggtcgatgctcgcctcaagggcatcatggaggactgcttcaagaacggtctcgagactgctcagaagttcgctactcctgccaagggcgtcctgccttccctcgtcaccggttccaacattgccggtttcaccaaggtcgccgaggccatgaaggaccagggtgactggtggtagctcgagacccagctttcttgtacaaagtggt

SEQ ID NO: 66 - DNA, 1498 bp, Saccharomyces cerevisiae
acaagtttgtacaaaaaagcaggctcctgcaggaccatgatagcttccaaaagctccttattagttactaaatcgcgcataccctctctatgctttcctttgataaagaggtcctatgtgtcaaagactccgacacactctaacacggctgctaatctgatggttgaaactccggccgccaatgccaacggcaatagtgtgatggcacctcctaactcaatcaattttctacagacacttcccaagaaggaactattccaactgggattcatcggtattgcgaccttgaacagcttcttcctgaacacgatcattaagttgttcccttacatccccatcccagtaataaaattcttcgtctcttctttatactgtggcggtgagaactttaaagaggtcatcgaatgcggcaaacgtctgcagaagagaggtatatcgaacatgatgctttcattaactattgaaaattccgaaggtacaaagagtttgtccagtactccagtagaccaaattgtcaaggaaacaatcagctctgtccacaacatcctactgcccaatattattggccagctggaatctaagccaatcaatgacattgctccaggttatatcgctctaaaaccctctgctttggtcgataaccctcacgaggttctgtacaatttcagtaatcccgcctacaaggctcaaagggatcagctgatcgagaactgctctaagattacaaaagagatttttgaactaaatcaatctttgttaaagaagtaccctgaaagaaaggccccatttatggtttccactattgacgctgagaagtatgatttgcaggagaatggtgtttacgaattacagagaatcttatttcaaaaattcaatcccacttcatctaaactgatatcatgtgtcggtacttggcagttgtacctaagggactctggtgaccatattttgcacgaattgaagctggcccaagaaaacggctataagcttgggctgaaactggttcgtggtgcttatattcattctgaaaaaaaccgtaaccaaattatctttggcgataaaacgggcactgacgaaaattacgatcgtatcatcactcaagttgtcaatgatttaatcatcaatggcgaggattcttattttggtcacttggttgtcgcctctcataattaccaatcccaaatgctcgttactaatttgctaaaatctacccaagacaactcttatgccaaatcgaacattgtgttggggcaattactaggtatggcagataatgttacctatgacctaattaccaaccatggcgctaaaaacataatcaagtatgtcccatggggcccaccattggaaactaaagattatcttttgagaagattgcaagaaaacggggatgctgtgagatctgataatggctggccattaatcaaggccatagcaaagtcgattccaaaaagagtaggcctatagctcgagacccagctttcttgtacaaagtggt

SEQ ID NO: 67 - DNA, 2008 bp, Saccharomyces cerevisiae
acaagtttgtacaaaaaagcaggctcctgcaggaccatgagttacgaatctgggaggtcatcctcctcttccgagagtacacggccaccaacgctaaaagaagaacctaatggtaaaatagcttgggaagaaagtgtcaaaaaatctagggaaaataacgaaaatgacagcactctcttgaggcgaaagctaggtgagactcgaaaagcaattgaaactggaggatcatcgagaaataaactttctgctttgacacccttgaaaaaagtggttgacgagaggaaggattcggtacaaccacaggtcccttccatgggttttacttattctttgcctaatttgaagactttaaacagtttttcagatgctgagcaagcacgtataatgcaagattatctatccaggggggtaaatcaaggcaacagtaataattatgtagacccactatatcggcaattaaatccaactatgggtagtagcaggaacaggcctgtttggagtttaaatcagccgttaccgcatgtattggatcgaggcttggcagcaaagatgatacaaaagaatatggatgcaaggtcccgcgcatcatcgagacgagggtcgaccgatatttcaagggggggttctactacgtcagtgaaagactggaaaaggctccttagaggtgcagcaccgggtaaaaagcttggtgacatcgaagctcaaacgcaacgcgataatactgttggtgcagatgtgaaacctactaagttagagcctgaaaacccacaaaagccctctaacacgcatattgagaatgtttcacgtaagaaaaagcgtacttcgcataatgtcaatttttcattaggcgatgaaagctacgcatcctccatagccgatgcagaatccagaaaattaaagaacatgcaaaccctcgatggttctactccggtttatacgaagcttcctgaagaacttattgaagaggaaaataaaagtacgagtgcattagatggtaatgaaattggtgcctcagaagatgaagacgcggatataatgacatttcctaacttttgggcaaaaattcgctatcatatgcgagaaccgtttgcggagtttctcgggacactagttcttgtcatttttggtgttggtggtaatcttcaagcaactgtaacaaaaggtagtggtggttcctatgaatccctatcatttgcatgggggttcggttgtatgcttggtgtttacgtcgcaggcggtattagtggtggtcatattaaccctgctgttacgatttcaatggcaatttttcgaaaattcccctggaaaaaggtgcccgtatatattgttgctcagattatcggtgcatattttggaggagctatggcttatggttatttttggagctctatcacagaatttgagggaggtccgcacataagaacaacggcgaccggtgcgtgtttgtttactgatccaaagtcttacgtcacgtggagaaatgccttctttgacgaattcataggagcctctatacttgtgggttgtttgatggcgctattggatgatagtaatgctccacctggcaatggtatgaccgcattaattattggattcttagtcgctgcaattggtatggcccttggatatcaaacaagtttcacaatcaatcctgcaagagatctcggtcctcgcatatttgcttccatgattggctatggtccacatgcttttcatctcacacattggtggtggacatggggagcctggggtggtccaattgccggcggtattgctggagcactcatatatgacattttcatttttactggatgcgaatccccagtcaactacccagacaacggttatattgagaatagggtaggtaaacttttacatgcggagttccaccagaatgatggcactgtctcagatgaatctggtgttaacagcaacagcaacactggcagcaagaaatctgtgcctacttcgtcatagctcgagacccagctttcttgtacaaagtggt

SEQ ID NO: 68 - DNA, 2413 bp, Saccharomyces cerevisiae
acaagtttgtacaaaaaagcaggctcctgcaggaccatgaatattgcagaagaaccatcagatgaagtaatatctagtggccccgaggatacagatatctgcagccagcagacatcagcgagcgcagaagctggagaccaatcaataaaaattgaaaggaaaacttccactggtcttcaactggaacaattggccaacacaaatttattaaccataagaataaaatggcagttacaagaagaagaagatgatcactgcaactctagaataaccgatcaaataatggacacaatacagcactacaaaggtatctccgttaacaactctgatacagaaacatatgaatttcttccggatacaaggaggttacaggttctcgaacaaaataaagacatctatctttacgagcatggaagtcaagagtatgagaaatcttacaaagataacgaagaggaagatgattggagatacgataccgttttgcaagcacaattcaagtaccccaagtcattagaaaatgcatgtacagatatctcggaattactcaagagcgaacctattggtcagcatattgataaatggtctatcggtgtgaacaagcatgcactaacctatcctggaaatatttttgtcgggggaatagcaaagagcctttctattggtgaactaagtttcttattttcaaaatatggaccaattttatcaatgaaattgatatatgataaaacgaaaggcgaacctaacggatacgggttcatctcctaccccttgggttctcaagcttcactttgcatcaaggaacttaatggaaggacggtaaatggctccacactatttatcaactatcacgttgagcgaaaggagagagaaagaatccattgggaccatgtcaaagaaaacaacaatgatgataatttcaggtgtctctttataggcaacttgccttatcacaatcctgaaaaagtagagactttgattacacctaaagaagtcatagaagtaatcaagaaggagttatcaaaaaagtttccggactttgatatcatttcatattactttccgaagagaagtaatacaagaagcagtagttcagtaagtttcaatgaggaggggtcagtagaatcaaacaaatcttccaataatactaatggaaatgcccaagatgaagatatgttgaagggttatggtttcatcaagcttatcaaccatgaacaagcactagcagccatcgagaccttcaatgggttcatgtggcatggaaacaggctcgttgttaataaggcggttcaacataaagtttacaacaaccacaatagccatgacaggcacccttccatcagtaaccacaatgatatggaggttttggaatttgcaaataacccaatgtatgattacaataattatacatatgatagatattacttcaacaataataaaaacgggaacagcaacgatacctccaatgtacggtattttgattctgtaagatcaacccctgtggcagagaaaatggatctgttctatcctcaaagggaatctttcagtgaaggtcgtggtcaacgtgtgcctagattcatgggcaacaagtttgacatgtaccagtacccatcaacttcttacagcttacctataccaatgagtaatcagcaagaatcaaacctatatgtcaagcacatccctctttcttggacagatgaagatttatatgatttctacaaatctttcggtgaaataatcagcgttaaggtcattactgttgggggtagtaagaacaagtatcgtcaacaatcgaatgatagctcatcagataatgatctgccagtgggatcatcaagaggttatggttttgtttcttttgaaagcccattagatgctgctaaggcaattttgaatacagacgggtatcaagtgagcaaagatcaagtgttatctgtttctttcgctcagaaacgtggtaatttatcttcaagtgatgatgatgatcaatcccaaactgataactcatcaaagttccaaaattttcagccacataatgattatcataaggcttatccaacaaagtataataagaaatttatcaatgccttgatgactcagaaccaatcgcaacagcaagtctcgagggaaaattatttcataccactgcagtaccctaataccaacacaaagcccgtgaacagttacaacttaataagtgcaaaccaaaataacgctaactggatgatgccaatgttcccatcatttgggtttattccacaggtgccgccagtgccctatataatacctccgcagaatcctgcagcaaatcatattcctataatggcaaacggtagtaatgaagaggaagaattttctagtggtgattattctatggactactagctcgagacccagctttcttgtacaaagtggt

SEQ ID NO: 69 - DNA, 697 bp, Saccharomyces cerevisiae
acaagtttgtacaaaaaagcaggctcctgcaggaccatgaacatatacacatcacccacgcgaacaccgaacatcgcaccaaagagtggccaaagaccatctcttcctatgctggccacagatgagaggtctacggacaaagaaagcccgaatgaagaccgtgaattcgtgccttgttcgagtttggacgtgcgcagaatctacccaaaaggcccattacttgttctcccggaaaagatctacctttattcagagcccacggtaaaagagcttttaccctttgatgtggtcatcaacgttgctgaagaggcaaacgatttacgaatgcaggttcctgctgtcgagtaccatcactaccgatgggaacatgattcgcagattgcgttggacttgccatcattgactagcatcatacacgcagctacgactaagcgagagaagatactgatacattgccaatgtgggctgtcgagatccgcaacgctgattattgcatatataatgaaatatcataacttgagtctgaggcactcatatgatctgttgaaatcaagggcagacaagataaacccttccatagggcttattttccagttgatggaatgggaggttgctcttaacgcgaagactaacgtgcaagccaacagttatagaaaagtaccgtagctcgagacccagctttcttgtacaaagtggt

SEQ ID NO: 70 - DNA, 1642 bp, Saccharomyces cerevisiae
acaagtttgtacaaaaaagcaggctcctgcaggacccgactcaatgactgctggttctgccccccctgttgattacacttccttaaagaagaacttccaaccgtttctctccagaagagtagaaaatagatctctgaaaagcttttgggatgcttctgatatctcagatgacgtcattgagctagctggtggaatgccaaacgagagattttttcctatcgaatctatggatttgaaaatatcaaaagttccttttaatgataacccaaaatggcataattcgtttaccacggcgcatttggacttgggatcccccagtgagctacccattgcacgttctttccaatatgcagaaaccaagggtttaccccctctcttacattttgttaaagattttgtgtccagaattaatcgcccagccttttccgatgagacggagtctaactgggatgtcatcctttctggcgggtccaacgattcaatgtttaaggtttttgaaacaatttgcgacgaatcgaccactgtgatgattgaagagtttactttcaccccggctatgtccaatgtggaggctacaggagcaaaagtcatccccatcaagatgaacctgaccttcgacagagagtcccagggtattgatgtcgaatatctaacgcagttgctcgataattggtcaactggaccatacaaagacttaaacaagccaagggtcctatataccattgcaacgggccaaaatcctaccgggatgtctgtcccccagtggaaaagagagaaaatttaccagttggcccaaagacacgatttcctcattgttgaagatgatccctacggttatctgtactttccttcctataatccgcaagagccattagaaaacccttaccattctagcgacctgactactgaacggtatttgaatgattttttaatgaaatcattcttgactttggatacagatgcccgtgtcatccgtttggagactttttctaaaatttttgctcctggattaaggttatccctcatcgttgctaataaattccttttgcaaaaaatcttggatttggccgacattactacaagggcccccagtggtacctcacaagctattgtttattctacaataaaggcaatggctgagtccaacttatcgtcctctctttctatgaaagaagcaatgtttgagggttggataagatggataatgcagattgcttctaaatacaatcataggaaaaatcttactttgaaagccttatacgaaacagaatcttaccaagctggtcagtttaccgttatggaaccctccgcgggtatgttcatcattattaaaatcaattgggggaatttcgatagacctgacgatttgccgcaacagatggatattttagataagttcttgctgaagaatggtgttaaagtagtgcttggttataaaatggctgtttgcccaaattattcaaagcagaattcagattttctaagactcaccatcgcctatgcaagggatgatgatcagttgattgaagcttccaaaagaatcggtagtggcataaaagaattttttgacaactataaaagttgaacagtgaagattaaacctatgtgtagctcgagacccagctttcttgtacaaagtggt

SEQ ID NO: 71 - DNA, 2293 bp, Saccharomyces cerevisiae
acaagtttgtacaaaaaagcaggctcctgcaggacctaaagaatgaccattgatggcacggggcaatctaaggaggcgctgcaagatgaacggttaaatactggctctgataaggtttaccaaaactatatgatgcctgctttagaactctacgatgccaaggtctccataaaccattggcagttgcgggattgtatcaaaccaggctccatgaaccagagtaaactgtattatatttacgatcattcgataagagtactagatacggattcttccgtattgaggtctccagtaaggcgacataattctattcaaccgagtaacagtggtaaaaactctactgaaaaaacgtctacaaaaggttctaggacaacgggctcgtatatctccaaaaatttacatgttccttccgagaaactggtagagttcaactttaagccgagatgtttcacggaattaaatgggttgactgtttgtggtggtctaatcggttctgatgataagggattcccttctaattggaaccgtttagctcaagatgcaaatatttcgttgccgccaccttcccaaccgattaatatttccaaaaatattagtttccctataaattcacattattcaaatcctaatatctggaagggcatcgtggagttttataatcaagaaacggacacaatgatgacttttacgttgggccagttcatcaataattgtgtcacactttatgacagggccagtatgcagtttgatctttttgcatgcaacaatgatggtcatctttaccaatgcgatgtaagtaatagagatgtaacactagtgaagcgttatgcggatttaaaatttcctttgaataacgcttctttgtcacatgatggtcaaacgatggtagtgtctggcgattctaataaatttgctgtttacaatcaaaatgaattaaccaaccaattctccttacattacgataatcatccttcctggggtagttctgtcaatcgtgttagacggataccacggtttgcgttacctgatgaatcagaatatatcgaaaacatatatgaagctccaaattcagaccatgggttttataactctttttccgaaaacgacttgcaatttgcgacggtatttcaaaatggtacttgcgcaatttatgatatcagaaacatggctactcccatggcagaaattagttcgactagaccacattcccacaacggtgcatttagagtctgtaggttcagttatggcctagatgatttattattcatttctgaacatcagggcagagtacacgttgtagatacaagaaactacgttaaccaccaagttattgttattcctgataaagttaatatggaatatataaacgaacggaagcataatacaaatcataatttcaccacaaataataacaacgaaaacgaaagtaatgatagcaaaaatgaattacaaggggcggattatcggtctttatcaagaagaagattttcgctgccctctatgccaaatgtaaccacagaaccatggataactatggctcaaagaatcccaaaaaagtatttggagccgcaaattctaccttttccgaaagttatggataaaattagtaacgaatcggttctgttttctacgaaaggtagttcatcaagtgacgtagctcatccatacaagagacgatgttcattcagggtaaggagagtatcgacttcggcaccaaccgccgattattctaataacaatgttaacgcaagtcttggcacacctgctgctgattctatcgcaacttcgtcgtcaaattccgcacctcaaaatttaattgaccccttaatactttctcaccagcaagctagtaatgatgtttttgaagatgatgaatattatgaagcttacaatgatgttcactcaacgtatcgtgtttcttcagactatcatggtgtttccgcaagagcttttgaaagttttctcagaccaccttcaacgccagacttaccgtcagatgatgacaattttgctgcaaatagtaggaataatagaggcacatccaattttttgagaagaccagtgattacaactcaggaaagtaacgaattctcagaagaaaacaatatatcaggtatcgattgggttgaagataggaatgggagctccttgattattggtacagattacggaattatgaggtggaatattaactcatgggcaagaagaagtttctctagttatgacttatgttgaacttcagccatacatatattgtgtagctcgagaccccagctttcttgtacaaagtggt

SEQ ID NO: 72 - DNA, 835 bp, Saccharomyces cerevisiae
acaagtttgtacaaaaaagcaggctcctgcaggaccatggtgaaattacaaaggtttagcgaaaagaaaagcctcatacacgaattcggcaagtttatccttgaaaagcaagaatcggcgttaacgggcgacgctgatgcagtgttcaatatcgccatcagtggaggatcgatgaaccaagcgctgtacgaaagtttggtaaatgacaaaaacatttttccacatattaagtggccacaatggagaatcttcttctgtgacgaaagattggttccatttgaggatccgcaaagtaactatggtcagttcaaaaaaacagttttggacccgctagtgcatcagggcaaccaattgaacttaggccccactgtatacactatcaacgaatcattaatcggtggcggtgaaacggccaatagaaagattgccgaagaatacgcttccatgctgcctgcatcattcgacctaatcttactcggatgcggagaagatggacatacatgctcgttgtttcccggggttgaatttaattaccttgtagaagagatggaccgcaaggttttatggtgtaataattcgcccaaggcacccaaggacaggatcacctttacattagcagtagtagccgaggctaaaagtgtgtgctttctcgttaggggagctgctaaaaaggctatcatgcatgacgtgttaatcgtaaaaaatagcgaactacctagtgtgctggttaatgaaatggtcggaaccaaagtaacttggtttctcgacgacgaagctggcgccttgattcctgaaaactgctagctcgagacccagctttcttgtacaaagtggt

SEQ ID NO: 73 - DNA, 892 bp, Arabidopsis thaliana
acaagtttgtacaaaaaagcaggctcctgcaggaccatggagagaagtactccggtgagaaagccacacacatcgaccgcagatctacttacttggtcggaagttccaccgccggattctccttcctccgcttctcgctccgccgttcgttcccaccagccatcggatgggattagcaaagtggtgtttggtggtcaagtcaccgatgaagaagttgagagcttgaaccgcaggaagccttgctcagaacataaaatgaaggagataactggcagtgggatcttttctcgtaacgaaaaagatgatgcgtcagagccattaccagtttatcagcaagcagttaatggtataagccagatatcatttggtgaagaggaaaatctatctcctaaaaagccggctactgtacctgaagtggcgaaacagcgagagctcagtgggactatggagaatgaatcagctaataagctacagaagcagctctctgatgctaaatacaaagagatcagtggacagaacatctttgcaccaccgcctgagatcaaacctcgatctggaactaatcgtgcattggctcttaaggacaatttcaacctcggagctgaatctcaaactgctgaagaagactcatctgtgaagacagcaaagaagatttatgacaagaaattcgcagaactttcaggaaacgacatattcaagggagatgcggcgtcatctaatgttgaaaagcatctgagtcaagcgaagctaaaggagataggaggaaacaacatatttgcagatgggaaagtagaagcaagagactatttaggcggtgtccgtaaaccaccaggtggagagacaagcatcgcacttgtttagctcgagacccagctttcttgtacaaagtggt

SEQ ID NO: 74 - DNA, 1090 bp, Arabidopsis thaliana
acaagtttgtacaaaaaagcaggctcctgcaggaccatgagcaattacgtccttgttgtttaccgtcacgccgttgcaaccatcgttatggccccgttcgccttctatttcgacaagaaggtgagaccgaagatgacactgatgatattcttcaagatatcactccttggtttactcgagccagtgatcgaccagaacttatactatctcgggatgaaatatacgacagctacatttgcaaccgccatgtacaacgtcctacccgcaatcactttcgtccttgcctatatatttggcctcgaaagagtaaagctacggtgcattaggagcacgggtaaggtggttggaacattggctactgttggaggagccatgatcatgacacttgtcaaaggcccagttctcgatctgttttggaccaaaggagtctctgcacataacacagctgggaccgacattcatagcgccatcaaaggcgcagtattggtcacgattggttgttttagctatgcatgtttcatgattctccaagcgataacattaaggacttaccctgctgagctctctctcacagcatggatatgtcttatggggacaatagaaggaaccgccgtggcattagtgatggagaaaggaaatcccagcgcatgggccattggttgggacactaaacttcttacagccacctatagtgggatagtgtgctcagcattggcttactacgttggaggagtggtgatgaaaaccagaggtcctgtgtttgtgacagctttcagtcctctttgtatgatcatagtagcgattatgtcgaccatcatctttgctgagcaaatgtaccttggaagggttcttggtgctgtagttatatgtgcaggattataccttgtgatatggggcaaaggaaaagattacaaatataattccacgctgcaattagatgacgaatcagcacaaccaaagctagaactaagcggaaacgggaaggataatgttgatcatgaagtcattactataagcaagcaaggagaacaaagaagaacagctgtagaaacagtctagctcgagacccagctttcttgtacaaagtggt

SEQ ID NO: 75 - DNA, 475 bp, Zea mays
acaagtttgtacaaaaaagcaggctcctgcaggaccatgtcgtcgtcacgccggagctcgagccccgacagcaacgacacgacggacgagcgcaagcggaagcggatgctgtccaacagggagtcggcgcggcggtcgcgcgcgcggaagcagcagcggctggaggagctggtggcggaggtggcccgcctgcaggcggagaacgcggcgacgcaggcccgcaccgcggcgctggagcgcgacctgggcagggtggacggcgacaacgcggtgctgcgcgcccgccacgccgagctggccggccgcctgcagtcgctgggcggcgtcctcgaggtgctccagatggccggcgccgccgtcgacatcccggagatggtcaccgacgaccccatgctccgcccctggcagccgtccttccccccgatgcagcccatcgggttctagctcgagacccagctttcttgtacaaagtggt

SEQ ID NO: 76 - DNA, 1341 bp, Zea mays
atgggtaaggagaagactcacatcaacattgtggtcattggccatgtcgactctggcaagtcgaccaccactggccacctgatctacaagcttggaggtattgacaagcgagtgattgagaggttcgagaaagaggctgccgagatgaacaagcggtcattcaagtatgcgtgggtgcttgacaagctcaaggctgagcgtgagagaggtattacaattgatattgccctgtggaagttcgagaccaccaagtactactgcactgttattgatgccccgggacaccgtgacttcatcaagaatatgatcactggcacttcccaagctgactgtgctgttcttatcattgactcaaccactggtggttttgaggctggtatctccaaggatggccagacccgtgagcatgctctccttgctttcacacttggtgtgaagcagatgatttgctgctgcaacaagatggatgctactacacccaagtattcaaaggcccgttatgatgagattgtgaaggaagtctcttcctacctgaagaaggttggatacaaccctgataagatccacttcgttccaatctctggttttgaaggtgacaacatgattgagaggtccaccaaccttgactggtacaagggcccaaccctacttgaggctctggacttgatcaatgagccaaagaggccttcagacaagcccctgcgtctcccccttcaggatgtgtacaagattggtggtattggaactgtccctgttggacgtgttgagactggtgtcattaagcctggtatggttgttacttttgggcctactggtcttactactgaggttaagtccgttgagatgcaccatgaggctctccaggaggcccttcccggtgacaatgttggcttcaacgtgaagaatgttgctgtgaaggatctgaagcgtgggtatgtggcctccaactccaaggatgaccctgccaaggaggctgctagcttcacctcccaggtcatcatcatgaaccaccctggccagattggcaatggctatgccccagttctggactgccacacctcacacattgctgtcaagtttgctgagctcgttaccaagattgataggcgatccggcaaggagctggagaaggagcccaaatttctcaagaacggtgatgctggtatggtgaagatggttcccactaagcccatggtggtggagaccttttctcagtatcctcctcttggtcgatttgctgtccgtgacatgaggcaaacggtggctgtcggagtcatcaagagtgtggagaagaaggacccaactggagccaaggtgacgaaggctgctgccaagaagaaa

SEQ ID NO: 77 - DNA, 975 bp, Zea mays
atggagaaccctgctccgagcatcgtagtggccatcgccgcacccgtggcggcggagttcgtgaagctcaccttccgtgccctgtatatgcgccgggctggtcctggcagcagggagatgactgtgccgggaaggccatccgaccagctgggcaggagagtcgtcactgacagccccgtgtacgacggccgtggcgccgacgcccgcctcgtggctcgcatacagggagtcacggtcctggtcggtaacgcagacgccttgttcaccatggtgttcgaaaccgacaggctaaagggctccacgctcgtcatcaacggaatggtcacggatgggtcagacgaatgggcgatctacggcggaaccggggtgttcgccatggccaccggtgtcatgaagagaagaaaccttgccggcggtagcaacgacgggaactctgacgagcttgccctggaagttttctgcccggtgtttggcgcatcacagcaaccaattagcaagcagcaggactccatctcctccgtcaccaagatcggactatggggcggacagggagggtcggcacaggacatcacggcagagcagccaccgcggcgtctgcacagcatcaccgtccgcgctggcgttgccgtcgactccatcgagttcacctacaccgacgacgctgggcagaggcgcactgctgggcggtggggtggacttggcggcaatgttcgaacgatcgaccttggcgacgccgaggatgttagagaagtctcgggaacatacggcgcatttgaaggtgccattacgctgacctcgctcaggctcgtcaccagcagcagaacctggggcccctgggggatcgagaacgggacgcgtttctccatcacggcgcccaacggcagcagcatcgcgggattctatgcgcgggcgggaaccaggctcgtcgacgctatcggtgtttacatacgtccagtggtgccaggcaggcctcgg

SEQ ID NO: 78 - DNA, 339 bp, Zea mays
atggcgtccggtcaggaaagcagggaggagctggcgcgcatggccgaggaggggcagaccgtcgtccccggcggcaccggcggcaagaccctcgaggcgcaggagcacctcgccgaagggcgcagtcacggcgggcagacccggagtgagcagctgggccatgaggggtacagcgagatgggcagcaagggcgggcagacccgcaaagagcagctgggccacgaagggtacagcgagatggggaggaagggcggcctgagcaccatgcaggagtccggcggcgagcgcgccgcccgggagggcatcgagatcgacgagtccaagttcaggaccaagtcc

SEQ ID NO: 79 - DNA, 870 bp, Zea mays
atggctggcaaggaaatcctccacaaggtgaaggacaaggtgaaagatgcatttagttcatcaggaccagaaacagggaaaggcaagacaaagttatcaggcaagcgtgtcaagcatggttaccatctggtgaagggcaaatctaatcatccaatggaggattatctagtggcagagtaccggcaagttggtgaacatgatttgggattgtttgctatattcgatggtcacctgggccacactgttccagactttttgagctcccatcttttcaataacatcttgagtgagccagaattcttgagtgatccagaaactgctatccgaaacgcataccaacttacggatcagaagatattggaaaacgcagcagagttgggaagaggtggctccacagctgttactgccatcttaataggaagtgacaagttcgtgaaactagttgttgcaaatgttggggattcacgggcagttattagcaagaacggtgtagcgaagcagctttcagttgaccatgaaccaaacatggagcgacaaacgatcgagcagaagggtggctttgtatcaaacctaccgggtgatgtgccacgtgttgatgggcagctggcagttgcaagggcatttggagaccggagcttgaagaagcacctcagctctgatccatatgtggtcgagcaaactatcgatgaaaatactgagtttttaattctagcaagtgatggcttgtggaaggtgatgtccaaccaggaggctgtcgacgagatcaaggattgcaaggacgcgcaggcagctgccaagcacctgacggagcaggccgtgaatcggaagagcaaagacgacatttcagttatcgtagtcaagttcatgtgc

SEQ ID NO: 80 - DNA, 1431 bp, Glycine max
atgggaatggaagaggagagtagcaacaacagcagcatcatagaaggtggtgcttcgctgccatcaacgggttcagacgccaagaagcgaagagtgacgtacttctacgagcccacgatcggcgattactactacggtcaggggcacccaatgaagccgcaccgaatccgcatggcgcacaacctcatcgtccactactccctccaccgccgcatggagatcaaccgtcccttcccggcctcccccgccgacatccgccgcttccactccgacgactacgtcgactttctctcctccgtctcccccgagaccctcgccgattccgccttctcccgccacctcaagcgcttcaacgtcggcgaggactgccccgtcttcgacggcctcttccccttctgccaggcctccgccggcggctccctcggcgccgccgtcaaactcaaccgcgccgacgccgacatcgccatcaattgggccggcggcctccaccacgccaagaagtccgaggcctctggattctgctacgtcaacgacattgtcctcggtatcctcgaactcctcaaagttcacaggcgcgtgctgtatgttgacattgatgttcaccatggtgatggtgttgaggaggccttttacaccactgatagagtgatgacagtgtctttccataagtttggggactttttccctggcacaggacacgtcaaggacattggggtgggatcaggaaagaattatgcagtcaatgtcccattaaatgacggaatggatgatgagagtttccgtagtctgtttcgaaccatcattcaaaaagtcatggaggtctatcaaccagaggcagttgttctacaatgtggagctgattcattgtctggggacaggttgggttgcttcaacttgtctgtgagaggtcatgcagattgccttcgttttcttagatcgttcaatgttcctttaatggtcttgggtgggggtggatatacaattcggaatgttgcccgttgttggtgttatgagacagcagtggcagtaggagtggagcctgataataagttgccttataatgaatattatgaatattttggcccagattatactctctatgtcgatccaagcaacatggagaacctaaacacacccaaggatatggaaaaaataaggaacacactactagaacagatttctcaacttccccatgctcccggtgtaccttttcagacaacaccacctaccttacaacttccggaagaggcagaagaggacatggatagaagacctaaacttcgcaaatgggatggtgaagattatgattctgatcctgatgaaggtggaaaggctaattccaagtttccaaacgtcactgcccatatgagggacattacagatgaaatggaagaagagaaaccagaagtgcatccatcatcttgttgttag

SEQ ID NO: 81 - DNA, 750 bp, Zea mays
atggcgaagaactacccgaccgtgagcgccgagtacagcgaggctgtggagaaggccaggcgcaagctccgagccctcatcgccgagaagagctgcgccccgctcatgctccgcctcgcgtggcactccgcggggacgttcgacgtgtcgtcgaggaccggcggtccattcggcacgatgaagcatcagtcggaattggctcacggcgctaacgcggggctggacatcgcggtgcggctgctcgagcccatcaaggaggagttcccaatcctctcttacgccgatttctaccagctcgcgggagttgtggccgtggaggtcaccggtgggcctgagattcccttccaccccggtagggaggacaagcctcaacccccacctgagggccgccttcctgacgccactaagggttctgaccacctgaggcaagtttttggcaagcagatgggcttgagcgatcaggacattgttgccctctctggtggccacaccttgggaaggtgccacaaagagcggtctggtttcgagggggcctggactacaaaccctttggtctttgacaactcttacttcaaggaacttctgagtggtgataaggagggccttcttcagctcccaagtgacaaagccctgctgagcgaccctgttttccgccctcttgtcgagaaatatgctgcggatgagaaggctttctttgatgactacaaagaggcccacctcaagctctccgaactggggtttgctgatgct

SEQ ID NO: 82 - DNA, 970 bp, Zea mays
acaagtttgtacaaaaaagcaggctcctgcaggaccatggcctccacctccaccttcctgtccaccctcgccagcaggtccgcggcagccgatagcctgcgcagcgccgtgccgtccttcgccaagatcgtcaggttcttgcccgcgcaggcgcagatcagccgcaggcggcgcgcggcggtgctgcccacgccgagggcggcggtgtcgggcaccgagaaggcgccgtcgagcaagcacgagcgcgtggtcagggtgcacagcacccaggagttcgacgacgcgctcaaggccgccaagaaccggctggtggtggtggagttcgcggcgagcgacagcgaggacagcagccagatctacccgaccatggtgcagctcagccgcacctgcggcgacgtggacttcctgctggtcctgcgcgacgacgagtcggaggccaccgaggagctgttccgccgggagggcgtcacgaaggtgccccacttcaacttctacaagggcgccgagaaggtgcacgaggaggaggccatcggccccgagcggctcgcgggcgacgtcctctactacggcgacagccactcggcggtggtgcagctgcactcgcgggaggacgtggaggcgctcatcgacgagcaccgcggcgacaagggcaagctcgtcgtgctggacgtgggcctcaagcactgcgggccctgcgtcaaggtgtaccccaccgtgctgaagctgtcgcggtccatggtcgacaacaccgtcttcgcgcgcatgaacggcgacgagaacgacagctgcatggagttcctcagggccatgaagatcgtggaggtgcccactttcgtcttcatcagggacggccagatcgtcggccgctacgtcggctccggcaagggggagctcgtcggtgagatcctccgatacaacggcgtcagggtcacctactagctcgagacccagctttcttgtacaaagtggt

SEQ ID NO: 83 - DNA, 618 bp, Zea mays
atgtcgacgtcgcggaggcggacactgctcaaggtcatcgtccttggcgacagcggggtcgggaagacgtcgctgatgaaccaatatgtccacaaaaagttcagtcagcagtacaaagctacaatcggtgcagatttcgtcacaaaggaggttctgatcgaagacaggctagtcacgttgcagatatgggacaccgcggggcaggagagattccagagtcttggggttgcattctacagaggggccgattgctgtgtgctcgtctatgatgttaactctaacaggtcatttgatacactcaatacatggcatgatgaattcctcaaccaagctagcccatcagatcctaaaacttttcccttcatcttactcggtaacaagattgatgtagatggtggaaaaagcagagtggtttctgataagaaagcaatggagtggtgtgcttctaaaggcaatatcccttattttgaaacttctgcaaaagaggactacaatgttgacaatgctttcctgactgttgccaagcttgctctagagcatgagcgcgatcaggacatttacttccagagtgttgcggatcctgtccctgagactgagcagagaagcggatgtgcatgc

SEQ ID NO: 84 - DNA, 651 bp, Zea mays
atggcggggccaggagacaaggtggactacgtcttcaaggtggtgctgatcggcgactcggcggttggcaagtcgcagatcctcgcgcgcttcgcccgcaacgagttcagcctcgactccaaggccaccatcggcgtcgagttccagacccgcaccctcgtcatcgaccacaggagcgtcaaggcccagatctgggacaccgccggccaggagaggtacagagctgtgacaagtgcttattacagaggtgcactgggagctttgctggtctatgacattaccagacgccagagcttcgatcatataccccgctggctagatgaactccgagcccatgccgacaagaacattgtgataatgctggttggcaacaagagtgatctcgaggagcagcgagcggtgagcactgaagatgccaaggagtttgccgagaaggagaacctcttcttcctggagacctctgcgctccaggcaacaaacgtagagagtgcttttcaaactgtcttgacagagatattcaagatccacagcaagaagaacatggtgtcggagccgaagagcaatggagctgcccaagcaatgccggggacaaaggtccttgtcccaggtccggcgcaggaaatcccaaagagcaagtgctgcagttccatg

SEQ ID NO: 85 - DNA, 1329 bp, Zea mays
atggagtcgacaggaaagattttgatggagcggtatgaggtggggaggctactggggaaaggcacatttggcaaggtgcactacgcaaagaatcttgagtccaacgagagtgttgccattaagatgatggacaaggacaaagtgctcaaggccgggctttcggagcagataaggcgggagatcacaacgatgcggttggtggctcataagaacattgttgagcttcatgaggtcatggcgacgcggaacaacatctactttgtcatggagtatgtgaaaggcggagagctctttgacaagattggcaagagtggcaagctcacagaggccgctgcacacaagtacttccagcagctcattggtgcggtggattactgccacagccgaggtgtgtatcaccgggacttgaagcctgagaaccttctgttggatgagaatgagaacctcaaggtctcagattttggactgagtgcactttcagaatccaaggggcaagatggcttactccacaccacctgtgggactccagcatatgtagctccagaggtgatcagcaagacaggctatgatggggcaaagtcagacatctggtcctgtggtgttgttctatttgtactagttgctggttatcttcctttccgggccccaaacatgatggagatgtatcgcaagatacagaatggtgatttcaggtgccctagttggttttcacacaaactcaagaagctcttgtacaagatcctcgaccccagcccagacacaagaatttcagtgcagaagataaaagagtctacctggtttcgaaaaggccctgtggagacccgtacagtaaaggagaaaattctgagtgagaatgacaccacaaatgctgctccagccgttgctatgaggcgcaagaagaatgttcatgaagacgtgaagcccccgactgtcacaagcttaaacgcctttgaaattatatctttctccacaggattggacctctctggcctatttatcagaaaggagtgtaagaaggagacgcggttcacttctgataagggtgccgtgtccatcatctcgaagcttgaagatgttgcaaaagcactgaatctcagggtaaggaagaaggacaatggtgttgtcaagattcaggggaggaaggtggggaggaagggtgtcctggagttcgacactgaaatatttgagatcacggcatcctaccacctcatcgagatgaaacaaacgggcggtgattcacttgagtacaagaaactgttggaagaggacatccggccagcactgaaggacatagtctgggcctggcatggagatgaccagcaacaaaag

SEQ ID NO: 86 - DNA, 555 bp, Arabidopsis thaliana
atgcccaacatcaccatgggtttgaaacccgacccggttgctccaacgaacccgactcatcatgagagtaatgctgccaaagagattcgttacagaggcgttaggaaacgtccatggggaagatacgccgctgagatccgagatccggttaagaaaactcgagtctggctcggtacgttcgacaccgctcagcaggcggcgcgtgcttacgacgcagccgcgcgtgactttcgtggtgttaaggctaagaccaatttcggtgttatcgttggtagtagtcctactcagagtagcaccgtcgtcgactctcccacggcggcacggtttataacacctccgcacctcgagctcagcttaggcggcggcggcgcgtgtcgtcgtaagatcccgcttgtgcatccggtttactactataacatggcgacgtatccaaagatgacgacgtgtggtgtccagagcgagtctgaaacgtcgtcggtcgttgatttcgaaggtggagctgggaagatatctccgccgttagatctggatcttaacttagctcctccggcggaa

SEQ ID NO: 87 - DNA, 1491 bp, Zea mays
atgtcaagctccaggaaacccaagactcccatcctcctcttcttcctcttccttctcgccagcctcgccttctcccaagagttcacctacaagggcttcagcgccagtggccgcggcgggagcccgaacctgaacctgaacggcacgtcggcaaccgagatcttgcccagcggcatcctccgcctcaccaacgagacgtcccggctcttcggacacgccttctacccgaccccgctgcgcttcctggaccagaagaacggcaccgccgtgtccttctccacgcagttcgcctttaccgtggtgcccgagttcccgacgctcggcggccacggcttcgcgttcgtcgtcgcgcccgacccgcgcatgtccggtgcgctgcccagccagtacctgggcctactcagcgccgccgacgtcggcaacgccaccaaccacctcttcgccatcgagttcgacaccgtgcaggacttcgagttcgacgacgtcaacggcaaccacgtcggcgtcgacctcaacagcctcatctccaacgcgtccgccaaggccgaccctttgaacctcaagtccggggacaccaccgcctgggtcgactacgacggcgccgccaggttgcttaacgtctccatcgccaacggcacgttggggaagcccaccacgccgctcatctccttccgcgtcgacctctctgggatcttccgcgagcagatgtacgtcggcttctcggcgtccacgggagtcctcgcgagctcgcactacctcaggggttggagctttcgcctcggcgccggcgccgcgccggcgctggatctctcgtccctgccgtcgctgccccagctcaagagctccaagaaccggacctcgctcatcctcgccgtcgcgttctcggcgttcgtggcgctcgtcgtgctcgccggcgccggcgcgtacggtgcgtaccggtacaagaaccgcgacatcatcgagccgtgggagctggactacggcccgcatcggttcaagtacgccgaactccgccgcgcgacgcgcgggttccgcgagcgcgaggtgctcggatccggcggtttcggcaaggtgtaccgcggcgtgctccggaaatccggcgagaccgtggccgtgaagcgcgtgaaccacgagtcccggcagggcctccgcgagttcgtggcggagatcgcgtctatcggccggctccgccaccgcaacctggtccagctccagggctggtgccgccgccgcggcgaccttctcctcgtctacgactacatgcccaacggcagcctggaccgccacctcttcggcgaccacctcaaagcgtcgcgcctgacctggccggtccgctaccgcatcctccgcgacgtcgcgtcggcgctgctgtacctgcacgagggatgggagagcgtcgtcctctaccgcgacgtcaaggccagcaacgtgctcctcgacgccgacatgtcggcgcggctcggcgacttcggtctcgccaagctccactag

SEQ ID NO: 88 - DNA, 459 bp, Glycine max
atgtctctgattccaagtttcttcggtggccgaaggagcagtgttttcgaccctttctccctcgatgtgtgggaccccttcaaggattttccatttcccagttctctttctgctgaaaattcagcgtttgtgagcacacgagtggattggaaggagacaccagaagcacacgtgttcaaggctgatattccagggctgaagaaggaggaagtgaagctggagattcaagatggcagagttcttcagataagcggagagaggaatgttgaaaaagaagacaagaatgatacgtggcatcgcgtggagcgaagcagtggcaagttggtgaggaggtttagattgccggagaatgctaaagtggaccaagtgaaggcttccatggaaaatggggttctcactgtaactgttcctaaggaagagattaagaagcctgatgttaaggccatagacatctctggt

SEQ ID NO: 89 - DNA, 1089 bp, Zea mays
atggggatatacctcagcactcccaaaacagagaaggcctctgaagatggtgagaacgacaagcttcgcttcggtttgtcttccatgcagggctggcgtgctaccatggaagatgctcatgcagctcatccatgtttggacgagtccacgtcatactttggtgtttatgatggccatggaggcaaagcagtttcaaaattctgtgccaagtatctacacctgcaggtgcttaagagtgaagcttacttagctggagatttaggcacatctttacagaaatcttttctcagaatggatgagatgatgcgtggacaaagagggtggagagaattagcaatcttgggggataaaatagaaaagttgtctggtatgctagagggctttatatggtctcccaggagtagtgaagccaatgaccgtgttgatgattgggcttttgaggaggggccccattctgattttactggaccaaactctggaagcacagcttgtgtggctgtcgtccgaggaaacaaacttgttgttgctaatgctggagattctagatgtgtcttatcaaggaaaggccaggcacacaatttgtccaaggaccacaaacctgaacttgaggctgagaaagacaggattctaaaagctggtggtttcatccaagttggacgggtcaatggaagtttaaacttggctagagcaattggagatatggaattcaagcagaataagtatttgcctgccgaaaagcagattgtaactgctgatccggacataacttcagttgagctttgtgatgatgacgagtttcttgtaatagcttgtgatggaatatgggattgtatgtctagccaacagcttgtagacttcatacatcaacagttaaaaacagagaataaactttctgcggtttgtgagagagtatttgataggtgcttggcaccaacagctggtggtgagggatgtgataacatgaccatgattttgattcagttcaaaaaaccttccagcagcccagatgcatcatctgtcatgaaccagcctcaatcgtctgctcaatcatctgaagctgatagaagttcggagacagtagaatcgaag

SEQ ID NO: 90 - DNA, 891 bp, Glycine max
atggcgaagcctcacagcggcacccccgcggtcgcaccgaagcccgcgtgggtcctcccgtaccgaaccgagaatctgcgcgaggtctacactctgtcccgaaaactagggcagggtcaattcggaaccacgttcctctgcacgcacaagggcacggggcgcacctacgcctgcaagtcaatcccgaagcggaagctgctctgcaaggaggactacgacgacgtgtggagggagattcagataatgcaccacctctccgagcagcccaacgtggtgcgcatccacggcacctacgaggacgccgcctccgtccacctcgtcatggagctctgcgagggcggcgagctcttcgacaggattgtgcggaagggacactacagcgagcgacaggccgccaagctcatcaagaccattgttgaggttgtggaggcctgtcactcgcttggtgtgatgcatagggacctcaagcctgagaactttctgtttgatactgtcgaggaggatgctaagctcaaaaccaccgattttggcctctccgtgttttataagccaggtgaaaccttttgtgacgttgttggaagcccgtactatgttgcaccagaggtcttgcgtaagcattatggtcctgaagcagacgtgtggagtgctggtgttattttgtacatcttattaagtggggtgccaccattttgggctgaaacagagcaggggattttccgacagattttgctaggaagactagatttccagtctgagccatggcctagcatttcagacagtgccaaagatctaattcgaaaaatgcttgatcggaatccaaaaacaagggttacagctcaccaagtactctgtcacccttggattgttgatgacaacattgcaccagattaa

SEQ ID NO: 91 - DNA, 1005 bp, Zea mays
atgggcaactgctgcgtgacgccgaaagcagccgacgacgccggcggcggcaagaagcccaaggagccgaagcagaagaagggtaagaagccgaaccccttttcgatcgattacaaccgctcggggcaggcgagcgcgccaaagctggtggtgctgcgggatcccacggggcgggacatcgcggcgcggtacgagctcggcgcggagctcgggcgcggcgagttcggggttacctacctctgcacagaccgcgcctcaggggaggcgctggcctgcaagtccatctccaagaagaagctccgcaccgccgtcgacctcgaggacgtgcgccgggaggtcgagatcatgcgccacctccccaagcaccccaacgtcgtcacgctcagggacacgtacgaggacgacaatgccgtgcacctcgtcatggagctctgcgagggcggtgagctcttcgaccgcatcgtggcgcggggacactacactgagcgtgctgccgccttggtcttacgcactattgttgaggtcgtgcagatgtgccataagcatggagtgatgcacagggatctcaaaccagaaaatttcttgtttgcaaacaagaaagaatcagcggcacttaaggccattgattttggcctgtctgtatttttcacaccaggcgaacggttttctgagattgttggaagtccttattacatggctccagaggtgctaaagagaaactatggcccagaggttgatgtttggagtgcaggagtgattctgtacattcttctttgtggtgtccccccattctgggcagaaacggaacagggtgttgctcaggcaatcattcgatctgtcattgatttcaaaagagatccatggccaagggtgtctgataacgccaaagaccttgtcagagaaatgctgaatccggacccaaaacgacgattgacagctcaccaagtgcttggtcacccatggttgcagaacattaagaaggctccaaatgttaatttgggttaa

SEQ ID NO: 92 - DNA, 444 bp, Oryza sativa
atgtcgtcgccttcgcgccggagctccagcccggagagcaacaccagcggcggcggcggtggcgccgacgagcggaagaggaagaggatgctgtcgaacagggagtcggcgaggcgatccagggcgaggaagcagcagaggctggaggagctgatcgccgaggcggcgcgcctccaggccgagaacgcgcgcgtcgaggcgcagatcggggcctacgcgggggagctgagcaaggtcgacggcgagaacgcggtgctccgcgcccgccacggcgagctcgccgggcgcctccaggcgctcggcagcgtcctggagatcctccaggtggccggcgcgcccgtcgacatcccggagatccccgacgacccgctgctccgcccatggcagccgccgttcgcggcccagcccatcgtcgccaccgccatggccgacgccttccagttc

SEQ ID NO: 93 - DNA, 1524 bp, Oryza sativa
atggatggaaatgctaaaggcggtgggcattcagaggcactgaagaactacaatcttggaagaactttaggtattggctcatttggaaaagtgaagattgcagagcataagcttacaggacacagagttgctataaagatcctgaaccgccgccaaatgagaaatatggaaatggaggagaaagcaaagagagaaatcaagatactgagattgttcattcatccccatatcattcgcctttatgaggttatatacactcctacggatatatatgttgtgatggagtactgcaagtttggagaactgtttgattacattgttgagaaaggcaggttgcaggaagatgaggctcgccgaatcttccagcagattatatctggggttgaatactgccacagaaacatggtggttcatcgtgatctgaagccagaaaacttgctactggattcaaagtataatgtaaagcttgctgactttggtttgagtaacgtcatgcatgatggccattttttgaagacaagctgtgggagtccaaactatgctgctccagaggtgatctctggtaaattatatgctggacctgaggttgatgtatggagctgtggagtgatcctttatgctctcctttgtggtactcttccatttgatgatgagaatatccccaacctattcaaaaagataaagggtggtatatatactctcccaagtcatttatctgctctggccagagatttgatcccaaggatgcttgttgttgatccaatgaagagaatcacaattcgtgaaattcgagagcatcagtggtttcagattcgccttcctcgttacttagcagtgcctccaccagacacagcacagcaagccaaaatgattgatgaagatacccttcaagatgtcgtaaacttgggttatggaaaggaccatgtgtgtgaatctctgcgcaatagactgcagaatgaggcaactgttgcatattatttactcttggacaatcgattccgagctaccagtggctatttgggagcagactatcaagaatctttggagaggaattttaatcgctttgcttcatcggaatcagcaagttcaaatacaaggcattatcttccaggaagcagtgatcctcatgccagtggtttgcgcccacattatcctgttgaaagaaaatgggctcttggacttcagtcacgagctcaacctcgcgagataatgattgaggtcctaaaggcacttcaagacttaaatgtctcctggaagaagaatggacagtacaacatgaaatgcagatggagcgttgggactcaggccactgatatgttagatgttaacaacagctttgttgatgactcaatcataatggataacggtgatgtaaatgggaggctacctgctgtgatcaagtttgaaatccagctttacaagaccagagacgagaagtatctgctggatatgcagagagttacggggcctcagctccttttcctggacttctgtgcagacttccttaccaagctgagggttcta

SEQ ID NO: 94 - DNA, 1017 bp, Sorghum bicolor
atggagaggtacgaggtgatcaaggacataggatcgggtaacttcggggtggccaagctggtccgggacgtcaggaccaaggagctcttcgccgtcaagttcatcgagcgggggatgaagattgatgagaatgtccaaagagagatcatgaaccacaggtcgctgaggcatccaaacatagttaaatttaaggaggttgtgctaactcccacacatttggccatagttatggaatatgctgctggcggtgagctatttgaaaggatctgcaaagctggaagatttagtgaggatgaggcaagattcttcttccaacaactgatttcaggagttagctattgtcattcaatgcaaatatgtcatagagatttgaaactagaaaacactctcctggatggtagtatagcacctcggctaaagatatttgattttggttactccaagtcctctgtgttgcactctcaaccaaaatcaactgtcgggacaccagcttacattgctccagaggtccttgctagaaaggaatatgatggaaaggtcgccgatgtttggtcatgtggagttactctgtatgtgatgcttgttggtgcttatccatttgaggaccccgacgaaccgaagaatttccgcaagacgcttactcggattctcagtgtccaatatgcggttcctgattttgtccgagtttcaatggagtgcagacatctgctgtctcggatctttgtggcgatccctgagcaacggataaccatcccagagatcaagaaccacccgtggttcttgaagaacctgcccatcgagatgaccgacgagtaccagatgaacctacagctggttgacatgaatggcccctcgcaaagtctggaggagatcatgaccatcatacaagaggcccggaagcccggtgacgggctgaagcattcgggacagctccctggcctggggagcatggagctggatgacattgatgtcgacgacatagatgttgaggacagcggtgactttgtatgtgccttg

SEQ ID NO: 95 - DNA, 760 bp, Arabidopsis thaliana
acaagtttgtacaaaaaagcaggctcctgcaggaccatgggaagaggaaagatagaaataaagaggatagagaactcaacaaatcgacaagtgacgttttgcaaaagaagaaatggacttctgaagaaagcctatgagctttcggtcctttgcgatgcagaagttgcgctcattgttttctccactcgtggccgtctctatgaatacgccaataacaacataagatcaaccattgagaggtacaagaaagcttgttctgatagcaccaacactagcactgtccaagaaatcaatgccgcgtactatcaacaagaatctgctaagctgagacaacagatccaaacgattcaaaactccaacaggaatctgatgggagactctttgagttccttaagtgtcaaggaactaaaacaagttgagaatcgccttgagaaagctatctctaggatcaggtccaagaagcatgagttgcttttagttgaaatcgaaaacgcgcagaaaagggagattgagcttgacaatgagaacatctatctaagaactaaggtagcagaagtggagaggtatcaacaacaccatcatcaaatggttagtggttcagagattaatgcaattgaagctttagcctcacgcaattactttgctcatagcattatgactgctggttctggatctggtaatggaggttcttactctgatcccgacaagaaaattcttcatcacggatagctcgagacccagctttcttgtacaaagtggt

SEQ ID NO: 96 - DNA, 842 bp, Zea mays
gcagtcgctgtcgttaccatggggaggggaaagattgagatcaagaggatcgagaacaccaccagccgccaggtgaccttctgcaagcgcaggaatgggctgctgaagaaggcctacgagctctccatcctctgcgacgctgagatcgctttgatcgtcttctctacccgaggccgcctatatgaatattccagtaacagcgtaaggtcgacgatcgagaggtacaagaaagcctctgccagcacttctggaacagctccagtgacagatgtcaactctcttcaatactttcagcaagaagcggcaaaactgcgccagcagatacaaaccttgcagaattcaaacaggcacctgatgggtgaatctactggcaatatgactgcaaaggagctaaagggccttgaaagcaggcttgaaagaggcattgggaggatccggtccaaaaagcatgagctgctgctcgcggagatcgaatatatgcagaagagggaagcagatctgcacaatgaaaacatgttcctgcgggccaaggttgcggaggctgagcgagctctggagcaggaggcggcagaagaccagacgatgatggtgccggcggcggtccgcggggctacgacggagctgaaagcgttgccggcgtcgttcgacgcgagtggctactaccagtaccagcagcatcagcatgtggtggccgccgcctccgctgcctcctcgtcgcagtacgcggagcagccccagggtcagcaggagtaccaccaccagactgccctccacctcggctaccacgttaagatcgattccgccgccgacaaaggcttcctctagaacccagcggtactcgc

SEQ ID NO: 97 - DNA, 711 bp, Oryza sativa
atggggagggggaagatcgagataaagcggatcgagaacacgacgaaccggcaggtgaccttctgcaagcgccgcaatggcctcctgaagaaggcgtacgagctgtccgtcctctgcgacgccgaggttgccctcatcgtcttctccagccgcggccgcctctacgagtacgccaacaacagtgtgaaatccaccgttgagaggtacaagaaggcaaacagtgacacctccaactctggcacagttgcagaagtcaatgcccagcactaccagcaggagtcctccaaactgcgccaacaaatcagtagcttacagaacgcaaacagtaggaccatagtgggggattctatcaacaccatgagcctcagggaccttaaacaggtagagaacaggctggagaaaggcatagctaagataagggctagaaagaatgagctgttatatgctgaagttgagtacatgcagaaaagggaagttgagctgcagaatgacaacatgtacctgaggagcaaggttgttgagaatgagaggggacagcagccactgaacatgatgggggcagcatcaacaagtgaatacgatcatatggttaataacccatatgattccaggaactttcttcaagtgaacatcatgcagcagcctcagcattacgcccatcagctgcagccaactacccttcaactcgggcagcagccggccttcaattag

SEQ ID NO: 98 - DNA, 519 bp, Arabidopsis thaliana
atgggaagaggaaagatagaaataaagaggatagagaactcaacaaatcgacaagtgacgttttgcaaaagaagaaatggacttctgaagaaagcctatgagctttcggtcctttgcgatgcagaagttgcgctcattgttttctccactcgtggccgtctctatgaatacgccaataacaacataagatcaaccattgagaggtacaagaaagcttgttctgatagcaccaacactagcactgtccaagaaatcaatgccgcgtactaccaacaagaatctgctaagctgagacaacagatccaaacgattcaaaactccaacaggaatctgatgggagactctttgagttccttaagtgtcaaggaactaaaacaagttgagaatcgccttgagaaagctatctctaggatcaggtccaagaagcatgagttgcttttagttgaaatcgaaaacgcgcagaaaagggagattgagcttgacaatgagaacatctatctaagaactaaggtagcagaa

SEQ ID NO: 99 - DNA, 528 bp, Glycine max
atgggaagggggaagatcgaaatcaaaaggattgagaacacaacaaatcggcaagtgaccttctgcaagagaagaaatgggcttctgaagaaagcttatgagctgtcagtgctgtgtgatgcagaagttgccctcatcgtcttctccagccgtggccgtctctatgagtattccaacaacaacataagatcaacaatagagaggtacaaaaaggcatgttctgatcactcaagcgcgagcactaccacagaaatcaatgctcagtattatcaacaagaatctgcaaagctgcgacagcaaatacagatgctgcaaaattctaacaggcacctgatgggtgatgccttaagcacactgactgtgaaggaacttaagcagttggagaatagacttgaaagaggaatcactagaatcagatctaagaaacatgagatgctactggctgaaattgaatacttccagaaaagggagattgaactggaaaatgaaaatctttgcctccgaactaagataactgacgtggagagg

SEQ ID NO: 100 - DNA, 216 bp, Glycine max
atgggaagggggaagatcgaaatcaaaaggattgagaacacaacaaatcggcaagtgaccttctgcaagagaagaaatgggcttctgaagaaagcttatgagctgtcagtgctgtgtgatgcagaagttgccctcatcgtcttctccagccgtggccgtctctatgagtattccaacaacaacataagatcaacaatagagaggtacaaaaaggca

SEQ ID NO: 101 - DNA, 531 bp, Oryza sativa
atggggagggggaagatcgagataaagcggatcgagaacacgacgaaccggcaggtgaccttctgcaagcgccgcaatggcctcctgaagaaggcgtacgagctgtccgtcctctgcgacgccgaggttgccctcatcgtcttctccagccgcggccgcctctacgagtacgccaacaacagtgtgaaatccaccgttgagaggtacaagaaggcaaacagtgacacctccaactctggcacagttgcagaagtcaatgcccagcactaccagcaggagtcctccaaactgcgccaacaaatcagtagcttacagaacgcaaacagtaggaccatagtgggggattctatcaacaccatgagcctcagggaccttaaacaggtagagaacaggctggagaaaggcatagctaagataagggctagaaagaatgagctgttatatgctgaagttgagtacatgcagaaaagggaagttgagctgcagaatgacaacatgtacctgaggagcaaggttgttgagaatgagagg

SEQ ID NO: 102 - DNA, 1116 bp, Zea mays
atgctggaggagtacaaaccgtgtgcggccatggtggtgacgcagtgcatctacgccgctctagcgctcttgtccaaggcggcgttcaccggcggcatgagccccctggtgttcgtcgtctacaggcaggccgtcgccaccattgtactcgtccccgtcgtcatcgcggccaacaggaagaagatgaaggagatgacgacgggccttggactgacgggcttctcgctggtcttcgtcgcctcccttgtcggggcaacggtgaaccagtgcatgtactaccaaggggtgaatctgggctcgtcgtccatggcaacggccatgaccaacttgatccccgccatcaccttcgtcatggcggcatcagtcggcctagagagggtggaggccaggaggccgaggagcctggccaagatcttcggcacggccgtctgcgtgagcggcgccatggccatggctttcttcaagggcccgaagctgctcggcgacggccccaacgctctccagctcctcctccacgcgggcggcggcaggtgggtggccggcgcgctcttcctcgtgggcagcagctcctgctggtcgctctggctcatcctgcaggtgcccatctgcaagtcgtacgtggagccgctggctctgtcggcgtggatgtgcgtcctgtccacgctccagtccgcgctgctcgtctccttcctcctgccggaccccagcgcctggaggatccactcgctcttcgagctctcctgctgcgtcttctcgggcgtgttcgggtccggcgtcacgttctacctgcagtcgtggtgcatctccgtgaggggcccgctctactccgccatgttcaacccgctctgcaccgtgatcaccaccgtgttcgccgccgccgtcctccgcgaagagctgcacgtcggcagtttgctgggcgcaatcgccgtcatcgcggggctgtacgtggtgctgtggggcaaagcgggcgacgccaataagggcggggtggagccagagcaccactcggacgatctggagaagacgtcgtcagcgcggtcggatcacaattcgacggccgacgtcggcagtggcatcgccgagcccctcctggcgggcggcgatccaacggagaag

SEQ ID NO: 103 - DNA, 1715 bp, Zea mays
aaaaaagcaggctcctgcaggaccatgcggccacggggaacctctctgcaacaaagctccgcatctgctctcggcgacggcgatgcggcgctaccgaagaagaagaggaaccggccaggcaatccgaaacctgatgcggaggtgatcgcgctgtcgcctcgaacgctgctggcgacgaaccggttcgtgtgcgaggtgtgcagcaagggcttccagcgggaccagaacctgcagctgcacctgcggggccacaacatgccgtggaagctgaagcagaaggaccccaaggacgcgcgccggcgggtgtacctgtgcccggagccgacgtgcgtgcaccacagcccgtcccgggcgctgggcgacctcacggggatcaagaagcactactgccgcaagcacggcgagaagaagttcaggtgcgacaggtgcagcaagcgctacgccgtcgagtccgactggaaggcgcacggcaagacctgcggcgcccgcgagtatcgctgccactgcaacgccctcttctccaggaaagacaacttcatcacccaccgcgctacctgcgacgcagcagttcgtgggaccgcccagaagccaccgctggtcgccggcctctacgtcggctcaggcagcgatgataggctcgggctctccgacgccgccgcccagatgcatggcttcgcagatcaaggccagtcctcttcagcagcagaagcctcacagtttgaccatgtcatgccatcgtactcgggctcctccatgttccgttctcaggcgtcagacttctcgttgtctttcttcctcggcggcggcactcctcttatcgaacaagacctgtccgacaacggtggtgatctctccgaaggcagccagggccctctgctccatggcaaggcgcccttgcatggcgtgatgacgcatctccccgagcagcagtatcagccaaacagcggcaacgccaacgttaacctcctggacattgggttcttctctggcaacagtggtggcacgtctggcagccagggccctctgctccacggcaaggagcccttccatagccatgacctgacgcaacttcccgagcagcagcaccagccaggcagcagcaacgcccgcgtcaacctccctaaccttggggtcttctctggcaacagcggtggatggcccggaagcagccatcaggacgcgcgccttgtcatccaagaccaactcaacggcggcagcagcagcaacaccgagcatggtaacgggatggcgtccatcggaagccacttcggcggaggcttcgtcccttccctgcacaactcatctccgtcggccgggctctcagcgacggcgctcctgatgaaggcggctcagatgggctcgacgacgtcgagcaccacccacaaccccaacggccccagcgcgctgctccgcgcagccggcttcgcaggcactgccagcgtccgggagactagtagcagggcagcggaagaagagaagtctcacgaggcatatttccatgatctcatcatgaactcactgccattaacgggaggaggcaccggcggcctctcagggttggcgggcgtggacgacggcaatgtgagcacaagggacttccttggcgtcggcagggacgacgcgacggcaccgcagggcctccacggcatgggcgccccgaatccgacccagatgaaatggtacatgtagctcgagacccagctttcttgtacaaa

SEQ ID NO: 104 - DNA, 1243 bp, Zea mays
acaagtttgtacaaaaaagcaggctcctgcaggaccatggcggaccagcagcagccacagcagcagccgcaggagatggacgttgatcgtaccggtggcctcgaactgcctccagggttccgcttccacccgagcgactttgagattgtcaacgactacctcacgaagaaggtgcacgacagggactacagctgcatcgccatcgcggacgccgacctaaacaagaccgagccatgggacctcccgaaagttgcaaagatgggcgagaaggagtggtacttcttctaccagaaggaccgcaagtacccgacggggctgagggcgaaccgggccactgaggcgggttattggaaggcgaccggcaaggacaaggaggtctacgatccccttgcagcggaagggctgctgctggtcggcatgaagaagacgctcgtgttctacaagggcagggctcccaggggtgacaaaaccaactgggtgatgcacgagtacaggctcgaaggcagtggtaggctccctgctagtcctgcatccgcatccggctcagccaccaacatcgctgcggccatgatgaaagcttcagcttcggcttgcaaggatgagtgggtggtctgtcgtgtgttcaacaagaccaccgggatcaagaagacggctgcgccggcataccaggtggccatggccggtgctgagatggatcagaatcagaacaacattccggccatccccatccccatgccgctgcagctgccactgcccgtgcccatgcagatgcaatttcccatcctgccagattttgccatggacccggtggccccctactaccccaacccaaatgccggcgcggggatgatgccgcctatggcattggcaggtatgggtggcgccggcgggctccagatcaacggcgctctgttcggcaatccggtgcccgcgccgctgccgatgaacttctaccaccaccagatgggcatgggggcagcagctggccaggtggacatgggggcagcggctggccagatggacatgggagcagctggcgctggcgctggcggcttcgacgttgcagcgccggagagtaggccgtcctcgatggtgtcacagaaggacgagcaggctaatgccgccgagatctcgtcgatgatgtctgtgaccggcccagggtccgcgaccaccaccatagagatggatggcatatggaagtacaagtactagctcgagacccagctttcttgtacaaagtggt

SEQ ID NO: 105 - DNA, 840 bp, Zea mays
atgtcggggctctacagccaggggttctcccctgcgcgaaacctctcccctcagattagaagcaatccggacgctgatagtcagtacctggccgagctgctcgccgaacaccacaaactggggcccttcatgcaggtgctgcccgtatgcaacaagctgctgagccaagagattatgcgggtatcaagcattgtgcacaaccatggatttggcgatttcgacaggcatcggtttagaagtcctagtccgatgtcttctccaaaccctagagctaatctccctagcaatgggttcagtccttggagcggactacaagagagattaggttttcctcaaggaaccagcatggactggcaaggagcacccccaagtcctagctcccatgttgtaaagaagattcttcgtctggaggttccagttgattcttatccgaatttcaattttgtggggcgcattttaggacctagaggtaattctctaaagcgagtagaagcatccactgggtgtcgtgttttcattagaggaaagggttccatcaaagattcagggaaggaggacaaactacggggaaaaccgggctatgagcacctgagtgatccgctgcatatcttgatagaggccgagttccctgccagtatcatcgatgcaaggctgagacaagcacaggagattatagaagaattgcttaaaccagtggacgagtcccaagatctctacaaaaggcagcagctcagggagctggcaatgctgaactcaaccctgagagaggacagccctcatccggggagtgtctctccattcagcaacggtggcatgaagcgtgcgaaaacaggacagtag

SEQ ID NO: 106 - DNA, 1347 bp, Zea mays
atggtgctgcagcgcttctcgtggccgtacggcggccggagcgccaccttctgcggtagcttcaccgggtggagagagtgtcccatggggctggttggggccgtgttccaggtcgtcttcgatctgccccccggagtttaccagtaccggtttttggttgatggtgtctggaggtgtgatgagacaaaaccctttgtacgtgatgaatatggactgatcagcaatgaagtgcttgtggaaaacaatgtacaacctgttgtgcagccagagccttctatcagaggaactaatatggataagggtaccattttgaaaacaatgcccccggagccatcatctcagaacccaagcatgcaaatagcagttatccgccatgtggtctctggaatattattacacaataccatatatgacgttgttcccctttctagcaagttaacagttttggacactcagcttcctgttaaacaagcatttaaaataatgcatgatgagggtcttgctctggttcctctttgggatgaccgtcagggaaccataacaggcatgctcactgcatcagattttgttttaatcttgagaaagttgcaaagaaacattcaagttattggcaacgaagagcccatttctgcttggaaagaagcaaagctacagttctatggtgggcctgatggtgctgccatgcagagaaggccattaatccatgttaaggattcagataatttagtggatgtggcactgactataatcagaaatgaaatatcttcagttcctatctttaagtgcatggcagattcatcaggggtgcctttccttaatcttgcaaccttacaggggattttgaaatttctttgctcgaagctacaagaagaggctgagggctgttcccttctgcacaatcagcttctcagtattcctattggtacatggtctccacatacggggaggtcaagtagcaggcaactcagaactttgctactgagttctcctctaaatacctgcctggatattctgcttcaagatagagtaagctcgattcctatagttgatgacaatggatccctccgtgatgtctactcactcagtgatatcatggctctggcgaagaatgatgtttatgctcgcatcgaacttgaacaagtgaccgtacaaaatgctttggatgtgcaataccaggtgcatggccgaagacagtgtcatacttgtttacagacgagtaccttgctggaagttttggagggattgtccattccaggagtgcgacggcttgttgttattgaacaaagtaccagatttgtggaaggaatcatctcattgagagacgtatttacatttctccttggatag

SEQ ID NO: 107 - DNA, 1571 bp, Zea mays
aaaaaagcaggctcctgcaggaccatggttgctatggcggcgccagggcgagtggcgctcctggccgccgcactcctgttcggcgccttcttcccatccgcgttcgccacgtcctcgtaccccgcaaggcttgcgggcaggctcctgtccaccacggcgtcggcggtggccaagcagctgtggtcgctcaaatcggccgccaccaagacggcgacggcgtccgtggcggggcggtccatggtgcggtacgagggcgggtacgcggtggacacggtgttcgacggcagcaagctggggatcgagccgcacgccgcccagatcaaccgcgccggcgacctcctcctgctcgactccatcaacagcaacatctacagggtccagctgccgttgtcaccatatagcagaccaaagctccttgctggttctccagaaggtttatctggccatgttgatggaagactgcgagaagcgaggatgaaccatcctaaggggttcactgtggatgataggggcaacatttatgttgcagatgctatgaacatggcaataagaaagatcagtgacacaggggttacaaccattgctggggggaaatcaattagaggagggtacatagatgagcccagtgtcagtgatgatgcaaaattctcaaccgattttgaagtccaatacatcagcagtacctgctctctcttggtcattgatagaggaaaccaagcaattcgagaaattccactgaacgatgatgactgtgcatatcagtatgaagctggttttccactagggtttgcattgctttgtgctgctggtttctttggttatatgcttgcattgctccaacaccggcttttaggaatgccgtcaacaatcaataaacctcaagcgcctccaagacccagcattgcaagtatccctccataccagaaacctttaaacccttatgttcgtcaaccattcatcccaagagaagaaactgcaagacaggaacctgaagaggggttcttcacctcagctggaaaacttgttggaggggcaaaatcatctgtggctgaggtatttggtttcaagaagaagagcctgagcaacccataccatcagcagcaacgaagagctaacccttggccggtgcaagaaagctatgccatcccacacgacgaaccacctccggcgctggacacgagagcaccagcccctcagaagaactacagctccgagaagatccactacgtccgccatgggcacccgtatttcaacagctgggacggtcaccgtctccctcagcagcagccggaccagcagctgtatcaccagcagcagcagcagcacctgcagcagcacaggcagtgctctgcaggcccccagacgttttacgagcagagttgtgaggctacaaacgaggtcgtctttggtgcggtccaggaggtggacagcaagcggcgaatggtcgagatcaaggctgtcaactacggagacacattctatgaacagtacgggatgcggtaccgcaacaatttcatcggctacaacaacactaacaactattagctcgagacccagctttcttgtacaaa

SEQ ID NO: 108 - DNA, 293 bp, Zea mays
aaaaaagcaggctcctgcaggaccatggcgctgtctcgacgtatggcggctcccgtcctcgtcctcatgctcctcctcgtcgccacagagctggggacgaccaaggtggcggaggcgaggcactgcctgtcgcagagccaccggttcaagggcctgtgcatgagcagcaacaactgcgccaacgtgtgccagaccgagaacttccccggcggcgagtgcaaggcggagggcgccacgcgcaagtgcttctgcaagaagatatgctagctcgagacccagctttcttgtacaaa

SEQ ID NO: 109 - DNA, 1254 bp, Saccharomyces cerevisiae
atggctggcgacaaccctgaaaacaaggatgcttccatgttagatgtcagtgacgcagctagcaacactacgattaatggtaaacatagcgccgattcaactaatgaggcttccctggcgtacactttttctcaaatgaacgtagataatcctaatgaattagagcctcagcatcctttaagacataaatcgagtttaatttttaacgacgatgatgacgatgaaatacctccatattcaaaccatgcggaaaatggttctggggagacctttgattctgatgatgatatcgatgctagcagctcgagtagtatcgacagcaacgaaggcgatatccacgatgcagatatgacaggaaataccttgcaaaaaatggattatcaaccatctcagcagcctgactcacttcaaaatcaaggctttcaacagcaacaagaacagcaacagggcactgtggaaggcaagaaaggaagagctatgatgtttccagttgacatcacttggcaacaggggggtaataaagtgtacgttactgggtcttttacgggatggagaaagatgatcgggttagtaccagtccctggacagcctggacttatgcatgtaaaattacagctgcctccaggtactcatcgtttcagatttattgttgacaatgagttaagattcagtgattatttacctaccgcaaccgaccaaatgggaaacttcgtcaactatatggaagtgagcgcaccgcctgattggggcaatgaacctcagcagcatctggctgaaaaaaaagcgaatcatgtagatgatagcaaattgagtaagagacctatgagcgctcgctcgagaatcgcattggagatagaaaaggaaccagatgacatgggcgatggttacactcgttttcacgatgagacccccgctaaacctaatttagagtacactcaagatatacctgctgtgttcaccgacccaaatgtaatggaacaatattatttgacacttgatcagcagcaaaataatcaccaaaatatggcctggttgactcctccacaactgccacctcatttagaaaacgtcattttgaatagttactcaaacgcgcaaactgataatacgtctggcgcccttcccattccgaaccatgttatattgaaccatctggcgacaagcagtattaagcataatacattatgtgtcgcatccattgttaggtataaacaaaaatacgtgacccaaatactgtatacaccattgcaatag

SEQ ID NO: 110 - DNA, 654 bp, Arabidopsis thaliana
atggatagcgggaagagacctctatcaccagaatcaatggccggaaatagagaagagaaaaaagagttgtgttgttgctcaactttgtcggaatctgatgtgtctgattttgtctctgaactcactggtcaacccatcccatcatccattgatgatcaatcttcgtcgcttactcttcaagaaaaaagtaactcgaggcaacgaaactacagaggcgtgaggcaaagaccgtggggaaaatgggcggctgagattcgtgacccgaacaaggcagctcgtgtgtggcttgggacgttcgacactgcagaagaagccgccttagcgtatgataaagctgcatttgagtttagaggtcacaaggccaagcttaacttccccgagcatattcgtgtcaaccctactcaactctatccatcgcccgctacttcccatgatcgcattatcgtgacaccacctagtccacctccaccaattgctcctgacatacttcttgatcaatatggccactttcaatctcgaagtagtgattccagtgccaacttgtccatgaatatgctgtcttcttcgtcttcatctttgaatcatcaagggctaagaccaaatttggaggatggtgaaaacgtgaagaacattagtatccacaaacgacgaaaa

SEQ ID NO: 111 - DNA, 1113 bp, Arabidopsis thaliana
atgggaagagcgccatgttgcgagaaggtcggtatcaagagagggcggtggacggcggaggaggaccagattctctccaactacattcaatccaacggtgaaggttcttggagatctctccccaaaaatgccggattaaaaaggtgtggaaagagctgtagattgagatggataaactatctaagatcagacctcaagcgtggaaacataactccagaagaagaagaactcgttgttaaattgcattccactttgggaaacaggtggtcactaatcgcgggtcatctaccagggagaacagacaacgaaataaaaaattattggaactctcatctcagccgtaaactccacaacttcattaggaagccatccatctctcaagacgtctccgccgtaatcatgacgaacgcttcttcagcgccaccgccgccgcaggcaaaacgcagacttgggagaacgagtaggtccgctatgaaaccaaaaatccacagaacaaaaactcgtaaaacgaagaaaacgtctgcaccaccggagcctaacgccgatgtagctggggctgataaagaagcattaatggtggagtcaagtggagccgaggctgagctaggacgaccatgtgactactatggagatgattgtaacaaaaatctcatgagcattaatggcgataatggagttttaacgtttgatgatgatatcatcgatcttttgttggacgagtcagatcctggccacttgtacacaaacacaacgtgcggtggtgatggggagttgcataacataagagactctgaaggagccagagggttctcggatacttggaaccaagggaatctcgactgtcttcttcagtcttgtccatcggtggagtcgtttctcaactacgaccaccaagttaacgatgcgtcgacggatgagtttatcgattgggattgtgtttggcaagaaggtagtgataataatctttggcatgagaaagagaatcccgactcaatggtctcgtggcttttagacggtgatgatgaggccacgatcgggaatagtaattgtgagaactttggagaaccgttagatcatgacgacgaaagcgctttggtcgcttggcttctgtca

SEQ ID NO: 112 - DNA, 678 bp, Arabidopsis thaliana
atggagaaaagaggaggaggaagtagtggaggttcgggatcatcagcagaagcagaagtgagaaaaggaccatggacgatggaagaagatcttattcttatcaactatatcgccaaccacggcgatggtgtttggaattctctcgccaaatctgcaggtctaaaacgaaccgggaaaagttgccggctccggtggctgaactatctccgccccgacgtacgacggggaaacatcactccagaagagcaacttatcatcatggaacttcatgctaagtggggaaacaggtggtcgaaaatcgccaaacatcttccaggaagaacggacaacgagatcaaaaatttctggaggacaagaattcaaaaatacatcaagcaatcggatgtaacaacaacatcgtccgttggatctcatcatagctcagagatcaacgatcaagctgcaagcacgtcgagccataatgtcttttgtacacaagatcaagcgatggagacttattctcctacaccgacatcatatcaacataccaatatggaattcaactatggtaactattcggccgcggcagtgacggcaaccgtggattatccagtaccgatgaccgttgatgatcaaaccggtgaaaactattggggcatggatgatatttggtcatcaatgcatttattgaatggtaat

SEQ ID NO: 113 - DNA, 1227 bp, Arabidopsis thaliana
atggaggctcgtccagttcatagatcaggttcgagagacctcacacgcacttcttcaatcccatctacacaaaaaccttcaccagtagaagatagtttcatgagatcagataacaacagtcagttaatgtctagaccattaggacaaacctaccatttactttcatctagtaacggtggagctgttggacatatatgttcttcttcatcatctggttttgcaaccaatctccattactcaactatggtatctcatgagaaacaacaacactacacaggaagcagcagtaataatgctgtgcagacaccaagcaacaacgatagtgcttggtgtcatgattcattgccaggagggtttcttgacttccatgaaaccaacccggcgattcaaaacaactgtcagattgaggatggtggcattgcggctgcttttgatgacattcaaaaacgaagtgattggcatgaatgggctgaccatttgatcactgatgatgatcctttgatgtctactaactggaatgatctcttgcttgaaacaaattccaattcagattcaaaggaccagaagacactgcaaattccgcaacctcagattgttcagcagcaaccttctccgtctgtggaattgcgacctgttagcacaacatcttcaaacagcaataacggaacgggcaaggcacgaatgcgttggacgccagagcttcacgaggcttttgttgaggctgtcaacagtcttggcggtagtgaaagagctactcctaaaggggtactgaagattatgaaagttgaaggcttgactatatatcatgttaaaagccatttacagaaatataggacagctagatatcggccagaaccatcagaaactggttcgccagaaaggaagttgacaccgcttgaacatataacatctcttgatttgaaaggtgggataggtattacagaggctctacgacttcagatggaagtacagaagcaactccatgagcagctcgagattcaaagaaacctgcaactccgaatagaagaacaaggcaagtacctgcaaatgatgttcgagaagcaaaactctggtcttaccaaagggacagcctcaacatcagattccgcagccaaatctgaacaagaagacaagaagactgctgattcgaaggaggttccagaagaagaaaccaggaaatgtgaggaactagaatctccacagccaaagcgtcccaaaatcgataat

SEQ ID NO: 114 - DNA, 666 bp, Arabidopsis thaliana
atggccaagatgggcttgaaacccgacccggctactactaaccagacccacaataatgccaaggagattcgttacagaggcgttaggaagcgtccttggggccgttatgccgccgagatccgagatccgggcaagaaaacccgcgtctggcttggcactttcgatacggctgaagaggcggcgcgtgcttacgatacggcggcgcgtgattttcgtggtgctaaggctaagaccaatttcccaacttttctcgagctgagtgaccagaaggtccctaccggtttcgcgcgtagccctagccagagcagcacgctcgactgtgcttctcctccgacgttagttgtgccttcagcgacggctgggaatgttcccccgcagctcgagcttagtctcggcggaggaggcggcggctcgtgttatcagatcccgatgtcgcgtcccgtctactttttggacctgatggggatcggtaacgtaggtcgtggtcagcctcctcctgtgacatcggcgtttagatcgccggtggtgcatgttgcgacgaagatggcttgtggtgcccaaagcgactctgattcgtcatcggtcgttgatttcgaaggtgggatggagaagagatctcagctgttagatctagatcttaatttgcctcctccatcggaacaggcc

SEQ ID NO: 115 - DNA, 547 bp, Arabidopsis thaliana
acaagtttgtccaaaaaagcaggctcctgcaggaccatggaatcgtcgtcgtcgggaacaacttcgtcgacgattcaaacgtcgtcaggatcggaggagagtctcatggagcagaggaaacgtaaacggatgctctcaaaccgtgaatctgcaaggagatcaagaatgaagaaacaaaagctcctagacgatctaacggctcaggttaatcatctgaaaaaagagaacacggagatcgtgacaagtgtcagcatcacaacgcaacactacctaaccgttgaagcagagaactctgttctcagagctcagcttgatgaacttaaccacaggctccaatctctcaacgacatcatcgagttcctcgacagtagcaacaacaacaacaacaacaacatgggcatgtgttcgaaccctctggttggtttggagtgtgatgatttcttcgtgaatcagatgaacatgtcttatattatgaaccagcctctcatggcgtcttctgatgctttaatgtattagctcgagacccagctttcttgtacaaagtggt

SEQ ID NO: 116 - DNA, 1227 bp, Arabidopsis thaliana
atggctagcaatgagatggaaaaatcgagtaaagagaaggaacctaaaacacctcctccttcttctactgcccctccctcttcacaggaaccttcatcggctgtgagtgctggcatggctactccagattggtctggttttcaggcatattctcctatgccgccgcctcatggttatgtggcatctagtccccaacctcacccttatatgtggggagttcagcatatgatgcctccttatggaactccgcctcatccttatgttgcaatgtatcccccaggtggcatgtacgcacatccttcaatgcctccgggttcttatccctatagcccttatgctatgccttctccaaatggaatgactgaagtttctggcaatactacaggcggcactgatggtgatgctaaacaatctgaagtgaaggaaaaattgcccatcaaaagatcaagaggaagcttgggaagtttgaacatgattacaggaaagaacaatgaacctgggaaaaactcaggagcatcagctaatggagcttactccaaaagtggggagagtgcttctgatggttcaagtgaaggaagtgatgggaactctcaaaatgattcgggatctggactagatggaaaggatgctgaagcagcatcagagaatggtggttctgccaatggtccgcaaaatggaagtgctggtacacctattctaccggtgagccagaccgtaccaatcatgccaatgacagctgcaggtgttcctggcccaccaacaaatttaaatattgggatggattactggggtgctccaacttcagctggtatccctggaatgcatgggaaagtatctacaccagttcctggagttgttgctccaggctcgcgagatggtggccattcacaaccctggttacaggacgatagagaacttaagcgacagagacggaagcagtccaatagggagtctgctcgaagatcaaggttgcgtaaacaggccgaatgtgatgagctggcccaacgcgctgaggtgttgaacgaagaaaacacaaatctcagagcagaaatcaacaagctcaaaagccaatgcgaagagcttaccaccgagaacacctctctcaaggaccaactttcattattccctccacttgaaggcataagcatggacaatgaccaccaagaaccagacaccaatcaaacaggtgccgcagagagaaaggttgattcatacaaagactcaacg

SEQ ID NO: 117 - DNA, 990 bp, Arabidopsis thaliana
atggctgataccagtccgagaactgatgtctcaacagatgacgacacagatcatcctgatcttgggtcggagggagcactagtgaatactgctgcttctgattcgagtgaccgatcgaagggaaagatggatcaaaagactcttcgtaggcttgctcaaaaccgtgaggcagcaaggaaaagcagattgaggaagaaggcttatgttcagcagctagagaacagccgcttgaaactaacccagcttgagcaggagctgcaaagagcaagacagcagggcgtcttcatttcaggcacaggagaccaggcccattctactggtggaaatggtgctttggcgtttgatgctgaacattcacggtggttggaagaaaagaacaagcaaatgaacgagctgaggtctgctctgaatgcgcatgcaggtgattctgagcttcgaataatagtcgatggtgtgatggctcactatgaggagcttttcaggataaagagcaatgcagctaagaatgatgtctttcacttgctatctggcatgtggaaaacaccagctgagagatgtttcttgtggctcggtggatttcgttcatccgaacttctaaagcttctggcgaatcagttggagccaatgacagagagacagttgatgggcataaataacctgcaacagacatcgcagcaggctgaagatgctttgtctcaagggatggagagcttacaacagtcactagctgatactttatcgagcgggactcttggttcaagttcatcagggaatgtcgcaagctacatgggtcagatggccatggcaatgggaaagttaggtacactcgaaggatttatccgccaggctgataatttgagactacaaacattgcaacagatgataagagtattaacaacgagacagtcagcacgtgctctacttgcaatacacgattacttctcacggctacgagctctaagctccttatggcttgctcgacccagagag

SEQ ID NO: 118 - DNA, 720 bp, Arabidopsis thaliana
atggacgtctacggcatgtcttcaccggacttgcttcgtatcgacgaccttctcgatttctccaacgacgaaatcttctcttcctcttccaccgtcacttcctccgccgcttcctccgccgcttcttccgaaaaccctttcagctttccttcttccacctacacttctcctactctcctcaccgacttcactcacgatctctgcgttcccagtgacgacgcagctcacctcgaatggttatcgcgattcgttgacgattcattttccgatttcccagcaaatcctttaaccatgaccgttagacccgagatttcattcaccggaaaacctagaagtcgccgatcaagagcaccagcaccttccgtagctggaacttgggctccgatgtctgaatcagagctttgtcactccgtcgctaaacctaaaccgaagaaagtctacaacgctgaatcggttacggcggatggagcgaggcggtgcacgcactgtgcctcggagaaaacgccacagtggagaactggaccgcttggacctaaaacactttgtaacgcttgtggagttcgttacaaatcagggaggcttgtaccggaatacagaccggcgtcgagtccgacgtttgtattgactcagcattcgaactctcatcggaaagttatggagctccggcgacagaaggaacaacaagaatcttgcgttcgaattccgccgtttcagccgcag

SEQ ID NO: 119 - DNA, 1216 bp, Arabidopsis thaliana
acaagtttgtacaaaaaagcaggctcctgcaggaccatgggaaatagcagcgaggaaccaaagcctcctaccaaatcagataaaccatcttcacccccggtggatcaaacaaatgttcatgtctaccctgattgggcagctatgcaggcatattatggtccaagagtagcaatgcctccttattacaattcagctatggctgcatctggtcatcctcctcctccttacatgtggaatcctcagcatatgatgtcaccatatggagcaccctatgctgctgtttatcctcatggaggaggagtttacgctcatcccggtattcccatgggatcactgcctcaaggtcaaaaggatccacctttaacaactccggggacgcttttgagcatcgacactcctactaaatctacagggaacacagacaatggattgatgaagaagctgaaagagtttgatgggcttgctatgtctctaggaaatgggaatcctgaaaatggtgcagatgaacataaacgatcacggaacagctcagaaactgatggttctactgatggaagtgatgggaatacaactggggcagatgaaccgaaacttaaaagaagtcgagagggaactccaacaaaagatgggaaacaattggttcaagctagctcatttcattctgtttctccgtcaagtggtgataccggcgtaaaactcattcaaggatctggagctatactctctcctggtgtaagtgcaaattccaaccccttcatgtcacaatctttagccatggttcctcctgaaacttggcttcagaacgagagagaactgaaacgggagcgaaggaaacagtctaatagagaatctgctagaaggtcaagattaaggaaacaggccgagacagaagaacttgctaggaaagtggaagccttgacagccgaaaacatggcattaagatctgaactaaaccaacttaatgagaaatctgataaactaagaggagcaaatgcaaccttgttggacaaactgaaatgctcggaacccgaaaagagagtccccgcaaatatgttgtctagagttaagaactcaggagctggagataagaacaagaaccaaggagacaatgattctaactctacaagcaaattgcatcaactgctcgatacgaagcctcgagctaaagcagtagctgcaggctagctcgagacccagctttcttgtacaaagtggt

SEQ ID NO: 120 - DNA, 792 bp, Arabidopsis thaliana
atggacgtctatggcttatcttcaccagacttacttcgaatcgacgaccttcttgatttctccaacgaagacatcttctccgcttcttcttccggtggttccaccgccgctacttcctcttcttctttccctcctcctcaaaaccctagtttccaccaccaccatctcccttcctccgccgatcatcactccttcctccacgacatttgcgttcccagtgatgacgcagctcatcttgaatggctttcgcaattcgtggacgattctttcgctgattttccggcgaatccattaggaggaactatgacttctgtcaaaactgaaacttcctttccggggaaaccaagaagcaaacgatcaagagctcctgctcctttcgccggaacatggtctccgatgccactggaatccgagcatcagcagcttcactccgccgccaaattcaagccaaagaaagaacaatccggcggaggaggaggaggaggaggaagacatcagtcatcgtcatcggagactacggaaggaggaggaatgaggagatgtactcactgtgcatcggagaaaacgccacagtggaggacaggaccacttggacctaaaacactatgtaacgcttgtggagtccggtttaaatccggtagacttgtaccggaatatagaccggcttcgagtcctacttttgttttgactcagcattcaaactctcaccggaaagtgatggagcttcgacggcagaaagaagttatgagacaaccacaacaagttcaacttcatcaccaccaccacccgttt

SEQ ID NO: 121 - DNA, 2227 bp, Oryza sativa
acaagtttgtacaaaaaagcaggctcctgcaggaccatggagattaattcctctggtgaggaagcggtggtaaaggtgaggaagccatacacaatcacaaagcagagggagcgttggactgaggcagagcacaacaggttccttgaagccttgaaactgtatgggagagcctggcagcgcatagaagagcatgttgggacaaagacagctgtgcagatcagaagtcatgctcaaaagttcttcaccaagttggaaaaggaagctatcaacaatggcacttctccaggacaagctcatgacatcgacatacctccaccacgaccaaaaagaaaacctaacagtccatatcctcgaaaaagttgtctcagctctgagacatccaccagggaagttcaaaatgataaggcaacaatatcaaatatgacgaacaatagcactgcacaaatggcaggtgatgcagctcttgagaaacttcaaagaaaggagatatctgaaaaaggaagttgctccgaagttcttaatctctttcgagaagtcccatcggcatcattttcttcagttaacaaaagctcttcaaatcatggtgcatccagggggctggaaccgactaaaacagaagtcaaagatgtggtcatcttggaaagggattctatttccaatggtgcagggaaggatgcaaaagatatcaatgatcaagaaatggaaaggctcaatgggatacacatcagctcgaagcctgatcattctcatgaaaactgtttggatacctcaagccaacaatttaagccaaaatcaaactctgtggagacaacatatgtggattggtctgctgcaaaagcttcacactaccaaatggacagaaatggggttactggctttcaagccactggaactgaaggaagccatcctgatcaaacaagtgatcaaatgggaggagccagcggaactatgaatcaatgcatccatccaacacttcctgtggatccaaaattcgacggcaatgccgcagcacagccctttcctcacaactatgcagcctttgcaccaatgatgcaatgccactgcaaccaagatgcctacagatcttttgccaatatgtcatccaccttctccagcatgcttgtctccacattgttgtcaaaccctgcaatccatgcagctgccaggcttgcagcatcgtactggcctacagtagacggcaatactcctgatccaaatcaagaaaatctttctgagagtgctcaaggaagccacgctggctctcctcccaacatggcatctattgtcacagctacagttgctgcagcatcagcatggtgggcaacacaaggtcttctccctctttttcctccacctatagcttttccatttgttccagctcctagtgctcccttttccacagcagatgttcagcgagctcaagagaaagatatagactgcccaatggataatgcacagaaggaattgcaagaaactcggaaacaagataattttgaagctatgaaggtcatagtgtcttcagagactgatgagagtggaaaaggagaagtgtcgctccacactgagttaaagatatctccagcagataaggccgacaccaaacctgccgcaggagctgaaacaagtgacgtttttggaaataagaaaaagcaggatcgctcttcatgtggttccaacacaccgtcaagtagtgatatagaagcagataatgctcctgagaatcaagaaaaggctaacgacaaggcaaagcaagcatcttgcagtaactcttcagccggtgacaataaccaccgtagatttaggagcagtgcaagcacaagtgattcatggaaggaagtttctgaagagggtcgtctggcttttgatgcactgttcagtagagaaaggcttccccaaagcttttctcctccgcaagtagaaggatcaaaggagattagcaaggaggaagaagatgaagtaaccacggtgacggttgacctcaacaagaatgccgctattattgatcaagaactcgacacagcggatgagccaagagcttcctttcctaatgaattgtcaaacctgaagctgaaatctcgcaggaccggtttcaaaccatacaagaggtgctcagtggaagcgaaggagaacagggtaccggctagcgatgaggttggtaccaagaggattcgtcttgagagcgaagcatcgacatagctcgagacccagctttcttgtacaaagtggt

SEQ ID NO: 122 - DNA, 1502 bp, Oryza sativa
aaaaaagcaggctcctgcaggaccatggctgctcccagcgtcgccgtcgacaacctcaaccccaaggttttgaattgtgagtatgcagtgcgtggagagattgtgatccatgctcagcgcctgcagcaacagctacagactcaaccagggtctcttccttttgatgagatcctatactgcaacattgggaatccccagtctcttggtcagaagccagttacattcttcagggaggttattgctctttgtgatcatccatgcttgttggaaaaggaggaaaccaaatcattgttcagtgctgatgccatttctcgagcaacaacaattcttgcctcgattcctggaagagcaactggagcatacagccacagccagggcatcaaagggctgcgtgatgcaattgctgctggaattgcatcacgtgacggataccctgcaaatgcagacgacattttccttactgacggagcaagccctggagttcacatgatgatgcagttactgataaggaacgagaaagatggcattctctgcccaattcctcaatatcctttgtactcagcctccattgctcttcatggtggagctcttgtcccgtattatcttaatgaatcaacaggctggggtttggagatctctgaccttaagaagcaactcgaagattctcggttgaaaggcattgatgttagggctttggtagttatcaatccaggaaatccaactgggcaggttcttgctgaggaaaaccaacgggacatagtgaagttctgcaaaaatgagggacttgttcttctggctgatgaggtgtaccaagagaacatctatgttgacaacaagaaatttaactctttcaagaagatagcgagatccatgggatacaacgaggatgatctccctttagtatcatttcaatctgtttctaagggatattatggtgaatgtggcaaaagaggaggctacatggagattactggcttcagtgctccagttagagagcagatctacaaagtggcgtcagtgaacttatgttccaatatcactggccagatccttgccagcctcgtcatgaatccaccaaaggctggagatgcatcatatgcttcatacaaggcagagaaagatggaatcctccaatcattagctcgccgtgcaaaggcattggagaatgctttcaacagtcttgagggaattacatgcaacaaaactgaaggagcaatgtacctcttccctcagcttagtctgccacaaaaggcaattgacgctgctaaagctgctaacaaagcacctgatgctttctatgcccttcgtctcctcgaggcaaccggaattgttgttgtccctggatctggatttggccaagttcctggcacatggcacatcagatgcacaatcctgccacaggaggagaagatccccgcgatcatctcccgcttcaaggcattccatgagggcttcatggcagcgtaccgcgactagctcgagacccagctttcttgtacaaa

SEQ ID NO: 123 - DNA, 1449 bp, Zea mays
atggccgccagcgtcaccgtggaaaacctcaaccccaaggtcttaaaatgtgagtatgcagtccgtggggagattgtcatccatgctcagcgcctgcagcaacaactacaaacacaaccagggtctcttccttttgatgagatcctctattgcaatattgggaatccccaatctcttggtcagcaacctgtgacattcttcagggaggttcttgctctttgtgatcatccgtgcctcttggaaaaagaggaaaccaaatcattgttcagtgctgatgcaatttctcgagcaaagcagattcttgcaactattcctggaagggcaacaggtgcatatagtcacagtcagggtatcaaaggactgcgtgatgcaattgctgctggaatcatgtcacgtgatggattccctgcaaatgcagatgacattttcattacagacggagcaagtcctggggtccacatgatgatgcaattactgattaggaatgagaaagatggcattctgtgcccaattcctcagtaccctttgtactcagcctccatagctcttcatggtggagctcttgtcccctattaccttaatgaaaaaactgggtggggtttggagatctctgatcttaagacgcaactggaaaatgctcggtcaaaaggcattgatgttagggccttggtggttatcaatccaggaaatccgactgggcaggttcttgctgaagacaaccaatatgatatagtgaaattctgcaaaaatgagggccttgttcttctagctgatgaggtatatcaagagaacatctatgtggacaacaagaaatttaactctttcaagaagattgtaagatccatggggtatggcgaggatgatctccctctagtatcgttacagtctgtttccaaaggatactatggagagtgtggtaaaagaggagggtacatggagattactggcttcagtgctccagtaagagagcagatctacaagatagcttcagtgaacttgtgctccaatatcactggtcaaatccttgcgagcctcgtcatgaatccaccaaaggctggggacgaatcatatgcttcctacaaggcagagaaggatggaatccttgagtctttagctcgtcgtgcaaaggcgttggaggatgcattcaacaagcttgagggattttcatgtaacaaggccgaaggagcaatgtatcttttccctcagattcatctgccacagaaggcaatcgaggctgctaaagctgctaagaaagcgcctgacgctttctacgctctccgtctccttgaatcaactggaatcgtcgtggtccctggatctggatttggtcaagttcctggaacatggcacatcagatgcacgatcctgccgcaggaagacaagatccccgcggtgatcagccgcttcagggctttccatgaggcgttcttggccgagtaccgcgactag

SEQ ID NO: 124 - DNA, 1537 bp, Zea mays
acaagtttgtacaaaaaagcaggctcctgcaggaccgagtgagtgacggcagcgaggcaagatggcgaggaggaggccgatggactacgaggagctgaacgagaaagtcaagaaggcgcagtacgcggtgcgcggggagctgtacctccgcgcctccgagctccagaaggagggcaagaagatcatcttcaccaacgtcggcaacccgcacgccctcggccagaagccgctcaccttcccgcgccaggtggtggcgctgtgccaggctccgttcctcctcgatgaccccaatgtcggcctcatgttcccgcccgatgccatcgtgcgggccaagcgctatctcgccatggcgccgggaggtctaggtgcgtacagtgatgcccgtggtatccccggaatcaggaaggaagttgctgacttcatccacaagcgtgatggatatccgagtgatccagaactcatttacctcacagacggcgccagcaaaggtgtgatgcaaatgctgaatgccatcattagaaacgagagggatgggatcttggttcctgttcctcagtacccactttattctgctatcatttccctctttggtgggtctctggtcccatactacttggaagaagaggctaactggaaccttgactttgcaaacatccgacaagcagtggccgaggcacgttcgaagggaatcactgttcgagcgacggtgattataaatccaggaaatcccactggccagtgccttagtgaagcaaatataagggaacttgtgcgatattgctaccatgaaaacttagttctgcttgcagacgaagtgtatcagcagaacgtttatcaagatgagcgcccatttataagcgcaagaaaggttatgttcgacatgggtccgccaataagcagggaggttcagcttgtttctttccacactgtgtccaaagggtactggggagagtgtggacaacgtggtggatacttcgaaatgacaaatcttcctccaaagacagtagatgagatctacaaggttgcatcaatagtactgagtccgaatgttcccgggcaaatctttatgggagtgatggttaaccctcctaaacctggagatatctcatacccgaagttcactgccgaaagcaagtccatcctcgaatctttgaggaggagagcgcgcatgatgacagacggtttcaacagctgccgaaatgtggtgtgcaatttcacagaaggagctatgtactctttcccccaaatacagctgccagcaagagccatcgaggcggcaaagagagccggcaaagcagcagacgttttctactgcctcaagctcctggaggcaacggggatttccactgttccgggatctggttttgggcagaaggaaggggtgttccaccttcggacaactatccttccagccgaggaagacttccctaccatcatgtcgagcttcaagaagttcaacgactcattcatggagcaatacgagggctactccaggatgtgatgtagctcgagacccagctttcttgtacaaagtggt

SEQ ID NO: 125 - DNA, 1643 bp, Saccharomyces cerevisiae
aaaaaagcaggctcctgcaggaccatgtccacgacagccgcaccacatgcgaaaaatggctatgccaccgctactggtgctggtgccgctgctgccactgccacagcgtcatcaacacatgcagcagcagcagcagccgctgctgccaaccattccacccaggagtcgggtttcgattacgaaggcctgatagattccgaactgcagaagaaaagacttgacaaatcgtacagatatttcaacaatatcaaccgattggccaaggagttccccctagctcatcgccagagagaggcggacaaggtcaccgtttggtgttccaacgactatttagcactttccaagcaccctgaggtattggacgccatgcataaaactatcgacaagtatggttgtggtgccggtggtacaagaaacattgctggccataacatccccactttgaatctggaagccgaattggccactttacacaagaaggaaggtgccttagttttttcgtcatgttacgtagccaacgatgccgtcttatccctactgggtcaaaagatgaaggacttggtgattttctccgacgaactcaaccatgcgtccatgattgtcggtattaagcatgctaacgtaaaaaaacacattttcaaacataatgacttgaacgaattggaacaactgctccagtcataccccaaatccgttcctaaactaattgctttcgaatcagtatattctatggccggttcagtggccgacatagaaaaaatttgcgacttggccgacaaatacggtgctttgaccttcttggatgaagtacatgcggtcggcctgtacggccctcacggtgcaggtgttgcagaacattgtgattttgaaagtcaccgtgcaagtggtattgctaccccaaagaccaatgacaagggcggcgcgaagactgtgatggaccgtgtcgacatgatcaccggcactttaggtaagtctttcggtagcgtaggtggctacgtcgcagcctctaggaaattgatcgattggttcagatcgtttgcacctggtttcattttcaccacgactttaccaccttcagttatggcaggcgctaccgcagcaattagataccaacgttgccacatcgacctaagaacctcgcaacagaaacataccatgtacgtaaagaaagctttccatgagttgggcattccagttattccaaatccttctcatatcgtcccagtgttgattggtaatgctgatttggctaagcaagcttctgacatcttaatcaataagcatcaaatctacgtacaagctatcaacttccctacggttgctcgcggtaccgaaagattgagaattaccccaacgccaggtcacaccaacgatttatctgacatcttaatcaatgcagttgatgatgtgttcaatgagctacagttaccacgtgtcagagactgggaaagccaaggtggcttattgggtgttggagagagcggatttgtggaagagtctaacttatggacatcaagccaactatctttaactaatgacgacttgaaccctaatgttagagaccccatcgttaaacaactagaggtttctagtggtatcaagcagtagctcgagcctgcagggacccagctttcttgtacaaa

SEQ ID NO: 126 - DNA, 773 bp, Zea mays
gcagtcgctgtcgttaccatggacaaccagccgctgccctactccacaggccagccccctgcccccggaggagccccggtggcgggcatgcctggcgcggccggcctcccacccgtgccgcaccaccacctgctccagcagcagcaggcccagctgcaggcgttctgggcgtaccagcgccaggaggcggagcgcgcgtccgcgtcggacttcaagaaccaccagctgcctctggcccggatcaagaagatcatgaaggccgacgaggacgtgcgcatgatctccgccgaggcgcccgtgctgttcgccaaggcctgcgagctcttcatcctcgagctcactatccgctcctggctccacgccgaggagaacaagcgccgcaccctgcagcgcaacgacgtcgccgcggccatcgcgcgcaccgacgtcttcgatttcctcgtcgacatcgtgccccgcgaggaggccaaggaggagcccggcagcgccctcggcttcgcggcgcctgggaccggcgtcgtcggggctggcgccccgggcggggcgccagccgccgggatgccctactactatccgccgatggggcagccggcgccgatgatgccggcctggcatgttccggcctgggacccggcctggcagcaaggggcagcggatgtcgatcagagcggcagcttcagcgaggaaggacaagggtttggagcaggccatggcggcgccgctagcttccctcctgcgcctccgacctccgagtagaacccagcggtactcgc

SEQ ID NO: 127 - DNA, 797 bp, Zea mays
aaaaaagcaggctcctgcaggaccatggaaccatcccctcagcctatgggtgtcgctgccggtgggtcacaagtgtatcctgcctctgcctatccgcctgcagcaacagtagctcctgcttctgttgtatctgctggtttacagtcagggcagccattcccagccaatcctggtcatatgagtgctcagcaccagattgtctaccaacaagctcaacaattccaccaacagctccagcagcaacaacaacagcagcttcagcagttctgggttgaacgcatgactgaaattgaggcgacgactgatttcaagaaccacaacttgccacttgcgaggataaagaagatcatgaaggccgatgaagatgttcgcatgatctcagctgaagctcctgtagtctttgcaaaagcttgtgagatattcatactggagctgacacttaggtcgtggatgcacactgaggagaacaagcgccgcaccttgcaaaagaatgacattgcagcagcgatcactaggactgacatttatgacttcttggtcgacattgttcccagggatgagatgaaggaggacggaattgggcttcctagggctggtctgccacccatgggagccccagctgatgcatatccatactactacatgccacagcagcaggtgcctggttctggaatggtttatggtgcccagcaagggcacccagtgacttatttgtggcaggagcctcagcaacagcaggagcaagctcctgaagagcagcaatctgcatagctcgagacccagctttcttgtacaaa

SEQ ID NO: 128 - DNA, 850 bp, Glycine max
acaagtttgtacaaaaaagcaggctcctgcaggaccatggatcatcaagggcatagccagaacccatctatgggggttgttggtagtggagctcaattagcatatggttctaacccatatcagccaggccaaataactgggccaccggggtctgttgtgacatcagttgggaccattcaatccaccggtcaacctgctggagctcagcttggacagcatcaacttgcttatcagcatattcatcagcaacaacagcaccagcttcagcaacagctccaacaattttggtcaagccagtaccaagaaattgagaaggttactgattttaagaaccacagtcttcccctggcaaggatcaagaagattatgaaggctgacgaggatgttaggatgatatcagctgaagcaccagtcatttttgcaagggcatgtgaaatgttcatattagagttaaccctgcgctcttggaatcacactgaagagaacaaaaggcgaacacttcagaaaaatgatattgctgctgctatcacaaggactgacatctttgatttcttggttgacattgtgcctcgtgaggacttgaaagatgaagtgcttgcatcaatcccaagaggaacaatgcctgttgcagggcctgctgatgcccttccatactgctacatgccgcctcagcatccgtcccaagttggagctgctggtgtcataatgggtaagcctgtgatggacccaaacatgtatgctcagcagtctcacccttacatggcaccacaaatgtggccacagccaccagaccaacgacagtcatctccagaacattagctcgagacccagctttcttgtacaaagtggt

SEQ ID NO: 129 - DNA, 861 bp, Zea mays
atggacatggacccaaggttcaacgtcgactggagtgccaacgagatcgagatggtgagatctctcatcgcttgtcacggcgccagcaacagcacgaacgacgacattgtggatgagctccaggcaatgttcccagggaaggataagcgccaggtaactgacttgtacgttgagcttgtggtggagatgataaacagtggggcagagctgagcagcaaccagctcctgctcaactctggtggggtgcacagcaggacgatggatgggtatttagcagacgagatgaaggcgaagaggatgctgctggaggaacagcgccgtaggaaattagttgctgttcctcgacaggataaccaacaacgtgcaaggaggttttggactctggaggagcacaggaatttcctgcgtggcctgcgtgtgtacgggcgcggcaattggaagaacatctccaaggacttcgtcaccactaagacgccggtgcaggtctccagccatgcacagaagtacttccggaggcaggagagcaccacaaggaagcagcgctacagcatcaacgacgtcggcctctacgatgctgagccatgggaggagcagcagcagcagcagcagaacagctcactgccggctttcactagcaccaacaataatgcttattacaacccatactgctatgcctttggtggtggccagcagcagctcgcatcatcccccttccagtgccatgccagtcaggcgagcagcagcagccagacagcagtcacctgggctgcaggaggtcagcagccaccgatttgctcttctgcagctccacccatgatggaggggggtggggctgaaatgtcatggaccacttattattag

SEQ ID NO: 130 - DNA, 1628 bp, Zea mays
aaaaaagcaggctcctgcaggaccatggtccgaggtatcatactgctcctgcttgtgacccccctcgccatctccatggcactgccatcactatcaacgagaatcgaagggagtgtcataggggagagatccaacttgttctcacagctgcactccgataattctagccctacagaaaacaaactccaaccaggtgaaaagtcctttgcatcggaggcatatgcggtgaactggaacgaaccaccagaccaacaatcgcaagactccctcgagcagctagagccgtatcgagtgatatggaagcaaccagtgcaaggtgaaaagtccttcgtatccgaggcatatccggcgaaatggaacaaaccaccatcaccaagcaagcaatcgcaagactccttcgagccagaggcatatcgggtgaaatggaacaaatcaccaccaccacaccaacaatcgcaagactctttcgagtcggaggcatatcgagtgaaatggaacaaatcacccccaccacaccagcaatcgcaagactcctttgagccggaggcatatcgggtgaaatggaacaaatcaccaccaccacaccaacaatcgcaagactccttggagcaggaggcatatcgggtgaaatggaacaaatcaccaccaccacaacaacaaacgcaagactctttcgagcaggaggcatatcgggtgaaatggaacaaatcaccaccaccacaccagcaatcgcaagactccttcgagccggaggcatatcgggtgaaatggaacaaaccaccaccaccacaccagcaatcgcaagactcctttgagccgaaggcatattgggtgggatggaagaaacatgcgcaaggagcaacggacgttgctgatgagacaacgccagcacgtggtcatggtctgcatgtcgcgaccgggatgctcttcacgaggaagagcttgcctccagggacagccctaccggaaggtaccaagttctgcggccacggcttcctcgatcccgagaggtttgaactacgagcggatgcggatgccatcccgttcagctacagccagctcgacaccatcctgaggatgtttcggatccctcgggggtccaagaaggcagagcaagtcgccgccacgctccggacatgcgaggctgagtccccagaggctcatgcctgcgccacctccgagcaggcggcggccgacttcgctgcctcctcgctcggggtcagggccagcaagctggtcgcgctcgtcaccaccgtccatggggggaaggacgccactagatacgtggtggcgcccaacggcatcacacgcatcggcaaggcggcaggggccgcggccgtagtgccgtgccacccgatgccgtacccgtacatggtccactactgccaccagccggcggacgtggaggcgctccgtgttgagctgaccgggctcggagacggtggcgtgacaaccgcgatcgccatgtgccacgccaacaccatgaactgggacgatcgctacttccaaatgctgaacgtgacgcgcggcgaggagatctgccacttcatgccgcgcaactatgtgctctggctaccagctgccgagcttctagggaactagctcgagacccagctttcttgtacaaa

SEQ ID NO: 131 - DNA, 815 bp, Zea mays
acaagtttgtacaaaaaagcaggctcctgcaggaccctttcggttcaggcggaggagggcatggagcgcggcgactgccagttcacggtggtgccgccgcggcagtacgacgaggcccagttcatgcaccagctgatggtggccggcgaccagcaggaccccgcgggcgcggggcggggagctgccgccgccggcggggagaggaagcggcggttcacggaggagcaggtgcggtcgctggagacgacgttccacgcgcggcgcgccaagctggagccccgggagaaggcggagctggcgcgggagcttggcctgcagccgcgccaggtggccatctggttccagaataagcgtgcgcggtggcgctccaagcagctggagcatgactacgccgcgctcagggctcagttcgacgcgatgcacgcccgcgtcgagtcgctcaggcaggagaagatcgcgctcgccgcgcaggtagacgagctgcgggggaggctgaacgagcggcaagaccagagcggcagctgcgaggtcaacgacgcggaggcggcggcggacgacaagaggaacaatagcaccagctccctcgtgcaggacgacggcgccacgccgccgccggctgcagtagacgcctccgaggactcggcggcgaccggcgagtactacgaccacgtcgcgtacgagtacgatggcctgcgcgaccccttcgtctgcgccactccggacctgtgggatacgtggccgctgctggagtggaacgcggtggcctgaaacctcgatcgtgtagctcgagacccagctttcttgtacaaagtggt

SEQ ID NO: 132 - DNA, 1578 bp, Zea mays
atggtctccgcgccgccggccgtcggcaccgccatgccgtcgctcgacttcgacacctccgtcttcaacaaggagaaggtctccctcgccggccacgacgagtacatcgtgcgcggcgggaggaacctgttcccgctgcttccggaggcgttcaagggggtcaagcagatcggagttattggatggggctcgcagggtcctgcccaagcccagaacctgagagattcactggctgaagccaagtcagatattgttgtgaagattggtctccggaaaggatccaaatcttttgaggaagcacgtgccgctggattcaccgaagagagcggaaccttgggcgatatttgggaaaccgtctccggcagcgatcttgtgttgctgctgatatcggatgctgcacaggctgacaactatgagaagatcttctctcacatgaaaccaaacagtatccttggtttatctcatggatttcttctaggacatttgcaatcactcggactcgatttcccaaagaacatcagtgtgattgctgtatgccccaagggaatgggtccatccgtccgcagactttatgttcagggcaaggaagtcaatggcgctggcatcaactctagctttgctgtgcaccaggatgttgatggaagggcaactgatgttgctttagcatggtcagttgcacttggttcccccttcacgtttgctactactttggaacaggagtacaagagtgatatctttggagagcgaggcatcttgctgggtgctgtccatggtatcgtggaggctctgtttaggaggtacacagaacaaggaatggatgaagagtcggcctacaaaaacactgtcgagggcataactgggatcatctcgaaaaccatctcaaagaaagggatgcttgaagtgtacaactctttgagcgaggaaggcaaaaaggagttcaacaaggcttatagcgcatcgttttacccatgcatggatatactctacgaatgctatgaagatgtggcctctggaagtgaaatccggagcgtggtgttggctgggcggaggttttatgagaaagagggcctcccagcttttccgatgggcaacatcgaccaaactcgcatgtggaaggttggtgaaaaggtgcgctcaacccgtccggaaggtgatcttggcccgctccatgccttcactgctggagtgtacattgccctgatgatggctcagattgagatcctgaggaagaaggggcactcctactctgagatcatcaacgagagcgtgattgagtcggtggactcgctgaacccgttcatgcacgcccgtggggtcgccttcatggtggacaactgctccacaacggctcgcctgggatccaggaagtgggcgcctcgcttcgactacatcctgacgcagcaggcctttgtggcggtggacaaggacgccccgatcaaccaggacctcatcagcaacttcttgtcggaccctgtccatggtgccattgaggtctgcgccgagctgaggcccaccgtcgacatctctgtgcctgccaacgccgactttgtgcgcccggagctccggcagtcttcctag

SEQ ID NO: 133 - DNA, 1230 bp, Zea mays
atggcgtcgcagggatcctccgtcttcgccgcactcgagcaggccccggaggaccccatcctcggagtgaccgttgcctacaacaaggatcccagccccatgaaggtcaacctcggggttggcgcctaccggaccgaggaagggaagcccctagtgctgaacgtggtcaggcgcgccgagcaaatgttgatcaataatccgtcacgtgtcaaggagtacctaccaatcaccggtctggctgaattcaataagctgagcgctaagcttatctttggcgctgacagccctgctattcaggagaatagggttgctaccgtgcagtgcctatcgggtactggttctttaagagtcggaggtgaatttcttgcaaggcactatcacgagcgcactatctacatcccacaaccaacctggggaaatcacccaaaagtcttcaccctatctggcttgaacgttaggagctaccgctattatgatcctgcaacatgcagccttcacttcgaaggactcatggaagacctcggttctgctccttcaggttcaattgtactgctgcatgcctgtgcccacaaccctactggagtagatcctaccatcgaacagtgggaacagattaggcagctgatgagatcaaaatcactgcttccgttctttgacagtgcctatcaaggctttgcaagtggaagtcttgacaaagatgctcagtcagtgcgtatgtttgttgctgatggtggtgaactgctcatggctcagagctacgctaagaacatgggattgtatggagagcgtgttggcgctttgagcattgtatgtagaagtgccgatgtagctgttagggttgaaagtcaactcaaacttgtcatcaggcctatgtattcaaaccctcctcttcatggtgcctctattgttgctaccatactcagggacagcgagatgttcaacgaatggactctggaactgaaggccatggctgataggatcattaacatgaggcaacaactatttaatgcgctgaaatccagaggaacccctggtgattggagccatatcattaagcaaattgggatgtttactttcactgggctgaatagcgaacaagtggcattcatgaggcaggaataccacatttatatgacatctgatgggaggatcagcatggccggtttgagcatgaggactgtgccccatcttgcagatgccatacacgctgcagttactcaactgaaatag

SEQ ID NO: 134 - DNA, 726 bp, Zea mays
atgggttccaaagcgtccttccgcgtcacgctcctcttgctgctcctcgccgccgcctggggacctgctgcacaggccgacgacgctggtattgctgagctcccggatcatagagctattaccttgaaggagcaggtttcttcgaccaagattcctgtccgtctcaagagtggcagcccgctgtgctcagcctgtgaaaacttcacgggcaaagctgtcagttatatcagtgagaaacagacgcaagataaggtcatgggattccttcatgacgcttgctctcagtcattctcgtttgaacagaagtgtgatgaattgatggactcttacgcaaccctcctgtttgccaagatcacggagatcaaaccagaagcgttctgcaaacagtatggcctgtgcaggggcacggctcttttctctggtgtgacaagtgacagcacatgtgtgttctgccaccacctgcttgatgaagttatgtccaaactgaaagatccggacgcggagtttgagataattcagatccttatcaaggagtgcaataagattgaaggccacgtccagcagtgcaagcgactggtcctgcaatacattcccctcatcctggtgaacggcgagaagttcctcgagaagaatgatgtttgcgcgctcgttcaggcttgtccagccacccataagaagactttcagctcagccttgaaggaggccttgttgctgagtaacgcttag

SEQ ID NO: 135 - DNA, 555 bp, Zea mays
atgtcttttcggagcatggttcgtgatataagggaaagttttgggaatatatcgaggcggaactttgaggtgagaattcaccacagagggaagtctcttgggtcttcaggtgacttgcaagacaggcctgctgaagttcagcaaagcaggtgggctagccttcctcctgagttgctctgcgatgtgatgaaaaggttggaggaagatgacagtagctggccggatcgcaaggatgttgtttcctgtgcatctgtttgtacaacctggagggatatgtgtaaggatattgttagaagtccagaacattgtgcaaagctcacatttccagtatctcttaagcagcctggaccccgagacggggtaatccaatgtttcataaaaagggacaaatcaaagctaacgtaccggctctacttgtcccttagctctggtgtgcttgatgagaacgggaagttcctgctagcagcgaaaaggagccgcaggatggcgcacacggagtatgcaatttttatggattatggtgagctgaaagtgcggaaatgcttgttagattag

SEQ ID NO: 136 - DNA, 1053 bp, Zea mays
atggcgacgccacggaagccgatcaagctcacgctgccgtcccacgagaccaccatcggcaagttcctgacgcacagcgggacgttcacggacggggatctgcgcgtcaacaaggacggcctccgcatcgtctcgcggagggagggaggcgaggctcctcctatagagccgttggatagtcaactgagcttagatgatctagacgttataaaagtgatcgggaaaggtagcagcggaaatgtgcaattggtccgccacaaatttactggccagttttttgctctgaaggttattcaactaaatattgatgagagtatacgcaaacagattgccaaggagttgaagataaacttatcaacacagtgccaatatgttgttgtgttctatcagtgtttctatttcaatggtgccatttctattgttttggaatacatggatggtggctcccttgcagatttcctgaagactgttaaaaccattccagaggcctacctcgctgctatctgtacgcagatgctaaaaggactgatctatttgcataacgagaagcgcgttatacaccgagatctgaaaccatcaaatatattgataaatcataggggtgaagtaaaaatatcagattttggtgtgagtgccattatatctagttcctcttcgcaacgagatacatttattggcacacgcaactacatggcgccagaaagaatcgatggaaagaaacatggttctatgagtgatatctggagtttgggactagtgatactggaatgtgcaaccggcatctttccatttcctccttgtgaaagcttctacgaacttctcgtggctgttgttgatcaaccgccaccttctgcgccgccggatcagttttcaccagaattctgtgggttcatttctgcatgtctccagaaggatgctaatgacaggtcatcagcccaagccttattggaccatccgttcctgagcatgtatgatgacctgcatgtagatcttgcttcgtacttcacgacagcaggatctcctctcgccaccttcaattccaggcaactctag

SEQ ID NO: 137 - DNA, 1269 bp, Zea mays
atgatccgcccaggctcaaaggactcgcaaaattatgataacaataatcaaagagtccatcctcaaccaatcgacgataacatgaatcagaacggggactcaatggacactgtgatcgggaggatattcaacaacatatcctctttaaaatccgcctacattcagctgcaggaagcccacaccccatatgaccctgacaagatccaggaagctgataaacttgtcatagaggagcttacgaggctttcagaactcaagcacgcttacagagaaaaacatcctaagccaatagctgcatcccctcaagattcacgcttgctttctgaaatacaagagcagcagaacttgttgaagacctacgaggtcatggtaaagaagttccagtcccagatccagtccagagacactgagataacccatctacagcagcaaattgatgaagctaaacttcggaaatcaaagctagagaagaaactgaaacagaggggcctacttaacagggagtcggaggaatctgacgaagaagagaactacttttccattgaattgacaccaagtttgtttacatctgccgttgataatgcctaccagtcgatacatgacttctcgaagcctttgatcaacatgatgaaggctgcaggttgggatcttgatggggctgctagtgcgatcgagcctggtgtggtttacacaagaagggctcacaagaagtttgcttttgaatcctatatttgccaaagaatgttcagtgggttccaagaagagagcttttctatcaaggattctaacatcagtgtttccaatgaggctttcttccaccaattcctcgcggtgcgagccatggatcctctggatgtcctgagccagaaccctgattcagtattcggaaagttctgcagaagcaagtacctatcgcttgtgcatcaaaaaatggaaggttctttcttcggcaacgtggatcagaggaactacgtcatgagcggcggccatccaaggacacctttctaccaggcattcctaaagctagcaaagtccatatggttgctgcacaggttggcgcactccttcgatccaaaggcaaaggtgtttcaagtgaaaaagggaagtgaattttcggatatccacatggagagcgtcgtgaaggacatcatcctagaagatgtcgcggagaggccgaaagttggcctgatggtgacgcctggtttcctgatcgggaccagtatcatacagtcccgtgtgtacctttcaggtgccaagtgtgctgactag

SEQ ID NO: 138 - DNA, 1197 bp, Zea mays
atggtcgccgtgaagcagctcaccggccctgccagacccgctcacacgtgcgctgctcatgctcaccagctgctcagtgctcgatacgatcaccgtggcgcgtctcaagctgaattaccggaccggatttcgccatccaacgcttccacgttctgcacgagcatgtactcgtcgtcggcggcggattcctccaagtcgtgccggcaggcaggcgctctgccgttcctgccccatcctcctaaacgtgagcagcagcagcagcagtcatccagctctccatcactgctcgtctgtactgacctcggcaacggtggtcaagacgaggctgaagcggaacatccggctgagctcaaggacttcctgaacctctctggagaagcttcatggagaggcggtttccatggagagagcagcggcgtcgctttcagattcagagagaaggtggagtttcagttcttgtctgaacagctcgggatcgccatcaccgaccacgacgagagccctcgactagatgatcaggaggacatatacgacaggccgccgcaaacctcttcttgtccggtactgtcttgctccaaccaagaagagggtctccagagggcagggtctcctgttaaagctcagctgagttcatatcgagctgcatgtaataacaagccaagactgaggtggaatctggagctccatgagcttttcgtgaaggctgtcaacaagcttggagggccagaaaaggcaactcctaagggcgtgttgaagcttatgaaggtagaaggcttgaccatctatcatgtgaagagccatttgcagaagtatcgctttgccaagtatcttccggagacaaaagaagacatgaagtcctcttcagaagacaagatgccaggaagcaatcctggcagaaagaagattctcaaaagcttacaagtagcagaagctcttcggatgcaaatggaggttcagaaacaacttcatgaacaattagaggtgcaaaggcagctacaagtgcgcatagaagaacatgcaaagtatctgcagaagatattagaacagcagaaggcaaggaattccttatcagctacgacaagttcaatacaaacagagctttctgaatctacaaaggaagagaaacctgagacacaagcggatacttcttcagctcagttgccaaataaaaagaactcagatactgacatggaatag

SEQ ID NO: 139 - DNA, 1798 bp, Zea mays
aaaaaagcaggctcctgcaggaccatggctcgaggtatcatactactcctgcttgtcatccccctcgtcgtgagaattgaagggagtgtcatgggggagagatccaactcgttctcacaggactccaataattctagccctgctgaaaacaaactccaaccaggtgaaaagtccttcgcatcggaagcatatgcggtgaactggaacgaaccaccagacctgcaaatgcaagactccttcgagcgacctgagctatatcggaagcaatcagtgcaaggtgaaaagtccttcgcatcggaggcatatccggtgaaatggagcatatcaccatcactaggtcagcaatcacaagagtctttcgagccagaggcatatccgatgaaatggaaagaaccaccaccatcaggccaacaatcgcaagactccttcgagccggaggcatatcgggtgaaatggaacaaatcaccaccaccacaccaacaatcgcaagactccttcgagccggaggcatatcgggtgaaatggaacaaatcaccaccaccactccagcaatcccaagactccttcgagccagaggcatatcgggtgaaatggaacaaatcaccaccaccacaccaacaatcgcaagactccttcgagccggaagcatatcgggtgaaatggaacaaatcaccaccaccactccaacaatcccaagactccttcgagccagaggcatatcgggtgaaatggaacaaatcaccaccaccactccagcaatcccaagactccttcgaaccagaggcatatcgggtgaaatggaacaaatcaccaccaccactccagcaatcccaagactccttcgagccagaggcatatcgagtgaaatggaacaaatcaccaccaccacaccaacaattgcaagactccttcgagccggaggcatatcgggtgaaatggaacaaatcaccaccaccactccaacaatcgcaagactccttcgagccggaggcatattgggtgggatggaagcaacatgcgcaaggagaaacagacgttgctgatgggacgacgccagcacgcggccatggcctgcatgtcgcgaccgggatgcttttcacgaggaagagcttgcttccagggacagccctaccggaaggcaccaggttcagcggccacggcttccccgatccgcagaggttcgcgctacgggcagacgcggacgccatccccttcagctacagccagctcgacgcgatcctaaggatgttccggatccctcgagggtccaagaaggcggagcaagtcgctgacacactccgggcatgcgaggccgagtcctcggacgctcatgcctgcgccacctccgagcaggcggcggcggactttgctgcctcctcgctcggggtcagggctagcgacctggtatcggtcgtcaccgccgtccacggggggaaggacgccactaggtacgtggtggcgcccgacggcgtcacacgcatcggcaaggcggcgggggccgcgaccgcggtgccgtgccacccgatgccgtacccgtacatggtccattactgccaccggccgacggacgtggaggcgctccgcgttgagctgactgggctcggagacgacggcgcgaccatcgcgatcgccatgtgccacgccaacaccatgagctgggacgaccgctacttccagatgttgaacgcgacgcgcggcgaggagatctgccacttcatgccgtggaactatgtgctatggctgccggctgccgaccttctagcgaataactagctcgagcccagctttcttgtacaaa

SEQ ID NO: 140 - DNA, 411 bp, Zea mays
atggctcgtactaagcaaactgctcgcaagtccactggagggaaggctcctaggaagcaacttgccaccaaggctgcccgtaagtctgcacccacaactgggggagtaaagaagcctcatcgttaccgccctggaactgttgctcttcgtgaaatccgcaagtatcagaagagcactgacctgctcataaggaagcttccgttccaaaggcttgtcagggagattgcccaggatttcaagactgatcttcgtttccagagccatgcggtgcttgcgctgcaggaggctgcggaggcgtacctggtgggtctattcgaggacactaatctgtgcgccatccatgccaagcgcgtgaccatcatgcccaaggacattcagctggctaggaggatccgtggtgaaagggcctag

SEQ ID NO: 141 - DNA, 1584 bp, Zea mays
acaagtttgtacaaaaaagcaggctcctgcaggaccgtctcgccagcgcgatggccagcggcggctcctccaggtacagctcgtacaaggcgccggggctgcgcggcgcgctgctggaggcggcgcacgtgtcgtgcctcgaggaccggtacgcgctgggcccgcagctggggtggggccagttcggcgtgatccggtcctgctccgacctggtcaccggcgaggcgctggcctgcaagtccatcgccaagggccggctcgtgtcccccgacgacgtgcgcggggtcaggctggagatcgacgtcatggcgcgcctggcgggccaccccaacgtcgtggggctcaaggccgtgtacgaggaccgcgactcggtgcacctcgtcatggagctctgcgccggcggcgagctcttccaccgcctccacgagcgcggctgcttccccgagcgcgaggccgccgcgctcttccgccacctcatggaggtcgtcgcgcactgccacgccaaggggatcgtgcaccgcgacctcaagcccgagaacatcctcctcgtcagcaggtcgccccagtcgccgatcaaactcgcggactttggactcgccacctacacccagcctggccgaagcttgagcggcatggtaggcagcccgttctacattgcgccggaggtgctctccggcgggtacaacgaggccgccgacgtctggagcgcgggggtcatactctacatcctcctcagcggcatcccgccgttttggggcaagaccaagtccaagatcttcgactgcatcaggtccatggagctgcggttcccttctgacccatgggacagggtttctgattccgccaaggagctcgtcaccgggatgctgcggcgcgaccctaggctgcggctcacggccaagcaggttctagagcatccgtggatgcaggaacacgcggacccacaagactcgtgcgggcagtgccacgagaccggcctccaacgggagggcgccggctcgtgctccttctccacgccgttggcgtcgcggagcagggacgtgagctttgacacgcgtggccccatcgcgtggaggggtgggggcgaggacgaggcgacctgctgctcgcccacgttcgccgccgtctgcaggtcgtcgttctcggcgttcatcaccgacccggccccgccgccctgctcggcctcctccgccttgggtggctctggcttctcgttcggtgagccctgcgaaccacttgacggaggaggaggaggagggttcccgatgcccatggcttccatgccgagcttctcgttcttctgcgcgcgggacagcagcgagccagctgagccacagccggtcgctgcctcctcgactccgaggacggcgaggggatccacgccacggggcgtcaacggcaggcggaaccacacgatcggcggcggcgggcgggagcacctggacgtggcggtggagtctgtcatccgctgggcgtcgtgcaccaacttctccacggcgccctcacttcgggcctccctcgtatgctagcactagcaacgtcgttccgcgtagctcgagacccagctttcttgtacaaagtggt

SEQ ID NO: 142 - DNA, 447 bp, Zea mays
atggcgcccaaggccgagaagaagccagcggagaagaagccggcggccgaggagaaggcggagaagacgaccgcaggtaagaagcccaagtccgagaagcgcctgcccgcctcgaagtcctccggcaaggagggcggcgagaagaaggggaagaagaaggccaagaagagcgtggagacctacaaaatctacatcttcaaggtcctgaagcaggtgcaccccgacatcggcatctcctccaaggccatgtccatcatgaactccttcatcaacgacatcttcgagaagctcgccggcgaggccgctaagctcgcccggtacaacaagaagcccaccatcacctcccgcgagatccagacctccgtgcgcctcgtcctcccaggagagctcgccaaacacgccgtctccgagggaaccaaggccgtcaccaagttcaccagcaattag

SEQ ID NO: 143 - DNA, 504 bp, Zea mays
atgggcaagcaaaagattgtgctcaagttgcccctggatgacgagaggaagaggaggaaggccttcaaggcagctgtgggaatgaacggtgtgacgtccgccacgatggagggcgacaagatcaccgtcgtcggcgatggagtcgaccccatcacgctcacaaccatccttcggcgcagcctcggctacgcggagctgctcagcgtcagctccggcgacgacaagaagaagggcgacgggtacggctacgggagcgccggtggcatgatgtacggtggcggcggatacggtggtggcaaagagggcaaggagagcaaagagagcagcggcggcaagagcagtggcggcggtgggggctacggcggccattaccaggcgatgccgtcggtctcgtaccctgccgcctaccagcagtacaacgccatgccgccctaccccgccgcctactcctatcctgcagcatacccgcagcaagaacaggaccctggatgcagcatcatgtag

SEQ ID NO: 144 - DNA, 1251 bp, Zea mays
atggaggcagcagtagccgccgcactcaagtcgcccaccgccgcacgtccctcgtggcggcccgcggccccgggcgccacctcgctcccctttgaccggaggcgcagctttgccttcggctccatcaagggtctcgggcggcagcagctcacctctaggactaggaggcgaagcagtgtggtcagggcctcctggtccccctcggagtctctgccaccgtcctcgtcgatggcgccgctcaggatggaatcgcccgcggggcagctactctcccagattcttcacacgcacccgcacctgctgcctgccgccgccgagcagcagctcgagctgctccagaccgaccgcgaggcagagaagaataaggataaggagagcgatgctggcgacaagctggctccgacaggtgtcgacctcgtgctgtacaggcggattgctcaagtaaaggagaaggaacggaggaggactttggaggagatactctatgctctggttgttgagaagtttgttgaagccggcgtttccttggttccggcactctcacgctccatcgactcttctggaagagttgatcagtgggcagaaactgtggaaggaaggctccagcgtttgcactcgcctgaggcctatgaaatgatcgagaaccatctcgccctcattctggggcagcgtcagagtgatgccactattgcagccataagtaagctccgtgttggccaggtctatgccgcatctgtgatgtatggctatttcctgaagagagttgatcagaggtttcagctcgagaagacaatgaagagcctcccttggggatcagaagaggaagacggcgctttgtatcaagttatgacgaccgactcgatgccttcagctcagtcttctagctctcacccagagatgggctcctggaccgccgcgcctgacttcaacgcaggaggtcctagcgaatctatcaagccttgtcgccttaggtcgtatgtcatgtcattcgatccagatacgcttcagaggtatgcaacggtcaggtcaaaggaggcctttggtatcatcgagaaacacacagaagcgctatttgggaaagcagagattgtagtcacacctggaggcacggttggttcatccaaggatgagcacattaggataagctttgccgggctgagaaggctggtcctggaggctgttactttcggatcattcctctgggacgttgagagctttgtggattccagctaccattttgtgaccagctag

SEQ ID NO: 145 - DNA, 1271 bp, Zea mays
acaagtttgtacaaaaaagcaggctcctgcaggaccccagccacccttccctctttcacaatgctggcctccgccgccaccgtcaagccctccaccgccgcggccgcggccacctgcaaggcggccttcaagccgctccacctccctcccctccccgccgccgccggcctcaggccgctctccctctccgtctccgcgcgcccgctgtaccgtcaggagcatgtcctggcatccgtggcggtggcggcggctgggcgcaacgaacgcgccacgtcccccgcgccgccgtccgccaccgctgacggcgcccggccgctggaggtcgccgcgccggcggagacgggtcggcgcgccaagatcggggtctacttcgccacgtggtgggcgctgaacgttatcttcaacatctacaacaagaaggtcctcaacgcgttcccgtacccgtggctcacgtcgacgctctccctcgccgccggctccgccatcatgctcgcgtcctgggccaccaggatcgccgaggcgccccagacggacctcgatttctggaaggcgctgactcccgttgcgatcgcgcacacgatcgggcacgtggcggcgacggtgagcatggccaaggtggccgtgtcgttcacgcacatcatcaagagcggggagccggcattcagcgtgctcgtctccaggttcttcctcggcgagcacttcccggcgccggtctacttctccctcctccccatcatcggcggatgcgcgctcgccgccgtcaccgagctcaacttcaacatggttggattcatgggggcaatgatctccaacctggcattcgtcgtccggaccatcttctccaagaaggggatgaagggcaagtccgtgagcgggatgaactactacgcctgcctctccatcatgtcgctggtgatcctcctgcccttcgccgtcgccatggaggggcccaaggtgtgggcagcgggctggcagacagcagtcgccgagatcggtcccaacttcgtctggtgggtggcggcgcagagcgtgttctaccacctgtacaaccaggtgtcctacatgtccctggacgagatctcgcccctcaccttctccatcggcaacaccatgaagcgcatctccgtcatcgtcgcgtccatcatcatcttccagacgcccgtccagcccatcaacgcgctcggggccgccatcgccatcctcggaaccttcatctactcccaggccaagcagtagctagctcgagacccagctttcttgtacaaagtggt

SEQ ID NO: 146 - DNA, 713 bp, Zea mays
acaagtttgtacaaaaaagcaggctcctgcaggaccgcaagaaaaccacatgccccacctcgccgccactccccccacttcctccgccgccgccgtccccgccgcgggccgcatcgcgttccggcgcccgtggaacacgccacagccggaagcgctgcgcctgcgcctccgcctgcgcgcgcggggcgtccggcgtgaggacggcggcggcgtgcgcacggaggagcaggagcagacagcaccgcggacgttctacgacctgctcgggatctcagcggatgggagccccgatgatgttcgggcgtcctacaggcggctggcgctaaagtaccacccagacgtgtcccctccgggcgccgcggccgagaacacgcgccgcttcatcgaggtgcaggaggcctacgagacgctctccgacccaagccgccgcgccagctacgaccgtgcactcgcccgcggcgtctgccgcctcgccttctccgggcgccgttcccaatcccaccacgcctactaccattaccaggaacaggaagagggatctgggtggagaaggtcctgggaggaccagatcgccgagctgaagaggaggagcgtggcgaaggattcagaagagaacctgtcgtggggcgctcgcatgcggagaagggccgaggcgtcagcagcggagtagctgcgacaatagctcgagacccagctttcttgtacaaagtggt

SEQ ID NO: 147 - DNA, 1142 bp, Zea mays
aaaaaagcaggctcctgcaggaccatggacgccggcgacgacgaaccccccgttctcctcgaccgcgccgcccgcgcctcccgaggcaagaggataaccaagctgctcgaggacgaggtcgagcaggacgaggctttctggaaccaagaagccctcaaggatgaggagaacgatgacaactacgtggaagagccggatgctggtgacgaattcgacagtgattttggtgaagatgaatctgaaactgatgatgagccggagaaggaagtacgcgagagattacctatcaagaaacggctaatgtttcctggcaagacgctgaggaagaccagcgtcaagaagaagaaggcgaccccaaaaccagaagatggcacaaaagccgacaagtctgctgataagccgagttcatccacacaagcagatattcctgatgaactggaggctgagaaggccatccggaaatcaaccagaacgtcggtcatcgtgaggcaagctgaaagagaagcgatacgtgctgaaaaagaagcaacggccaagccgattaagagaaaaaaggagggagaagaaaaacggatgacacaagaggagatgcttttggaagcagctgaaacagagatcatgaacatgagaaatctagaacgtgtcctggcaagagaggaggaagtgaagaaaaaagctgttgttcataaggacacttatgagggtcctacagttcgttttttctcaagagatggggaatcacgtctggaattcataaatggagcatcgtttgggtccgaactttgtacaacatcatctccttatccggagaaacctgtttgtgtggtgacaggacttccagccaaataccgtgatccgaagacagggctgccttatgcaactatggaagcatttaaaataatccgggagagtttcctgaaagaggaggctgatagaaagcgtccgaacatgtcgaatatgggagagcttttcgaatcaataactggtggacacttgatgcctaagaagagaagggttgagataaggtctccgaacatgttaggaggctctaggcatggcgggcgtacctggcgaatacctgcttttgatatggtggacgaggactagctcgagcctgcagggacccagctttcttgtacaaa

SEQ ID NO: 148 - DNA, 960 bp, Glycine max
aagtttgtacaaaaaagcaggctcctgcagggccatgaagaagaggagcagcagcagcagcagcagttcagtttttgaggcgaatggagtggaggaacctcaacaaccttcatcctgtgcagcagcagcacttgatgagttgcataaagagaaaaatgagaatggagaagaaaccctcgtgccttccaatccctatcccaatcttgacgatggcttctatgaaatcgaaaccatacgccgtaagaggctacgcaagggtcagctccagtacctaatcaaatggcgtggatggcctgagactgccaacacttgggaacctcttgaaaatctacagtccgttcctgatctcgttgatgcttttgaggacagcctcaagtctggaaaacatcagaagcgcaagcgcaagcatgtggatgtgcttcaactcaccctactcaagaagcgctccgaacgttctaccacttcttacagccttagacatttcccacctctaactcccactaatgcaaatgattatgatccaaagctcagtgaacttaaggcaccaacacacactggggttcagctagataaccttgcaatacatttccaacaaccaattccaagcagaggagcaaaaaggagaaaatctgcttcttctgtcaagaggttcaagagagacaccgatgcagctgcacttcaaccaatttctgctcctatcaacatgcctgatgctaatactgcctgcaatattgtcaagattatcaagccaataggctattcagcttctttatctgacaacatgcacgatgttttagtcacctttatggctatgaggtctgatggaacagaagtgatggtggacaacagatatctcaaggcatacaatcctcttctgctgatcaatttctatgagatgcatccccggtatactcctacaccgtagctcgagcctgcagggacccagctttcttgtacaaa

SEQ ID NO: 149 - DNA, 1454 bp, Glycine max
aaaaaagcaggctcctgcaggaccatgaagggtggtggtgggaagagaaaggcttctacctcggaggctccgaacgatgttgttgttgttgttgctgctgcttctgctccttctgatgatgctgatttgggtgttggagatgtcgggggtgtgaaagttcaaaactttgagggaaacgagggtacccagttgcggaatactgaagaacaggaagaagaaccccaccacgtggagggtgatgaaggaggagaagacgaagaagattatgccgagggagaggaagaatatgaagaagaaaatggtggtgctgttgctgggggacaacaaggttttcctgctcttggtgaaaatttctttgaagttgaagccatacgtcgtaagaggttgcgcaagggtgaggtgcaatacttaatcaaatggaatgggtggcccgagacagccaacacttgggagcctctggaaaatctagagtctgttcctgatgttgttgaagcttttgaggagagcttgaagtccggaaaacatcgtaagcgcaaacgcaagcatgtagtgcatcatactcaacccaagaagcggctggagcgttcgacaactccttacagccttcggcgtttttcaactagtacagctgagaaccatacacagtctgctcctcctcttaatgatcctagccttccagatattcccgccttccctcacactgtgctgttttctgatgatgtgggaaatggtgctgaaggcagcagtcttagaaaagccacacccagtaatgctaacaggtctgcaaatggttcagaacaaaatattaaaaggaatgaggaaaatgattatgatcctgtgcttagtgagcttaaagctatgacttctaatgggaatgatgcagacaggcttgcaatacggattccagaagctaagggttctgggccttctggcagtaatggtcaaatggatgctaaatcaaagggggcttgcatggaaacaagtgaaagtgaccgctgccggggatccaaaaggagaaaatgtggttccgtaaagaggttcaagaaagaactatatgccaatgagcctgctaatgcggaaaatccagttagcatgcctgttggtacagctgagccagaacgaacaagagatgctggtagtggtggcaatactaatcatgccagacctgctagcaatattgtaaacattgtaaagccagtaggctattcagcttcagtagccagtggaatgcaggatgttttagtaacctttgtggcttcaaagtctgatggaacagaagtgatggttgacaacaagtatctaaaagcatttaatccacttcttgtagtaccctataccttcacattattacatttaattattgggtgtattatctttttggtccctcatcttttgaggatttctgtttttagtccttagctcgagcctgcagggacccagctttcttgtacaaa

SEQ ID NO: 150 - DNA, 810 bp, Zea mays
acaagtttgtacaaaaaagcaggctcctgcaggaccctcatcgctcctagctgcggagccgatggctggcgctgacgtcgacgtcgggacggagctccgtctcggcctgccgggaggaggcgccgatgcggccaaggctgccaagaggggcttcgaggacaccatcgacctcaagctaaagctgcccaccgccggcatggaggaagctgccgctgccgccgccgccaagccggagccggccgccgagaaggccaagaggcccgccgaggcgccggccgctgatgccgagaagccacccgcacccaaggcacaagctgtgggttggccaccagtccggtcataccgcaggaacgtcatgaccgtccagtctgtgaagagcaagaaggaagaggagcctgagaagcagcagtccgctgccaacgccggcggcaacggctccgccttcgtgaaggtcagcatggacggcgcgccctacctgcgcaaggtggacctgaagatgtacaacagctacacggagctctccgttgctctgaagaagatgttcagcaccttcaccacatccgggaacaacatgaatgagggaaaactggttgatccggtcagcggtgctgatgtggtcactacttacgaagacaaggatggcgactggatgctcgttggcgacgtcccgtgggagatgtttgtcgagtcatgcaggcgtctgaggatcatgaagagctctgaagccataggtcttgcaccaagaacgaaggacaagtgcaagaacaggagctgaatagctcgagacccagctttcttgtacaaagtggt

SEQ ID NO: 151 - DNA, 1697 bp, Glycine max
atgaccacttctttctctgaccttcttgcttctcccacagacaacaacaaaccaccacatggtggtggtggtggtttgtctgagagaactggctctggtgtccccaaattcaagtccacaccaccaccttctctgcctctctctccccctcccatttctccttcttcctacttttctattcctcctggtttgagccctgctgagcttcttgactcacctgttctccttaactcttccaacattctgccatctccaacaactggagcatttgttgctcggagcttcaattggaagagcagttccggggggaaccagcgaattgtcaaagaagaagacaaaggcttctcaaatttctcctttcaaacccaacaaggacctcctgcttcatccacagcaacatatcagtcttcaaatgtcacagttcaaacacaacagccatggagttatcaggagaccacaaagcaggataatttttcttcaggaaagagcatgatgaaaactgaaaaatcttcatccatgcaaagtttttcccctgagattgctagtgtccaaaataatcatagcaatgggtttcaatcggattatggcaattaccccccacaatctcagaccttaagcagaaggtcagatgatgggtacaattggaggaaatatggccaaaaacaagtgaagggaagtgaaaatccaagaagttattacaaatgcacataccccaactgccctacaaagaagaaggttgagaggtctttagatggacaaattactgagatcgtttataagggtactcataaccatcctaagcctcaaaatactaggagaaactcatcaaattcctcttctcttgcaatccctcattcaaatcccatcagcgctgaaatcccagatcaatcctatgccacacatggaagtggacaaatggattcagctgccaccccagaaaactcatcaatatcaattggagatgatgattttgagcagagttctcaaaagtgtaaatcaggaggggatgaatatgatgaagatgaacctgatgccaaaagatggaaaattgaaggtgaaaatgagggtatgtctgcccctggaagtagaacagtaagagaacctagagttgtagttcagacaaccagtgacattgatatcctagatgatgggtatagatggagaaaatacgggcagaaagtagtgaagggcaatccaaatccaaggagttactacaagtgtacacacccaggatgtccagtgaggaagcatgtggaaagagcttcacatgacctaagggctgtgatcacaacctatgaggggaagcacaaccatgatgttcctgcagctcgtggcagtggcagccattctgttaacagaccaatgccaaacaatgcttcaaaccctaccaacactgcagccactgccataagtcccttgcaagtgatccaacacagtgacaattcccatcagaaccaaagatctcaagcaccaccagaggggcaatcacccttcaccctagagatgctacaaagtccaggaagttttggattctcagggtttgggaatccaatgcaatcttacatgaatcagcagcaacaacaactatctgacaatgttttctcttccagagccaaggaggagcctagagatgacatgttccttgagtctctactatgctagctcgagcctgcagggacccagctttcttgtacaaa

SEQ ID NO: 152 - DNA, 1359 bp, Glycine max
atggttcccgcagactttgacaaccatgcaagtgaaaaatctactcaaatagatggtcaaggaaaagctcaagcttttgattcatcaccattagtaaaaaatgagtcagcatccccttcaaatgaattaagtctatcatcacctgttcaaatggattgctcaggaggtagtgcccgtgttgaaggtgatttggatgaattgaaccctagaagcaacataacaactgggcttcaagcatcacaagttgacaatagaggtagtggactttccgttgcagctgatagagtatctgatgatggatacaactggagaaaatatgggcaaaaacatgttaaaggaagtgaatttccacgcagttattacaaatgtacacatcctaattgtgaagtcaagaaactatttgaacgctctcatgatgggcagatcactgagataatttacaagggaacacatgatcatcctaaacctcaaccaaaccgccgttactctgctggaactattatgtctgtgcaagaagagagatctgataaagtttctttgaccagccgagatggcaatggatcctatatgtgtggccaggggtctcacctggctgagcctgacagtcaaccagagctatcgcctgtagcaacaaatgatggtgatctagatggtttgggggttttgtcaaaccggaataatgatgaggttgatgatgatgatcccttctcaaagcgaagaaaaatggaccttggaattgctgacatcactcctgtagttaagcctatccgggagccacgggttgttgtacaaactctgagtgaggttgatatcttggatgatggctaccgctggcgcaagtatgggcagaaggtggtgagaggcaatcctaaccctaggagttattacaaatgcacgaacactggttgccctgttagaaaacatgtggagagggcatctcatgatccaaaagctgtgattaccacatatgaggggaagcacaatcatgatgttccaactgcaaggaatagttgccatgacatggcaggaccagcaagtgcaagtggacagacaagaattaggcccgaagaaagtgataccatcagccttgaccttgggatgggaattagcccagctgctgaaaacacaccaaacagtcaagggagaatgatgctttctgaatttggggatagtcaaactcacaccagcaattccaatttcaattttgttcatactacgacagtgccagggtactttggtgtgctaaataacaactctaacccatatggttctagagaaaatccaagtgatggtccatctttaaaccattctgcttatccttgccctcagaacatagggagaatactaatgggtccttag

SEQ ID NO: 153 - DNA, 638 bp, Glycine max
aaaaaagcaggctcctgcaggaccatgagctctcatgctttaaacaccaatgtgaatgctcttgatcactttgagatacccgtaacgacgccgtttcaggacgtttctgcatcggtgccgtccatagcagcgttctgccggagttctagcttccggaacattttcttgacagagaattgggcggagctgccgttgaaggagaacgacaccaatgacatggtcatctacggtgctttgcgtgatgctgctgccaccggatggttccccgccaatggaaatgaggtgagtaatgttagtgtagctgtgaaaatggaaaatgagggtcaaaatagtaaaactacagccgcgcgtggcactcgcacgcctccaaagaaggggttgagctaccgaggcgtgcggaggaggccgtgggggaagtatgcggcggagattagggacactaagaggaatggtgtgagagtgtggcttggaacctacgaaaccgctgaggatgcagctttagcttatgatcgagctgcatttaagatgcggggctcaaaagctaagctgaattttcctcatttaattggctcggatcatgagccaattaaggttacgctaaagaaacattagctcgagacccagctttcttgtacaaa

SEQ ID NO: 154 - DNA, 1256 bp, Glycine max
aaaaaagcaggctcctgcaggaccatggatgcaattagttgcatggatgagagcaccaccactgagtcactctctataagtctttctccgacgtcatcgtcggagaaagcgaagccttcttcgatgattacatcgtcggagaaggtttctctgtccccgccgccgtcaaacagactatgccgtgttggaagcggcgcgagcgcagtcgtggatcctgatggcggcggcagcggcgctgaggtagagtcgcggaaactcccctcgtcgaagtacaagggcgtggtgccccagcccaacggccgctggggtgcgcagatttacgagaagcaccagcgcgtgtggcttggaacgttcaacgaggaagacgaggcggcgcgtgcgtacgacatcgccgcgcagcggttccgcggcaaggacgccgtcacgaacttcaagccgctcgccggcgccgacgacgacgacggagaatcggagtttctcaactcgcattccaaacccgagatcgtcgacatgctgcgaaagcacacgtacaatgacgagctggagcagagcaagcgcagccgcggcgtcgtccggcggcgaggctccgccgccgccggcaccgcaaactcaatttccggcgcgtgctttactaaggcacgtgagcagctattcgagaaggctgttacgccgagcgacgttgggaaattgaaccgtttggtgataccgaagcagcacgcggagaagcactttccgttacagagctctaacggcgttagcgcgacgacgatagcggcggtgacggcgacgccgacggcggcgaagggcgttttgttgaacttcgaagacgttggagggaaagtgtggcggtttcgttactcgtattggaacagtagccagagttacgtcttaaccaaaggttggagccggttcgttaaggagaagaatctgaaagctggtgacacggtttgttttcaccggtccactggaccggacaagcagctttacatcgattggaagacgaggaatgttgttaacaacgaggtcgcgttgttcggaccggtcggaccggttgtcgaaccgatccagatggttcggctctttggggttaacattttgaaactacccggttcagatactattgttggcaataacaataatgcaagtgggtgctgcaatggcaagagaagagaaatggaactgttctcgttagagtgtagcaagaaacctaagattattggtgctttgtagctcgagacacagctttcttgtacaaa

SEQ ID NO: 155 - DNA, 2189 bp, Saccharomyces cerevisiae
atggaacagacacaaacagcagagggcactgacttactaattggtgacgaaaagaccaacgatttaccttttgtgcagttatttctggaggaaataggatgcactcaatacctggatagctttattcagtgcaaccttgtcacagaagaagaaattaagtatctcgacaaggatatcctcattgctttgggtgtaaacaaaataggagacagactcaaaattttaaggaagtcaaaatcgttccagagagataaacggattgaacaggtgaatagattgaaaaacctgatggaaaaagtaagctctctatccactgctacgctatcgatgaattcagaattgattcctgaaaagcactgtgttatatttatcttaaacgatggttccgctaagaaagttaatgtaaatggttgctttaatgcagattctattaagaaaaggctaatcagaagattgccacatgaattattagccacaaactccaatggagaagtaactaaaatggtccaagattatgatgtgtttgtcttagattataccaagaacgtactgcatttgctatatgacgtggaattagtcactatttgccacgcaaatgatcgtgttgagaaaaataggctaatttttgtttccaaagaccaaacaccaagtgataaagctatatccacatccaaaaaactatatctaagaacgttgagtgcattgagccaggttgggccatcctcgtcaaatttgttggcacagaacaaggggatttcgcataacaatgctgaagggaaactccggatcgacaacacagaaaaggacagaattagacagatttttaatcagaggcctcctagcgaatttatttctaccaatttggccggatattttcctcatacagacatgaagcggttgcaaaagacgatgagagagtcatttcgccattcagcaaggctaagcattgctcaaagaagacctttaagtgcagaatcaaataatatcggtgacatactattgaaacactcaaacgctgttgatatggccctattacaaggattagatcagacaagattaagcagtaaacttgacacaactaaaattccgaagcttgcccataaaaggccagaagataatgatgccatatctaaccagttagaactattaagtgtagagtctggtgaagaagaagatcacgatttctttggggaggacagtgacattgtttcattaccgacgaaaattgccacgcccaagaattggttaaaaggtgcttgcattggatcaggcagttttgggagtgtttacttgggcatgaatgctcacactggtgaactaatggcagtaaagcaagtggagataaaaaataataacattggtgttcccacagacaacaataaacaagccaattctgatgagaataatgagcaggaggaacaacaagagaaaatagaagatgttggggcggtaagtcatccaaaaaccaatcaaaatattcacagaaagatggttgatgctttacagcatgaaatgaatttattgaaggagttacatcatgagaacattgttacttattatggtgcttctcaagaaggcggaaatttaaatatttttcttgaatacgttcctgggggttcggtttcctccatgctgaataattacggtccatttgaggaatcactgattactaatttcactaggcaaatactgattggggttgcgtatttgcataagaagaacattattcacagagatatcaagggtgcaaatattttgattgatatcaaaggttgcgtaaaaattactgattttggtatttcaaaaaaattatcacctttgaataaaaaacaaaataagagagcttctttgcaaggttccgtattctggatgtcaccagaggtggtcaaacagaccgctactactgctaaagcggatatatggtctacaggatgtgttgtcattgaaatgtttaccggtaagcatcctttcccagatttttctcaaatgcaagcgatcttcaaaataggcacaaacacgacccccgagataccttcctgggctacgtcagaaggaaagaatttcttaagaaaggcatttgagttggattatcaatacaggcctagtgcccttgaattgctgcagcatccatggctggatgcacacataatttagctcgagcctgcagggacccagctttcttgtacaaa

SEQ ID NO: 156 - DNA, 2702 bp, Glycine max
atgcttacatggtggggaaaatcatcatcaaaagaaaccaagaagaaagcaaataaggaaagtttctttgacacactgcaccgaaaacttagaatttcatccaaaggtaaagtaagcattagatctggaggatcacgtagacattgcaatgacacaatttcagagaagggagatcattctccatgtggatcaagatcgccttcaccttccaaagtggcaaggtgtcaaagttttattgataggcctcatgctcagccacttccacttcctggtctgcatccttcaagtgtaggccgagtagattctgaaattagcatatcatcaaaatcaagattggaaaaagtctccaagccattatcgtttcttacgcttccaacacctggatgcatacgttgtaggccaaaccctgcagatttggatggagatatggtcactgcttcagtctttagtgattgctctgctgacagtgatgagccggcagactcacacaatcgtagtcctctagcaattgactgtgagactgggactagaactgctgctggcagtccttccagcttaatgctcaaggatcaaccacctgctgtttcccaactgaattcaacgggagtaaagaaaccaggaaatattctaagtaatcatatgtcttctacttcaccaaaacgtaggcctttacgcaaccatgttccaaatcttcaggttcctcctcatggtgccttctatagtgctcctgatagttccttgtcaagtccatcaagaagtccattgagggcatttggcacagatcaggtgttgaattctgcttttttggctggaaagccatatccagagatcaattttgttgggtctgggcattgctctagtccaggttcaggtcacaattctgggcacaattcaatgggaggggacatgtcaggaccgttactttggcaaccaagcaggggtagccctgagtattctccagtacctagtcccagaatgactagccctggtccaagctctagaattcagagtggagcagtcacacctattcatcccaaagccgggggaacacccacagaatcacagactcatcgattgcctcttcctcctttgtcagtttctaattcctcactgttctctcattcaaattctgcagcaacatctccgtctatgccaagaagtccagctagagcagataatccaaactctggctcacgttggaagaaagggaagctgcttggcagcggctcatttggacatgtctatcttggcttcaatagtgaaagaggcgaaatgtgtgcagtgaaggaggttaccctgttttcagatgatcccaagtctatggaaagtgcgaagcaatttatgcaggaaattcatttattaagccgcttacagcatccaaatattgtccagtattatggttctgaaacagtcgataacaagctttacatataccttgagtatgtatctggaggctccatacataaacttcttcgagaatatgggcaatttggtgaactagttattcgtagttatactcaacaaattttgtcagggcttgcttatttgcatgctaaaaatactctccatagggatatcaaaggagcaaatatactggtagatccaactggtcgggtcaagttggcagactttggcatggcaaaacatataacagggcaatcgtgcccattgtcattcaagggaacaccttactggatggctcctgaggttataaaaaattctaatggatgcaaccttgcggtggatatatggagtcttggatgcacagttttggaaatggctacaaccaaacctccttggtttcagtatgaaggggttgctgccatgttcaagattggtaatagcaaggaactcccaaccatccctgatcatctctcaaatgaaggaaaagattttgttaggaaatgtcttcagcgtaacccacatgatcgtccttcagccagtgaattgttggaccacccctttgtaaaaaatgctgcacctttggaaagacctattccggctcctgaagctttggaccctgtttctgggattacacagggagcaaaagctctggctattggacaaggaaggaatctttctagcttggattcagatagactttctgttcattcttctagatttttgaaaactaatcctcatgaaagtgaaatccatattccaaggaatatatcttgccctgtttctcccattggaagcccacttttgaggtcaagatcaccacagcacaggaatgggaaaatgtctccttctcctatatctagccctcggactgcttctggggcatctacacctcttgctggtggcagtggtgccattccatttggtaatcactctaaacagtccatttactttcaagagggttttggaagcattcccaagtcctcaaatggtgtctacatgaatggccattctcatcacgactcgaatgttgacatttttcgaggaatgcaaatggggtctcacatttcaccagaactggtttccagtgaaaatgatgttttggttaagcagtttgcaaggcatcctcatgcagagccatatgattttcagtcggtcttggcagatcgtgttggccggcagctgctgggggaacatgttaagattaacccatccattgatctcagtcccaactcgtctttgcttagccggccaaacggtttatagctcgagcctgcagggacccagctttcttgtacaaa

SEQ ID NO: 157 - DNA, 1024 bp, Glycine max
acaagtttgtacaaaaaagcaggctcctgcaggaccatgaataagagtgggggaggagagatgagtaagtggccgttcacaatgtctcagtggcaggaactggaacatcaagctttgatttacaaatacatggtggctggtcttcctgtccctcctgatctagtccttcccattcagaacagcttccactccatttcccaaaccttcttgcaccatccctctaccaccatgagttattgttccttctatgggaagaaggtggacccggagccaggacgatgcaggaggactgatgggaaaaagtggaggtgctccaaggaagcctacccagactccaagtactgtgagcgacacatgcaccgtggccgcaaccgttcaagaaagcctgtggaatcacaaactatgactcagtcatcatctaatgtgtcatcattgactgtaactgctggcagcagcagcagtgcaactggaaatttccataaccttaccaccacaaatgcatatggtaatccccaagggactggttctggatcagaccaaacccactatcacatggattccattccctatgggatcccaagtaaagaatacaggtattttcaaggacctaaatctgagggaggtgaacatagtttcttgtccaaaactttaggaagcaacaaggttcttcacatggagtcacagatggataacactttgatgccaaccagtggagttgcctcattctctacattgagatcaaataataattccatgttgcagggtgattatctgcagccttctttcttatctagtgagtatgcctcagcagaaactgtgaagcaagagggtcagttccttcgacctttctttgatgaatggcctaaaaggagggactcatggtctggtctggaagatgagggatccaaccacactcaactctcaatatccattcctatgtcagcatcaaatttctctacaactagctctcattccccacatggtgagatttagctcgagacccagctttcttgtacaaagtggt

SEQ ID NO: 158 - DNA, 1143 bp, Glycine max
atggctgaggataaggagatgtctacctctgtcatcaatgggaatgattccctaactggtcacatcatatctacaactattggaggcaaaaatggggaacccaaacagactattagctacatggcagaacgggttgtaggaactggatcatttggaatcgttttccaggcaaaatgcttggaaactggggaggcagtggcaattaaaaaggttttacaagacagaagatacaagaatcgtgaactgcagttaatgcgtgtgatggatcatccaaatgtgatctctttgaagcattgtttcttttcaactacaagtacagatgaactttttctcaatttggtgatggagtatgttccagagtccatgtatagagtcttaaagcactatagcaatgctaatcaaagaatgccaatcatctacgtaaaactttatatgtaccagattttcagggggttggcttacatccacactggtcccaaagtttgccacagagatttgaagcctcaaaatatactggtggatcctcttacacaccaagtgaagctatgtgattttggaagtgcaaaagttctagtcgaaggtgaagctaatatatcatacatatgttcacgattctatcgagcaccagaacttatatttggggccacagagtataccagttcgattgatatttggtcagctggctgtgttcttgctgaacttcttttgggccagccattattccctggcgaaaatgcagtagaccagcttgtacatattataaaggtgcttggcacacccacccgagaggaagtacgctgtatgaatcccaattacaatgactttaggtttccacagataaaagcacacccatggcacaagatattccacaaaaagatgcctccagaagctattgatcttgcatcccggcttttgcaatactccccaagtctccggtgcactgcgcttgaagcatgtgcacatcctttctttgatgaacttcgtgaacctaatgctcgcttgccaaatggtcgtccatttccccctctatttaacttcaaacaggaattatctggagcatcttccgagcttgttaataagttgatacctgaccatgtgaagcggcaaatggggatacagtttatgcatctgggaggatcgtag

SEQ ID NO: 159 - DNA, 1212 bp, Zea mays
atggctaccgcgctcggtggggagcccaaccccaccgccgacgccatggaggtcgaccctccgcgcgcctccgccgacgagaagcatgtcgccactattattgcggggggtagtgatgcagtgacaggccacataatatcgactacgattgggggaaagaatggtgaaccaaagaggaccatcagctatatggctgagcgagttgttggaactggatcgtttggggttgtcttccaggcaaaatgcattgagactggtgaaactgttgcaattaagaaggttctacaggacaaaagatacaagaatagggagttacaaataatgcgatcaattgaccattgcaatgtcatttccctgaagcattgtttcttctctaccacaagtagggatgaacttttccttaacttagtcatggagtttgttccagagtcactttatcgcgttctgaaacactacaaagacatgaagcagaggatgccccttatatatgttaaattgtatatgtaccagatattccggggactagcttatattcatactgtaccaggaatttgtcaccgagatattaagcctcagaatatcttggtggatcctctttcccaccaagtcaaggtttgtgacttcgggagtgctaaaatcttgattaaaggtgaagctaatatatcatatatatgctcacgctattatcgtgctcctgagctcatatttggtgcaactgaatacacaacatctattgatatatggtcagctggatgtgttcttgctgagcttcttcttagtcaaccattatttcctggggaaagtgctgtggaccagctggttgagattatcaaggttttgggcaccccaacacgagaggaaattcgttgtatgaatcccaactatacagaattcaagtttcctcagataaaagcatgtccatggcacaagatcttccacaagagaatgcctccagaagcaatagatcttgtttcccgtcttcttcagtattcgccgaatctgcgatgtagtgcacttgaggcgtgtgctcattcattctttgacgaattacgagaatcacatgcaagactccctaacggacgcccatttcctccactattcaactttaagcaggaactagcaaacgcaccaccggagcttgtcagcaggctattaccagagcatgctcgacggcattcaggattcggttccttatttgggagtggaccgtag

SEQ ID NO: 160 - DNA, 1541 bp, Zea mays
aaaaaagcaggctcctgcaggaccatggacccgtacaagcatcgcccgtcgagcgccttcaacgccccgtactggaccaccaactccggcgcccccgtgtggaacaacgacagctccctcaccgtcggcgcacgaggtcccatcctgctggaggactaccacctggtggagaagctagccaacttcgaccgcgagcgcatcccggagcgcgtggtgcacgcgcgtggcgccagcgccaagggcttcttcgaggtgacccacgacatcacccacctgacgtgcgccgacttcctgcgcgcgcccggggtgcagacgcccgtcatcgtccgcttctccacggtgatccacgagcgcgggagccccgagacgctgcgcgacccgcgcgggttcgccgtcaagttctacacccgggagggcaactgggacctggtgggcaacaacttccccgtcttcttcatccgcgacggcatcaagttcccggacatggtgcacgcgctcaagcccaacccgcggacgcacatccaggacaactggcgcatcctcgacttcttctcgcaccacccggagagcctgcacatgttctccttcctcttcgacgacgtcggcatccccgccgactaccgccacatggacggatccggggtgcacacgtacacgctcgtcagccgcgccggcaccgtcacctacgtcaagttccactggcgccccacctgcggcgtgcgctcgctgatggacgacgaggccgtcgccgttggcggcgccaaccacagccacgccaccaaggacctcacggacgccatcgcggcggggaacttccccgagtggacgctctacatccagaccatggaccccgagatggaagaccgcctcgacgacctggacccgctggacgtgaccaagacgtggcccgaggacgcgttcccgctgcagcccgtgggccgcctggtgctcaaccgcaacatcgacaacttcttcgcggagaacgagcagctggccttctgcccgggcctcatcgtccccgggatctactactccgacgacaagctgctgcagaccaggatcttctcctactccgacacgcagcgccaccgcctcggccccaattacctgctgctaccggccaacgcgcccaagtgcgcacaccacaacaaccactacgacgggttcatgaacttcatgcaccgccacgaggaggtcgactacttcccctccaggtacgacgccgccaggaacgcgcccaggtaccccatcccgaccgcccacattgccggccgccgagagaagactgtgattagcaaggagaacaacttcaagcagcccggggagaggtaccgcgcgatggacccagcaaggcaagagcggttcatcaccagatgggtcgacgcgctctccgacccccgcctcacccacgagatcaggaccatctggctctccaactggtctcaggccgacaggtctctgggccagaagctcgcgagccgcctcagcgccaagccgagcatgtagctcgagcctgcagggacccagctttcttgtacaaa

SEQ ID NO: 161 - DNA, 343 bp, Zea mays
acaagtttgtacaaaaaagcaggctcctgcaggaccttgcaccacaaggtcgaggatgtcttgcaactgcggatcaagctgcggctgcggctcaagctgcaagtgcggcaagaagtaccctgacctggaggagacgagcaccgccgcgcaggccaccgtcgtcctcggcgtggccccggagaagaaggccgcgcccgagttcgtcgaggccgcggcggagtccggcgaggccgcccacggctgcagctgcggtggcaactgcaagtgcgacccctgcaactgctgatcacatcgatcgacgaccatggatagctcgagacccagctttcttgtacaaagtggt

SEQ ID NO: 162 - DNA, 1221 bp, Zea mays
atggaggcgccgccggtaccggagctcatggatctggacgcgccccctcccgccgcagccgacgccgcagccgcggcgccggttccccctgccgtcagcgacaagaagaaggaaggggaagggggagacactgttacgggccacatcatctccaccaccatcggtgggaagaacggcgagccgaagcggaccatcagttacatggcagaacgtgtcgtgggtacgggctcatttgggatcgtcttccaggctaagtgtttggagactggagagaccttcgccattaagaaggtgctgcaggatcggcgttacaagaaccgggagctgcaacttatgcgtgccatggagcaccccaacgtcatctgcctgaagcactgcttcttctcaacaacgagcagggacgagttgtttctaaaccttgtcatggaatttgtccccgagaccctgtaccgtgtcctgaagcactacagcaacgcgaaccagaggatgcctcttatctacgtcaagctctacatgtatcagcttttcagaggcctagcctatattcataatgtaccaggagtctgccatagggatgtaaagccacaaaacgttttggttgatcctctcacccaccaggtcaagctctgtgactttggtagcgcaaaagtcctggttcctggtgaaccgaacatatcttacatatgctctcgttattatcgtgctccagagctcatatttggagcgacagagtatacaacttcaatagacatatggtcagctggttgtgttctagctgagttgcttcttggtcagccactgtttccgggagagagtgctgttgatcagttggtagagattatcaaggttcttggtactccaacccgtgaggagatacgatgcatgaatcccaactatactgagttcaggtttcctcagataaaggctcatccgtggcacaagattttccacaagagaatgcctccggaagccattgaccttgcttcccgtctccttcagtattcgccaagtcttcgctgctctgctcttgatgcatgcgctcatcccttctttgatgagctgcgggcgccgaatgcacgtctaccaaacggccgtccattccctccgctctttaacttcaaacatgagctagcaaatgcctccccggacctcatcaacaggcttgtaccggagcacattagacggcagaacggtgtcaactttgggcatatcgggagctag

SEQ ID NO: 163 - DNA, 2136 bp, Zea mays
aaaaaagcaggctcctgcaggaccatggccgccgtcgcgccgcccccggcccccgcgccggcaccggttccggctcctgctcctgccaccgtccctgtcgcggatcaaaccacggatctgctgcagaagctgtcgctcgactcgcagcccaagccggcggacgcaacacagcctgctgctgccaccgccaaaaagcagggcgccgcggcgagccagccgctgagcgtggcgatcccgccggagccgtccatcacgccggtgatccaagactttacggatcccaacctgttttatctaccagcgtattactacggaggctacgacagttccatgagcgagtgggatgattatccgaggtatctaaattcagatggagtggagattgccccagcggtatacagcgatatttatggatatgggtatgctccttacggggcatactctcctgccacttccccagttccaacagttgatggtcagatgtttggtgcacagcattaccagtatccaactgcttatttccagcctcctacaccagttccttctaccactcaaagtaacctacagtcttctaaaaatcctgaaaagccagcagctaaagcagatccagccaagaccactaacggtgttcccaatggtactgctcacagtaacagtggaactgtaccccttgcgtcgagccaacaaaattcatcactgacgcctgatggaacttatagggcgcccttgctaggtggagttccttctgctggttacctggacacgacttatgggtatgacagcacaggggcacacttcgcatggtatgatggctctgcttatgcaaatggacaacaaagaacagctacaactaaccattttccatcctcaacatttggtaatggttccccagcaagatatcagaacaagagcaccaccacaccgcagatgggtatgcagaatagaagacctacaactacatcaccagctcctacttatcccaataggatgtaccctagctcccgaccgtacacccagtatgggaattcaataaaaactggccttccctacgggagcaacggttatgattccaggatatatgggcgatggggtcttggtatggataacaggtacaggcctaggggccgtaatggatattatggttatggcaacgagagtcaggatggaacaatcgagttaaacagaggtcctagatctggccgtttcaagaaccagaaattgtacggccatactgtcactattgctgtgaaagggcagagccttccttctggtgaaagcaaggatgatagtgccgtgcctgatagagcacagttcaatagagacgatttccctgttcagtatgatgctgcaaagttctttgtcattaaatcgtacagtgaggatgacatccacaagagtgtaaaatacaatgtgtgggcaagcacaaccaatggaaacaagaagctcgatgctgcttatcaagaagctcagtcgaagggttctgcgtgccctatattcttgtttttttcagtgaatacaagtgggcagtttgttggtgttgctgaaatgacaggggctgtcgattttgagaaaaccctggggtattggcaacaggacaagtggaatggttccttctctgttaagtggcacattgtcaaggacgtgcctaacaacattctcaaacacatcatcctagagaacaacgagaacaagcctgtcacgaacagccgtgacactcaagagatacacctagaacaaggccttcagatgctcaagatatttagggagcatgtcagcaagacatccatcttggatgacttcgccttctatgagagtcgccagaagctgatgcaggataagaggtcgaaacagcagcaggtccaaaagcaggtctgggacagtaggacccccatttctgtcactggaagcgagcaacagcaggaagctgctaatgggaagcccaatccgtctgtaccaaacggtgtccctgcagaggtgaaggcggcgaaggcttctgcagagaacggcaccgccactccagctatttcctacgcggcaaaggtggcccaagcagcaacagagaaacctgtgctcgccaacggagacgctaagaccggttagctcgagcctgcagggacccagctttcttgtacaaag

SEQ ID NO: 164 - DNA, 1101 bp, Zea mays
atggcgttccctcagatctcccgcagagccctcggcctcctgctcgtcatcgccgcagcggccgcgatcgtctcgcccgccaccgccgacgaggtggtggccctgacggaagccgacttcgagaaggaggtcggccaggaccgcggcgccctcgtcgagttctacgcgccatggtgtggccactgcaaaaagcttgcccccgagtatgaaaaacttggcgccagcttcaagaaggctaaatctgtactgatagcaaaggttgactgtgatgagcacaagagtgtatgcagcaagtatggagtttctgggtaccccacaattcaatggtttcccaaaggttccctggagccaaagaagtatgagggtcaacgttctgtggaagcccttgcagaatttgttaacagcgaagcaggtaccaatgtcaagatagctgccattccttcaagcgtcgtggttctgacttcagagacctttgactcaattgtccttgatgaaaccaaagatgtccttgttgagttttatgccccatggtgtggtcactgcaagcatcttgctccgatttatgagaagctggcttcagttttcaagcaggacgacggtgttgtgattgccaatattgatgctgacaagcacactgacttggctgaaaaatatggtgtttctggtttccctacattgaagttcttccctaagggaaacaaagccggtgaagattatgatggtggccgggacttggatgactttgtcaagttcattaatgagaagtgtggcaccagccgggatccaaagggccacctgaatcaagaggctgggcttgtgccaagcttgaatcctcttgtgaaggagtttctcaatgctgctgatgacaagcggaaggaagtcctctctaaaatagaagaggatgttgctaagctcagcggttctgcagccaagcatggaaagatatatgtgacagctgcaaagaagatcatagacaagggctctgactacactaagaaggagactgagaggcttcaccgcatgctggagaagtcaatcagtccttccaaagctgatgaattcatcgttaagaagaacattctttcgatattctcttcgtag

SEQ ID NO: 165 - DNA, 597 bp, Zea mays
atgtttagcgggacgcagcagaagtgcaaggtgtgcaccaagacggtgtacccgatggaccagctctccaccgacggcgtcgtcttccaccgctcctgcttcaagtgccagcactgcaagtctaccctctcactgagcaactattcctcgttcgaaggagtgccgtactgcaagacccatttcgagcagctgttcaaggagaccgggagttacaacaagagcttccaatcacagtcacctgcaaagattactccggaaaagttggcccctgagctgaccagatcaccaagcaaagctgcaaggatgttttcaggaacacaagacaagtgtgcgacttgtggtaaaactgcgtatcctcttgagaaggtaacagtcgaagagaagtcctaccataagtcatgcttcaaatgctcccacgggggctgcgcgattacaccttccaactatgcagccttggagggcatcctctactgcaaacaccatttctcccaacttttcaaggagaagggaagctacaaccacttgatcaagtgcgcgtccgtcaagcgcgctgctgaagcacagccagaacaaccggcctctgattcctcctcctag

SEQ ID NO: 166 - DNA, 1010 bp, Zea mays
aaaaaagcaggctcctgcaggaccatgttagattgtgtggcacagcgtgaaacaattttgcctttcgtactctatatccagaaaacattgcgcaggaggcctttcttaataaaaaatcttgaaaatgttatgcgcaaattcctccaatccttggagttctttgaggaaaatgagaggaagaaactcgccatattcacagcccttgcattttctcaaaagctgtcagggcttcctccggagacagtgttccagccattgctcaaggataatctggttgccaaagggatagtactttcattcataactgagtttttcaaggagtacctgaaggaaaacaccttggatgatttgattgcgcttttgaagaaaggaaaaatggaggacaatctgttggacttttttccatcagctaagagatcctctgaggctttatctgagcatttcatcaaagaaggtctgactagccttgttgagtacaatgaaaagaagatgtttgaagttaaacttaaagagataaagtcaacactgaccactatgatcaatgatgaggctgcaatacctgaagtgattgagactgtcaaacagcaagttaaggatgctaaatttcctgatctagaggtcattcgcatgttgtgggatgtgctcatggaggctgttcagtggtctgggaagaaccagcaacagaattctaatgcagcacttcggcaggtgaaagcatgggctgagcttttgaatgctttttgcacgagtggcagactcgaactggaacttatatacaaagtacagacacagtgctatgaggatgctaagctgatgaagctgtttcctgaaatcataagaacactgtatgaccaagatgtcctagctgaagatactgtcctgctttggttccgtaaaggttcaaaccagaagggcaggcaatctttcgtgaaagctctggagccgtttgtcaaatggctcgaggaggctgaggaggaagaatagctcgagacccagctttcttgtacaaa

SEQ ID NO: 167 - DNA, 1002 bp, Glycine max
atgtcggaagcaccaccgtctcagccaccgcctccaaccgccaacgcgtcaccaccgccgtactggtgctaccactgcgagaagcgcgtctccatcgaaacgctcgcgaatctccccgacgtcgtctgcggtgagtgcaagaacggcttcgtggaatccatccacacgccgtcgcgctctcgctccccctccgcctcctccgacgacccctacttcggctcgcagttcctccaggtccttcgcctaatcgctcagtcggcgcgtgacgacgacgcgtcgcctccgccgccgccaagccgctctccggagaacgatttcctcaggatcgagctcggtggctgggacaacgatgaggagaacgacaacgacaacaacgacgacgaggagttcgaggaacacgaggaggcagaggatcgctccggcaatgaggatccgcacggaagagacgacgaggatctgagaagaaggaggcgcgagctgcttcggcttcggattagggatttggcgacgcgcacgaggagcatgcggaaccggatcttggattgggccgagattctgatgggccttgaggacaattccatcgagttccgcctccagctgccggaatccgaccgctacgtcgggaatcccgaggattacgtcgacgcggcggagtacgaggcgctgctgcatacgcttgcggaaagcgacggcggaggtaggagaggagcgccgccggcgtcgaaggcggcggtggaggcgttgccgacggtgaaggttgcgtccgaaagcgaagccgtggcgtgcgctatatgtaaggatttgctcggtgttggagacttggcgaagaggttgccgtgcgggcatgggtatcatggagattgcattgttccttggttgagttctcgaaattcttgccctgtttgcaggtatgagctaccaacggatgataaggaatatgaggaagagagagtggttaactctgcttcgagttccggtggagatggaagtgccattgcttag

SEQ ID NO: 168 - DNA, 491 bp, Arabidopsis thaliana
atggccatggagctcgagcttgatgatgatgtcttctttgctgacataagcaagcaactcaatctcttaatcacagatgaagatgaacaaaaccctatttcactttcctcttctgtctctttccagggtttgttcagaggaaactaccaaacatcagcaacaccatatatgatgtacaatgagcagatcaattacaacgtaattcgagagagcaaaggaacaggagtgtttatcccaagatcttctcagccaagaaggaaacataatcatcatcctcatcagaagaagcaagggagattcatcggttcctttatccccaagcaacagtttcctcatcatggccatgacaacaatcttacaactctcaacaacaacaaccaagaaagcatcacctttcatcatgcttctactaacccaagaagaacctacagagatgcagcatctcttttcacttagctcgagcctgcagggacccagctttcttgtacaaa

SEQ ID NO: 169 - DNA, 672 bp, Zea mays
atggcggcgctcctagcccggcaggcagcgcaggcgctccgcgcgagacagtcggcgcagctcgggccgacaacgtcggcgatgcaggggcacctccgtacctacatgaacgcggggattcccaagcggttcaaagaggaagaggagaaagaacagcttgcaaaagatatcgcaaaagattggaatgctgtgtttgaaaggagcatcaatacattgtttttgactgaagtggtccgtggcttgatgctaactctcaagtacttcttcgagagaaacgttacaattaactatccgtttgagaagggtcctctgagtccccgcttccgtggtgagcacgctctcagacgttacgaatctggggaagagcgttgcattgcttgtaaactatgcgaagctatatgcccagctcaggcaattacaattgaggctgaagaacgtgaagacggcagtcgccgaaccacaaggtatgatattgacatgaccaaatgcatttactgtgggttctgccaagaggcttgcccagtcgatgctattgttgaggggcctaactttgagtttgctactgagacacacgaggaactactgtacgacaaggagaaattgctcgagaatggtgaccgctgggaaactgagattgctgagaacttgagatctgagagcctttatcgctag

SEQ ID NO: 170 - DNA, 669 bp, Glycine max
atggctgcaatcttagctcgaaaatcactccttgctcttcgtgcgcgccaattggctgtaagcggtcaagggctgcacagctcccaatactatggccttcggttaagtgcacactccttctctaccaaaagagaggatgaggaaagggagcaactcgcaaaggacatttcaaaggattggagttctgtctttgaacgtagcattaacactctctttctcactgaaatggttcgaggactaatgctgactctgaaatacttctttgaaacaaaagttacaatcaattatccatttgagaaaggccctttgagccctcgtttccgtggtgaacatgcactccggcgatatccaacaggggaggaacgttgtattgcttgcaaactttgtgaggctatatgtcctgcacaagcaatcacaattgaggctgaggagcgagaagatggcagccgcaggacaactcggtatgatattgacatgaccaagtgcatctattgtggattttgtcaagaggcatgccctgttgatgccattgtcgaaggaccaaactttgaatttgctactgagactcatgaggagcttttatatgacaaggagaagctgcttgaaaatggggaccgatgggagactgaaattgcagagaacctgagatctgaaagcctttatcgctag

SEQ ID NO: 171 - DNA, 464 bp, Zea mays
aaaaaagcaggctcctgcaggaccatgcgcaaacatcgaatcgtctcgctcgtggctgccctgctcatactgcttgccctcgccgtatcgtccacccgcaacgcacaggaggattccatggccgacaacaccgggacgttggcgggcggcatcaaggacgtgccggggaacgagaacgaccttcacctccaggaactcgcccgcttcgccgtcgatgagcacaacaagaaggccaatgctcttctggggttcgagaagcttgtgaaggccaagacacaagtggttgctggcacgatgtactatctcactattgaagtgaaggatggcgaagtgaagaagctctacgaagctaaggtctgggagaagccatgggagaacttcaaggagctgcaggaattcaagcctgttgaagagggtgctagcgcctagctcgagcctgcagggacccagctttcttgtacaaa

SEQ ID NO: 172 - DNA, 738 bp, Glycine max
atgagagcatcaaactcttcttcttcgatttccattgcgaagcgttactttttcttcttccttctcttcattttcttcgctcttcgatcttcgtccggggactgctccgaataccaccaccaccactcgccgatggccacgatcggaggcttacacgactcccaaggctctcaaaacagcgtcgaaaccgaagccctcgctcgattcgccgtagacgaacacaacaagaagcagaattcgcttctggagtttgctagggtggttagggcacaggaacaggttgttgctggtaccctgcatcaccttactcttgaggctattgaggctggtgagaagaagctctatgaagccaaggtgtgggtgaaaccatggctgaatttcaaagaactccaagagttcaagcctgctggtgatgcaccatcgtttacctctgctgatcttggtgtcaaaaaggatggtcaccaaccaggatggcaatctgtgccaacacatgaccctcaagttcaggatgcagcaaatcatgcgatcaagaccatccagcaaaggtctaattcactagtaccctatgagcttcatgaggttgctgatgcaaaggctgaggtcattgatgattttgctaagtttaatctgcttctcaaagtcaagaggggacagaaggaagagaagtttaaggtagaggtacacaagaataaccaaggggggttccatctaaatcagatggaacaagatcattcctag

SEQ ID NO: 173 - DNA, 1645 bp, Zea mays
acaagtttgtacaaaaaagcaggctcctgcaggaccggagaggggccatggaaaacccggcgccgccgaccaacccggcctccgccacgccgtcgccgtcgcggcagctgccggacttccagcagtcggttcgtctcaagtacgtgaagctggggtaccattacctcatcacccacggcatgtacctgctgctcaccccgctgatggtgctcgtggccgtgtacctctccacgctctccccgcgcgacgtcgccgacctgtgggcccacctccgcctcaacctcatctccgtgctggcctgctccacgctcctcgtcttcctcggcacggcctacttcctcacccgcccgcggcccgtgtacctggtcgacttcgcctgctacaagcccgggccggagcgtcggtgcacgcgcgacaccttcatgcgctgctccaggctcaccggctgcttcactgacgccagcctcgagttccagcgcaagatcctggagcgctcggggctgggcgaggacacgtaccttccccccgccgtcacgcgggtgccgcccaacccgtccatggacgaggcgcgcgcggaggcgcgggaggtcatgttcggcgccgtcgacgagctgctcgccaagacgggggtcaagcccaaggacatcgggatcctcgtggtgaactgcagcctgttcaacccgacgccgtcgctgtcggccatggtggtcaaccactacaagctgcgcgggaacgtggtgagctacaacctcggcgggatggggtgcagcgccgggctgctgtccgtggacctcgccaaggacctgctgcagacgcacccggggtcgtacgcgctggtcatcagcacggagaacatcacgctcaactggtactcggggaacgaccgctccaagctggtgtccaactgcctgttccggatgggcggcgccgcggtgctgctctcgaatcggcggtccgaccggcggcgggccaagtacgagctggtgcacacggtgcgcacgcacaagggcgcggacgaccggtgcttcggctgcgtgacgcaggaggaggacggcgagggcgtcgtgggcgtgtcgctgtcgagggacctgatggcggtggcgggcgacgcgctcaagacgaacataacaacgctgggcccgctggtgctgccgctgtcggagcagctgctgttcatggcgacgctggtcgccaagaagctgctcaagatgaagaaggtgaagccgtacatcccggatttcaaactggcgttcgagcacttctgcatccacgccggcggccgtgccgtgctggacgagctggagagcaacctggcgctcacggattggcacatggagccgtcgcggatgacgctgcaccggttcgggaacacgtccagcagctcgctctggtacgagctggcctacagcgaggccaaggggaggatccggcgccgccaccgggtgtggcagatcgcgttcgggtcagggttcaagtgcaacagcgccgtgtggagggcgctccggtcggtgaacccggcggaggagacgaacccgtggatggacgagatcgacaggtttcccgtggatgttcccaaggtctctaaggtttcaagcgactgaaatgcattgctagctcgagacccagctttcttgtacaaagtggt

SEQ ID NO: 174 - DNA, 1520 bp, Glycine max
aaaaaagcaggctcctgcaggaccatggcggcgtcgcggcggctccgggacctccaatcccaaccggcgaacaagatctgcgtcgactgttcccagaagaacccgcaatgggcctcggtttcctacggcgtcttcatgtgcctggagtgctccggcaagcaccgcggcctcggcgtgcacatctccttcgtgcgatccgtgacgatggattcgtggtctgaaatccagatcaagaagatggaagccggaggcaacgacaaactcaacgcgtttctcttgcagtacggcatccccaaggaaaccgatatcgtcgccaagtataactccaacgctgcctccgtctaccgcgaccgcatccaggccctcgccgacggccgcccctggcgggatccccccgtcgtcaaggaagccgtccgttcctcctccgctgcattcaagggcaagccgccgctctcggctagcagcaacaacaacggcggatgggataattgggacgccgacgacggattcggatcggccaggggcgggtcggatctcaggcggaaccagtccaccggggacgtgaggggattcggcggcggcgggaacgtggcgaggtcaaaatcgacgcaggatatttacacgcgggctgaattggaagcttctgctgccaacaaagaagaattcttcgcgcggaagagagcggagaatgagtcgcggccggaggggcttccgccgtcgcagggtggcaagtatgttggattcggatctggccccgccccgccccagaggggtaatcagcaaaacgattatttctctgtcgtttctcagggacttggtaaattatccttggctgctgcttctgctgctaatgttgttcaggccgggacaaaagagttatccgctaaggtaaaagagggtggttatgattacaaggtcaatgaaactgtcaatgttgtctctcagaagacaacagagattggacaaaggacatggggtatgatgaaaggggtcatggcattggcttcacagaaggttgaggaattcgctagagataacccgaattggacgtctgataactggcaacgaaatgaaagtgatagaaatggtttctaccaggagttcaatcgagagaataatggccggaattcttctaccagagaaggacaacattcttcaggtggacaaactaatacttttcactcaagctcttgggatgattggggccacaatgattttaggaaggaagagccagctaaaggatcagctcctcagtcatcaggtgggaagtttgataattataactcgagctcctgggatgattgggaccaggaagatacaaggaagaaagaaccagctaaagggtcatctgcccgtagcagtgatggttgggctggatgggataatgccaaagatgatggatttgatgatatctatggaagtgcatctaatagtaaaggtgtcactcataatgacaagtcaggtgctgcctggacaggaggaggctttctctagctcgagacccagctttcttgtacaaa

SEQ ID NO: 175 - DNA, 1415 bp, Zea mays
aaaaaagcaggctcctgcaggaccatggcgtccacggcggcgaggcggctgcgggagctgcaggcgcagacggggaacaagacctgcgtggactgcgcgcagcggaacccgcagtgggcgagcgtctcctatggggtgttcatgtgcctcgagtgctcgggcaagcaccggggcctcggcgtgcacatcagcttcgtgcgctcggtcaccatggactcctggaccgaggcgcagctccgcaagatggaggccggtggcaacgaccgactcaacgccttcctcacagctcgcggcgttcctaaggagacgccccacgtcgccaagtacaactccaacgccgcagccgcctaccgcgaccgcatcgccgcgctcgctgagggaaagccgtggactgacccgcccgtggtcaaggagacgcccggatctggcgcccccgcccccgctaggaagccgcccgtgcacacatctgccgcctccggcggcggcgggtgggacgactgggacgacgattttcggccggacatgaggcggaatcagtcggttggatcgttcgccgccgcgggtgcgcagtcagggaggcagccgccgaggtccaaatcaacacaggacatgtacacgaggcagcaactggaggcgtcggcggctaataaggaggactttttcgccaggaggatggcggagaacgagtccaagcctgacgggatcccgccatcccagggcggcaagtacgttgggttcggatccagcccaccgccgtcggctaacaggaacggcggtgctgcccagggcgatgtcatgcaggttgtctctcagggatttggacgcctttcattagttgcagcatctgctgcccagtctgctgccagtgctgtccaagttggcacaaaagaaatccaatcaaagatgagggatgggggctatgaccagaaggtgaatgaaactgtcagtgttgttgccaataaaactgcagagattggaagcaggacttgggggatcatgagaggagttatggcgctggcctcacaaaaggtagaggaatatgccaaggaaggaggagtgggtggctggggagaggattggcaacacagcgagcagaaaagtgagccttaccaaaggtttgagcatgagaccaacggcaacagttggaattcctcccaaaattcttcatcgaagaacaattccagttcttgggacgactgggacgacccaggcaagaaagatgagcctgcgaaaccgcaccagagcagtgactcctgggctggctgggatgatgggaaggatgatggttttgatagccctagttacaacaatcacagcacctccaacaaggggagcaaccaaaacgggacatccggtggcacattttggacagaaggcggcttccgctagctcgagacccagctttcttgtacaaa

SEQ ID NO: 176 - DNA, 1382 bp, Glycine max
aaaaaagcaggctcctgcaggaccatgaagctagaagaatcggtgtccaactccaacatcactgccccgctccttccaccggaagatccgagtccgagtccgcaaaatggatcaatctccggagcggtgttcaacataacaaccaccatgatcggtgccggaatcatgtccattccggcgaccatgaaggttttaggcatagttccggggttggtggtgatcgtgttggtggcactgataacagatgtgactgtggagtttatgctaaggtacacaagttccggtaaatcctccacttacgcgggcatgatggccgagtcctttggctccataggatccctcgcagttaagatttgcgtcatcataaccaatttgggggttcttatcatctatttcattattcttggagacgtgctctgtggaaatgagtcgaacggtatcacacacttgggtattctacaagaatggtttggcatcaactggttgacctctcgtgcttttgctcttctttttgttgcactcttcataatgcttccacttgttatgttacgtcgtgttgattcactgaggtatagttctgcaatatcaatcctactagcattggtgtttgttgtaatatgctcatcaatggcggttagtgcattgttgtctggaaaaagtcagacaccgagaatagtgcctgatttctctcaagtcactgtccttgaccttttcaccgctataccagtgtttgtcacgggtttcggtttccatgtcaatgttcatcctatcagagcagagcttataaaagttgaacacatgggtttggctgcacggatttcgttgataatttgcgtggctatttactttgctattggtttctttgggtaccttttatttggggactccatcatgccagatgtgctggtgaactttgaccaaaactcccatacaagtactggtcgattactcaatgccattgttcggttaagttatgcactccatcttgcacttgtgttcccaatcatgaactattccctgagggccaacatagatgaactaattttctcaaacaaaaataagcctccccttgcatcagacaccccaagatttgtgtcactcactttgactttgctagccctcacatacttggtcgctgtgaccatcccaaacatatggtatttttttcagttcttgggatccacaaccattgtttccacctcattcatcttccctgctgcaattgttctcagggacatgcatgggatatcaaagacaaaagatcaagtgatggcaatagtggtgattgttttggctgtagggacaagcggaattgctatatggacgaatttgaatggttcaggggatgatcaatagctcgagacccagctttcttgtacaaa

SEQ ID NO: 177 - DNA, 1484 bp, Zea mays
aaaaaagcaggctcctgcaggaccatgggcggcggggccgttaacgaccacttcccgggggccagcgacccgctgctccccacgaagcgggatggggacggggacgaggacgacgcaggtgcctccgcgttccacgagttcgacggcgcctccttcgccggcgcggtgttcaacctctccaccaccatcgtcggcgcgggcatcatggcgctaccggccaccatgaaggtgctcggtctcgtccctgggctcgtcatgatagtgctcgccgcgctcctcaccgacgcctccatcgagctgctcgtgcggttcagccgggccgcgggcgcgcgctcctacagcgcggccatggccgacgccttcggatggtggggtaggaggctgctccaggtctgcgtcgtcatcaacaacgtcggcgtcatgattgtgtacatgatcattataggcgatgtgctttctggatccacttctggtggtgagcatcactatggtgtgttagaaggatggtttggaatacactggtggaatgggcgtttatttgttctccttgtcacaaccctttgtgtgttcactccactagcatgcttgaagcgtattgattcactaagctatacatccacaatatctgttgctttggcggttgtattcgttattattactgcaggaattgctgtcatcaagttgataggtggacaaattccaatgcccaagttgtttcccactgtttctgatttggcatctgtttgggaactttttacagcagtgccggttcttgtcactgcttacgtttgccattacaatgttcacccaattcataatgagctaaaggactctacccagattaagccaatagtacacacatcattgacactatgctcgaccatctacatcacaacaagtttctttggatatctcctctttggtgaatctacactctctgatgtgctctccaactttgattcaaatcttgggatcccatacagttcagtcctcaatgatgctgtcagagtgagctatgctgttcacctgatgcttgtgttccccatgatattccatgcattgaggcttaatttggatgggctcctcttcgcctctgcaaggcctctgtcttctgacaacagaagattcggcataattacagcatcgctcctcctagtgatttttgggtctgcaatcttcattcctagtatttgggatgcctttcagtttactggggcaactgctgctgtctgtatcgcctttattttcccagctgcgatcactttaagggattcacaaggtattgccaagaagtgggacaaaattctggcgatcttcatgattgttcttgctgttgtatcaaatgtagtagcggtctacagcgatgcctacaaaatattcaacaaggaaagtgctccttctaatgcctggatcggggagtcaactgaaaatagatcttcgtggtggcttgtacgttagctcgagacccagctttcttgtacaaa

SEQ ID NO: 178 - DNA, 2153 bp, Zea mays
aaaaaagcaggctcctgcaggaccatgtcggtctcgccctcgtccctgtgcggcggggacccggcgatgaggatcgtggtgtggttccggagggacctcagggtggaggacaacccggcgctcgcggcggcggcgcgtgccggtggggaggtggtgccggcgtacgtctggtcgccagaggaggagggcccttactaccccggccgcgtatcccggtggtggatcagccagagcctgaaccacctggacgcctcgctccgccgccttggggcgggaaaacttgtcacgcggaggtcggccgacgccgccgtcgcgctgctccagctggtccgcgacaccggcgccacgcacgtctacttcaatcatctatacgacccgatctcactggtcagggaccgccggttgaaggagatgctggcggctgagggcatcgttgtgcaatctttcaattcggatctgctgtacgagccatgggaagttgtcgatgatgaagggcagccattcaccatgttcgacccgttctggaacaggtgcctcagcatgccgtatgacccccctgcaccgcttctgcccccgaagaggatcaattcaggtgacttatcgatgtgcccatcggaggatctgatctttgaggacgagtcagagaggggaagcaacgctcttctggcccgagcgtggacgccagggtggcagaacgcagacaaggcgctgacggccttcctcaacggcccactggccgactactcagtgaaccgcaagaaggccgatagcgcgagcacgtccctgctctcgcctcacctgcacttcggcgagcttagcgtgcgcaaggtcttccacctagttcgcatgaagcagctcgtgtggagcaacgagggcaaccacgctgccgaggagagctgcaccctgttcctccgttccatcggcctgcgggagtactcccggtacctgagcttcaatcacccgagcagccatgagaggcccctcctggcgcacctcaggttcttcccctgggtggtggacgagagctacttcaagatttggaggcagggaaggacggggtacccgctcgtcgatgctggcatgagggagctgtgggcgacggggtggctgcatgaccggatacgcgtggtggtggcaagcttcttcgtcaaggtcctccagcttccatggcgatggggtatgaagtacttttgggacacgttactggatgctgatcttgagagcgatgcgctgggctggcagtacatcactggctctcttcctgatggccgggagcttgaccgcatcgacaacccccagtttgaaggctacaagttcgacccgcatggggagtacgtccggcggtggattcctgagctcgcaaggctgccgacggagtggatacaccatccatgggacgcgcctgtctccgtgctgcaagctgcaggaatcgagctgggctccaactaccctctccccatagtggagctggacgcggccaagggcaggctgcaagcggccctgtcagagatgtggcagctggaggcggcgtcgagggccaccatgaacaacgggacggaggaaggcctcggcgactcctcggaggtcctgttccctcaagagctgcagatggaggtcgaccggcagccagccccagccgaggcagcagccaacgtgcacgtgcccgtgccgatgcctgcccggaggcgcggggaccagatggtgcccaccatgacgacctcttcgctgaacagagctggaacagaggtctccgccgatctagtagtagcgaacagcgaggaggaggacaccagggcgcaggttccgttccacgcgcatctccacccacgagccgaagccccgccagctgcgcgtagaaccaacaacggcgctcgccagcacgacgtcttccagcagcctcggaaccacaggcgagaagctctgcttgctccgtcagcgtcggaggcttcgagcagctggaccggcagagagggcgccgtggtcccggtctggtcgcctcctgcggcgtcgggccattcggacgccttcgctgccgacgaagctgacgtctctagtaggagctatttgggtaggcatccgcagtcccaccggctgatgaactggagccaactatcgcagtcatcgtagctcgagacccagctttcttgtacaaa

SEQ ID NO: 179 - DNA, 2000 bp, Zea mays
atggctggaccggagaagactgttgtttggttcaggagagacctcaggatccaggacaacccggccttggcagcggcggcgaaagggggctctgtcctccctatcttcatatggtgcccctcagactacgggcagtactaccctggaaggtgctcccggtggtggctcaagcagtctcttgcccaccttgggaagtcattagagctgctcgggtgcccactcgtgctgatccgtgcggaggacagcactcttgcagctcttttggagtgcgttcgttccatcagtgccactagagtggtttacaatcgtctctacgaccctatttcacttgtgcttgacaacaaaatcaagaatgagcttccagcccatggaatttctatccaaagtttcaatggtgatttactttacgagccgtgggatgtttatgatgagaatgggcaggcatttacaacctttaacaagtactgggagaaatgtatgagcctacctattgagatatcacaatatcttgcacctacaaggctggtggcagcgccaggtctagcaaatgttcgctgttgttcgattgatgatctaggtcttgaatctagtaaggatgtggaatcaagcaatgctttgctaagcagggcctggtctcctggctggcgcaatgcagagaacatgcttgaggaatttgtgtcttatggtcttccagaatattcagaacatggtatgaaggttgggggaagtactacgtcattattgtcaccgtatctccatttcggggagttgagtgtaaggatgatttatcaacttgttaaaatgcgtcaagtcaagtggcaaaatgaaggaaaatctgaagctgaggagagtgttcgattgttcctacgatcaattggttttcgagaatattcacggtacttatgctttaactacccattcacacatgagagatcatttttaggtaacttgaagcattatccttggctattggatgagggccgtttcaaatcttggagacagggaatgactggatacccattagtagatgctggcatgagggaactctgggctactggttggacacataatcggataagagtgattgtctcaagtttcgctgtaaaatttctacagataccctggatttggggaatgaagtacttttgggatgtgcttctggatgcagacctagaaagtgatattcttggttggcagtacatatctgggagtttgcctgatggacatgagctcagtcgtcttgataatccagaggttcagggtcaaaagtacgatccggacggtgaatatgtaagaacttggattcctgaacttgctagaatgccaacagaatggatccatagtccatgggctgcgccaaactctatattacaagttgctggagttgagctgggctttaactacccaaagcccatagtagaacttcatatggcgcgggaatgtttagatgacgccatctccacaatgtggcaattggacacagctgcaaaacttgctgaactagatggtgaagttgttgacgacaatctgaataatatcaggaattttgatatcccaaaggtggttttgaacaagaaattatcaccaagcacttcatccatggagcacagggtgttgtctactaatggcaaggacgaaaagtcgcagcctactgaagtgaaggccctgtacaaacagattattcgagatgatatgatgaatgactcaaacatggatgacacatgctctactgctaacttgaaagtgacaaggaaaagatctagcagtgatagtgcgttcaatgttccctcatgttcatcctcattagtcatggaatcacggattcatcataatgaacctagttctgttctgtattcaggctacttccagaagacagcagacagagatggcactagtaaggttgaagataatgacagtgaagatagtggtacgagcatctctaggccatccaagaaagctgcttagctcgagcctgcagggacccagctttcttgtacaaa

SEQ ID NO: 180 - DNA, 768 bp, Oryza sativa
tccactagtaacggccgccagtgtgctggaattcgcccttcctgcaggaccatggcctcctcagcaccgacgccgccgccgctcctcccggtgaccaacccggcagccgcggggtcgtccccggccgccaccgccgtgggatctgacgcgccgatcgcaaccccggcgttccggctcttcctgagcaagctctccgactcggcgcggcgctcgctgtccgaccggcggccgtggacggagctggtcgaccgctcggcgttctcgcggccggactccctctccgacgccacctcccgcctccgccgcaacctcgcctacttccgcgtcaactacgccgccgtggtggccttcgcgctcggggcgtccctcctcgcgcaccccttctcgctcctcgtcctcctcggcctcctcgccgcctggtgcttcctctacctcttccgcggctccgaccagcccgtcgtcctcttcggtcgcaccttctccgaccgcgagacgctgctcggcctcgtcgtcgcgtcgttcgtggccttcttcttcacctccgtcgcgtcgctcatcatctccgggctgctcgtcggcggggccatcgtcgccgtccacggcgcgtgccgcatgcccgaggacctcttcctcgacgacgctgacgccgccagcggcaacagcgcggcccagggtctcctgtccttcctcggggcgcccggatctagggtttagctcgagcctgcaggaagggcgaattctgcagatatccatcacactggcggccgc

SEQ ID NO: 181 - DNA, 656 bp, Glycine max
aaaaaagcaggctcctgcaggaccatgaccacatatggaacaatctcagaagaggcttcatcaaattcaaactcagttttcgtttcacaggccaaagagcgcattgaagacggtctaggcacaacaagaccatggagtgaaatgctccaaacttgtcatctcaaacttccatcttccttcttcggtgcaatccaaagaatcaacacaaatgccaaacattttcgagcaaactacgtgattatcatactgcttgtgcttttccttagcttactaggacaccccatttctttgatcatattagttgttatgatgattgcatggctgtacttatatttcctacgagatacccctttggtgattttgaggtttgagatggatgagcgattggtggttatctctttgttgttgatcaccattggtttgcttgtacttacaaatgtaacctacaatgtgatagttggtatgtgtgttgccttagtggttgtgttggtccatgctatcatgagggaaacggaggatctgtttaccatggatgaagatgtaggggttgtaaaaggttttagagatgttgtcaaagtccctcttagacaacctggttcctcttcttttactttgccttagctcgagcctgcagggacccagctttcttgtacaaa

SEQ ID NO: 182 - DNA, 536 bp, Zea mays
aaaaaagcaggctcctgcaggaccatggccgccgtgctggtggcgaggcaggggcgcgagctgcagcggtacagccagagcacgggcgggcgcatcgtggtgggctgcatcccgtaccgcgtgcggcgcgacggcgagctggaggtgctggtgatcacgtcccagaaggggcacggcatgatgttccccaagggcgggtgggaggtggacgagtccatggacgaggccgcccggcgcgaggccctcgaggaggccggcgtgctcggcgacaccggaccggtcctcggcctctggcactacaagagccgccgctacgtggaccagacctacgagggcttcatgttcccgctccgcgtcgccgacgagctccaccagtggcccgagatggcgtcccgcaagcgcacctgggcaacggtgcagcaggcgatggacgggtgcccgcactggtggatgcgcgaggcgctggagcggctcgtcgcgcggcaagccgtgctgcagtctgccctctagctcgagacccagctttcttgtacaaa

SEQ ID NO: 183 - DNA, 584 bp, Zea mays
atgtgcgacctagtggcccgcacgggccggcatcagcagcggtacgaggatggccgtcggctagtggccggatgcataccatttaggtatagagctaacaatgatgaaacctctggtgacaaaactaagaaactcgtggaagttctcatgataaattcccaaagcggacctggtcttttgtttccaaagggaggatgggagaatgatgaaactgttgaagaggcagcagctcgagaagctatagaagaagctggagttcgaggtgatatagtgcattttctggggctctatgacttcaaaagcaagacgcatcaagatgcgtgctgccctgagggtatgtgcagagctgcagtgtttgcgctgcatgtaaaggaagagctggcctcatggcctgagcagagcacccgacagaggacctggctcacggtccctgaagctgcatcaagttgccgataccagtggatgcaagaggccttgctgacaggcttctctgactggcacgacaagtggagcagaggcggcggcggcacaaactgtgacccggcctagctcgagcctgcagggacccagctttcttgtacaaa

SEQ ID NO: 184 - DNA, 605 bp, Zea mays
aaaaaagcaggctcctgcaggaccatgtgtgatctggtggcccgcacgggccggcacctgcagcgctacgagaacggccatcgccttgtggccgggtgcataccattcagatatagggatattaatgatggagcttctgatgatgaacaaaagaaacttgttgaagttctcatgatcagctcccaaagtggaccgggtcttctatttccaaagggaggctgggagaatgatgaaactgttgaagaggcagctgcaagggaagctatcgaagaagctggagtgcgaggagatttagtgcaactgctggggttctacgatttcaagagcaagcagcccgaagcaacgtgcagggccgcaatcttcgccctgcacgtgaaggaagagctagcctcctggccagaacagagcacccggcagaggagctggctcaccgttcccgaggcggcggagcggagccgctacccgtggatgcaggaggccctcgtgacaggcttctccgcctggctcgagaactggagaaacggtggtggcggcggcggcggcggctgcgtggaccgaactgagagatagctcgagcctgcagggacccagctttcttgtacaaa

SEQ ID NO: 185 - DNA, 1520 bp, Oryza sativa
acaagtttgtacaaaaaagcaggctcctgcaggacccccttgctttcatggccatggagacgacgagccaagattcgcaggtgatcatggggcggtacaagctcggccggctcctcggccgtggcacgttcgccaaggtctacaaggcctataagttggccaccggcgaggccgtcgccatcaaggtgttcgacaaggaggcggtgcagcggtccggcacggtggagcaggtgaagcgcgaggtggacgtcatgcggcgtgtgcaccaccgccacgtcatccgcctccacgaggtgatggctacgcggtccaggatctacttcgtcatggagtacgcgagcggcggcgagctcttcacccgcctctcccggagcccgcggttcccggagcccgtcgcgcgccgctacttccagcagctgatcaccgccgtggagttctgccacagccgcggcgtgtaccaccgcgacctcaagcccgagaacctcctcctcgacgcccgcggcgacctcaaggtcaccgacttcggcctcagcgcgctagacggaggcctccgcggcgacggcctcttgcacaccacgtgcggcacgccggcgtacgtcgctcccgaggtgctcctgaagcgtggctacgacggcgccaaggcggacatctggtcgtgcggcgtgatccttttcgtgctcctcgccggctacctccccttcaacgaaaccaacctcgtgatcctgtaccggaatatcacggagagcaactacaggtgcccgccgtggttctccgtcgaggcgcgcaagctccttgccaggctgctcgacccgaaccccaagacccggatcaccatctccaagatcatggacaggccatggttccagcaggcgacgtgcccgctcggcgacatgtccctcgtcgcgagcgcgccctcggtgctgcttgccagaaaggaagccagccagcagcacgacgacgaggaggacgatgggtttgcacgggagaagaagaagcggtccaatgtgatcatgtcgtcgccggtgatcgacgtgaggccctcgagcatgaacgccttcgacatcatctcgcggtcgagagggctggacctgtccaagatgttcgacgcggaggagcgcaggtcggaggcgcggttctccaccagggagaccacgacggcgatcgtctccaagctggaggagatcgcggaggcggggaggttcagcttcaagctgaaggagaaagggagggtcgagctggaggggagccaggacgggcggaagggcgcgctggccatcgaggcggagatcttcaaggtggcgccggaggtgcacgtggtggaggtgaggaagaccggcggcgactcaccggatttccgggacttctacaagcaggagcttaagccgtcgcttggcgacatggtgtgggcgtggcagggaggtgattcgccgccgctcgtgccggcggcggggaggaggccgatcacgaagcgctcttgatatgccgatagctcgagacccagctttcttgtacaaagtggt

SEQ ID NO: 186 - DNA, 1453 bp, Oryza sativa
acaagtttgtacaaaaaagcaggctcctgcaggaccatggtgaacggagaggcggaggcggagtgcacgcgggcgtcgctgctggggaggtatgagatcgggcgcacgctcggggagggcaacttcggcaaggtcaagtacgcgcgccacctcgccaccggcgcccacttcgccatcaagatcctcgaccgcaacaagatcctctccctccgcttcgacgaccagataaggagggagattgggacgctcaagctgctcaagcaccccaacgtcgtccgcctgcacgaggtggctgctagcaaaactaagatttacatggtgcttgaatatgtcaatggaggcgagctctttgacaagattgccgtaaaaggaaaactctctgaacatgaaggaaggagacttttccagcagttaatcgatgctgtgagctattgccatgataaaggtgtctaccacagagaccttaagcccgaaaatgttcttgtggatcgaagaggcaatatcaagatctctgactttggcctaagtgctttgcctcaacatcttgggaatgatggattgctgcacacaacatgtggcagccccaattatattgctcctgaggttttgcagaaccgaggttacgatggctcattgtcagatatctggtcttgtggagtaattctctatgtaatgctcgtcggataccttccctttgatgaccgaaatcttgttgtcctgtaccagaagattttcaagggggacactcaaatcccaaagtggctttcacctagtgcacgggatcttcttcgaaggattcttgaaccgaacccgatgaagaggatcaacatagcagggatcaaagagcatgagtggtttcagaaggattacactcctgttgttccatatgacgacgatgatgacaattatcttgactcagttcttccaatcaaagagcaaattgatgaagcaaagcaggaaaagcctactcatatcaatgcttttcagttgattggaatggcttctgcccttgatctttcaggtttctttgaggaagaggatgcgtctcaaagaaagataaggttcacatcaacacattcaccaaaagatttattcgacaagattgagaatgttgtgacggagatgggattccaagtccagaggggtaatagcaagctaaaggtcatgaaaaatggcaggggttcaaagaacctcaggaatccatcatcattcttggtctgtactgaggtagtcgagctcgggccatccttatatgttgtcgaattgaagaaatcccatggagatcctatattgtatagacagctatgtgagaggctatcagatgagctaggagtgtgcaagacagagcagattcagaggacggagtcgctggaggatgatctagagagcttcgacagcggatcttctctgcctggtttttagctcgagacccagctttcttgtacaaagtggt

SEQ ID NO: 187 - DNA, 1632 bp, Oryza sativa
acaagtttgtacaaaaaagcaggctcctgcaggacccgccggaggtcaggtagaagatggagggagctggcagagatgggaaccctcttggcggttaccggattggcaaaaccctagggattgggtcatttggcaaagtgaagatcgcggagcatatattgactggtcacaaggtggcaatcaagatcctcaatcgccgtaagatcaagagcatggagatggaagagaaagttaaaagagaaatcaagatacttagattatttatgcacccacatatcattcgcctttatgaggtgatagacaccccagctgatatttatgttgttatggagtatgtcaaatctggagagttgtttgattacatcgttgagaagggaagactgcaagaggaagaagctcgacgctttttccagcagatcatatctggtgttgaatattgccatagaaacatggtggttcatcgtgatcttaagccagagaaccttcttttggactccaaatgcaatgttaagattgcagactttggcttgagtaatgttatgcgtgatggtcactttctgaagacaagttgtggtagcccaaattatgcagcacctgaggtgatatctggtaaactatatgctggccctgaagttgatgtgtggagttgtggtgttattctttatgctcttctttgtggtacccttccatttgatgacgagaatattcccaacctttttaagaaaataaagggtggcatatatacccttcccagtcatttgtcacctttggcaagggatttgattcccagaatgcttgttgttgatcccatgaagaggatcaccatacgtgaaatccgtgaacatcagtggttcacagttggtcttccgcgttatttagctgtgccacctcctgacactgcacaacaggttaaaaagctcgacgatgaaactctgaatgatgttatcaatatggggtttgacaagaatcagctaatcgaatcacttcacaagagactgcaaaacgaggcgacagttgcctactatttactattggacaataggctgcgcacaaccagtggctaccttggagctgagttccatgaatctatggaatcttctctcgctcaagtaactccagctgagacaccaaactcagccactgatcatcggcagcatgggcatatggaatctcctgggtttggcttgaggcatcatttcgcagctgacaggaaatgggcccttggtcttcagtctcgagcacatccacgagaaataataactgaagttcttaaagctctgcaagagctaaatgtttgctggaagaagattggacattataacatgaaatgcagatggagtcctagttttcccagtcatgagagtatgatgcataacaaccatggctttggtgcagaatctgctataattgaaactgatgacagtgagaaatcaacccacactgtgaaatttgaaattcagctttacaaaacaagggatgaaaaataccttcttgacttgcaaagggtcagtggaccacagcttctctttctggacctgtgctctgcctttctaactcagctgagagtcctttaattatgccgttgtctgcttcccaactagctcgagacccagctttcttgtacaaagtggt

SEQ ID NO: 188 - DNA, 940 bp, Oryza sativa
acaagtttgtacaaaaaagcaggctcctgcaggaccatggggaacgcgagcggcaaggaaggggaggagaacggccacgtggcggcgggggccgccgccggagtggctggctcggcgggggcagcggcccgggctccgccgccgcttatgccgccggacgccgtgatgcgggagctgcctcccccggtgccctacgtcttcacgccgcaggttccagtagccccactgcatatacctactgaattttctcctgttttcaacaattcatggataaatgaatcggatgaatccaccaataaccatccccaggagaagggaattccaactttgatctcatggagtcaaggaggaaatgaggtgtttgtggaaggatcatgggataactggacatcaaggagggtgttagagaagtctgggaaagaccataccatattgctagttctgccatcaggggtataccattacaggatcatcgtcgatggggaaccgaaatatgtccctgaactacctcatgtggctgatgagggagggcaggttgccaacctcctcgatgtccatgattatatcccagaaagcctgggcagcgtggcaggattcgactctcctccgtcgcctgaacacagctatgatctccagctcccaggtgatgaggagtttgccaaggagccacctatactgccacctcagcttgtaatgtctgttcttggtgatactgataactctgaagaacaaactctgaagccaaagcatgttgtcctcaaccacctgtatatcgagaaaggatggggatcgcagtcgctgcttgctcttggagtcactcaccggtttcaatccaagtatgtaagcttcgtgctgtacaagccgctgcgaaggtcatccacggcgaagcgaacaaagaatggtggttagctcgagacccagctttcttgtacaaagtggt

SEQ ID NO: 189 - DNA, 878 bp, Glycine max
atgggaaacgctaacggcagagaagacggatccattccccccgccgccgccgatccctccgccgccgcacgtggaactcacgcgccgccggtctctctccctccggttcgcgccttctcctccgattcaatggccaatagcccgccgcacagccctcgccgctccagatcgccgatcctcttcggtcctcaggttcctctagctccattacaacgaggtaatggccctccttttctcaatcaaatgtggcagaatgagtctcatggtattgttaatcacccttctgagcaagggatccctgtcatgattacatggaactatggtggtaacaatgtggctgtggagggatcttgggataactggacatctaggaaggcattacagcgagctggcaaggatcactcattccttatagtccttccaccaggtatatatcattacaggttcattgctgatggtgaagagagatttatcccagagctacctaatgtagctgatgagatggggcatgtctgcaatcttcttgatgttaatgattatgtgccagaaaaccccgatggtgtgtctgagtttgaagcaccaccctcccccgaatccagttatggccaagcatttccagctgaagaagactttgcaaaagagccaatggctgttccttcgcaactgcatcttactgtcctaggtatggaaaactctgacataggttcctcttcaaagccccaacatgttgtgctaaatcatgtcttcatagagaaaaatttggcctcaaagtctgttgttgccctgggactcactcacaggttccagtccaaatatgtgacagttgtcctttacaaaccgctcaagaggtagctcgagacccagctttcttgtacaaa

SEQ ID NO: 190 - DNA, 1352 bp, Glycine max
atgagtcagcctaagattaaacgccgagttggtaaatacgaggtggggaggaccattggtgaaggtacatttgcaaaggtgaaatttgcaaggaactctgagacaggagagcccgtggctcttaaaattcttgacaaggagaaggtgctaaagcacaagatggctgagcagatcaggagagaagtagctacaatgaaactaatcaagcatccaaatgttgttcgattgtatgaggtcatgggaagcaagaccaaaatatatattgttttggagtttgtaactgggggggaactctttgacaaaattgtaaaccatggaaggatgagtgaaaatgaagcacgtagatatttccagcagcttataaatgctgttgattattgccatagcaggggtgtctaccacagagacctgaagccagaaaatttgctattagatacttatgggaaccttaaagtttctgattttggtttgagtgccctctcccagcaagttagggatgatggacttcttcatactacatgtggcactccaaattatgttgctcctgaggtccttaacgatagaggctatgatggggcaactgcagacttgtggtcatgtggggttattctctttgtattggttgcaggttacttgcctttcgacgaccctaatcttatgaacctgtataaaaagatctcagctgctgaatttacttgccccccatggctttctttcactgccaggaaattgattacacgaatcttggatccagatcccaccactcgtatcactatacctgagattttggatgatgaatggtttaagaaagaatataagcctcccatttttgaggagaatggggaaatcaacctcgatgatgttgaagctgtctttaaagactctgaagagcaccatgtgacagagaaaaaagaagagcagcctacagccatgaatgcatttgagttaatctccatgtccaaaggactgaaccttgaaaacttgtttgatactgagcagggatttaaaagggaaacaagattcacctcaaaatcccctgcggatgagataatcaacaagattgaggaagccgcaaaacctcttggctttgatgtgcagaagaaaaattacaagatgaggcttgcaaatgtgaaagctggaaggaagggaaaccttaatgttgccacagagatatttcaagtggcaccttctcttcacatggtagaggtacggaaggcaaaaggagatacattggagttccataagttctacaagaaactttcaacaagcctggatgatgttgtttggaaaacagaagatgatatgcaaatgcgagaaacaaagtagctcgagacccagctttcttgtacaaa

SEQ ID NO: 191 - DNA, 1429 bp, Zea mays
acaagtttgtacaaaaaagcaggctcctgcaggaccatggagaagaagccgaccatcctcatgaacaggtacgagctcgggcgcacgctcgggcagggcaccttcgccaaggtgtaccacggccggaacctcgcgtccggcgagagcgtggccatcaaggtcatcgacaaggagaaggtgatgcgcgtcggcatgatcgaccagatcaagcgcgagatctccgtcatgcgcctcgtccgccaccccaacgtcgtgcagctgcacgaggtgatggccagcaagagcaagatatacttcgccatggagtacgtccggggcggcgagctcttcgcccgcgtcgcccgcggccggctcaaggaggacgccgcgagaaggtacttccaccagctcgtcggcgccgtcgacttctgccacagccgcggcgtctaccaccgcgacctcaagcccgagaacctcctcgtcgacgagcacggcaacctcaaggtctccgacttcggcctcagcgcgctcagggagtgccagaagcaggacggcctgctgcacaccacctgcggcacccccgcgtacgtcgcgccggagatcatcaacaagaagggctacgacggggccaaggccgacatctggtcctgcggcgtcatcctcttcgtgctcctcgccggctacctcccgttccacgacgccaacctggtggagatgtaccgcaagatcagcagagccgacgtcaagtacccgcagtggttctcccctgagctccggcggttgatgcccaagctcctcgaaccgaacccaaacaacaggatcacgatcgagaagctggtcgagcacccctggttcaagaaggggtacaggccggccgtcatgctggcacagccgcacggctccagcagcctcaaggatgtccaggtcgccttcagcaacgccgaccacaaggacagcagcagcaaggtggaacagccggcggacagctccttgaagccggcgagcctgaacgcgttcgacatcatctcccactccagagggttcgacctgtcaagcctgttcgaggtggaccaagagcagaaggccagcaactcgcggttcatgacccagaagccggcgtcggcgatagtgtcaaagctggagcagatcgctgagacagagcgcttcatggtgaaaaaacaggacgggctggtgaagctgcaggggtccaagcaagggaggaaggggcagctcgcgatcgacgccgagatcttcgaggtgacaccggcctttcacgtcgtcgaggtgaagaagtcggcaggcgacacgctggagtatgagatgttctgcagcaagggcctaagaccttcactcagcgacatctgctggagcagccgatctgaggagaacatggctccttcagtggttcagccatcatagctcgagacccagctttcttgtacaaagtggt

SEQ ID NO: 192 - DNA, 1406 bp, Zea mays
atgatggaagcagagaagaatggaaacattcttatgcaaaagtatgaggttggaaaattattggggcaaggaacatttgccaaggtataccatgctaggaacatagagacctctcaaagtgttgctatcaaggttattgacaaggacaaaatttttaaggttgggctaatggagcagatcaaacgagagatatcggtgatgaaactggtgaggcacccaaacatcgtgcaactttatgaggtcatggctactaaatcaaagatatactttgtgcttgaatatgtcaagggtggtgaattgtttaacaaaattgctaaaggaaagttaagagaagatgcttccaggaaatacttccagcaattggttagtgcggttgatttttgtcatagtaggggtgtgtatcatcgtgatttgaagccagaaaacctactcgttgatgagaatgggaatctaaaaatttcagattttggattgagtgctcttgctgaatcaagacgccaagatggtcttctacacacaacttgtggtactccagcatatgtggcgccagaggttattagccgaaaaggatatgatggtgcaaaggttgacacatggtcctgtggtgtgatcctatttgttcttatggctggatatcttcctttccaagattcaaatttgatggagatgtacagaaaaattggaaaagcagatttcaaatgcccaccatggtttccatctgatgtacgcaagttagtgtcaagaattcttgatccaaatccaaggactagaatgccaattacaaaaatagtggaatgcttttggttcaaaaagggcattgacaacaagctaatccgaaagaatatcgagatgaaagggaaagtttcagctctcactgatgttaatgtagttttctcatccacgggtattggtagcaacaataacaaattggttgatgtggaacaagatgtagcaaagattaccaacctgaatgcttttgacattatttccctttcagaaggctttaatctttcaggcttatttgaagagtccgagaaaagaaaagaggcacgcttcacatctagtcaatcagcttcaactattatatcaaaactagaagatgctgccacctgttcaaagatgacaataaagaaaaaagaaggtggtgtgctaaaaatggaaggtgcaaatgaaggaaggaaaggtgtactatctattgatgctgagatctttgaagttactcctgctttccatcttgtagagattaagaaaaataatggggatacactagaatatgaaaatttgtttaagcaggacatgaaaccagcgcttaaagacattgtttgggcatggcaaggtgagagtaaggaccaacaggccaaggatcacaatcaatcatagctcgagacccagctttcttgtacaaa

SEQ ID NO: 193 - DNA, 1376 bp, Zea mays
atgagcgcatccgtgggccggacccgcgtggggcggtacgagctcggccggaccctcggcgaaggcaccttcgccaaggtcaagttcgccaggaacgtcgagaccggagagaatgtcgccatcaagatcctcgacaaggagaaggtcctcaagcacaagatgatcgcccagatcaagcgagagatctcgaccatgaagctcatcaggcaccccaacgtcatccggatgtatgaggtgatggccagcaagacaaagatatacatcgtcatggagctcgtcaccggtggcgaactcttcgacaaaatcgcctcgcgtggaaggctgaaagaggatgacgcaaggaagtacttccagcagctgatcaacgctgtcgattactgccatagccgaggcgtctaccaccgcgatctcaagcctgaaaatctcctgcttgatgctagcggcacgctcaaggtttcggattttggactgagcgcactatctcaacaagtccgagaggatggtctgctgcacacaacctgtggaactcccaactatgttgctcccgaggttataaacaataagggctatgatggagctaaggctgatctgtggtcatgtggagtgattctctttgtcctcatggcggggtacctcccatttgaagattcgaacctgatgtcgctctacaagaagatcttcaaagcggatttcagttgcccgtcctggttctccacaagcgcaaagaagctcatcaagaagatacttgatcctaatgctaacaatagaataactattgcagagctcattaacaacgagtggttcaagaaggggtatcagcctcccagatttgaaacagcagatgttaatctggatgacgtgaactccatcttcgatgaatccggggagccagcacagcttgttgttgagaggagagaagaaagaccatcagtgatgaacgctttcgagttaatctctacgtctcagggcctcaatctcgggacgctcttcgagaagcaaacgggttctgttaagcgagaaacaaggtttgcgtcaaggcttcctgcaaatgagatactgtcgaagatcgaagcagcagcgggacccatgggcttcaacgttcagaagcgcaactataagctgaagctgcaaggggagaaccctggaaggaaaggtcagctggccattgcaacagaggttttcgaggtcacgccttccctgtacatggttgagctgcgcaagtccaacggcgacacccttgaattccacaagttctaccacaacatctcaaatggactgaaggacgtgatgtggaagccggagagcggcatcgtggaaggcgacgaggcgcggcaaaggaggtccccgtagctcgagacccagctttcttgtacaaa

SEQ ID NO: 194 - DNA, 1349 bp, Zea mays
atgagtacaaccaaggtgaagagacgtgtgggcaagtatgagctcggccggaccataggcgagggcaccttcgcgaaggtcaggttcgcgagggacacggtcaccggcgaggccgtggccattaagatcctggacaaggagaaggtcctcaagcacaagatggttgagcagatcaagcgggagatctcgacgatgaagctgatcaagcaccctaacgtcgtccgcatatacgaggtgatgggaagtaaaacaaagatctacattgtgttagaattcgctaccggtggcgagctctttgatacaattgttaaccatggtcgaatgagggaagacgaggcaaggaggtacttccaacagttaatcaatgcagttgattattgccatagcaggggtgtgtaccaccgggatttaaaacctgaaaatttgctgcttgattcatatggaaacctgaaggtctctgactttgggctcagcgcgctatctcagcaaatcaaggatgatggactgctgcacacaacttgtgggactccaaactatgttgcaccagaggtccttgaagatcaaggctacgatggagcaatggctgatctgtggtcatgtggagttatcctgtttgttctgctagcagggtatttgccgtttgaggactctaatctcatgactttgtataagaaaatatcaaatgcagaatttacatttccaccatggacatcttttcctgccaagaggttgttaacaagaatccttgatccaaatccaatgacgagaataacaatcccagaaatattagaggatgagtggttcaaaaagggctacaagcgcccagaatttgatgaacaatatgacaccacattggatgatgtggatgccgtcttcaatgattcagaagagcaccatgtgacagaaaagaaagaagaagaaccagtagctctgaacgcattcgaactgatttcgatgtcagcgggcctaaaccttggaaacttatttgactcagagcaggagttcaaaagagaaacaaggtttacatcaaaatgtccccccaaagaaattgtccgcaagatcgaggaagctgcaaaacctctaggatttgatgttcagaagaaaaattacaagttgaggctcgaaaaggtaaaggcagggaggaagggaaacctcaacgttgctactgagatactgcaagttgcaccctctctccacatggtagaagtccgaaaagcaaagggtgacactctggaatttcataagttctacaagaacctttccaagaccttgaaggacgtcgtctggaaatccgacgatcttcaaacgcaacatgcttcttagctcgagacccagctttcttgtacaaa

SEQ ID NO: 195 - DNA, 1433 bp, Zea mays
aaaaaagcaggctcctgcaggaccatggtgaacggcgagcggcgggcggacgcggagtgcacgcgggcgtcgctgctggggaggtatgagatcgggcggaccctcggcgagggcaacttcggcaaggtgaagtacgcgcgccacatcgccagcggcggccacttcgccatcaagatcctcgaccgcagcaagatcctctccctccgcatcgacgaccagatcaggagggagatcgggacgctcaagctgctcaagcacccgaatgtcgtccgcttgcacgaggttgctgccagtaaaacgaagatctacatggtgcttgagtttgtcaacggcggcgagctcttcgacaagatcgctatcaaggggaaactgtccgaacacgagggcaggaggctcttccagcagctaatcgacggcgtcagctattgccatgacagaggtgtctaccaccgagacctcaagccagagaatgtccttgttgatcggaagggcaccatcaagatctctgacttcggcctcagcgctctacctcaacatctcgggagtgacggacttctgcacacaacatgtggcagccccaactacatagctcctgaggttctgcaaaacagaggctatgacggctccttgtcagatctctggtcgtgtggggtgatcctctacgtgatgcttgttggctgccttcccttcgacgacaggaacctcgtcgttctttatcagaagattttcaagggagactgtcagatccccaagtggctttcgcctgccgcgcaggaccttctcaagaggatcctccaaccgaatccgatgaagaggatcaacgtcgcggggatcagggagcacgagtggttcaagaaggactacgtgcctgctgttccgcacgatgatgacgaagacgtccttcctagtccagctccctcgataaagccaatcgatgagccggcgcaagagaagtgttctcctatcaacgcttttcagttgatcgggatggcctcttcccttgacctttctggtttcttcgaggaagaggatgcagcgcaaagaaagattcggttcacttcgacgcacccacccaaggatctatttgacaagatcgagagcgttgtcatggagatgggattcaaagtccataggggggcaggcaagctcaaggtcttgaggaatagcaagtgttccaggaacccgtcatcattgttggtgtgcaccgaggtgtttgagctcggtccatcattatatgtcgtagagcttaggaaatcccacggagactctacgttgtatagacagctgtgcgaaaggctctccgatgagctaggtgcctgcaagacagaccagatcgcgaggactgaatcatcgagtgacgacctctcgagcgtcgatggcgaagcgttccctctatctgggttctagctcgagacccagctttcttgtacaaa

SEQ ID NO: 196 - DNA, 1441 bp, Zea mays
acaagtttgtacaaaaaagcaggctcctgcaggaccagaaaggaaggaggtgggcggcaatggaggatgcggtggcggcggacgggaagagcgtgctgcaggggcggtacgagctggggcgggtgctggggcacggcaacttcgggcgggtgcacgcggcgcgggacctgcgcacgggccgcagcgtcgcggtcaaggtggtggccaaggacaagctggagcgcgcgggcatggcggagcagatcaagcgggagatcgccgtcatgaagatggtgtcccaccccaacatcgtggagctgcacgaggtgatggccacccgctccaagatctacctcgcgctcgagctcgtccgcggcggggagctcttctcccgcatcgcgcgcgcggggcgggtccgggaggacgtggcgcgctgttacttccggcagctcgtcgccgcggtcgacttctgccacggccgcggggtgttccaccgagacctgaagctcgagaacctgctcctcgacgaggtaggcaacctcaaagtggcggactttgggctcagcgcgctcgccgggcacgcgcgctccgacgggctgctccataccgcctgtggcacgccgtcatacgtcgcccccgaggtgctcggcgggaagggctacgacggcgccaaggcggacctctggtcctgtggcgtcatcctctacgtgctcctcgttggcagcttgccattccacgaggacaacctcatggtcatgtaccggaagatgcagcgcggcgagttcctctgcccgccgtgggtctcagcggacgcccggaagctcatcggcgagctgctcgaccccgacccgagcacgcgcatcaccgtcgctcgcctcgtcgagacgccgtggtaccggaagccgttgcccgtcctgccgccgctcaacctcaaggagccaaccccggacgcgcgccgcgccacctctgacaaggaagagcccgaggtgctgaacgcgttccacctcatctctttctcggagggcttcgacctgtccccgctcttcgaccagggccgtggcggcggcgtagggaggtctagcgcgggcggcatccgtttcgtgacgcgcgaggccgccagcagcgtggtctcccgtctggagtcgctggtcaccggccgcggagccaacatgcgcgtgacaaagagcggctcgcggggcgttcgtttggaggccgtgtcgcgcgggcgctcgggggcgcggctggcagtggccgcggagatcttcagcgtggcgccgtcggtgctcctggtggacgtgaagaaggacggcggcgacacgatggagtaccggtcgttctgtagcgaggagctccggccggcgctcaaggacatcgtctgggcctccagccaggacacaccgggcgccgcttgatgtcgtcgctgtcgcttagctcgagacccagctttcttgtacaaagtggt

SEQ ID NO: 197 - DNA, 1492 bp, Zea mays
acaagtttgtacaaaaaagcaggctcctgcaggacccagcagagagcatggcgagatcagggcgggaagcggatcccggagaggaggaacggaagctggtgctgggcaagtacgagctgggccgcctgctggggcagggcaccttcgccaaggtttactacgcgagggacctgagcgccggcgccggcacgggccacagctgcagcgtagccatcaaggtgatcgacaaggcgcggctgcggcgcacggaggggatggtggagcagctgcgccgggagatctccatcatgcggatggtgcggcaccccaacgtggtgggcatccgggaggtgctcgccagccgctcccgcgtcttcgtcgtcatggagtacgcgcgcggcggggagctcttcgccaaggtggcccggggccgcctccccgaggaccacgcgcgccgctacttccagcagctggtcgccgccgtcggcttctgccaccgccgcggcgtcgcgcaccgggacctcaagcccgagaacctgctgctggacgaggcggggcggctcaaggtcaccgacttcgggctggccgcgctgcccgagcagctgcgccacgacggcctgctccacacgcagtgcggcacccccgcgtacgtcgcgcccgaggtgctcaggaagcgcggctacgacggcgcccgcgccgacctctggtcctgcggcgtcgtgctctacgtcctcctctgcggcttcctcccgttccagcacgacaactacgtcaagttgtaccagaagatcttcaaggccgactaccaggtaccgccctgggtctccggcgacgcgcgccgcctcatcgcgcgcctgctcgtcgtcgaccccgccaagcgcgcctccatcgccgagatcatgtgcacgccgtggttcaggaagggcttcgtgccgcccgtcctttcgcccccggtgacgcccaagaaacagcagctggacgaaggcgctgccctcttcgacaacgacgacgacgacgacaacagcaaccactctggcgccacctcccctcggtcgtgcaacgcgttccagctcatctcgtccatgtcctccgggttcgacctgtcggggctgttcgagagcgagcagaagaccgcgaccgtgttcacggcccgcgcgccggcggccaccgtggtggagaagctggagtccgtggcgcgcgccctaggattcgaggtcaccagggggaaaggctggaaggtgaggatggaggccaaggccgagggcacgaacggacggctcgcggccaccgccgaggtgctcgaggtggccgtggacgtggccgtggtcgagttcgtgcacgacgccggggacgcgctggactttaacaagttctgcgccgtcgacgtccgcccggggctcacggagatcgtctgggcgtggcagggcgacagccccgctgccgccgtcggcaccgcgtgaacaagcgtcctctggcgtctagctcgagacccagctttcttgtacaaagtggt

SEQ ID NO: 198 - DNA, 1382 bp, Zea mays
atggtgggcggtggcggcggcgggccgctgcggcgggtgggcaagtacgaggtgggacgcaccatcgaggaaggcaccttcgccaaggtcaagttcgcgcagaacaccgagaccggggaaagcgtcgccatgaaggtgctcgaccgctcctccatcctcaagaacaagatggccgaacagattaagagagaaatatccataatgaagcttgtcaggcatcccaatgtcgttaggctacacgaggttttggcaagccggaagaagatatttataattctggagttcatcactggcggcgagctattcgataaaattattcgtcatgggagactcagtgaagcagatgcacgcagatactttcagcaacttattgatggtgttgatttttgtcacaagaaaggagtctaccatcgagacttaaagcctgaaaatctcctccttgattcccaaggcaatcttaaaatttcagactttggactgagtgcatggcctgctcagggatctttccttctacgtacaacctgtgggactccgaactatgttgccccagaggttctcagtcataagggatataatggcgcacttgctgatacatggtcatgtggagtaattttatatgtattgttagcaggttatcttccatttgatgaagtggacctgactaccctttatggaaagattgagagtgcagaatattcattcccagcctggttttcaggtggtgcgaaatcactgattcgtagaattcttgacccaaatccagagacacgaatcaggatagaagagatcagaagtgatgaatggtttcagaaaaattatgaacctatcaaagaaatagaaaatgaggaagtcaatctcgatgatgtcaatgcagcttttgatgatcctgaggacgataatgaggatgcttttgaagatgaaacaggtcctctaacacttaatgcattcgacctaatcattctttcgcaaggattgaatcttgcagcgctctttgaccgcagacaggactgtgacaagcttcaaaatagattcttatcacgcaatccagcaaaggttatcttgtcaagcatggaggttgttgcgcaatcaatgggatttaagacacacattcgcaattataagatgagggtggaaggtctaaatgccgacaagactagccatctctcagttatggttgaagttttcgaagttgctccatcaatcttcatggtagaactacaaagagcagcaggagatacttcagagtataacacgttcgtaaataactactgcagcaaattagatgatatcatctggaaatttccaactgagaagggaaaatcgaggataccccggttatcaaagtctcattcatagctcgagacccagctttcttgtacaaa

SEQ ID NO: 199 - DNA, 1579 bp, Zea mays
acaagtttgtacaaaaaagcaggctcctgcaggaccatggagggagctggaagagatgccaaccctttgggcggttaccgaattggcaaaaccctaggaattgggtcgttcggtaaagtgaagatcgcggaacatatattgactggccataaggtggcaatcaagatcctcaatcgccgtaagatcagaagcatggaaatggaagagaaagtgaagagagaaatcaagatactgagattatttatgcatcctcatatcatacgcctttatgaggtgatagatacacctgctgatatttatgttgttatggagtatgttaaatctggagagttgtttgattacattgttgagaagggaagactacatgaagaagaagcccggcgcttttttcagcagatcatatctggtgttgaatattgccataggaacatggttgctcaccgtgatttaaagccagagaatcttcttttggattcgaaatgcaacattaagattgctgattttggcttaagtaatgttatgcgtgatggtcactttcttaagacgagttgtggtagcccgaattatgcagcacctgaggtcatatctggtaaactatatgctggtcctgaagttgatgtctggagctgcggcgttattctttatgctcttctttgtggcactcttccatttgacgatgagaatattctaaacctttttaagaaaataaagggtggaatatatacccttcctagtcatttgtcaccttcagcgagggacttgattcctagaatgctggttgttgatccgatgaaaaggattacaatacgtgaaatccgtgaacatgtgtggttcaaaattcaacttccgcgctatttagctgtaccgcctccggacactgcacaacaagttaagaagctggacgaggaaacccttaatgatgttattaagatgggttttgacaagaatcagctaattgaatctctgcacaacagattgcagaatgaggcaacagttgcctattatttactcatggacaataggcttcgtacaaccagtggttatcttggatctgagtttcaagaatctatggacccatctttctctcaagtacatgctgaaacaccaacttcagcaactgaacatcgacagcatgtgtttacagaatctccggggtctggtttgaggcagcattttgcatctgaaaggaaatgggcccttggtcttcagtctcgagcacatccacgagaaataataagtgaagtgcttaaagcactgcaagaactgaatgtttactggaaaaagattggacactacaacatgaaatgcagatggagtcctggctgccttgagagtatgatgcataactgtgatggctttagtgcagagtctgctataattgaaactgatgatctcatagcgaaatcaacccgtatagtgaagtttgagattcagctttacaaaacgagggatgagaagtaccttcttgacctgcaaagggtcagtggaccacaactcctctttctggacttgtgttccgcctttctaacgcagctgagagttctttagctcgagacccagctttcttgtacaaagtggt

SEQ ID NO: 200 - DNA, 1556 bp, Zea mays
atggatggaagtagtaaagggagtgggcattctgaagcattaaggaactacaacctgggaagaactttaggtatcggtacatttggaaaagtgaagattgcagagcataagcttactggacatagggttgctataaagatcatcaactgccgccaaatgagaaatatggaaatggaagagaaagcaaagagagaattcaagatattgaagttgttcattcacccccatatcattcggctttatgaggtcatatacacacctacagatatatatgttgtgatggaatattgtaagtatggcgagttatttgattacattgttgagaaaggcagattacaggaagatgaagctcgtcgaatcttccagcagatcatatctggcgtcgaatactgccatagaaacatggttgtccaccgtgacctaaagccggaaaacttgttacttgattcaaagtataatgtaaaacttgcggattttggtctgagcaatgtcatgcatgatggccattttctgaagactagctgtgggagtccgaactatgctgctccagaggtaatatctggtaaactatatgctggacctgaggtcgatgtatggagttgtggggtgattctttatgctcttctttgtggaactcttccatttgatgatgagaatattcccaatctgttcaaaaaaattaagggaggtatctacacacttccaagtcatttgtctgctttggccagggatttgatcccacgaatgcttgttgttgagcctatgaagagaatcacaattagggaaattcgggagcatcaatggttccagattcgccttccacgttacttggcagtgcctccaccagatacgacacaacaagccaaaatgattgatgaagatacacttcgagatgttgttaatatgggatttaacaagaaccatgtgtgtgaatcactgtgcagcagacttcaaaatgaggcaactgttgcatattatttactattggacaatcggtttagagcaactagtggctatcttggggcagattatcaagaatcaatggacaggaatttaaatcagctggcgtcatctgaatcatctagttctggtacgaggaattatgttccaggaagcagtgatcctcatagcagtggtttgcggccatattatcctgttgaaagaaaatgggcgcttggacttcagtctcgggcccaccctcgtgaaataatggttgaggtcttaaaagcacttcaagaattaaacgtcagatggaagaagaatgggcactacaacgtgaaatgcagatggtgcccagggtttcctgaagttaatgacacgttagatgccagcaacagctttcttggtgactctaccatcatggataatgatgatgctaatgggaggctacctactgtgatcaagtttgaattccagctttacaagacgaaggacgacaagtacctcttagatatgcagagagttactggacctcagctgctcttccttgacttctgtgcggccttccttaccaagcttagggttctatagctcgagacccagctttcttgtacaaa

SEQ ID NO: 201 - DNA, 866 bp, Zea mays
atggcgacacctgccgcagagaagccggaagatgtagagatccgtgaggtttgggcggacaacctcgagacagagttcgccgtgatccgcgacatcgtcgacgactatccgtatgtggctatggacactgagtttccgggcgttgtgtgtcgtccgctcggcacttacaagtcggcggccgagttcaactacgccactcttaaagctaacgtggacatgctgaagcttattcagctcgggctcaccttgtccgacgagcatggtgggctgccggcgctaggcccagacggtcgtccctgcgtctggcagttcaactttcgaggatttgaccctcggactgatgtggctgcagcggactccatcgatcttctacgccgtagtggtattgacttctctcgccatgctgctgatggagtcgactctcgctgctttgctgaactgctcatgtcctccggcgtagtattgaattcagatgtgcattgggtgacttttcatagcggctacgactttggctacctgctcaagctactcactggcacaaatctccctgatacgctgccaggattcttcgatctcatcaagatttactttcctgttatctacgatataaaacacttgatgaggttctccaatagcctccatggagggctgaacaagcttgctgagctgcttgatgttgcaagggttggaatctgccaccaggcagggtctgattcgcttctgacagcactgtccttcaagaagcttaaagaggcatacttcaacgggttaactgagaaatatgctggtgtgttgtatgggcttggctttgagggtgtagagaccacctctgctcactagctcgagacccagctttcttgtacaaa

SEQ ID NO: 202 - DNA, 647 bp, Glycine max
acaagtttgtacaaaaaagcaggctcctgcaggaccaccaacatgcgttccagcaacggtacatcaagcagcagggcctccaacggtaacacagggcgccaccctgtttaccgtggagtgaggcgtaggagtagtggtaaatgggtttctgaaatccgtgagcccaaaaaacctaacaggatttggttagggacatttgccacccctgaaatggctgctattgcctatgacgtggcagcgcttgctcttaagggtaaggatgctgagctcaacttccctaactcggcttcctccctccctatccctgcatcatctgcagctcacgacattcagatggctgcagcactagctgcaaccgctgtcggagcagcgaatgatgcactggaaggaagccaaggaggaaatgtttcggtttcattggcggaagagttttcagggggaaacttaaatcactttgtggatgaggacttgatctttgacatgccgaatattctggtcaatatggctgaaggaatgctactcagccctcctcgttttgataattttgctgctaccgactatgaatacatggatgaagatcctaacctctgggggttccctaattactagttactagctcgagacccagctttcttgtacaaagtggt

SEQ ID NO: 203 - DNA, 944 bp, Glycine max
atggaggtagcagtggccaaagcgttgaaaccgagtttaaggagagagttcatcgttcagcaaatgctctgcgaggatattttcagcctgaacgccaacaccgtcgccgccggcgaagatttctccgtcgacgacctatttgacttctctaacggctctcttcacaacgaacaacaacaagaatacgacgaagggaaacaaagtttatcggcttcagaggaccgcggagaagacgattgcaactccaattccaccggcgtttcctatgattcacttttctccaccgaattagccgttccggccggtgatttggaggacctagaatgggtttcacactttgtggacgattcactcccggagctgtcacttctatacccggttcgttcggaggaagcaaaccggtttgttgaaccggaaccctcagcgaagaaaacgccttgttttccgtgggaaatgaaaataacgaccaaggcgagaaccgtacggaataggaagcccagcaacagtcgcatgtggtcgttgggtagcccgttgctctcgctgccgtcttcgccgtcttcgccgtcgtcgtgttcttcttcggtgagggagccgccggctaagaagcagaagaagcaagcccaggcccagcccgttggggcccagattcagcggcggtgcagtcactgccatgtgcagaagacgccgcagtggaggaccggcccactgggcgcgaagaccctctgcaacgcgtgcggggttcggtacaagtcgggtcggttattttcggagtatagaccggcgtgtagccccaccttctgcagcgatattcactccaatagtcaccgtaaagtgttagagattcggaagaggaaagaggtggctcaaccggataccggcttggcccaggcccagactcaaatggttcccacctgctagctcgagacccagctttcttgtacaaa

SEQ ID NO: 204 - DNA, 938 bp, Glycine max
atgagcaacataagcatggtagaggcaaagctgccaccagggttcaggtttcatccaagagatgaagaacttgtgtgtgattacttgatgaagaaggtggcacacaatgattcccttctcatgataaacgttgaccttaacaagtgtgagccatgggatattcctgaaacagcttgtgtgggagggaaggagtggtatttctatacacaaagagaccgtaagtatgcaacagggctacgcacaaatcgtgccactgcttcagggtattggaaggccacagggaaggacaggtctatcctccgcaagggcacccttgtagggatgaggaagactttggtgttctatcaagggagggcacccaaaggaaataaaactgagtgggtcatgcatgagtttcgaattgaaggacctcatggacctccaaaaatttcttcttccaaggaagattgggttttgtgtagggtgttctacaaaaacagagaagtttcagccaaacctagaatgggtagctgctatgaggacacaggatcttcatctcttcctgcattaatggactcttacataagttttgaccaaactcaaacccatgcagatgagtttgagcaagtgccctgcttctccattttctctcagaaccaaacaagccccattttcaaccacatggccactatggagcctaagttacctgccaaccatgcaactaatgcatatggaggagcaccaaatttgggttattgcttagaccctttatcatgtgacagaaaaatgttaaaagctgttttgaatcagatcacaaagatggaaaggaatccacttaaccaaagcctaaaagggtcaccaagcttaggagaaggaagttcagagagttacttatctgaagtggggatgccccacatgtggaacaattactagctcgagacccagctttcttgtacaaa

SEQ ID NO: 205 - DNA, 1382 bp, Zea mays
atggatcaacctgaggaaaaccctgaattcccaagctgtgatgcctactttgaagctatccagtccaagaagaagttgccactgactttgcaagaatcactaactgctgcctttgctcagattccagtctcatccttccctgaggttccagctggtcgagtaattgaaattcctggtgatacttctgttattgatgctgtaaggactctctctgaacagaacataagggcagcaccagtactgaatccagaacctggggctcctactgattggcaggggaggtaccttggtgtcatcgattactcggcaatcatcctttgggtactagaaaatgctgagcttgctgctgttgcactctcggctgcatcggcaactgctgctggagttggcatgggtgctgttggtgctgttggggtggcagctttgggaacaactggcccagctgctgtagctggcttaactgcagctgcaattggggcttctgttgctggtggattaactgctgaaaagggtgtggcgaaggatgggctaactgctgcagatcatttaggggaggatttctacaaagttttacttcagcaggaacctttcagatcaacaacagttcgatcgattgttgagtcgtaccgctggtctccttttgtccccattacactggacacttccatgctgactgtacttctgttgctctctaagtacagattgcgaaatgtccctgtgattgagcctgaaaagcctatcatcaggaatttcattactcagactggtgttgtcaaagggctgcagcaatgtaaaggaagggactggtttgactacatttctgcacttcctctttcagacttaggacttccatttatgtccattgatgaggttatcaccgtcaacagtgatgatcttatcttagaagctttcaagtgcatgaaggataacaagattggtggtgtcccagtagtagaaggccccaaaagaaaacttgttggcagtgttagcataagggacatccgctttctgttgcttagacccaacttattttcaaatttcaggcagttgacagtcattgaattcatgaagactctaggctccactcttcctgattcagagagcaattgcctggtgaagccaccacccacttgcactcctgacgcttcccttggtagtgttattgacagcattgcatcaagaataacacacaggatatatgtagtggatgatgaccttgaggttgttggtgttgtgactctgcgtgatgtgatctcatgctttattcatgagccacccggttattgcgacaactatttggcttcagcgatggagaagcttgaggggaaaggagtcagatcagtggagaaaatttagctcgagacccagctttcttgtacaaa

SEQ ID NO: 206 - DNA, 1463 bp, Zea mays
atggcaacggcggcggcggatggcccccctgtggaaccgcagtctctgaagaagctgagcctctggtcgctcaagcggtccctggacctcttcgccccggcgcacgccctcctcttcacgcccgacgccgagagcaagcggattcgtactgggtgcaaggtgagtgcggagtacggtgcggtgaaggacctcacgccggagcaggggcgcggtgggcagggcaagggtcctgcgccgccatcttcaacagctttggcattgccaggaacacaagatacaaaagatgctcacggagaaggctctaggaatgccattgtccctgcaccacttatgctgccaaaagcacctgaatctaccatacctggcaaaaatacaactctgtcaattcctggatcatctgacagattttctacatccgcactgatggaaaggatacctagtagatggccacggcctacatggcatgctccttggaagaactatcgggtcatcagtggtcacttgggatgggttcgatctattgcatttgatccagcgaatgaatggttctgcactggttctgccgataggacaataaagatatgggatcttgcatcaggaaccctgaagcttacactgactggtcatattgagcaaattcgtggacttgctgtcagccaacgtcacacttatttattttctgctggtgatgacaaacaagtaaaatgttgggatcttgaacaaaacaaggttattaggtcctaccatgggcatctgagtggtgtttactgcctagctctccatccaacaattgatatcttactgactggtggccgggattcagtttgcagggtgtgggacatcagaacaaaagcacatgtttctgctttaacagggcatgacaacactgtctgttcagtgtttgctcgtcctacggatcctcaagttgttactggttcacatgatacaactattaaattctgggatcttgtagctgggaggactatgtgtacccttactcaccataaaaagtctgtccgagctatggcgcttcatccaaaggagaaagcatttgcatcagcatcagcagacaacgtaaagaagtttaaccttcccaaaggcgaatttctgcacaacatgctgtcgcagcagaaaacaataatcaattcaatggctgtaaatgaggatggtgtcttggcaactggaggggataatggaagcctgtggttttgggactggaagagtggtcataactttcaacaagatcagactatagtccagcctggatcactggagagtgaggcatgcatatatgccttctcatatgacgtgagcggatcaaggcttgtgagctgtgaggcggataagactataaagatgtggaaagaggacttgacagcgacgccagagactcatcccatcaatttcaagcccccaaaggacatccgaagatattagctcgagacccagctttcttgtacaaa

SEQ ID NO: 207 - DNA, 1462 bp, Oryza sativa
acaagtttgtacaaaaaagcaggctcctgcaggaccatggagaggtactcctccgacgccgacacgacggcgccgaactcgagccttagctcggcggcgagcagcacggggagcctcgcgcggtgctcgagcctgtcgcgcctgtcgttcgactgctcgccgtcggccgccgtggcggcggcggcgacgtcgtgctcgccgccgcgggcgtcggtgctgttgcggccgcacaggtccggcgacgtcgcgtgggcggccatccgcgcggcttcgacgacctccgcggcgccgctaggcccgcgggacttcaagctcgtgcggcgcatcggcggcggcgacatcgggacggtgtacctgtgccgcctccggagctcgccggagagggagagcccgtgcatgtacgcgatgaaggtggtggaccggagggcggtggcgaggaagcagaagctggggcgcgcggcggcggagaagcggatcctgcggcagctggaccaccccttcctccccaccctcttcgccgacttcgacgccacgccgcacttctcctgcgccgtcatggagttctgccccggcggcgacctccactccctccgccaccgcatgccgtcccgccgcttcccgctcccctccgcccgcttctacgccgccgaggtgctcctcgccatcgagtacctccacatgatgggcatcgtctaccgcgacctcaagcccgagaacgtcctcatccgcgccgacggccacatcatgctcaccgacttcgacctctcgctgcagtccaccacctcgccgtctctcgacggcgacaccgacaccgacgacgaggccagcggtggcgcgtcctgcttcccggaccacctcctccggttcaagcggcggcggaacgccgtggcggcgccgcgtccgcggttcgtggcggagccggtggatgcgaggtcgtgctcgttcgtggggacgcacgagtacgtggcccccgaggtggcgagcggcggcgcgcatggcgcggccgtggactggtgggcgtacggggtgttcctctacgagctcatctacggccgtacgccgttcgccggcgctacaaacgaggcgacgctccgcaacatcgtccgccgcccgctcgccttcccctccggctccggctcgtgcggtcccgccgacgccgacgcgcgcgacctcatcgcccgcctcctcgccaaggaccccgccgcccgcctcggctcccgccgcggcgccgccgacgtcaagtcccaccccttcttcaagtccctcaacctcgccctcctccgttcgtcgcgcccgcccgtcgtccccggcgccggcgccggcgccgcgccgctacaccggtcgcagtcgtgcaaggcggcgccgacaacgccgccgccgccgacgacgacgaagccggcgaacgccaccgcgcggttcgacctcttctagctcgagacccagctttcttgtacaaagtggt

SEQ ID NO: 208 - DNA, 1790 bp, Oryza sativa
atggcttcgatggatgagcctctttatcccatcgctatactgatagatgagctcaaaaacgaagatattcaattgcgtctgaactccattaggaggctctccacaattgcacgagcacttggagaagaaagaacccggaaggagttaattccttttctcagtgaaaataatgacgatgaagatgaggtgcttcttgctatggctgaagaattgggcgtgttcattccttacgttgggggtgtagaacatgctcatgttttgctaccaccattggagacattgtgtacagtggaggaaacctgtgtccgagacaaggcagttgaatctctgtgccgtattggagcacagatgaaggaaagtgacattgtagactggttcgttccagtagtaaagaggctagcagctggtgagtggtttacagctcgagtatcgtcttgtggacttttccatatagcatatccaagtgctcctgatcaattgaaggcagaattgaggaccatttatggtcagctatgccaagatgacatgcctatggtccgaagggcagctgcatcaaatcttggaaagtttgcagccacagttgaacagaactatctaaagacagaagtcatgtcgatatttgatgatctaacccaagatgatcaagattccgtacgcttgttggcagttgaaggctgtgctgctcttgggaaattgttggaaccacaagattgtgtagcacatatccttccagttattgtcaatttctcccaggacaaatcatggcgagttcgttatatggttgccaatcaattgtatgagctctgcgaggcagttggtcctgaacattctagggagcagttggtgccggcatatgttcgtctccttcgtgacaatgaggcggaagtgcggatagcggctgcagggaaagttactaagttctgtaggattttaagtcctcagcttgcaattcagcatattcttccttgtgtcaaggaattgtcatcagattcatctcagcatgttcgttcagctttggcttcagttattatgggaatggccccggtcttgggaaaggaggctacaatcgaacaacttcttcctattttcctttctttgctcaaggatgaatttcctgatgttcggctcaatataatcagcaagctcgatcaagttaatcaggttattggaattgatttgctgtcacaatcactgttaccggcgatcgtagaacttgcagaggataggcactggagggttcggcttgcaataattgagtacattcctttattggctagtcaattaggcgttggatttttcgatgacaagctgggggcactttgcatgcaatggttggaagataaggtcttctcaatcagagatgctgctgcaaacaacttgaagcgcctagctgaggagtttggtccagaatgggcgatgcagcatataatccctcaggtgctggagaagataaacaacccgcattatctctaccgcatgaccatcctgcaagctatttcattgctggcccctgtcatgggtgccgaaatcacttgtcaacagctgctccctgttgtgattaattcctcaaaggacagagtgccaaacatcaaattcaatgttgcgaaggttctgcaggcacttataccgatccttgatcaatctgttgtggagaagaacgtgaaaccatgcctcgttgaactcagtgaggaccctgatgtggatgtaagatactatgcaaaccaggcccttcaggcatgcgatcaaatcatgatgtcaagctagctcgagacccagctttcttgtacaaa

SEQ ID NO: 209 - DNA, 1301 bp, Zea mays
aaaaaagcaggctcctgcaggaccatgtttgtggaatttggctgtgggtttgtgagtgatagtcttgggctgatctctgatgcttgccatatgttgtttgattgtgctgcactggcaattggtctctatgcgtcctacattgcgagattgcctgcaaatgggatgtacaactttggaaggggcaggtttgaggttctgtcagggtatgtcaatgcagtgttcttggttcttgttggtgtgctgattgtgttggagtcgtttgagaggattcttgagcctagggaaatatcaactagtagtcttttgtcagtttcgataggtggacttgttgtaaacataatcggattggtgttctttcatgaggagcaccaccatgctcatggtggtacctgttctcactcacattctcattcacatcatggtcatgaacatcatcaacaccatggccatgaagagcacaaacatcataatcatgatcatcacggtgcgaataatgtgaaggcatgttgtgatcatcatggagatgacaaccatcgccatgatcaccatgggaatagtaaaagtgagggcattcataacaatatcatggataacacctgcaaggagaagcatagccatggccatgagcatcatcactatgaacattcggaacattgccatcagagcagagagcattctcatcaaaattgcaacaatattactgttgagcaacagcttcttgacattcctcttagcaatatatcttctcatgacacagaaagtcactcttcaaaagaaggattgagaccatcagattctggaaacagtaataagccaggacaccggcaccacattgatcacaacatggaaggaatcttcttgcatgtcctagctgacacaatgggaagcgttggtgttgtaatatcgaccttactgatcaagtacaagggatggcttatagctgatccgatatgctcagtattcatttctgtaatgatcgtatcttctgttattccattgttaaggaattctgctgaaattctgttgcagagagtcccaagaaatcatgaaaaggatttggctgtagcattggatgatgttatgaagatcgaggacgtccttggagtcaacaatgttcatgtatggaacttaactaacactgacactgtaggtacttttcagttacatgtatcagcagaagctgacaagtcttccataagaaataaagcttcacggatatttcaagaagctggggttcaagatctgactatcgagattgagtgtgttaaaaggtagctcgagacccagctttcttgtacaaa

SEQ ID NO: 210 - DNA, 1369 bp, Zea mays
acaagtttgtacaaaaaagcaggctcctgcaggaccatggtctcctcctcctcctcgtcctccagcttcctcctcccgctgctactgctctgctcgcacctctccctcgcctcggcagagacggcgtcggcggcggcggacctcctcagcgaggcgcgcgcgccggggttcgccgcgtggctgcgcggcgtgcggcgccgcatccaccagcgccccgagctggccttccaggagttccgcaccagcgagctcgtgcgggccgagctcgacgcgatcggcgtcccgtaccggtggcccgtcgcccagaccggcgtcgtggccaccatcgcgggcgccgccgccggccccgtcgtcgcgctccgggccgacatggacgcgctccccgtgcaggagctggtggactgggaacacaagagccaggagagtgggaaaatgcacgcttgcggacacgacgtgcacacgacaatgcttctgggggctgccagaatactccaggatcgcaagagcgacctaatgggcaccgtgaagcttgtattccagccggcagaggagggccagggcggcgcgtactacgtgctgcaagaaggcgttcttgacgacgcgtcggccatattcggcttgcacgttgacccggccctccccgtcggcgtcgtttcgtccaggccaggacccttcgcggcgacgtccggtcggttcctggcgacggtcaccggtaaaggcgggcacgccgcgatgccccacgaatccatcgaccctgttgtagctgcagccactactgtcgtcagcctccagaagatcatctcccgggaaatcgatcccctgcagggcgcggttgtgtccgtcacttttctgaagggaggagaagcgtacaatgtcatcccagagaatgtggcctttggcggcaccatgaggagcatgacgaatgaaggtctatcgtatctcaagaagaggatcaaagagatcgtcgaaggacaggcagcggtgcaccactgcagtgccagcgtggacttcatggaggacacgatgaagccgtacccggccgtggtcaacgacgaagggatgtacgctcacgccaaggaggtggccgagggcctccttggggagaagaacgtcagggtgggtccccaggtgatgggcgcggaggacttcgggttctacgcgcagaggatggcgggcgccttcttcaccatcggggtcggcaacgcgagcaccatggcgaccatccattccacccactcgcctcacttcgtcgtcgacgaggacgtgcttcccgtcggagctgcgttccatgctgctgtggcgattgaatatgtcaggaagaaccgtgcgtccacctagctcgagacccagctttcttgtacaaagtggt

SEQ ID NO: 211 - DNA, 1007 bp, Zea mays
aaaaaagcaggctcctgcaggaccatggccctggcctccctcgcggcctcgctcccagtcgccgccaccgccgccgcggtgagattcccattccgtttccgcatcggtcgcgccatggcctccgccgccgcaggggcctcgccggcgagggtggccgtggtacagatgacctccgtgggggacgtcgacgccaactacgccacctgctcccgcctcaccaaggaagcagctgcttctggagtgaaatttctttgcttccctgaggtcttctcattcattggatccaaggatggcgaggctatgaagctagctgaaccattagatgggccaataatgcagagatactgctcacttgcaaaagaatcaagcatgtggctatctcttgggggttttcaagaaaagggacctgatgattctcaccagtacaatactcatgtattaattgatgacactggaaaagttaggagctcatatcgaaaaatacatttgtttgatgttgatgtacctggcaatatggtgtacaaggaaagtcgtttcacagccgcaggtgatactattgttgctgtggatagcccttttggacggttggggcttactgtttgctatgatttgagattcccagagctttatcaaattttgcgttttaagcatcaagcacaggtattactagtgccatctgcattcacaaagataacgggagaggcacactgggaaattctcctccgagctcgtgcaattgagacacaatgttatgttattgctgctgctcaagctggaaagcacaatgaaaaaagagaaagttacggtgattctataattattgacccatgggggacagtgatagctcgacttccagatcggctctccactggatttgcagttgcagatcttgatttgtcaaaagttgaggctgtgagaactcgaatgccaatttcagagcaccggaagttcgacagcgattggaaacccacgcctctttagctcgagacccagctttcttgtacaaa

SEQ ID NO: 212 - DNA, 1352 bp, Glycine max
atgggcaattgcggtaccagagaggaatctgctgtggtttccaacgctcaagttgttcagcagcttcaccatgcgacgtcgttgggcgcgagtgcgaggagccagaatgcaggtagcgagaagaagcacggtcacggtcacggtcacaggcacaatctgagcgagtgcgcttcggatctgagcgagtcctgttccacaccgcacggtaacaatagcaacaacacgctgctctacacgcacgtgatcgccttcacgctctacgagttggagaccataacgaagagcttccgcggcgactatatcctcggtgagggaggcttcggcaccgtttacaaaggttacattgatgagaacgtcagagtcggactcaaatcgctccctgtcgctgtcaaagtgttaaacaaagagggtttacaaggacatcgagagtggcttacggaggtgaattttctagggcagctgaggcatcctaatctggtgaagttgattgggtactgctgcgaagatgatcacaggctgcttgtgtatgagttcatgtttcgagggagtttggaaaatcacttgttccgaaaggcaactgtccctttatcatgggctacaagaatgatgattgctcttggagcagccaaaggacttgcctttctccacaatgctgaaaggcctgtaatctatcgtgacttcaaaacgtctaatatattattggactccgactatacagccaaactttctgattttggactagctaaagcaggaccacaaggtgatgaaacccatgtatccacccgagtgatgggtacatatggttatgctgcccctgaatatgtaatgactggccacctgacggctaggagtgatgtctatagctttggcgttgttcttttggaacttttaacggggaggaaatctgttgacaagaccagacctggaaaggaacagagcttggtagattgggcacggccgaagctcaatgacaagagaaagctccttcaaataattgatcctagattggagaatcaatactcagtgagggcagcacaaaaagcatgtagcttggcttattactgtttgagtcaaaatcccaaagcaaggccactaatgagtgatgtggttgagacattggagcccttgcaaagttcaagtgttggtccaggtgaagtctcattatctggatcaaatagtgggagtgctgggccttttgctatgaacaaaatctctgactaccggatgcgccacaagttttcaaacaacgttggtcccggtgctacttgtcggtctccgaacccgaattgctcaccaggtggcccagcaacattacgggtcagatagctcgagacccagctttcttgtacaaa

SEQ ID NO: 213 - DNA, 701 bp, Glycine max
atggtgaggggaaagactcagatgaagcgtatagagaatgccacaagcaggcaagtaactttctcaaagcggcgaaatgggttgctgaagaaggcctttgagctatcagttctgtgtgatgctgaggttgctctaatcatcttctctccaagagggaagctctatgaatttgctagctccagcatgcaggagtcaattgaacgataccgcaggcataccaagcatgttaatccaactacattcagatcagttgaacaaaatatgcagcatctgaagcaagaggcagaaaacatgatgaagaagattgaccttcttgaagctgcaaaacggaagttcttgggggaaggtttgggggcttgctccattgaggaactgcaacggatagaacaacagttggagaggagtttaagtaatgttagagcaagaaaggtttttaaggaacaaattgaacaactaaaagaaaaggaaaaagccctactagatgaaaatgccaagctcactgaaaatgccaggctctctgagaagcatgacatccatctacagccagcaacaaagaatcagaatgtgaatcaaccccaatgcaatgcagaaagtagttcaagttcagatgtggagaccgaattgttcattggacttcctgatacaagagcaagacacatctctcatcacgtctagctcgagacccagctttcttgtacaaa

SEQ ID NO: 214 - DNA, 683 bp, Glycine max
atgtcgagcgccgatcccgagcacagagaagaggaggaggcacccgccgttggcgacgacgaggacaccggagctcacgtcgctccaatcgtcaagctcgaggaggttgctgtcaccaccggcgaggaggacgaagatgcaatcctggatctcaaatcgaagctttaccggttcgacaaggacgggaaccagtggaaggagcgtggcgccggcactgtgaagttcctgaagcataaggcttccggcaaggttaggcttctcatgaggcaatccaagacgctcaagatctgcgctaatcatctcattttgcctacgatgagtgtgcaagagcacgctgggaacgagaaatcctgcgtttggcatgctagggattttgctgatggtgaactcaaggacgagctcttctgcatccgttttccttctattgaaaattgcaaaagcttcatggaaacattccaagaagttgctgaaacacaaaaggcagaggatgagaaggaatcatctgatgcagctggtcttattgagaaattaagtgttgaagagaaggctgatgcagagaagaaagatgaagagaagtctgaggacaaaactgtggagaaagaatctgcatcaggaaaggaaagcaaggcagttgaagagcctgcgtcctcagcttagctcgagacccagctttcttgtacaaa

SEQ ID NO: 215 - DNA, 659 bp, Zea mays
atggccgacccggcggagcaccgtccagcggaggaggacgaggaagccgcggcggccggcgaggatgaggacaccggcgctcaggtcgcgcccatcgtgaagctggaggaggtcgccgttaccaccggagaggaggacgaggacgtacttgtcgacatgaaggcgaagctctaccggttcgacaaggaggcgaaccagtggaaagaacgtggcacaggcactgtgaagctgcttaagcacaaggagaccgccaaggtccgcctcgtcatgcgtcaggcgaagacgcttaagatctgtgctaaccatctagtggtggcgacgactaagatgcaggagcacgcagggagcgacaagtcgtgcgtgtggcacgctctggacttcgccgacggtgagctcaaggaggagatgtttgctatccgttttggatctgtcgagaattgcaagaagttcaaggacactgttgaagagatagctgaagagcaaggaaagaccgaggtgaaagaaaacgaggaagtctccactgccgccgcagatttggtacagaagttaacagtgacagaggcgagcaaggagggaaatgcagaggaagaggaggctcctgcatctgacgataagaaggatgctaaagggtagctcgagacccagctttcttgtacaaa

SEQ ID NO: 216 - DNA, 545 bp, Zea mays
atgatgctgcgcgcggcgggcaggcgactcctcggcgtaggaggcggcgatccagcgcccgcggtcgctgctgctgtggcggcgagcaggagcagaggataccacgagcgggtggtggaccactacaacaacccgcgcaacgtggggtccttggacaaggacgacacggacgtcggaacggggatcgtcggcgcgccggcgtgcggggacgtcatgaagctgcagatccgcgtcgacgaggggtccggcaggatcgtcgacgcgcgcttcaagaccttcggctgcggctccgccatcgcgtcctcctccgtcgcttccgaatgggtcaagggcaagcaagtggaggaagtggtggccatcaagaacaccgagattgcgaagcacctgtctcttccaccagtgaagctccactgcagcatgctcgctgaggacgcaatcaaggccgccgtgaaggattacgaggcaaagaaagggaagaagatggccaaggcagaggagcaggacaccccatgcccgtagctcgagacccagctttcttgtacaaa

SEQ ID NO: 217 - DNA, 798 bp, Zea mays
acaagtttgtacaaaaaagcaggctcctgcaggacccagcagtagagatggccgccctcgccgcctcctccacggccgccttcgccgccaagccgcgcctcccacgcgcgcgcctcaccgtggcctgctccgccaccggcggcgacggcaacggcagcagcagcagtgtgtcgctcgcatcctccgtgaagacgttctcggccgcgctggctctgtcgtcggtgcttctctcctcggccgccacctcccctccccccgcggccgctgacatcgcggggctgaccccgtgcaaggagtccaaggcgttcgccaagcgcgagaagaactcgatcaagaagctcaccgcgtcgctcaagaagtacgcgcccgacagcgccccggccctcgccatcaacgccaccatcgagaagaccaagcggcggttcgagaactacggcaagttcggcctgctctgcggcgccgacggcctgccgcacctcatcgtcagcggcgaccagcggcactggggcgagttcgtcaccccgggcctgctcttcctctacatcgccgggtggatcgggtgggtcggcaggagctacctcatcgccatcagcggcgagaagaagcccgccatgagggagatcatcatcgacgtcgagctcgccacccgcctcctccccagggggttcatctggcccgtcgcggcctaccgcgagctcatcaacggagacctcgtcgtcgacgacaaggacatcggctactactagctgctgcacctgtgcttgtagctcgagacccagctttcttgtacaaagtggt

SEQ ID NO: 218 - DNA, 1718 bp, Zea mays
aaaaaagcaggctcctgcaggaccatggcccgcagggcgctggagctcgcggcggttctgctcgcgctggcggcgctggcggccgtggcggccggaggggacatcgtgcaccaggacgacgaggcgcccaagatccccggctgctccaacgacttcgtgctggtaaaagtgcagacctggatcaacaaaaaagataaagatgagtttgttggtgttggtgctcgatttggccccaagatagagtcaaaggaaaagcatgccaactggacaaacttgctgttagcagacccttctgattgctgcacccctccaagagagaaggttgctggagatattttgttagtggagaggggaaactgtaagttcactacaaaagctaaggtggctgaatctgctggtgcttctgcgattataattatcaatgataagcacgagttatacaagatggtatgtgagaccaatgaaacaaatttagatattggcatacatgctgttcttctgccaaaagatgcaggctcttctttacaaaggtctctctctagtggtgaagtcttagtggagctgtactctccagatcgtcctctggttgatactgcagaggtgtttctgtggcttatggcagttggtaccattctttgtgcatcatactggtcagcatggagtgcccgagaagcagatattgaacaagagaagcttctgaaggatggtcgtgaagtagcaccaaactttgagcctggaggttctagtggtatggtagatatcaacatggtatccgcaatactgtttgtggtgattgcatcatgcttcttgataacactctacaagctgatgtcccattggtttgtggagcttctggtggttatcttttgcataggtggtgtggagggtctgcaaacatgcttggtggccttactgtcaatgtcaaggcggtttaaacctgctgcagaatcgtatgtgaaagtgccattttttggagctgtttcataccttacattggcagtttgtccgttttgcattctgtttgctgttctgtggggtgtttatcgtcggttgccttatgcttggattgggcaagatattcttggtattaccttgatcgttacagtcatccaaattgttagaatacctaaccttaaggtgggttcagccctcctgggttgtgccttcttatatgacatcttctgggtttttatctccaagatgttgttccatgaaagtgtgatgattgtggttgcacgtggtgacaagactgatgaggatggtgtacccatgctgttaaagattcctcggatgtttgatccatggggtggatacagcatcataggctttggtgatatccttcttcctgggctgttggttgcttttgcattaaggtatgattgggctgccaagaagaccttgcaatctggctactttttgtggtcaatggtggcatatggttccggtaatatgtctcctaattacatacgttgccttgaaccttatggatggccatggccagccggctctcctttacatcgtgcctttcacaatcggcaccttcttagcactgggcatgaagagaggcgagctcagaaacctgtggacaaaaggacagcccgagagagtgtgcacgcacatgcacccatcccccaaggattcgcctgttgcggtcagctcgctgtcgtagacaaggctaacgaccttacctagctcgagacccagctttcttgtacaaa

SEQ ID NO: 219 - DNA, 713 bp, Zea mays
atgaatgttgaaaagctcaagaagatggcaggtgctgtgcgcaccggggggaagggtagcgtgcgcaggaagaagaaggcagtccacaagactacaaccacagatgacaaacggcttcaaagcaccttgaaaagaataggagtgaacagcattcctggtattgaagaggtcaacatctttaaggatgatgttgttattcagtttgtaaatcctaaagtgcaagcgtcaatggtgctaatacatgggtggtcagtggaactccacagacaaagaagctgcaagatctgcttccgtcgattatcaaccagcttggtcctgacaacctggacaatctgcggaggctcgcagagcaattccagaagcaggcctctggtgcttctggtgcagaggctggtgccagcgctggggctgttcaggacgatgatgatgacgttcctgagcttgtccctggagagacatttgaggaggccgcggaagagaaaaaggagtcctcatgattttgctacatgcctgctgttgttaaaccatgccattagaagggacctgttgagaactctgacctaccttatttgtgcctgtgggactggttatgtcatgatcgagaatttggtagggcgtgctggtgggattttacatgaagtatgcctcttttttttcatccatatctcccttgcttttgtgtggtagctcgagacccagctttcttgtacaaa

SEQ ID NO: 220 - DNA, 1061 bp, Zea mays
atgaccggaggaggggaggagcaggggaggtcgctgttcggcgtgtctctgacaaacaggcccaggtggcagcagttcttgatctgctcctcgggcttcttcttcggctacctcgtcaatggcatctgcgaggagtacgtgtacaacaggcttcagttcagctacggctggtacttcacgttcgtgcaggggttcgtgtacctggcgctgatacggctgcaggggttcacggtggagcagatggtgaacccgtggcggacctacgtgcgcctctcggcggtgctcatgggctccaatggcctcaccaagggctccctcgccttcctcaattaccctgcacagatcatgttcaagtcaaccaaggttctaccggtgatggtgatgggagccttcatccctggtctgaggcgcaagtacgcgttccaagagtacgtgtcggccgtgatgctcgtcgtcggcctcatactcttcacgctcgcggacgcgcagacgtcgcccaacttcagcatggccggcgtggccatggtgtccggggcgctcgtcatggatgctttccttggcaacctgcaagaagcaatcttcaagatgaacccggacacgactcagatggagatgctgttctgctccactgtcgttggcctcccgttcctagcggtgcccatggtgttaacaggagagctcgtgacggcttggacttcctgctcccagcatctgtacgtgtacgcggtgctggtgttggaggcgatggccacgttcgtcggccaggtctccgtgctctccctcatcgcgcttttcggtgcagcaaccacagccatggtgacgacggcgaggaaggcggtgacgctgctgctgtcgtacctgatattcaccaagcccctgacggagcagcacgcgacggggctcctcctcataaccatgggcatcgtcatcaagctcctgccggagaacaaggagggacgcccgcgccggtcgcccaagaatgacgacgacgacaagccccgggagggtagagaagcgggggaggaaacagcatagctcgagacccagctttcttgtacaaa

SEQ ID NO: 221 - DNA, 1262 bp, Zea mays
atgaatgcattggcagcaaccagcaggaacttcaagcaggcagctaagctgctgggcctcgactccaagctggagaagagcttgctcattccattcagggagatcaaggttgaatgcacaatcccaaaagatgatgggactttggcatcctatgttggatttagggttcaacatgacaacgctaggggacctatgaagggtggaatcagataccaccatgaggttgaccctgatgaagtcaatgccttggcacaactgatgacatggaaaacagcagtggctaacataccatatggaggagctaaaggtggaataggatgtagccctggagacctgagcatctccgagcttgagaggcttacccgagtttttactcagaaaatccatgacttaattggcatccataccgacgttccagctccagatatgggcaccaactcacagacaatggcatggatacttgatgaatactcaaagttccatggttactcacctgctgttgtgacaggaaagcctgttgaccttggaggatcattgggaagagatgcagctactggaaggggggttctgtttgctactgaagctttgcttgcagagcatggcaaaggcatttcaggccagcgtttcgtcatacagggattcggtaacgttggttcctgggcagctcagctgatcaatgaagccggtggcaaggtgattgctatcagtgatgtcacaggcgctgtcaaaaacgtcaatggccttgacattgcccagctagtgaagcactcggcggagaacagagggatcaagggcttcaacgggggagatgccatcgatccaaactcattgctcactgaagagtgcgacgtcctcatcccagcagcgcttgggggagtcataaataaggataatgctaacgacataaaagcaaagtacatcatcgaggctgccaatcacccctcagacccagaggcagacgagatcctgtcaaagaaaggcgtcatcatcctccccgacatcctcgccaactctggcggtgtcacagtgagctacttcgagtgggttcagaacatccaggggttcatgtgggacgaggagaaggtgaacgcggagctccggacgtacatgacgcgcgccttcggggacgtgaaggagatgtgccggagccacaactgcgacctccgcatgggcgccttcacgctgggcgtcaaccgcgtcgcgcgcgccaccgtcctcaggggatgggaagcctagctcgagacccagctttcttgtacaaa

SEQ ID NO: 222 - DNA, 652 bp, Oryza sativa
tttttgtaggtagaccgcgggatatcacaagtttgtacaaaaaagcaggctcctgcaggaccggtgccgacgccaatgtactcgtccacctcgtcgcactcggatcccgagagcattgccgagtccaacccgcacccgccgccgatgaagaagaagaagaaggccaagaagccggccgctccggccgccgcctctgacgccgaggccgacgccgacgcggcggacgccgactacgaggaaggcggcgcgctcgcgctcccgccgggcaccgtgcggcggtgcacgcattgccagatcgagaagacgccgcagtggcgcgcgggcccgctcggccccaagacgctctgcaacgcgtgcggcgtccgctacaagtccggccgcctcttcccggagtaccgcccggcggcgagccccaccttcatgccgtccatccattccaactcccacaagaaggtggtggagatgcgccagaaggcaacccggaccgccgacccgtcctgcgacctcctgcagtacatccgccgccgggattaatctcccggcggtagctcgagacccagctttcttgtacaaagtggtgatggggatcccccaccctgcaatgtgaccctagacttgtccatcttctggattggccaacttaattaatgta

SEQ ID NO: 223 - DNA, 2327 bp, Zea mays
atggcgtcccacattgttggataccctcgcatgggccccaagagggagctcaagtttgcacttgagtctttctgggatgggaagagcaccgctgaggatctggagaaggttgctaccgacctcagggccagtatctggaagcagatggctgatgctgggatcaagtacatccccagcaacaccttctcgtactatgaccaggtccttgacaccactgccatgctcggcgctgtccccgaacgctactcatggactggaggagagattgggtttgacacctacttctccatggccaggggcaacgccactgtccctgctatggagatgaccaagtggtttgacaccaactaccactttattgtccctgaattgggcccaaacaccaagttctcctatgcttctcacaaggctgttaacgaatataaggaggctaaggcgctcggtgttgataccgtgccagtacttgttggaccagtctcgtacctgttgctctcaaagcccgccaagggtgtggagaagggattccctcttctttcccttcttagcagcatcctcccagtctacaaggaggtcattgctgagttgaaggcagctggggcttcatggattcagtttgatgagcccactcttgtcctcgaccttgattctgacaaattggctgcattctctgctgcatacgcagaacttgaatctgtactttctggattgaatgtgcttgttgagacttactttgctgatgttcctgctgagtcctacaagaccctaacatctctgagcagtgtgactgcttatggttttgatcttgtccgtggaacccaaactcttgggcttgtcacgagtgctggtttccctgctggaaagtacctctttgctggtgttgtggatggacgcaacatctgggctgatgatcttgctacatctctcagcactctccagtctcttgaggctgttgttgggaaggacaagcttgtcgtatcaacttcctgctcgctcatgcacaccgctgtggatcttgtgaacgagactaagcttgacagcgagattaagtcttggcttgcttttgctgcccagaaggttgttgaggttgatgctcttgctaaggcattggctggtcaaaaggatgaggcttacttcgcagcaaatgctgcagctcaggcctcgaggaaatcctcaccccgtgtgaccaatgaagaagtccagaaggctgctgctgctctcaagggctctgaccaccgccgtgcgaccaacgttagtgctagattggatgcccagcagaagaagcttaacctccccatccttcccaccactacaatcggttcgttcccacaaaccgttgagctcaggagggtccgccgtgagtacaaggcaaaaaagatctctgaggaggaatacgtcactgccatcaaggaggaaatcaacaaggtcgttaagctccaagaagagcttgacattgatgtgcttgtgcatggcgagcctgagagaaacgatatggttgagtacttcggtgagcagctctccggttttgcgttcactgccaatggctgggtgcagtcttatgggtcaaggtgcgtcaagcctccgatcatctacggtgacgtgagccgccccaaccccatgaccgttttctggtcgaagacggcgcagagcatgacgtctcgcccaatgaaggggatgctgactggcccagtcacaatcctcaactggtccttcgtccggaatgaccagccgaggtttgagacttgctaccagatcgctcttgcgatcaagaaggaagtcgaggatctcgaggctggtggtattcaggttatccaaatcgacgaggctgcactgagagaagggctgccgctccgcaaggctgagcatgcattctacttggactgggctgtccactccttcagaatcaccaactgcgagatccaggacaccacccagatccacacccacatgtgctactccaacttcaacgacatcatccactcgatcatcgacatggacgcggacgtgatcaccatcgagaactcgcggtccgacgagaagctgctctccgtgttccgtgagggtgtcaagtacggcgcgggcatcggccccggtgtctacgacatccactcccccaggatcccgtcggccgaggagatcgccgaccgcatcgacaagatgctggccgtgctggacaccaacatcctctgggtgaaccccgactgcggcctcaagacccgcaagtacacggaggtcaagcccgccctgaccaacatggtctccgctgctaagctcattcgcacccagctcgccagcgccaagtagctcgagacccagctttcttgtacaaa

SEQ ID NO: 224 - DNA, 771 bp, Zea mays
acaagtttgtacaaaaaagcaggctcctgcaggaccgcgagcgagatggagtggacgacggtggagacgagggacggcgcgaagctgagcgtgcggctgttcaagccccccgcgtccggaacggggttggagccggagccgagggaggacgtggcggtggtgctggtgcatccctacaccatcctcggcggcgtgcagggcctgctgcgggggatggcggagggcgtcgcgcggcggggttacaccgccgtcaccttcgacatgcgcggcgcgggccggtccacggggcgggcgtcgctcacgggctccaccgaagtcggggacgtcgtcgccgtctgccgatgggtcgcagagaacatcaagccgcgcggcatcctcctcgtcggatcctcagctggggcaccaattgccggatctgcagttgataaagtggatgaagtgattggttacgttagcatcgggtacccctttggtctgatggcctcagtcctattcggaaggcataatgatgctatactcaagtctgaaaaaccaaagcttttcatcatggggaccaaagatggcttcaccagtgtgaaacaactgcaaaacaagctcaaatctgcagctggacgggctgatacacacttgattgaaggagctgggcacttccaaatggagggccctgcttttgatgcccagatggtagaaattattattaaattcattaattccttgccaaaatagcatttatggtgtagctcgagacccagctttcttgtacaaagtggt

SEQ ID NO: 225 - DNA, 1085 bp, Zea mays
aaaaaagcaggctcctgcaggaccatgtccaagtcgggagcgctggatcttgcttctggcctcggagggaagatcaacaaggtggaagtcaagtcggccgtcgatgagtatgagaaatatcatggatactatggagggaaggaggaagcaaggaagtccaactatactgatatggttaataaatactatgatcttgccactagcttctatgagtatggttggggtgaatccttccactttgctcacagatggaatggagaatccttacgtgaaagcatcaagcgacatgagcattttcttgccctgcaacttggtttgaaaccaggaatgaaggttttagatgtgggctgtggaataggtggaccactgagagaaattgcaagatttagctcaacttcagttaccggattgaataacaacgaataccagataaccaggggaaaggagctcaaccgtttagcaggaattagtggaacatgtgattttgtcaaggcggacttcatgaagatgccgttcgatgacaacacttttgatgctgtttacgccattgaggcaacatgtcatgcacctgatccagttggttgctacaaggagatatatcgtgtgttgaagcctggccagtgctttgccgtgtacgagtggtgcattacggatcactatgatcctaacaatgcaacccacaaaaggatcaaggatgaaattgagcttggcaatggcctgccagatatcagaagcactcggcaatgtctccaggcagtaaaagacgccgggtttgaggttgtttgggataaggatcttgctgaagattctcccttgccttggtacttgcccttggatccaagccgattctccctgagtagcttccgtttgacctctgtgggacgcatgattacccgcacaatggtcaaggccctggagtacgttggtcttgctccgcagggcagtgagagggtctctaatttcctggagaaggctgcagaagggctggtagagggcggaaagaaggagatcttcacgccaatgtacttctttcttgttcggaagcctcttctggaatagctcgagacccagctttcttgtacaaa

SEQ ID NO: 226 - DNA, 815 bp, Glycine max
aaaaaagcaggctcctgcaggaccatgttggccatattccacaaagcttttgctcatccacctgaagagctgaacagtcctgcatcttacaaaggttccaagaagcctaaggttcctgaggaaactctcaaagatttcctttcccaccatcctcacaacacttgctccatgagctttggtgaagctgctgtgctagcttatgttcgtcctgatcaatccttctctcgtcatcaaaggttgttttgtgggattgataacatatactgtctcttcttggggagcttgaacaatttgtccctactcaacaagcaatatggattgtcaaagagtactgacgaggccatgtttgtgattgaagcttataagactctccgtgaccggggtccataccctgcagatcaagtggtcaaggaacttgatggcagttttgcttttgttgtctatgacagcaaggttggcagtgtctttgcagcactgggttctgatggaggagtgaagttgtattggggtattgcagctgatggatctgtggtgatctctgatgatctagaagtcataaaagagggttgtgccaaatcctttgctccctttccaacagggtgtatgtttcacagtgaaggaggtctgatgagttttgagcatccaatgaacaagttgaaggcaatgccaagggtggacagtgaaggggccatgtgtggggccaacttcaaagttgataagttcgccagagtcaacagcattcctcgagtgggaagtcaatccaattggatggaatgggaccaacattagctcgagacccagctttcttgtacaaa

SEQ ID NO: 227 - DNA, 1034 bp, Zea mays
aaaaaagcaggctcctgcaggaccatggtcaagtccaaggccatcagggtccacgagctgggcggccccgaggtgctgcggtgggaggaggtggaggtcggggagcccggtgaaggggagatccgcatcaggaccaccgccgtcggcgtcaacttcatcgacatctactttcggaagggggtctacgccgcgcccaccatgcccttcaccccaggaatggaagccgttggcgtcgtcaccgctgttgggcctggcctcactggcaggaaggtgggcgatgttgttgcatatgccggcaaccccatgggctcctatgctcaggagcagatccttccagcggctgtcgctgttcctgttccaccttccgttgatcataagcaagcagcttctgtgatgctcaagggcatgaccgcccatgttctgcttcgccgggtattcaaggttgagagtggccatactatcctggtccatgctgctgctggtggtgtcggctcactcctttgtcaatgggcaaacgcccttggtgccactgtcatcgggactgtttccaatcaagaaaaagccgctcaggcagctcaggatggatgccaccatcccataatttacactagcgaggatgtcgtcgcaagagtcaaggatattacatcaggaaaaggtgtcaatgtcgtctatgattctgttggaaaggatacatacaaggcttccctggagtgcttggcgtcccgcggcttcctggtgtcgtttgggcagtcgtcaggcaaacctgacccaatcccaacgagcgacctggcttccaagtccttgttcctcactcgtcctagcctcatgcattacactgctacccgtgatgagctgctggagtcagccggcgaggtgtttgccaatgtcgctaacggggtgctgcacgtccgggtgaaccacacgtatccattgtcggaagctgcccaggcccatgcagatctggagggcaggaagacatcagggtccatagtgctcatcccgggatagctcgagacccagctttcttgtacaaa

SEQ ID NO: 228 - DNA, 2198 bp, Glycine max
aaaaaagcaggctcctgcaggaccatggatggtggttctggtgatgattttgatgctgccgacaacccaccgaggaaaaaacgctatcaccgacacactcctcagcaaattcaagagcttgaatcgctcttcaaggagtgtcctcacccggatgagaagcaaaggcttgaactcagcagaaggcttaatttggaaacgaggcaagtaaagttttggttccaaaatcgaagaacacaaatgaagacacaattggaacggcacgagaactcgctgctaaggcaagagaatgacaagcttagagctgaaaacatgtctatgagggaagccatgagaaatcccatatgctcaaactgtggaggtcctgctatgatcggtgaaatttcactcgaagaacagcacctcagaattgagaatgctagattgaaagatgaactagaccgtgtttgtgcactcgctggcaagtttctgggtcgacccgtttcttctctaacaagctcaattgggcctccaatgccaaactcaagtttggagcttggtgttgggagcaatggttttggacaaggtttaagcactgtgccttcaacaatgcctgattttggggttggaatatcaagccctttagccatggtgtcaccttcaagtactagaccaaccacaacagcattggtgactccttctggctttgacaacagatcaattgagaggtctattgttcttgaacttgctttggctgcaatggatgagttggtgaagatggcacaaactggtgagcctctttggatcagaagcttggaagggggaagagaaattctcaaccatgaggagtacacaaggactatcactccttgcattggcttgagacccaatggctttgtcactgaggcttctagacaaactggaatggtcatcataaacagcttggcccttgttgaaacattaatggactcaaatcgttggtcagagatgttcccttgtatgattgctagaacctcaaccgctgaagttatatctaatggaataaatggaactagaaatggtgcccttcagctaatgcatgctgagcttcaagttctttctcccttggttcctgttcgtgaggtcaattttctacgcttttgcaagcagcacgcagaggggttatgggcagtggtagatgtgtccatagataccatccgagaaacttctggagcacccacttttgtgaactgtaggaggcttccttctggttgcgtggtgcaagatatgccaaatggttactctaaggtgacatgggtggaacatgcagaatacgacgaaagccaaattcaccagctctttagacccttgttgagctcaggcatggggtttggtgcacaacgttgggttaccactcttcaacgccaatgcgagtgcctagccattctaatgtcctcagcagctccctctagagaacattcagcaataagctcaggtggaaggagaagcatgttgaagctggcacatcgcatgacgaacaatttctgttcgggtgtgtgtgcctccacagtgcacaagtggaacaagctgaacgcaggaaacgtgggggaggacgtgagggtgatgaccaggaagagtgtggacgacccgggcgagccgcccgggatcgtcctaagcgctgccacctcagtgtggcttcccgtctcgtcgcagaggctctttgacttcctccgcgacgagcggctccgaagcgagtgggatatcctctccaacggtggacccatgcaagagatggctcacattgcaaagggacaagaccatgctaactgtgtctccctccttagagccagtgctataaatgcgaaccagagcagcatgttgattttgcaggagacgtgcaccgacgcgtcgggctcgcttgtggtgtacgcgccggtggacattccggcgatgcacgtcgtgatgaacggcggcgactctgcttacgtggcgcttctcccgtcagggttcgccatcgtgcccgacgggtccggcgaggagcaaggtggcgcgtcgcagcagagggcggcgagtgggtgtcttctcacggtggcgtttcagatccttgtgaacagccttccgacggcgaagctcacggtggagtcggtggagacggtgaacaacctcatctcctgcaccgtgcagaagataaaatcagctcttcattgcgagagctagctcgagacccagctttcttgtacaaa

SEQ ID NO: 229 - DNA, 875 bp, Glycine max
aaaaaagcaggctcctgcaggaccatgggaagaaaggccaactgtgacaatcaatatgctatgaacagaggtccttggtctgctgaagaagacaaaattcttatgaactacgttcaagtccatggagaaggaaaatggagagagctttccaaaagagcaggcttgaaaagatgtgggaagagttgtagactccgatggctgaattatctcaagccagatatcaagagaggaaacatttcttcggatgaagaagatctcattattagactgcataagctcttagggaatagatggtctctaattgcgggacgcttaccagggcgaacagacaatgaaattaagaactattggaatacttatttgagaaagaaggcagagcacaagcatgacaaaattcctagccataacgataacattcctatcaaattaagaattgaatctccgggttgctcaaaaaattcctttggtaatgttcttgatcctacaaaatcccctcacccaatgaggtgtaccaaggttatgatgccagtcaatgattcagtcaacacaacgaatttgattacaacgagctgggacaatcataacccttcttctgcatccatgcaactagatgactataatcattgcttaacaggtgtcctccaagaatttgacatcagtgacttgttaatgtcgtatgaggatgattttcgttttaatggatatgcttgtgtcgaaataccccaacatatttttgaagatgagacttgcaggcttgatgattcgttgggtgaagaagcatggtatgagaattggaagaatgacccctattttccacaagatcaagatatgggtttttcttccttttagctcgagacccagctttcttgtacaaa

SEQ ID NO: 230 - DNA, 2356 bp, Oryza sativa
acaagtttgtacaaaaaagcaggctcctgcaggaccatgatgcctccaagattcagatgccaagattacctcctgccgctgctgctcgccctttcgccggccgccgccgccgcccgcgaggtggagtaccaccattgccactgcgacggcggcggcggcggcggcggcggggggttgtggagcatggacagcatcttcaggtggcagaaggtgagcgacctgctgatcgcggcggcctacttctccatcccgctggagatcctctacttcgtcgccgggctccggcatctcctcccgttccggtgggtgctcgtccagttcggcgccttcatcgtgctgtgcggcctcacccacctcctcaccgccttcacctacgagccgcacccgttcatggtggtgctcctcctcaccacggccaagttcttgacggcgctcgtctccttcctcaccgccatcacgctgctcaccctcatcccgcagctgctccgggtcaaggtgagggagagcttgctgtggctcaaggccagggagctcgaccgcgaggtcgtcctcatgaagcggcaggaggaggcgagctggcatgtccggatgctcacccacgagatccgcaagtcgctcgaccgccacaccgtgctctacaccaccctcatcgagctctccagggtgctcggcctcaccaactgcgccgtctggatgcccgccgccggcgagatgtgcttgacgcacgagctccggcgagacggcggcggcgaggatggcgtcgtcggcgtcgacgacgcggacgtcgtcgaggtgcgggggagcgacggcgtcaagctgctcgggccggactcggtgctcgccgcggcgagcggcggcaaggaggagggcaccggcgcggtggcggcgatccggatgccgatgctgaaggtgtccgacttcaagggcggcacgccggaggtgatccagacgagctacgccgtgctggtgctggtgccccccgccggcaagagctgggggcggcacgagatggagatcgtcgaggtggtcgccggccaggtcgccgtcgcgctgtcgcacgcgacgctgctggaggagtcccgggcgatgcgggaccggctggcggagcagaaccgcgagctgctgcaggcgcggcgcgacgcgctcatggcgaacgaggcgaggcaggcgttccagggcgtgatgagccaggggatgcgccgcccgatccactccatcctcggcctcgtgtccatggtgcaggaggaggccctggcgccggagcagaggctcgtcgtcgacaccatggcgcgcaccgccaccgtcgtctccacgctcgtcaacgacgtcatggagatgtcggccgacagccgcgagcgcttcccgctcgagacgcggccgttccacctgcacgccatgatcagggacgccgcctgcgtcgcccggtgcctctgcgacttcagggggttcggcttcgccgtgcacgtcgagaacgcgctgccggacctcgtcgtcggcgacgagcggaggattttccatgtcctgctccacatggtcggcaacctgattggccgcaccgagcccgggcatgtcacgctccgggtgcgcgccgccgacgacgacgtgctggacgacaggctcggccagaggtgggatccatggtggccgtcctactccactggctactcctcggtgaagtttgtcattggtgtcaagcggcagcagaacggcgatgccggctcgccgctgtcgcggaggccgagtgggaagggcattgatctcagacttagcttcagcatgtgcagaaagcttgtgcagatgatgcaagggaacatctgggcgattcttgatccccaagggctaccggagagcatgactctggtgctcaggtttcagctgcaatcgccactgacatcatcaagccttggaggatcattcgagcagaagcactcgtcgccgtcgtgccagattgcaggcctgaaggttctgcttatcgacgacgatgacgacatcaaccttgtggttgctcggaagctattggagaagctcggctgcgtggtctcctcgccgccttcaggatcaggatttctcagctctgttggctcctcagcagcagccttccagcttgtcatggtgaacctcgaaatgaagagagtaaaagcccttgatgtcgcgacgaggatcagccagtacaggagcggccgatggccaatcgtcatggccatggcttccgaccagaaggcctgggagaagtgcgctcaatccgggatcaatggcatcctcaagaagccggtgattctgcaggagttgaaagacgagctggcgcgaattcttcagagcacatagctcgagacccagctttcttgtacaaagtggt

SEQ ID NO: 231 - DNA, 931 bp, Glycine max
acaagtttgtacaaaaaagcaggctcctgcaggaccatggcttcttccttctctccaagcctatcatcacttgtgcctctgcttgtgagccttttcattgtggtttgtgctgccggtaacttcaaccaagactttcagattacgtggggagatggtcgtgcaaaaatactcaacaacgccaatcttctcactctctcccttgacaaggcctctggctctggcttccaatccaagaacgaatacttatttggcaagattgacatgcagctcaagctcgttcctggaaactctgctggcactgtcaccgcttattatctatcttcaaagggatcaacatgggatgagattgacttcgagttcttggggaatctcagtggtgacccttacattctgcatactaatgtgttcagccagggcaagggcaacagagagcagcaattctatctctggtttgacccaactgcagatttccacacttattcaattctttggaatccccaacgcattgttttttctgtggatggcacccctataagagaattcaagaatttagaatcaattggagttccttttccgaagaggcaaccgatgaggatatactcaagcctatggaacgctgatgattgggccacaaggggtggacgcatcaaaaccgattggtccaaagctcctttcactgcatcctacagaaacttcaacgctaacgcttgtgtttggaacagaggaaaatccacatgcaaatcaaattcaccatcctctaatgcatggctatcacaagagctggattccactgctcagcaaaggctgagctgggtgcagaagaattacatgatttacaattattgctccgacaaaaacagatttgctcaaggccttccactcgaatgcacacattcgtagctcgagacccagctttcttgtacaaagtggt

SEQ ID NO: 232 - DNA, 680 bp, Zea mays
aaaaaagcaggctcctgcaggaccatggcggcccggtgctccacagctgcctccgtggtcagaacaggatcgcgagacctctccccctccttttccttcacagccgcggcgctcccatcggcgcgtctgaggccggtaggagcgtgggtccgcggtggagggtacacctgcaggctccgcgccgtccgcgccatgggctccgcgccgtcgtcgtcccaatccccgtcgccgcacacgccttcaggacaaacccaagggaaagcagattataaatcactgagtgaagaggagtggaagaagcgcctgactgaagagcagtattatgttactcggcagaagggcactgaaagagcattcactggggaatactggaatactaaaaccccaggcatttatcagtgtgtctgctgcgacacccctctgtttcagtcatcaaccaaatttgatagtggtactgggtggccatcctattataaaccaattggtgaaaatgtcaagagcaagcttgatatgtcaatcatttttatgccccggaccgaggtgctctgtgcaacctgtgatgctcatctggggcatgtcttcgatgacgggccaccaccaacagggaagagatactgtatcaatagtgcatctctgaaattgaagccccaatagctcgagacccagctttcttgtacaaa

SEQ ID NO: 233 - DNA, 1720 bp, Zea mays
aaaaaagcaggctcctgcagaccatgggggagaccaacgagctaccgccgccacccgtggccgcgccgccgcccatgatgccgatgcagtccatgatggtcggcgcaggcgccatccacccgccccacgagcagttccaccatctcaactactgcgtccactcaaatccatcctgggttcaggtggcagcacttgcattccttcactatcttgtgatgttgggttctaccgtcatgcttgcaacagctattgttcctgcgatgggtggtaacgctggtgacaaggctcgagttattcaatcgttcctctttatgagtggcataaacacactgctgcaaacacttattggaacgagacttccaacagttatgaatgcctcttttgcatttgttgtcccagtgctgtcaatagcaaaagagattgaatcaaataacttcctgaatgatcatgagagatttaaacacacaatgagaacagcacaaggagctctgattgtggcatccatcctcaacatgattcttgggttcagcacgatatggggggcatatgccaaaaagttcagtccggtgataatgacccctgttgtttgtgttgttggtcttggactattccaacttggctttccccaggttgggaaatgtgtggagattgggcttccaatgctaattcttgcggtggttgtgcaacagtatgtgccaaattacttcagttatatccatcaacgggtcaccttcttgtttgagaggtattcgttgcttctttgtatcggcatcgtgtgggcctttgcagctatccttactgctgcgggtgcatatgaccatgcttcacctaagacacaacagcactgccgcactgataagtctttcctcatgtcatcggcaccatggattaaaattccattaccattcgaatggggtcctccaatcttcactgctggtcattcatttggaatgatgggtgctgtacttgttgcagccttcgagtcaactggagcacactttgctactgctcgtctagcgggtgctacaccacctccagcttatgtccttagtcggagcgttggcttgcagggtattggaatgttcttggaggggatctttagtgttccagcaggttcatctgtatcagttgaaaacattggcctccttgggctgacaaaagttggaagtaggagggtgatccagatatcaactgggtttatgatattcttctccatatttgggaaatttggggccttctttgcatcgatcccactgccgatctttgcagcaatttactgcatcttgttcggcattgtagctgctgtgggagtctcgttcatgcagtttgccaacaagaactcgatgaggaacatctatatcatcggactctcgttgttccttggcatctcggtccctcaatacttcaacggatacacttcttcagctggcggccacggacctgcccggacaaatgctggatggttcaacgacattataaacaccgtgtttgcttccgggccgacggtggcgctaattgtcgcttctgtcctggacaacacgctggagttcaggggctacgaggccgaccgggggctctcgtggttccagccgttcctgcgccgccataagggatactcggaccccagaaacgaggagttctacagcttcccaatcagcgtctatgacgtcatcccagaccgatttcggcgctagctcgagacccagctttcttgtacaaa

SEQ ID NO: 234 - DNA, 1925 bp, Glycine max
aaaaaagcaggctcctgcaggaccatggatgatatgaatttgattcagcaaacccagagacatcacttggttgtgagggagattggcgaggagattgatttagaaataggagctggggaggatgacccgtcatttggtagcactactctgattggtgcaccgatgcgggaatcttctgtagaagaacatggtgagagcaagcagatggggatgatttctcagcttcctaatgatgctcaagatatgtccaagacccaacaagggaaaaggaagaaaaaggttgttaaaagatggagagaagaatgggcagacacctataagtgggcttatgttgatgtgaaggatggtacaccgaggattttctgctctgtctgcagggagtacggtcggaagcatagaagaaatccttatgggaatgagggcagtcgtaatatgcagatgagtgccctggaagaacacaacaacagtttgcttcacaaagaggctcttcgtcttcaaatggcctccaaagataaaattgtggtcgacaagcctgtttatgtaaaagttgccatgtcaaaaacagcaggatcaattcttgaagctacactaaaaagggatcctcatgaggttgaattcattcaggcagtccaagaagcagttcaagcccttgaaagagtcatagcaaaaaattctcgttatattaacatcatggagcgcttattggaacctgaacgaatgattgtttttcgagtttcatgggtggatgataggggtgggacatgtgtgaatcggggctttagggtacagtttaaccagtcaatgggtccatgtaggggtggtattcgttttcatccatcaatgaatttaagtgttgccaagttccttggttttgaacagactttaaagaatgccttatcaccatacaaattaggaggagcagctggtggaagtgatttcgatccaaaaggaaaaagtgataatgagattatgcgattctgccaaagtttcatgagcgaaatgtatcgctacctggggcctgacaaggaccttccgtctgaggaaatgggtgttggtactcgagaaatggggtatctttttggacagtataggcgtctagcaggtcattttcagggaagctttacagggccaaggatattttggtctggctccagtcttcgacctgaagctactggctatgggctggttttctttgcccagctcatgcttgctgacatgaataaagaacttaaaggattaagatgtgctgtgagtggttctggaaagattgcaatgcatgtcttagagaagctaattgcttatggtgctcttcccatttcagtatcagattctagaggatatttggttgatgaggatggatttgactacatgaaaatatcatttttgagagacatcaaagctcaacaaagaagtttacgagactattcaaagacctatgctcggtccaaatattatgatgaagcaaaaccatggagtgaaaggtgtgatgttgcatttgcttgtacttcacagaatgaaattgatcaatctgatgccattaatttggttaattcaggttgtcgtatactagtagaaggttcaaacatgccttgtacccctgaggcagttcagattcttaggaaagctagtgttctcattgctcctgcaatggctgccggtgctggaggggttgtggctggagaacttgaactgaatcatgaatgcagtttgatgcactggtcaccggaggactttgaatctaaattgcaggaagctatgaagcagacttatcagagggctatgaaagctgcaactgactttggttatcaaaaagaaagtcctgaggctttggtacatggagcagtcatctctgcctttctaaccattgctcaagccatgactgatcaaggctctatatagctcgagacccagctttcttgtacaaa

SEQ ID NO: 235 - DNA, 1328 bp, Oryza sativa
aaaaaagcaggctcctgcaggaccatggagatggagagcccgcggagcccggaggcggagatcgggcacagggtggaggacctgtgggaggtggcggagccgcagctgtcgccgtccgagaagctcaactcctgcttcgaggacatcgccgtcgcctccttcccccgcccccttggctcgcaagtaatcgagataccttcaaatgctagtctggctgatactgttgaaatattatccaaaaacaaaattttgagtgcacccataagaaatgttgatgctccagaagatgctagttggattgacaaatacattggcattgtggaatttgctggtattgctatgtggttgctctatcagtctgaggctgcagctaatggcacggctggttctgccgtagggtcaccagtagccaatctagtatctaggctaggctctttcacattcagaaggacatcatctggcagggtagaaaccaccactgacccagaatcagatgaaaccgcatcggtcggtgggagctttttcgaaacactcacttcctctgaattctacaagaacacaaaggttggcgatatctcaggaagcttccgatgggcgccattcctggcactgcagacatctgacacattcctcaccatgttgctgctgctgtccaagtacaggatgaagagcctcccagtagtagacattgggggagataagattgagaacatcattacgcaatcttccgttgtgcacatgcttgcagagtgtgttggacttccttggtttgagagctggggaactaagaaactctccgagctggggcttcctctcatgaagccatgcaaactcgttaaggtaaatgaagaccaacctgtgttaaaagccttccaactgatgagggaaaaaggcgttggtggcctcccggttatggacacaagtggcacaaaagcaattggcaatatcagcatcagagatgtccaatatcttctaactgcccccaacatatacaaagattacaggacaatcacggccaaggatttccttaccgcggtccggcaacaccttcaggagcaacacgaggcctcgccgttgctcggctccgtcatcacatgcagaagggatgatgaagtcaaggacatcatactgaagctggactcggagaagatccacaggatctacgtgatcgatgacaaggggaacaccgagggggtcatcacgctgagggacataatctccaagctggtgcacgagccacgccattactttggggatttcttcgatggtgttgttcccctgcctccaaacagcactgtatagctcgagacccagctttcttgtacaaa

SEQ ID NO: 236 - DNA, 643 bp, Oryza sativa
aaaaaagcaggctcctgcaggaccatgagcgcgtctcggttcatcaagtgcgtcaccgtgggggacggcgccgtgggcaagacctgcatgctcatctcctacacctccaacaccttccccacggactatgttccaactgtttttgataacttcagtgcaaatgttgtggtcgatgggagcactgtgaacttggggttgtgggatacagcaggacaagaggactacaataggctacgcccgttgagctatcgtggcgctgatgttttcctgctggccttttctctgatcagcaaagcaagctatgagaatgtttctaaaaagtggatacctgaattaaggcattatgctcctggtgtgccaataattctcgttggaacaaagcttgatctgcgggatgataagcaatttttcgtagatcaccctggtgctgtacctatttccactgctcagggcgaagagctgaggaaactcattggtgcagcggcatacattgaatgcagttcaaaaacacagcaaaacatcaaggcagttttcgatgctgcgattaaggtggttctccagcctccaaagcaaaagaagaagaagaaaaaggcgcagaaaggatgtgccatcttgtagctcgagacccagctttctgtacaaa

SEQ ID NO: 237 - DNA, 644 bp, Oryza sativa
aaaaaagcaggctcctgcaggaccatgagcacggcgaggttcatcaagtgcgtcaccgtcggcgacggcgccgtcggcaagacatgcatgctcatctcctacaccagcaacactttccccacggattatgtgccgacggttttcgacaacttcagcgccaacgtggtcgtcgacggcaacacggtgaaccttgggctctgggatactgctggacaagaggattacaataggctgaggcctctcagctacagaggagctgatgtctttttactagcattttccctcatcagcaaagcgagctatgagaatattcacaagaagtggataccagagctgaggcattatgctcctaatgtgccaatcgtattagttggaaccaagcttgacttgcgtgaggacaagcagttcttcctggaccaccctggtctagcacctatttccactgcacagggggaggagctgaagaggatgataggtgctgcggcgtacatcgaatgcagctccaagacgcagcagaatgtgaaatcagtattcgactcggcgatcaaagttgtactttgcccgccaaagccgaagaagaagaacaccaggaagcagaggagttgctggatcctatagctcgagacccagctttcttgtacaaa

SEQ ID NO: 238 - DNA, 695 bp, Oryza sativa
aaaaaagcaggctcctgcaggaccatggcgtccagcgcctcccggttcatcaagtgcgtcacggtgggcgacggcgccgtgggcaagacctgcatgctcatctgctacaccagcaacaagttccccactgactacataccaacggtgttcgacaatttcagcgcaaacgttgttgtggacagcaccacggtgaatctgggcctctgggatactgctgggcaagaggattacaaccggctcaggcctctgagctatcgtggtgctgatgttttcgtgcttgccttctctcttgtgagccgagctagctatgaaaatattatgaagaagtggataccggagctacagcattatgcacccggcgtgcccattgtgttggttggcacaaaattggatctccgtgaagacaagcactacttgttggaccatcctggcatgatacctgttaccacagcacagggtgaagaacttcgaaaacaaataggtgctgcttattacattgagtgcagctcaaagacacaacagaatgtcaaaggtgtgtttgatgctgctatcaaggtagtaatccagcctccaactaagcagagggaaaagaagaaaaagaaatcacgacaaggatgctctatgatgaacatgttccgtggaaggaaaatgtcatgcttcaaatcctagctcgagacccagctttcttgtacaaa

SEQ ID NO: 239 - DNA, 695 bp, Oryza sativa
aaaaaagcaggctcctgcaggaccatgagctcggcggcggcggcgacgaggttcatcaagtgcgtcaccgtgggggacggcgcggtggggaagacgtgcatgctcatctgctacacctgcaacaagttccccaccgattacatccccaccgtgttcgacaacttcagcgccaatgtctccgtggacgggagcgtcgtcaacctcggcctctgggacactgcaggtcaggaggattacagcaggttgaggcctctgagctacaggggagccgatgtgttcatcctgtccttctccctgataagcagggcgagctatgagaatgttcagaagaagtggatgccagagcttcgccggtttgcgcctggtgttcctgtagttcttgttggaaccaagttggatctccgtgaagatagggcctatcttgctgatcatccagcttcttccataataacaacggagcagggagaagaactgaggaagctaataggagcggtcgcctacatcgaatgcagctccaagacacagagaaacattaaagctgttttcgacactgccatcaaagtggtgcttcaacctccaagacataaggatgtaaccagaaagaaactccaatcaagctccaatcggccagtaaggcggtacttttgcggaagcgcttgtttcgcgtagctcgagacccagctttcttgtacaaa

SEQ ID NO: 240 - DNA, 1076 bp, Zea mays
aaaaaagcaggctcctgcaggaccatggagaagaagaaggtggcgatcccgctggtgtgccacggtcactcgcggccggtggtggatctcttctacagccccgtcacacccgatggttacttcctcatcagcgccagcaaggacacaaatccaatgcttcgtaatggtgagactggtgactggattgggacttttcaaggtcataaaggagctgtttggagctgttgccttgacaggaatgctctgagggctgcatctgcttctgctgacttctcggctaaagtatgggatgcacttactggtgatgaactacattcatttgaacataagcatatagttcgggcatgtgctttctctgaggacacccaccttttactcactggaggcatggaaaagactttgcgtgtgtatgatattaatcgtcctgatgcagctccaagagagcttgacaaatcacctggttctgtccgaactgctgcctggcttcatagtgaccaaactatattgagttcctgcactgacatgggtggagtaaggctatgggatgtgagaacaggtaaaattgtccaaactcttgaaaccaaggcttctattactagtgcagaagtaagccaggatggcaggttcatcactacagcagatggctcaagtgtaaaattttgggacgcgaatcacttcggccttgtgaaaagctatgatatgccgtgcaatgtggagtcagcttcacttgaacccaagtctgggagtaaatttgtagctggaggagaagatttgtgggttcatgtattcgatttctttactggtgaagaaatagcttgtaacaaagggcatcatggaccggtccactgtgtccggtttgcacctggtggtgaatcatacgcatcgggttcagaagatggcaccattaggatctggcagcttagcccagttaatgctgatgacgacgaggcggccaatgcaaatggcaaggcaaatgctgcagtgaacgaggttacaaccaagctcgagggcggcttccacattcccaaggagggacaggctggggggtagctcgagacccagctttcttgtacaaa

SEQ ID NO: 241 - DNA, 1196 bp, Zea mays
aaaaaagcaggctcctgcaggaccatgtcttggcggcgaaaccagctacgtgcgtttctcgttctcgccgtcatcctcctcatcaccgcagctacctaccgagccaatgcgcagccggcgcctccagcagacccaacgccagccgctgacacctgcgccgaccccagcgtggaaggggcgtgccgcaacgtcccgaaggcgctgcgcctgaagctgatcgccatcccgacgatcctcgtctccagcgtgatcggcgtgtgcctgccgctcttgtcccgctctgtgcccgcgctccgccccgaccgcaacctcttcgtcatcgtcaaggccttcgcctcaggcgtcatcctcgcgacgggctacatgcacgtgctcccggactccttcagcaacctcacctcgccgtgcctgccgcggaagccgtgggccgatttctccttcaccaccttcgtcgccatgctcgccgccctgttcacgctcatggtggactcgctcatgctcagcttctacaaccggaggaagggtggcaacacctccggccgacgcactagcggcgcggtcgccgaccacgagagcccggcgcatgagcaccactggcacagccacggccatggacatggacatggacatgctgggggcatcgtggtggctgacaagcccgaggacgatgaggccagccaggtgcagctccgccggaaccgcgttgtcgttcaggtcctggagatgggcatcgtcgtgcactcggtggtgatcgggctgggcatgggagcgtcgcagaacgtgtgcaccatccggccgctggtgacggcgatgtgcttccaccagctcttcgagggcatgggactcggcggctgcatcctgcaggcggagtacggcgcgaagatgaaggcggggctggtgttcttcttctccacgacgacgccgttcgggatcgcgctggggctggcgctcaccaaggtgtacagggagaacagccccacggcgctcatcgtggtgggcctgctcaacgcggcctcggcggggctgctccactacatggcgctcgtggagctcctggccgccgacttcatggggcccaagctgcagagcagcgtcaggctccagctcctctgcttcctcgccgtcctcctcggcgccggcggcatgtccatcatggccaagtgggcgtagctcgagacccagctttcttgtacaaa

SEQ ID NO: 242 - DNA, 1205 bp, Zea mays
aaaaaagcaggctcctgcaggaccatggctgcggcgggggcagggaccgggagcgaggggaagaagcggggcgcgtcgcggagctggatcctgctcgacgcggccggggaggagcagctgctggacgccgataagtacgccatcatgcgccgcgtcgacatcaacgcgcgcgacctccgcatcctcgacccgctgctatcctacccctccacaatcctcgggcgcgagcgtgccatcgtcctcaatctcgagcatataaaggcgatcatcacttccaacgaggttctgcttagggatccttctgatgagaatgtaatccctgtagtagaggagctccataggcggttagcaccatcgagtgctactcagcatgatggaaaagagaacttaagtggccagcatgatgtagaaggggcagaagaagatgaatctccttttgagttccgtgcattggaggttactctggaagcaatctgcagtttccttgatgcacgcactactgagcttgagaccgatgcttacccagctttggatgagttgacatccaagatcagcagccgcaacttggatagggtacgtaagttaaaaagcgggatgacaagattgaccgcaagggttcagaaggtgagagatgagcttgaacaattattggatgacgacgatgacatggctgatctttatttgtctagaaagttggctggggcatcttcccctgtcagtggttctggtggaccaaattggttccctgcctccccaactattggttcaaaaatatcaagagcaagcagagccagtgcagctactgtgcatggaaatgagaatgatgttgaagagctagagatgttgctggaggcatatttcatgcaagttgatggcacattaaacaaattgacaacgttgagagagtacatcgatgacacggaagattacatcaatatccagcttgataaccaccgtaatcagttgattcagctagagttattcttgagttctggtaccgtctgtctgtcgctgtactcattagttgctggagtctttggtatgaatattccgtatacctggaatgacggccacggatacatcttcaaatgggtggttcttgtatcagggcttttttgtgcctttatatttgtctccattgttgcttacgcacgacacaaggggctcgtcggatcctagctcgagacccagctttcttgtacaaa

SEQ ID NO: 243 - DNA, 221 bp, Zea mays
aaaaaagcaggctcctgcaggaccatgtcggacggcacggcgacctgcatcgacatcatcctcgccattatcctgccgccgctcggggtcttcttcaagttcggctgcggggttgagttctggatctgccttatcctcaccttcttcggctacctccccggcatcatctacgccgtctgggccatcaccaagtagctcgagacccagctttcttgtacaaa

SEQ ID NO: 244 - DNA, 547 bp, Oryza sativa
acaagtttgtacaaaaaagcaggctcctgcaggaccatggagagcctacgggtgcacgccagcgcgctgctctcgctgtcgtcgcctgcagcgtcggcgtcgcagccgacgtcgtcgtcgtcgacgacggagggggtgttcgagtgcaagacgtgcagcaagcggttcccgtcgttccaggcgctgggcgggcaccggacgagccacacgcggctgcaggcgaagctgctgagcgaccccgccgcggcggcggcggcggcggccgagagggacagggcacgcgtccacgagtgcgccgtgtgcggggtcgagttctccatggggcaggcgctcggcggccacatgcgccggcacaggggcgagacgggcacgacgaccgtcgtgctcgcggacgccgacgactcgggcggcgccaccgtgccgcagccgccggagcccatgccggacctgaactacccgccgctggaggacgccggcgacggctcggagcctgagttacttaaccttcttgtatagctcgagacccagctttcttgtacaaagtggt

SEQ ID NO: 245 - DNA, 971 bp, Glycine max
  misc_feature (949)..(949): n is a, c, g, or t
  unsure (1)..(971): unsure at all n locations
tgttctcggtagtttttcttttctgatttgtgacaatgcagcctcgtgcggagcttttttgtaggtagaccgcgggatatcacaagtttgtacaaaaaagcaggctcctgcaggaccatgaagattcagtgtgatgtgtgtgagaaagcccctgcaaccgtgatttgttgcgcagatgaggcagctttgtgtgccaaatgtgacgttgaagttcatgctgcaaacaagcttgcaagcaagcaccagaggcttctccttcaatgtctatcaaacaagcttcccagatgtgacatatgccaagataagccagctttcatattttgtgttgaggacagagcactcttctgtaaagactgtgatgagccaattcatttagccagtagcctttctgcaaaccaccagcgcttcctcgctactggtatcagggtggctttgggttctaattgcaccaaaggccatgaaaaaggtaacatggaaccatctaatccaaatgcacaagaagttcctgtgaaaactccttctcagcaagtgcctagcttcacatcctcttgggcagttgatgacttgttggaattaacagactttgaatcgccagacaaaaagcaatccctggaatttggagaacttgaatggctagcagatgcaggccttttcagtgaacagtttcctcatgaagctttagtcgcagctgaagttcctcagcttccagtgccacacactagcagtgttgcctcacataaagcccccaaatccttggtgtcttacaaaaagcctaggattgaagtcctggatgaagatgatgatgaacactgcactgtcccggatctcggatagctcgagacccagctttcttgtacaaagtggtgatggggatcccccaccctgcaatgtgaccctagacttgtccatcttctggattggccaacttaattaatgtatgaaataaaanggatgcacacatagtgacatct

SEQ ID NO: 246 - DNA, 1273 bp, Zea mays
acaagtttgtacaaaaaagcaggctcctgcaggaccatggagcaagcaacaggtgtaagtggtcctgaacacataattgatattccaagggaaattggtcctcctgcttcggtttctcgtagtgctggtagagagaaccatgaagaatcgaatcctgtggacaggccttcaacaagagctctagtacctgccttgcaggcaccatcagcaataggtgctgtacctattacagggcatacttcaggcactaggagaaatgacaactatgttcgtcggcacagaagcccattgaattctggactgtggatttcaattgaagttattgttaactttagccagattgttgctgccattgttgttctttgtgtgtcaagaaaggaacacccacaagctccattacttgagtgggtcataggttacactgttggttgttttgcaacgttaccccatctctattggcgctatatacaccgtaatattgtaaatggtgagcatgagtcatcacatacacctcaagggtccgctcataacaactcaaatgaagcgactcatgctgcaagtgcatcagaacgccgtagaaatgctgcccgaaatgctgtgcttgctaatcctaggatcaatgcgctgtttgaccacttcaagatggccctggattgtttctttgctgtctggtttgttgttggaaacgtgtggatatttggtggccgttcttctgctgctgatgcaccgaacttgtacaggttgtgcattgtgttcctcacttttagttgcattgggtatgccatgccattcatcctatgtgcaatgatatgctgttgccttccctgcattatatctgttatgggttttagagaagatacaaacaatacaaggggtgcttcctcagaatctatcaatgctttgcctacatataaattcaaaatcaagaaacgtcgccatggttcaggcagtgaaactgaaggccaggaaggagggatattggctgcaggaactgacaaggagcgatcactctctgctgaagacgcagtttgctgcatctgtcttgcaaaatatgcgcacaatgatgagctccgtgaacttccatgtgcacactgtttccacaaggactgtgttgataaatggctcaagataaatgcactttgccctctgtgcaaatctgagatagtgagctcgtctggtacttctgatgcccgccaatcagaccagaacaccgttcctgtgcaggagatcgaaatgcattagctcgagacccagctttcttgtacaaagtggt

SEQ ID NO: 247 - DNA, 1391 bp, Zea mays
aaaaaagcaggctcctgcaggaccatggatgttcttcctgttgggtcagaaagagaaagtcaaacagatagtcaccctttactcatggagcatgcgattggcatcccaaggcatgatgttgcttctacttcgacacctcatcgagacaataatgatggcatggatcaactgccccgtgattcagaaagttcttctggaacaactgatgcatcttactctccgaatgctcctctagcaaggagagatgataatcgccttcggcgtcagcaaagtctaaattctggcttctggatatcaattgaactagctgtaaatcttagccagattatagctgctatctgtgttctgtctgtgtcaaagaatgaacatcctcatgctccattgtttgagtgggtcattggttatacaataggctgcattgcaactcttcctcatctatactggcgctatctccagcgcaaccagctggccactgtgcaagggtcaaatcagaactacgttccagacaacagctttgagagtagttcttttactgggatttcgccccctcctgtgtctgaagctggtgttgtaactgtatcaaatggagtcttgagaaacaacgtggttaccacaaatctgagggcccaagcttttgctgatcacttcaagatggcgctggactgtttcttcgctgtatggtttgttgtgggaaatgtgtgggtgttcggtggacattcttccgcccatgacgcacctaacctgtacaggttgtgcatagccttcctcactttcagctgcattggctatgcgatgcccttcatcctctgcgcgctgatatgctgctgcttaccctgcataatctccctgatgggcttccgggaagatctggacgaaaacagaggtgctacttcggatgcgatcaacgccctgggcacatacaggttcaggtcaaagaagccccgtaacggggaggcaaacgaaggtagcggtggagtctttgctcctggaacggacaaggaacgcgctgtttctgctgaagacgccgtttgctgtatctgcttggcgaggtacgtggataacgatgatctccggttgctcccttgcgggcacttcttccacaaggactgtgtcgacaaatggctcaagataaatgcgctgtgcccactctgcaaagctgagatcgacgtcgtcccgaggaccgctcctccagccattggctttgggcgccgcgacagccacaggagggtaggaaacgacattgaatcacaacggcttccatagctcgagacccagctttcttgtacaaagtggtgatggggatcccccaccctgcaatgtgaccctagacttgtccatcttctggattggccaacttaattaatgtatgaaataaaaggatgcacacatag

SEQ ID NO: 248 - DNA, 1295 bp, Zea mays
aaaaaagcaggctcctgcaggaccatggcgcacacttcctgtgatggtgtacatcatgttataagtgtagcacatggggaaactgcatcaacatcaaccagtcatcaagatatgtgcagtgactcggatgaaccacatcaggaagataggctatcaacaagcacacaaaccctgtcatcagagtcttcgccatcaatatcaccaactgcttatagcaccagaaatttatcttttcctagaagagatagtatatatggtcatggaagaagtccatggaattctggtttatggatctcgtttgaaattgtcatgtacattgctcaggttgtagctgctattgtcatcctcatcttttcaagacatgaacatccccatgctcctttgttcgcatggataattggatatacacttggctgcattgctagtcttcctcttatttattggcggtatgttcatcgaaacagacatttggatcaagaacctcagcagccacctacaacatatcctactttgactccttctcagtcatcagaaggacgcaaccatcgtaccagtggtattgttttgcatcttggatgtatctcaatttcttgcccaaggcttagtgtgctggcttatcacttcaagacaggtgttgactgtttctttgctgtatggtttgttgttggcaatgtgtggatttttggtgggcgcagtatttcatcagatgctcaggacgctcccaatatgtacaggttgtgtttggcattccttgcgcttagttgtgttggatatgccattccttttataatgtgtgcagcaatatgctgctgctttccatgcttgatttctgttttgcgtcttcaagaagatttgggtcaaaatagaggagctactcaagagctaatagatgcattgccaacctacaaattcaaaccaaaacgtgtcaaaaactgggggattgaccatgcttcaagctcagagcatcttgatgagggtggcattcttggcccaggaactaagaaggaaagagttgtttcagctgaagatgctgtgtgctgcatctgtcttacgaagtatggagatgatgatgagcttcgtgagcttccttgcacacacttctttcatgttcaatgtgtagataaatggcttaagataaatgcggtgtgcccactctgcaaaacagagattgggggtgtggttcgatctttctttggcttgccatttggccgccgccgtgtcgataggatagcggcaagaggtgtagctagctcaagattcagtgtatagctcgagacccagctttcttgtacaaa

SEQ ID NO: 249 - DNA, 1124 bp, Zea mays
aaaaaagcaggctcctgcaggaccatggccagcctcaccgacctcgtcaacctcgacctgagtgactgcaccgacaggatcatcgccgagtacatctggattggaggatccggcatagacctcaggagcaaagcgaggacggtgaaaggccccatcaccgacccgagccagctgccgaaatggaactacgacggctccagcaccgggcaagctcccggagaggacagcgaagtcatcctctaccctcaagccattttcaaggacccgttcaggaagggtaaccacatccttgtgatgtgtgactgctacacgccacaaggcgagccaatccccaccaacaagaggtacagcgccgccaaggttttcagccaccccgacgtcgcagctgaggtgccgtggtacggtattgagcaggagtacaccctccttcagaaggacgtgagctggcccctcggctggcctgttggtggataccctggtccccagggaccatactactgcgccgccggtgccgacaaggcctttgggcgcgacgtggttgacgcccactacaaggcctgcctctacgccggcatcaacatcagcggcatcaacggcgaagtcatgcctggacagtgggagttccaagtggggccgtcagttgggatctctgccggcgacgagatatgggtcgcccgctacattctcgagaggatcaccgagatggccggaatcgtcctctccctcgacccgaagccgatcaagggcgactggaacggcgccggcgcccacaccaactacagcaccaagtcgatgagggaggccgggggatacgaggtcatcaaggcggcgatcgacaagctggggaagaggcacaaggagcacatcgccgcgtacggcgagggcaacgagcgccgcctcacgggccgccacgagaccgccgacatcaacaccttcaaatggggcgtggcgaaccgcggcgcgtccatccgcgtcggccgcgacaccgagagggagggcaagggctacttcgaggaccgcaggccggcgtccaacatggacccctacgtcgtcaccggcatgatcgccgagaccaccatcctgtggaatggaaactagctcgagacccagctttcttgtacaaa

SEQ ID NO: 250 - DNA, 518 bp, Zea mays
aaaaaagcaggctcctgcaggaccatgcagatcttcgtgaagaccctgacggggaagaccatcacgctggaggtggagtcctcggacaccatcgacaacgtgaaggccaagatccaggacaaggagggcatcccgccggaccagcagcgcctcatcttcgccggcaagcagctcgaggatggccgcaccctcgccgactacaacatccagaaggagtcgacgctgcacctggtgctccgcctcaggggaggcgccaagaagcgcaagaagaagacgtacaccaagcccaagaagatcaagcacaagcacaagaaggtgaagctcgccgtgctccagttctacaaggttgacgacgccaccggcaaggtcacccgcctccgcaaggagtgccccaacgccgagtgcggcgcgggggtcttcatggccaaccacttcgaccgccactactgcggtaagtgtggcctcacctacgtctacaaccagcaggcgtagctcgagacccagctttcttgtacaaa

SEQ ID NO: 251 - DNA, 515 bp, Glycine max
aaaaaagcaggctcctgcaggaccatgggtttggagcctccgttgttccacacgctgcaacacatgatggacatgtcagaggacgctgcaggggaaaacaagacgtacagtgctccgacacggtcatacgttcgagacgccaaagcaatggctgcaacacctgcggatgtgaaggaatatcccaactcctacgtgttcgagatcgacatgccgggtttgaaatctggggacataaaggttcaggttgaagacgacaacgtgcttctgattagtggggagagaaagagggatgaagaaaaagaaggggtgaagtatctgagaatggagagaagggttgggaagttcatgcgcaagtttgtgttacctgagaatgccaacactgatgcaatctctgcagtgtgtcaagatggggtgcttagtgtcactgtgcagaaattgcctcctcctgagcccaagaaacccagaaccattgaggttaaggttttctagctcgagacccagctttcttgtacaaa

SEQ ID NO: 252 - DNA, 563 bp, Zea mays
aaaaaagcaggctcctgcaggaccatggcgcccaccgtgatgatggcctcgtcggcaaccgccgtcgccccgttccagggtctcaagtccgccgccagcctccccgtcgcccgccgcagcaccaggagcctcggcaacgtcagcaacggcggaaggatccggtgcatgcaggtgtggccggcctacggcaacaagaagttcgagacgctgtcgtacctgccgccgctgtcgacggacgacctgctgaagcaggtggactacctgctgcgcaacggctggataccctgcctcgagttcagcaagctcgggttcgtgtaccgcgagaactccacctccccgtgctactacgatggccgctactggaccatgtggaagctgcccatgttcggctgcaccgacgccacgcaggtgtacaaggagctgcaggaggccatcgccgcgtacccggacgccttccaccgcgtcatcggcttcgacaacgtcaggcagacgcagtgcgtcagcttcatcgcctacaagccccccggcagcgagtagctcgagacccagctttcttgtacaaa

SEQ ID NO: 253 - DNA, 1028 bp, Zea mays
aaaaaagcaggctcctgcaggaccatgcttattttctccagcgtgctttccctatgtgaagggaaacatcttgacggcaaactcactgcaggacagaacactgtaagcgcgctagggcggtttgtgttgatcatatggctcttcgttgtgctgatcatcaattcaagttatactgccagcttgacgtcaatcctcacagtccaacagctcgcaacaggaataactgggatcgatagtttgatttcaagtggtttacctattggatatcaggctggaaaatttaccagaaattacctgattgaagagctcaatattcctgagtctcgattggtaccactaaatacaatccaggagtatgctgatgcccttaagcgtggaccaaaagatggtggtgttgttgcaattgttgatgagatgccctatgttgagatcttcctgtcataccactgcaatttcagaatagtgggacaggagttcaccaaggagggatggggttttgcattcaagagagacttcccccttgctgcggacttgtcgacagccatccttcaactctcagagagtggtcagcttcagagaattcacgacgagtggttcacccggcctagttgctcctctgatgacagcgaagtgggggcaaccaggcttggcctcggaagcttttggggccttttcctcgtgtgtgccctgatatgcctcttggctttgctggtgtttttcatacggatatgctggcagtataacaagtactccaattctgaggctgctggtgagcccagtgcagcagcagctgctgctgcagcagtagatgctgctgctgctgccgccgatgctgtcgaaagacagaggaggccatcacgtcttggcagcttcaaagatattatacagtttgtcgacaaaaaggaggaggaaattaagaagacgatgaaacgaagagtaagtgagaaagataataaccaagctgcaggatcctcagaagctcattcagtggcttcagcatagctcgagacccagctttcttgtacaaa

SEQ ID NO: 254 - DNA, 1136 bp, Zea mays
aaaaaagcaggctcctgcaggaccatggctctcgtgacctcgggctcgggtgccgaccaggtgatcgccgaggtggcgatgaacggcggcgccgacccaagtgcaaccaccgtgcgtgctactgtcgtgcaggcgtccaccatcttccacgacacgcccgccactcttgataaagcagagagattgatagcagaggctgctgggtatggttcacagttagttgtctttccagaagcttttattggaggctatcctcgtggatccacatttggtttcgggatcagtattagtattattaatccaaaagacaagggaaaggaagcattccggaggtatcatgcatctgctatagatgtgcctggtccagaagttacacgcttggctgctgtggctacaaaatataaggttttcttggtcatgggggtgattgaaagggaaggttacaccctttattgttccgtgcttttctttgaccctcttggccgttacctgggtaagcaccggaagctcatgcctacagcattagagagaattatatggggatttggggatggatcgactattccagtttatgatactccacttggaaagattggggcgctcatttgctgggaaaataaaatgccacttttgaggacagcgctgtatggtaaaggtattgagatatactgtgcccccactgctgactccaggcctgtttggcaagcctccatgacacacattgctttggaggggggatgctttgtcttgtcagcaaaccaattctgccgcagaaaggactatcctcccccaccggagtatgagtttgctggtttaggtgaagagccatccgcggacactgttgtttgccctggaggcagcgttatcatttctccatctggagaagtcttggcaggtcccaactatgaaggagaggcactgattacagccgaccttgacctgggagagattgttcgagccaagtttgatttcgacgtggtgggacactactctcgacctgaagtccttagattggtagtgaacgaccaaccgcagctccctgtgtctttcacgtctgccgctgagaggactccagctgccaagagtgatatcgatactaagtcttactagctcgagacccagctttcttgtacaaa

SEQ ID NO: 255 - DNA, 925 bp, Zea mays
acaagtttgtacaaaaaagcaggctcctgcaggaccatgccttttcgattccagttcccatggctcaagaacccaactacaaacggcggcacctccaacatagacactaaccctagcccccgcttccccaaccccttcctccctatccaagcccatgtcacctccttcctctcctccttcccccgggcgctcccgccgccgccgccctgggcgcgcatcacctcgccagcctccacctccggggccctacctacctctgagatcgaggagcggctcgccggggtgcccgtgtacgcgctcgccaacgccgcccaggagttcgtgcttgtgtcgtccacacgcgtgggagggcaagggggcgagagcgtgagtccaacgcaggcgctcgggctgctctgcttccggaaggaagatgctgacgcgctgctggagcagatggatggcgatatgcgcgccggctctggtgtcgttcctgtcgcgctgaacaaggttatccaaatgaagtcggatggtgtggcgtttagattcctccctgattcatctcaggtggctaatgcaattaagttgatgcaagatgaaggactgtatgccggagagggatttccaggagtgccagtttttcagtcaaggagcctggtcttgatgagtgacaacaagagatatcgtccagtttttttcagaaaggaggacttggataactcactgcaccggacctcccgtgatcagcaaaaacctaatcctgctgttaggtttggtgacactcaggtttcttctttggaagatatcattaaatctatgaaggatagctcctcctcaaaatgggatgatgttgtatttattcctcctggatttgaccttgctactggctcgacaccatcacagctccgcaagtagctcgagacccagctttcttgtacaaagtggt

SEQ ID NO: 256 - DNA, 934 bp, Zea mays
acaagtttgtacaaaaaagcaggctcctgcaggaccatggggaggtccccgtgctgcgagcaggcgcacaccaacaagggcgcgtggaccaaggaggaggaccagcgcctcgtcgcctacatcaaggcccacggcgagggctgctggagatcgctaccaaaagccgcaggtctgctgcgctgcgggaagagctgccggctgcggtggatcaactacctgcgcccggacctcaagcgcggcaacttcaccgaggaggaggatgacctcatcatcaagttccacgagctcttcggcaacaagtggtcgctcatcgccgggaggctgccgggcaggacggacaacgagatcaagaactactggaacacgcacatcaagcgcaagctcctcgcccgcggcatggacccgcagacgcaccgcccgctcgccagcgcgaccgcggggcagcagcattaccagctgcaggagccgcagaagcgagcggccggcggcggtccagcaggccatccgcaccaggaccacttggaggtcgtcgtcatctcgaactcgccggacgaggcctacagccgtagcagcgacgacgagccgcggtccgccacgccgccgcggcgccacctcgacatcgacctcaacctgtccatcagcctagcggcctaccagccgccggaggaaaccggcatcatcaagcagccactggtgatgaagcaggagcaggaaacggcggcgggcggcaccaatgccgcggcggtgtgcctgtgcctcaacagcctcgggtaccggccgggcgtcgagtgcgtctgcggcgacggcagctcctcctcctcctcctcgcactcccactcccactcccaccaatgggctctgaattttttacaggcggcggcgccctgctacagaggccaatagctcgagacccagctttcttgtacaaagtggt

SEQ ID NO: 257 - DNA, 748 bp, Zea mays
acaagtttgtacaaaaaagcaggctcctgcaggaccatggggaggtcgccgtgctgcgagaaggcgcacacgaacaagggcgcctggaccaaggaggaggaccagcggctcgtcgcctacatcaaggcccacggcgaaggctgctggaggtcgctccccaaggccgcgggcctgctgcgctgcggcaagagctgccgcctccggtggatcaactacctgcgccccgacctcaagcgcggcaacttcacccaggaggaggacgacgtcatcatcaagctccaccaggtcctcggaaacaagtggtcgctgatcgccgcccagctgccggggcggacggacaacgagatcaagaactactggaacacgcacatcaagcgcaagctcatcgcccggggcatcgacccacggacgcaccagccggcgagtgccgccgcagttgcccccgccgccgccgccgccgccgccgcgcaaagcagctttcgccaccatggcgacgacgaggcggtggcgcggcgcagctgctcgcgagacagcggctgcatcgcggcgcacagcagcgacgacgacgacagcacgtccgggtccctgccacaccaacatgctgtcggcggcatcgacctcaacctctcgctaagcccaccgacgagccaaccgtcatcgccggccgccgccaagggagttgtagctagcggatatggccaagggagtgagagctagctcgagacccagctttcttgtacaaagtggt

SEQ ID NO: 258 - DNA, 683 bp, Glycine max
aaaaaagcaggctcctgcaggaccatgggaaggtccccttgctgtgagaaagcacacacaaacaaaggtgcatggaccaaagaagaagatcatcgcctcatttcttacattagagctcacggtgaaggctgctggcgctctctccccaaagccgccggccttctccgttgcggcaagagctgtcgtctccgctggatcaactatctccgccctgacctcaagcgcggcaatttcaccctcgaagaagaccaactcatcatcaaactccacagcctccttggcaacaagtggtctctaattgctagaagattgccgggtagaacggacaatgagataaagaattactggaatactcacataagaaggaagcttctgagcagaggaattgaccctgccactcacaggcctctcaacgatgacaaggtattggaacgctgccctgacttgaaccttgagctaaccattagtcctccccgtcaacctcaatctgatcagcatcacttgaagcccgttgggagaaactcaaacctttgctttgcctgcagtttgggtttgcaaaatagcaaagatcattgtagctgtgcgctcaacactgccaacgctgcttctggccatgatttcttggccttgaaaaccagcgttttggaaatgaaatagctcgagacccagctttcttgtacaaa

SEQ ID NO: 259 - DNA, 1428 bp, Zea mays
atggctggcggcttcagggtactgcatctggtcaggccttttctggctttcttgccagaggtgcagagcgcggataggaagataccgttcagagaaaaagttatctacactgttatttccctcttcattttcctggtctgcagccagctcccactctatggcattcattcaacaactggagctgatcctttctactggatgcgtgttatcctcgcatcaaaccgtggcactgtgatggagttgggtattactccaattgtgacatctgggatggtaatgcaacttcttgttggatcgaagatcattgaagttgacaacagtgtgagagaggatcgtgctctgctgaatggtgcacaaaagttgcttggtatcctgattgctattggggaagctgtggcatatgtcctgtctggaatgtatggcagtgtaagccaacttggaacagggaatgctatcctcattatacttcagcttttctttgctggcatcattgtcatctgtctggatgaacttctccagaaaggttatggcttgggatctggcatttctctgttcattgctaccaatatctgcgagaatataatctggaaggcatttagccccacaaccatcaacagtggtcgtggtgctgaatttgaaggggctgtcattgcactgtttcatctgttgattacgagaaccgataaagtccgtgctcttcgtgaggctttctaccgccagaaccttccaaatgtgaccaatttgcttgccacagtcttggtcttcctcatagttatctatttccaaggcttccgtgttgtgcttccagtgagatcaaagaatgctcgtggccagcaaggctcatatccaattaagctgttctacacttcaaacatgcccatcattctgcactctgcactgattaccaacctctatttcatatcccagcttctctacaggaagtacagtggaaacttccttgttaaccttcttgggatgtggaaggagtctgaatactctggccattctgttcctgttggtggtcttgcttactatgtaactgccccatcaagtttggctgatgtccttgcaaatccattccatgcactgttttatgtggtcttcatgctgtcagcttgcgctctgttctcaaaaacgtggattgaagtttctggttcatcagcaaaggatgttgctaagcagctcaaggaacaacaaatggtgatgccaggacatcgtgagtcaaacttgcagaaggaactgaaccgatacatccccactgctgctgcatttggtggagtatgcatcggcgcattgactgtcctggctgatttcatgggtgcaattggttcaggaactggaatactgctggcagtgacaatcatataccaatacttcgaaaccttcgagaaggaaagggcaacggagcttggtttctttggtttttag

SEQ ID NO: 260 - DNA, 1481 bp, Glycine max
aaaaaagcaggctcctgcaggaccatgggtggtggatttagagtgcttcacttagttagaccatttctctcgtttcttcctgaagttcagactgctgacaggaaagtgccatttagagagaaggtcatatatactgtgatctctttgttcattttccttgtttgcagtcagcttcctctgtatggcatacactcaacaacaggtgctgatccattctattggatgcgtgttatccttgcttcaaaccgtggaactgttatggagctgggaatcacccccattgtgacttctgggctggtaatgcaacttttggctggatcgaagatcattgaagtggacaacaatgtaagggaggatcgtgctctcttaaatggtgcacagaagctacttggcattttgatagctgttggtgaggcagttgcatatgttctttctggaatgtatggtagtgtgggtcaacttggagtgggaaatgccatcctcatcatcctccagctatgttttgcgggtattattgtgatatgtttggatgagctccttcaaaaaggctatggcttgggatctggaatttctctgttcattgccactaatatatgtgaaaacatcatatggaaagcatttagtcccaccaccattaacagtggacgtggagctgaatttgaaggtgctgtcattgctctattccatttgttgataactagaacagacaaggttcgtgcccttcgtgaagcattttaccggcaaaaccttcccaatgtgacaaatctgcttgctaccatcttgatcttcctaattgtgatatacttccaaggatttcgtgtggttttgcctgtgagatcaaagaatgcccgtggacagcaggggtcttatccaatcaagttattttatacctccaacatgcccattattcttcagtctgcccttgtttccaatctctacttcatttctcagcttctacacagaaagtacagtggaaacttcattgtagatctattgggcaaatggaaggagtctgaatatggaggtggtcagtctgttcctgttggtggtattgcatactacatcactgcaccttccagcttagctgatatggcagccaatcctttccatgcattattctaccttgtgtttatgttgtcagcctgtgccttgttctctaaaacttggattgaagtctctggttcatctgctagagatgttgcaaagcagctgaaggaacaacaaatggtaatgcctggacatcgggaatcaaacttgcagaaagaactgaaccgatacattcccaccgcggcagcatttggaggcatatgtatcggtgcattgactgtgttggcagatttcatgggggcaattggttcagggacaggaatattgcttgcagtaacaatcatctatcagtacttcgaaacatttgagaaggagagagcaagcgagcttggcttcttcggtttctagctcgagacccagctttcttgtacaaa

SEQ ID NO: 261 - DNA, 269 bp, Oryza sativa
aaaaaagcaggctcctgcaggaccatggcgtccggccggtgctgcacgttcctcgagatcctgctcgccatcatcctcccgcccctcggcgtcttcctccgcttcggatgctgcagcatggagttctgcatctgcttgcttctcaccatccttggctatgtccctggcatcatctacgcagtctatgtgcttgttgctcttgactcagaccagtaccagagggaatatcatacccttgcttagctcgagacccagctttcttgtacaaa

SEQ ID NO: 262 - DNA, 500 bp, Zea mays
aaaaaagcaggctcctgcaggaccatggcggaccaactcaccgacgaccagatcgccgagttcaaggaggccttcagcctcttcgacaaggacggggatggttgcatcacgaccaaggagctgggaactgtcatgcgttcactggggcaaaaccctacagaggctgagctccaggacatgatcaatgaggtcgatgccgatggcaacggcaccatcgattttccagagtttctgaaccttatggctcgcaagatgaaggacaccgactctgaggaagagctcaaggaggcctttcgtgtgtttgacaaggaccagaacggcttcatctctgccgccgagctccgccatgtcatgacaaatcttggggagaagctaactgatgaggaggtagacgagatgatccgtgaggctgatgtcgatggtgatggccagattaactacgaggagtttgttaaggtcatgatggccaagtagctcgagacccagctttcttgtacaaa

SEQ ID NO: 263 - DNA, 500 bp, Oryza sativa
aaaaaagcaggctcctgcaggaccatggcggatcagctcaccgacgaccagatcgccgagttcaaggaggccttcagcctcttcgacaaggacggcgatggttgcatcacaaccaaggagctgggaaccgtgatgcgttcgctggggcagaacccaacggaggccgagctccaggacatgatcaacgaggtcgacgcggacggcaacggcaccatcgacttcccggagttcctcaacctgatggcacgcaagatgaaggacaccgactcggaggaggagctcaaggaggcgttcagggtgttcgacaaagaccagaacggcttcatctccgccgccgagctccgccacgtcatgaccaacctcggcgagaagctgaccgacgaggaggtcgacgagatgatccgcgaagccgacgtcgacggtgacggccagatcaactacgaggagttcgtgaaggtcatgatggccaagtagctcgagacccagctttcttgtacaaa

SEQ ID NO: 264 - DNA, 1076 bp, Oryza sativa
aaaaaagcaggctcctgcaggaccatgcttcaacacaagatgggttgtgttatattatcttttcttgagaaattatataagcgctatgttatcaagaggaatcagcgtaaacgccaaagagaagaggatctaaagaaggaagacaagaaaacatcagagaagcggcccaagacaaatgatgaaactttaagtgaaagtggcccgagtaatcaaggggaaagtgttgaaatgataaaagcgggtaagggtacagctcattcagctggccaacccaataaagatgatgagacaaagatgaatgcgggtcactcagcagctgcccaggatgaactggttaaagagggcaaggagaagatgagtgcagatcactcgacagcgccccctaaagaacttataaaagagggtgaggaaaacatgaacacggataattcagcagctgtccatgttgagcctgtagctgatgagaaaatggaggatgaagagcctgattatgaagaagatcctgaagaggtagaattatatgaagatgatgaggagatggatgaagctgctgctgaggaactggtagaacagaatgaagataatttgaatgataaggccaagcaggaagtaactactgaagaggatggaaacaagaacacagaggagcgtgagtcagaaaacaatgctaatatgcttgaaaaagctgcttcaggagaggacaaacagtctgtagttgaaaaatctgcttcagtggagggcaaacaatctgtatcggagaaaggtgacaaggcagttggtaaggaggtaaagacaactagatcacaaaaaggtgattcaacaaaagatgaggtcgttgataaagagctgctgcaggcttttagatacttcgaccaaaacagagccggttatttgaaggtggatgatttaaggtgcattcttcataatttggggaagttcttatctaacagggatgtgaaggatttggttcaaatcgcccttgttgagagcaattctgcaagggataatcgcatcatctatacaaagcttgcgaagaaagttgacctctagctcgagacccagctttcttgtacaaa

SEQ ID NO: 265 - DNA, 1292 bp, Oryza sativa
aaaaaagcaggctcctgcaggaccatgggcaactgcgggacgcgagaggagaatgccgtcgtcgcggcgcacgcccaagttcagcagctccatttgttacaacatcctgtcaagaatgctgttgcagagaggaagcatacccgcatctcatcagatatgagtgatccttcaacacctaggaaaattgaagatgccaagaacatctccatatacaacgatgtgattgatttcacattgtttgaactcgagaccatcacaaagagcttccgtgctgactacgttcttggtgaaggagggtttgggactgtttacaagggctacatagatgagaatgtcagggttggtctgaagtcactacctgttgcagtcaaggtgctcaacaaagatggacatcaaggacacagagaatggcttactgaggttaggttccttgggcagctaagacatccaaatttagtcaagttgattgggtattgctgcgaagatgaccacaggctgcttgtgtacgagttcatgtttcgaggaagtctagaaaaccacttattccgaaggacagctactccactatcctgggctactaggatgtcgattgcattaggggctgccaaagggttagcttgcctccacaatgctgaaaggccaattatctacagggatttcaagacatcaaatattctgctggactcagattatactgctaaactctctgactttggtctggcaaaagctggcccagaaggcgatcaaacccatgtatcaacacgggtgatgggaacatatggttatgctgcccctgaatacgtgatgactggtcacttgactgctagaagtgatgtctacagctttggtgttgtccttcttgaactcttgactgggcgtaagtccatcgacaagtcacggcccagtagggagcacagcttggttgactgggccctcctgaaactgaacgacaagaggaggcttctccaaatcattgacccaaaactggagggacagtattcagttagagctgcccacaaagcctgcagcctagcatactactgcttgagccaaaacccaaaggcgaggcctcttatgagcgacgtcgttgagactcttgaaccattgcagggcagtggtggaagtgatggagctgttcaatctgttcttggcagtggccttccgagctacagagtaaaccgcagactaacgacgaacagcgtccactgtagggcgattccgaaccccaagtgctcccctgctgtcccagcatgcagggtgagatagctcgagacccagctttcttgtacaaa

SEQ ID NO: 266 - DNA, 2936 bp, Oryza sativa
gcagtcgctgtcgttaccatggcgcgcaatgcggcggacaaggggacgtccatcgacgcgcagctgcggatcctggcgcctaagaagctctcggaggacgacaagcttgtggagtacgacgcgctgctcctcgatcgcttcctcgacatcctccaggatctgcatggggaggacatcagggagacggttcaagaatgctatgaattagctgctgagtatgaaagtaaggttgaccccaaacagctggatgcaattgggaatgtgttaactcgtttagatcctggagactccattgtgatgacgaagtcattctcacacatgcttatcctggcaaacttggctgaggaggtccagattgcgtatcgtaggaggataaaactgaagaagggtgattttgctgatgaaaactctgctacaactgaatcaaactttgaggagaccctaaaaaggcttgttggtgagcttaagaagtcccctcatgaggtatttgatgctctcaagaatcaaacaatcgacctggtcctgacagcacatccaactcagtcagtcaggaggtcgctgctacaaaagcatggcaggataagaagttgtttaacaaaactttatgcaaaagacataactccagatgagaagcaggaactcgatgaagcacttaagagagagatccaagccgcctttagaacagatgaaattcggcgagcacctcctacaccacaggatgaaatgcgtgctggaatgagttattttcatgagacaatatggaagggtgtacccaagtttttacgtagggttgatactgcccttaagaacattggcataaacgagcgagtgccctataatgctcctcttattcaattttcttcttggatgggtggagaccgtgatggaaatccaagagtcacaccagaggttacaagggacgtatgcctgttagctagaatgatggctgctaacttatactatgcacagatagaggatctgatgtttgagctatctatgtggcgctgtagtgatgaactacgtgtaaaagctgatcagttacaccgttgcgcaaagaaaaacacaacaaagcactatatagagttctggaaacaagttcctccgagtgaaccctatcgtgtaatactgagcaatgtcagagataagttgtacaatacacgcgagcgagcacgccatttattagccagtggattttctgaaattcctgacgaagcaacattcactgatgttgagcagttcttggagcctcttgagctctgttacaggtctctctgtgcctgtggtgataattctattgcagatggcagtcttcttgactttctacggcaagtgtccacatttggactatcccttgttagacttgatattaggcaagaatctgaccgacatactgatgttatggatgccataactcaataccttggaattggatcctatcgtgaatggtcagaggagaaacgccaagaatggcttctgtcagaactcaatggaaagaggccattatttggtcctgaccttccccagacggatgaaattgctgatgccctagatacttttcatgtgatagcagaactaccctatgatagctttggtgcatatgtaatatccatggcaacagctccttcagatgttctagcagttgagcttctgcaacgtgaatgtcatgtgaagaagccactgagagttgtgccattgtttgaaaaactagcagatctggaagcagcaccagcagctcttgcccgacttttctctgttgactggtacagaaataggatcgacggaaagcaggaagtaatgattgggtattcagattctggaaaagatgctggccgtttctctgcagcttgggaactgtataaagctcaagaggagcttattaaagttgctaagcagtttggggttaagttgactatgtttcatgggcgaggtggaactgttggaagaggtgggggtcctacacaccttgctatactgtcacaacctccagataccattcatggatcacttcgtgtgactgttcaaggtgaagtcattgagcaatcttttggagaggagcatttgtgttttaggacacttcaacgttttacatctgctactcttgagcatggtatgcatccaccaatttcaccaaagccagaatggcgtgctttgatggatgaaatggccgctgttgctacaaaagaataccggtccattgtcttccaagaggcacgatttgttgaatatttccgccttgcaacaccagagttggaatatggtaggatgaatattggaagtaggccatcaaaacgaaagcctagtggaggcattgaatcacttcgtgcaattccttggatctttgcttggacacaaactcgattccacctaccagtgtggcttggttttggcgcagcgttcaagcatgtcttgcagaaggacatacgcaatcttcagatccttcaggagatgtacaacgaatggccatttttcagggttacaatagacttggttgagatggtgtttgctaagggtgatcctggtatagcagctctgtatgacaagttgctagtttctgaggatttgtggccatttggtgctcgtcttagagcaaactatgaagaaacaaagcaacttcttctacaggttgctggacacaaagaccttctggagggagatccttacttgaggcagagactgcgtatccgtgattcctacattacagcgctgaatgtttgccaagcttgcacgctaaagcgtatcagggaccctggcttccatgtaagcccccgagctcacctctccaaggacataatggactcagggaagccagccgctgagcttgtgaagctgaacacaacaagcgagtacggcccaggcctcgaggacactctcatcctgaccatgaagggcatcgctgctggtatgcagaacactgggtagaacccagcggtactcgc

SEQ ID NO: 267 - DNA, 2954 bp, Zea mays
aaaaaagcaggctcctgcaggaccatggctgccttaggggcgaagatggagcgtctgtcgtcgatcgacgcgcagctgcggatgctggtgccggggaaggtttcggaggacgataagctcatcgagtacgacgctctcctcctcgatcggttcctcgacatccttcaggacctccatggcgacgacctcaaggaaatggttcaagaatgctatgaggtagctgctgagtatgaaacaaaacatgacttgcaaaagcttgatgaactcgggaagatgataacaagcttggatcctggggactctatcgtgattgctaagtctttctcgcacatgcttaacttggccaacttggctgaggaagtccagatagcctacaggaggagaatcaagctcaagaagggagactttgctgatgagaactcggcaatcacagaatctgacattgaggaaacacttaagaggcttgttgttgacctgaagaagtcacctgctgaggtatttgatgccctcaagagccagactgttgatctggttttgactgcacatccaacacagtctgtgaggaggtcactgctccagaaacactcgaggatacgcaactgtttggttcaactctactcaaaagatatcactccggatgataagcaggaacttgatgaggctctgcaaagagagatccaagctgcctttagaactgatgagatccgaagaacacagcccactccccaagatgaaatgcgtgctggtatgagctacttccacgaaacaatttggaagggtgttccaaagttcttgcgccgggttgatactgcattgaagaacattgggattaacgagcgtgttccttacaatgcacctcttattcaattctcttcttggatggggggagatcgtgatggaaatccaagagtgacaccagaggttaccagggatgtctgcttgcttgccagaatgatggcatcaaacttgtactgctctcagattgaggatctcatgtttgagttgtctatgtggcgatgcagtgatgaactgcgcatgcgagctgatgtgctgcatctctccactaagaaggatgccaaacattacatagagttttggaagaaggttcctccaaatgagccatatcgggtgatactgagtgatgtcagggataaactgtacaacactcgtgaacggtcacgagagcttttatccagtgggcattctgatattcctgaggaagctacattgacaaatgttgagcagctgttggagcccttggaactatgttacagatcactctgtgcttgtggtgactctgtaattgctgatggaacccttctggatttcttgcgtcaagtgtccacctttggactctcccttgtgaggcttgacattaggcaagagtcagataggcatactgatgtccttgatgccatcactacatacctggggataggatcttaccgtgaatggactgaagaacgccgccaagaatggttactgtctgaacttaatggcaagcgccctctgtttggctcagaccttcccaagactgaggaaatttctgatgttctagacacattccatgttattgctgagcttccctctgacaattttggtgcgtatatcatttccatggcgacagctccgtcggacgtccttgctgttgaactcctccaacgtgagtgtcatgtgaaaacaccacttagagtagtcccgctgtttgagaagttggccgatcttgaggctgccccggctgcattggccagactgttctcaatagattggtacagacagaggatcaatggcaagcaggaggtcatgattgggtattcagactcgggcaaagatgctggtcgcctctcagcagcttggcagctatacaaagctcaggaggagctcatcaaggttgctaaggactttggtgtgaagttaacgatgttccatggacgtggtgggactgttggaaggggtggtggtcccactcaccttgccatcttgtcccagccaccagacacgatccacggatcactcagggtcactgtgcaaggtgaagtcattgaacagtcatttggtgaggagcacttgtgctttaggacactgcaacgtttcacggctgctaccctggagcatggcatgcacccaccaaatgcaccaaagccagaatggcgagcccttcttgatgagatggcagttgtggcaactgaggaatatcggtccattgtcttcaaagagccacgctttgtcgagtatttccgccttgcaacccctgaaacagagtatggtaggatgaacataggaagcaggccatccaagagaaagccgagcggaggtatcgactcactccgagcaatcccatggatctttgcttggacacaaacgcggttccacctcccggtctggctaggatttggagccgcattcaagaatgtcctccagaaggacatcaggaacctccacatgctccaggaaatgtacaatgagtggccatttttcagggtgactattgatctggtggagatggtgttcgccaagggtaatcctggcattgccgcactgtatgacaaactcctcgtttcagaggaactgcatccattgggtgagaagctgagggccaactatgaggaaacccagaagcttctacttcaggttgctgggcacagggatcttctggaaggtgacctctacctgaagcagcggctccgcctgcgtgatgcgtacatcaccaccctgaacgtctgccaggcctacaccctgaagcggatccgtgacccggactaccatgtcgcgctgcgcccccacctctccaaggagatcatggactcgaccaaggctgcggcggagctggtgaagctgaaccctggcagcgaatacgcaccggggctggaggacaccctcatcctgaccatgaagggcatagcagccggcctccagaacaccggttagctcgagacccagctttcttgtacaaa

SEQ ID NO: 268 - DNA, 2954 bp, Glycine max
aaaaaagcaggctcctgcaggaccatggcgaccaggaacttggaaaagatggcatccattgatgcacagcttaggcaattggctcctgccaaagtgagtgaggatgacaaactgattgagtatgatgctcttctgctggatcggttccttgatatccttcaagatttacatggggaggatctgaaggaaacagttcaagaagtgtatgaactttcagctgagtatgaaggaaagcatgaccctaagaaactggaagaacttggaaatttgataaccagtttggatgctggggactctattcttgttgccaagtccttttcccacatgcttaatttggccaacttggctgaagaggtccagatttctcgccgccgaagaaacaagttgaagaaaggggattttgcagatgagaacaatgcaactacagaatcagacattgaagaaactctcaagaaacttgtatttgacttgaagaagtctcctcaggaagtttttgatgcactgaaaaaccagactgttgatttggttcttactgctcatcctactcaatcaattcgtagatctttgcttcaaaagcatggaaggataaggaattgtttatctcaattgtatgccaaagacattactcctgatgataagcaggagcttgatgaggctctacaaagggagattcaagctgccttccgtacagatgaaatcaggaggacccctccaacaccacaagatgagatgagagcagggatgagctacttccatgaaacaatttggaacggtgttcccagatttctgcgccgtgtagacacagctttgaacaatatcgggattaaagagcgtgttccttataatgctccccttattcaattttcttcttggatggggggtgatcgggatggtaatccaagagtaactcctgaagtgacaagggatgtttgcttattggctagaatgatggctgctaatttgtattattcccagatagaagatcttatgtttgagctctctatgtggcgctgcaatgatgaactacgcgttcgtgcagaagaacttcacaggtcttccaagaaagatgaagttgcaaaacactatatagaattttggaaaaaggttcccccaaatgaaccatatcgtgtggtactcggtgaagtaagggataggctctatcagactcgtgagcgttctcgccatttgctttctaatgggtactctgacattccagaggaagccactttcaccaatgttgaggagttcctggaatctcttgaactatgttacagatcactatgtgcttgtggtgatagagcaattgctgatggaagccttcttgatttcatgagacaagtctccacttttggactgtcactagtgaggcttgatatcaggcaagagtcagatcgtcacactgatgtgctggatgccattaccaaacacttggaaattggctcgtaccaggaatggtctgaagagaaaagacaggaatggttgttgtctgagttaagtggcaaaaggcctctatttggacctgaccttcctcaaactgaagaaattagagatgttttggacacatttcatgtcatagcagaactaccaccagacaactttggagcctatatcatatcaatggcaactgcaccatctgatgtgcttgcagttgagcttctacaacgtgaatgtcacatcaagcatcccttaagagttgtgccattgtttgagaagctagctgatctagaggctgctcctgctgctctggcacggttgttctcgatagactggtacagaaataggatcaatgggaagcaagaagtgatgattggatactcagattcagggaaagatgctgggaggttctctgcagcatggcagctatataaggctcaggaggaacttataaatgttgccaagaaatttggtgttaagctaaccatgttccatggtcgtggtggaactgttggaagaggaggtggacctactcatcttgctattctgtctcaacctccagacacaatccatggatcacttcgtgtgacagtccaaggtgaagtcattgagcaatcatttggagaacaacacttgtgctttagaacactacaacgtttcactgccgccactctagaacatggcatgcaccccccaatttcgccaaaaccagaatggcgtgctttgatggatcagatggctgtcattgctactgaggaataccgttccattgtattcaaggaaccacgctttgttgagtatttccgcctggctacaccagagttggagtatggaaggatgaatattggaagtcgaccagcaaagagaagacctagtggaggcattgaaacactgcgtgcaataccttggatttttgcatggactcagacaaggtttcatcttccagtgtggctaggctttggagcagcatttaaaaaagtcattgaggaaaatgttaagaatctcaatatgctgcaagagatgtacaatcaatggcctttctttagggtcacacttgatttggtggaaatggtgtttgccaaaggagatccgaaaattgccgctctgaatgatagactccttgtttcaaaggatctgtggccgtttggggatcaattgaggaacaaatatgaagaaactaggaaactcctacttcaggtggctggacacaaggaaattcttgaaggggacccttacttgaagcaaagactcaggcttcgtcatgctcccattaccaccctcaatattgtccaagcttacacattgaaacgtatccgtgatcctaactacaatgtgaaggtgcgcccccgcatatcaaaggaatctgcagaggcaagcaaatcagctgatgaacttgtcaaattgaacccaacaagtgaatatgcccctggtttggaagacacactcattctcactatgaagggtattgctgctggcatgcagaacactggttagctcgagacccagctttcttgtacaaa

SEQ ID NO: 269 - DNA, 539 bp, Zea mays
aaaaaagcaggctcctgcaggaccatggccatgagagctctcccgctgaccccttccaggagctcctcgtttggagctcaccaaaccaggccgagcggcggcggccccagatcagtgagagcttatgcgaagggagacgaggagggcgacaagcagtccctgttcggaagcatcaccgaggcgctggacttctcgcaggtccggtcggagaaggacgccgagctgctgtacgaggccagggagtccaccaaaggtggagggaggatgacgagggagcagtacggagcacttaggcggaagattggtggcacctaccaggatttcttcaagtcatatgttgaagtcgacgggcaatacgtggaggagggttgggtcgacaagacctgcaagatctgcaagaaggacacaaggggggagccgaggcaggttgacaagctaggaagatacgctcacgttgcgtgcctggagaaccccaaaccgacgaactttttcgccaaaatcttcgccagatagctcgagacccagctttcttgtacaaa

SEQ ID NO: 270 - DNA, 1621 bp, Zea mays
acaagtttgtacaaaaaagcaggctcctgcaggaccatggagccggcctatgtcgtcaccctctccttcctcttcctcttcttgctccaccatctcctcggccgccaccgccgcaggaccaacggcaagaacaagagaacgcagctgccaccgagccctcccgccatcccggtcttgggtcacctccacctcttacggaagcctatccacgcggcgctcgctcgcctcgcggagcgctacgggccggtgttcttcctccggctcggctcgcggcaagccgtggtggtgtcgtccgcggcttgcgccacggagtgcttcaccgagaatgacgtctgcttcgcgaaccgcccgcggttccccacgctcctgctggtttccttcggcggcgccacgctcccaatgtgccgctacggctcgtactggcgcaacctccgccgcgtcgccacggtgcagctcctgtccgcgcaccgcgtcagctgcatgctccccgtcatatccgccgaggtgcgggcaatggcgcggaggatgtaccaatccgccgccgccgcccccgccggcgccgcgagggtcgagctgaagcggaggctgttcgagctctcccacagcgccctgatggagaccatcgcgcgaaccaagacgtcccgtgccgtggcggacgacgacacggacatgtctccggaggcccaggaattcatgaaggcgctggacgtgttccttccgcttctcagcggggccaacgcgtgggactacctgccggtgctacggtggctcgacgtgttcggcgtgaggaacaagatcctgcgcgcggtgagcgcaagggacgcgttcctacggcggctcatcgacgcggagcggcggaggctggaggaaggcggcgagaacaacgataagaagagcatgattggtgttctgctctcactgcagaagtcagaaccggaggtgtacacggataccatgatcatggctctgtgctcgagcatgttcgctgggggttctgaaacaacggcgacgacggcggaatgggcgatgtcgctgctgctaagccaccccgatgttctgaagaaagcgcaggcggagattgacgcgtccgtggggcactcccggctgctcggcgccgacgacctgccgcgcctcggctacctccactgcatcatcagcgagaccctgcggctgtacccggtcgtgccgacgctggtcccgcacgagtccaccgccgactgcacggtcggcggccaccgtgtgccgagcgggacgatgctcctcgtcaacgtgtacgccatccacagggaccccgcgatatgggcggacccagccgcgttcaggccggagcggttcgaggacggccgtgccgacgggctgttcgtgatgccgttcgggatgggaaggcggaagtgccccggagaggccctcgcgctgcggacgctggggctggtcctggggacgttgatccagtgcttcgactgggacacggtcggcggcgccgaggtcgatatggccgaagggggcggaatcacgctcccgagggctgtccctctggaggccatctgcaagccgcgccatgctatgcttggcgtcctcaagggactgtagctcgagacccagctttcttgtacaaagtggt

SEQ ID NO: 271 - DNA, 371 bp, Zea mays
aaaaaagcaggctcctgcaggaccatggcggagcttgtgggaccgcgcgtctacagttgctgcacttgccggaaccacgtttgccttcacgacgacatcatctccaaggcctttcaggggaggaatggccgtgcgtttctgttctctcatgccatgaacgtagttgtgggggcgaaggaggatagacacctcatgacagggctacacacagttgctgatatctactgtaatgactgccgtgaggtgttaggctggaagtatgtgagagcatacgaagagacgcagaaatacaaggaaggaaaattcatattcgagaagtcaaagattgtgaaggaaaactggtagctcgagacccagctttcttgtacaaa

SEQ ID NO: 272 - DNA, 440 bp, Zea mays
aaaaaagcaggctcctgcaggaccatggggcgcctgttcctgatgcacctggacggcaacgtctacagctgcaaacactgcaagacccacctcggcgttgccagcgacatcatctccaaggccttccagtgcaagcacggcaaggcgtacctcttccataaggttgtcaacgtgacttctggagtaaaagaagaccgcatgatgatcacaggaatgcatactgtttctgatatcttctgtgttggctgtggatccatagttgggtggaaatatgatgctgcacatgagaagggccagagatacaaggaaggcaagtttattctggagaggtacaaggtgtcgggccctgacggaagccaatactgggttccacaagatgctcacttgggcggaagcgacgccgatgacatatagctcgagacccagctttcttgtacaaa

SEQ ID NO: 273 - DNA, 524 bp, Glycine max
aaaaaagcaggctcctgcaggaccatgtctatcatcccaaacttgttcggtggtagacgaagcaacgtcttcgacccattctctctggacgtatgggaccctttcgaggggtttcctttttccacaggtcacgtgccttcctctggtggggaaagcagtgccatagccaacactcgcgtggactggaaggagactccggcggctcacgtgttcaacgttgatcttcccgggttgaagaaggaggaagtgaaggttgaagttgaagatgggagggtgctgcagattagtggtgagaggaccaaagaacaagaacagaaagatgataggtggcaccgcgttgaaagaagcactgggaagttcatgaggaggttcaggcttcccgagaatgccaaaatggatcaggtcaaggctgctatggagaatggagtgctaactgttactgtgcccaaggaggaagacaagaaacctcaagtcaagtcaattcaaatatctgcctagctcgagacccagctttcttgtacaaa

SEQ ID NO: 274 - DNA, 2360 bp, Zea mays
aatgcagcctcgtgcggagcttttttgtaggtagaccgcgggatatcacaagtttgtacaaaaaagcaggctcctgcaggaccatggccaccgcagaccagagccgtattttcatgaaggacgtcaaacgcgtcatcatcaaggtgggcactgcagttgtcacgaggcatgatgggcgagtatccacaggcaattttggtgttctttgtgaacaggtgaaagagataaatgctctaggatacgaggtgatcattgtgtcctcaggtgctgttggtgtggggaagcagaggctcaattacaggaagcttgtcaatagcagctttgctgatatgcaaaagccacagacggagctggatggaaaggcttgcgctgccgttggacagagtggcctcatggctctctatgatatgctatttactcaacttgatgtatcctcttcccaacttcttgtgacagacagtgattttgagaatccaaacttcagggagaggcttcgtgaaactgttgagtcactattagatcttaaagttgtaccaatatttaatgaaaatgatgccatcagcaccagaaaggctccgtatgaggattcatcgggtatattttgggataatgacagtttagccggtcttttggctatagaacttaaagcagatcttcttgttctactcagtgacgtggatggcctctacagcggtccacctagtgaacctcaatcaaagatgatacatacatacatcaaagataaatatcataacgaaattacttttggggataagtcacgtgtaggtagaggaggaatgacagctaaagtgaaggctgctctcgtggcttcaaacagtggcacacctgttgttataacaagtggatctgcatctgggagcatcattagagttctccaaggagagaagattggtactctctttcataaggacgcgagtttgtgggaaccatccagtgatgttagtgcatgtgagatggctgttactgcaagagaatgttcaaggcgtctgcagaatttgtcgtcggatgagcgcaataaaatattgctagacgtggcggatgctttggagaaaaatgagaatctaattaggaccgagaatgaagccgatgtagctgcagcgcaagatgctggatatgagaaatttttggttgatagattgaccctaaagccaggaaagatatcagccctcgcgaaatccattcgcactcttgcacgtatggaagacccaatcaaccaaatactcaaaagaacagagattgctgaaaatttaattctcgagaaaacatcatgtcctttgggtgtcctattggttatttttgagtccaggcctgatgccttggtccagattgcatctttagcgattcgaagtggcaatggtcttctcttgaaaggtggaaaagaagccatgagatcaaacaaagtattgcataaggttataactggtgccattcctagcaacgtgggtgaaaaacttattggccttgttacaagtagagacgaaattgctgatttactaaagcttcatgatgtaattgatcttgtcattccaagaggcagcaataagctggtttcacaaatcaagacatcaactaagatccctgttcttggtcatgctgatggtatctgtcatgtatacatcgacaaatcagctaacatgaatatggcaaaacaaatagtgatggatgccaaaattgattacccagcagcctgcaatgctatggagacattgcttgttcataaagatcttataaaggctccaggtcttgatgacttactgctatcactcaaaacaaaaggagttgctatttttggggggcctgttgcacatgaagtattgtgcattccagaagcaaattcattccatcatgaatatagttctatggcctgcgcaattgagtttgttgatgatgtacagtcagcgattgaccatatacattgttatggaagtgcacatacagattgcattgtcactacagatgataaagtagcagaaacttttctgcgtcaagttgatagtgctgctgtgtttcataatgcaagcacacgattctctgacggggctcgttttggattgggtgctgaggttggcataagcacagggcgtatacatgctcgtgggcccgtgggtgttgaaggtctcttaacaacgcgctggatcatgcgagggagcgggcaagtggtgaacggtgacaatgatatcgcatacacccataagaaccttccattgccatagctcgagacccagctttcttgtacaaagtggtgatggggatcccccaccctgcaatgtgaccctagacttgtccatcttctggattggccaacttaattaatgtatgaaataaaaggatgcacacat

SEQ ID NO: 275 - DNA, 1001 bp, Glycine max
aaaaaagcaggctcctgcaggaccatggcgacacttaaggttcctcagcctcttccccccgttgcagatgattgtgagcagctccgaaaagccttctcaggttggggaactaacgaggagctgattgtatcgatcttggctcataggaatgctgctcagaggaagcttatcagagaaacttatgcccagacctatggagaagatctcctcaaggccttggacaaagaactcacgagtgattttgagaggctggttcatctttggacacttgattctgctgaacgtgatgcatttttggcaaacgaggcgactaaaaaatggacttcaagcaatcaggttctggtggaaatagcctgcactaggtcctctgaacaattgtttgctgcgaggaaggcttaccatgttctttataagaagtctctggaggaggatgttgctcatcacacaacaggagacttccgtaagctcatactacctctggttagttcttatcgatatgaaggagatgaggtcaacttgaccctggcaaaaactgaggcaaaattgctgcatgagaagatttcaaacaaggcttataatgatgacgacttcatcaggattttggccacaaggagcagagcacagattaatgctactttgaatcactacaaagatgcatttggacaagatatcaacaaggacctgaaggctgatccaaaggacgagttcctgtctttactaagagcaactgtgaagtgcttgatccgtcccgagaagtacttcgagaaggttgttcgcttggcgatcaacaagcgaggaaccgatgaaggagcccttacaagagtggtggccacaagggctgaggttgatttgaaaaacatagcagatgagtatcaaaggaggagcagtgtccctcttgaacgtgctattgttaaggacaccaccggtgactatgagaaaatgcttgtggcgcttttaggacatgatgatgcttagctcgagacccagctttcttgtacaaa

SEQ ID NO: 276 - DNA, 992 bp, Glycine max
aaaaaagcaggctcctgcaggaccatggctacccttattgctcccagcaaccactctccccaagaagatgctgaagctctcagaaaggcttttgaaggatggggaactgatgagaacactgtcatagtaattttgggtcatagaactgtgtatcagaggcagcaaatcagaagagtttatgaggaaatttaccaggaggatcttgtgaagcgcctagagtctgagatcaaaggagactttgagaaagccgtgtaccgatggatactggaacctgcagatcgtgatgctgttttggccaatgttgccatcaagagtggcaaaaactacaatgtcattgtggaaattgccactatcctctccccggaagagcttttggcggttagacgcgcctatctcaaccgctacaagcactccttggaagaagatgttgcagctcatacctctggccatctacgccagcttttagtggggttggtgaccgcattcaggcatgttggtgatgagatcaatccaaaattggcacaatctgaggctgaaattcttcatgatgctgtaaaagagaagaagggtagctatgaagagaccattagggtcttgactacaaggagcaggacccaacttgttgcaactttcaaccgctacagagagatccatggcacttccatctctaagaaattggtggatgaaggatctgatgagtttcagagggcattgtacactgccattcgtgccatcaatgatcctattaagtactatgaaaaggtggtgcgcaatgcaatcaaaaaggttggaaccgatgaggatgcactcactcgcgtggttgtgagccgggccgagaaggacctgaagataatctcagaggtttactacaagagaaacagcgttcttcttgagcatgctattgccaaggaaatctcaggggactacaagaagttccttctcactctgttggggaaagaagactagctcgagacccagctttcttgtacaaa

SEQ ID NO: 277 - DNA, 1004 bp, Glycine max
aaaaaagcaggctcctgcaggaccatggctaccttgactgtacctccagttcctccttcccccagagatgatgccatgcagctttaccgtgcttttaagggatttgggtgtgatacaagtgctgttatcaatatacttgctcatcgagatgctacacagcgtgcctacatccagcaagaatacaaagcaatgtattctgaggaactttccaagcgcttagcttcggagcttagtggaaagttagagactgcagttctgctctggttgcatgaccctgcaggacgtgatgcaacaatcattaggaagtctctaacagcagacaacaaaacccttgaaggtgctactgaagttatatgttcacgcactccatcgcagctacaatatttaaaacagatctatcattctatgtttggtgtttatcttgagcatgatattcaaacaaacaccagccccggcgatcatcaaaagctcttgcttgcatatataagcacacctcgtcatgagggccccgaggttaatagagaaattgctcagaaggatgcaaagggtctttacaaagcaggggagaagaaactgggaactgatgaaaagacttttatccacatattcagtgaacggagtgcggcgcatttggctgccgtcagttcttattaccatgacatgtatggtcattcactgaagaaggcagtaaagaatgaaacatctggggcctttgaacatgcacttttgacaataatccaatgtgctgttaatccaggaaagtattttgcaaaggtgttgcataaggcgatgaaaggcttggggactgatgattccacactcattagggtcgttgtgacaaggactgaggttgatatgcagtatatcaaagctgcatatttaaagaaacacaagaagactctgaacgatgaagtacactcagaaacatccagtcactacaggacttttcttctctcacttttgggccctaatcactagctcgagacccagctttcttgtacaaa

SEQ ID NO: 278 - DNA, 788 bp, Glycine max
aaaaaagcaggctcctgcaggaccatgaaggtttccattgccaagtttcactcccttcccctatgttttctccttctcttggccatcaacacacagccactgctagcagctgaaccagagccagtggtagataagcaagggaaccctttggtgccaggagtagggtactatgtgtggccactttgggctgataatggaggcctcacactaggccaaacaaggaacaaaacatgccctcttgatgttatccgtgacccttcattcatagggtccccagtgaggttccatgcatcaggccttaatcacattccaacactcactgatctcaccattgatttccctgtggtgacagtgtgcaaccagccaacagtgtggaggctgagcaaggaaggatcagggttctggtttgtgagcactaggggtaaccctcaggacctcattaccaagttcaagattgagaggcttgaaggggatcatgcctatgagatctacagcttcaagttctgctctagtgtgcctggtgtgctatgtgctcctgtggggacttttgtggatgctgatggaaccaaagtcatggctgtgggtgataacattgacccttactatgtgaggttccagaaagtctccacctttggtcaagacaagaaacaaccttttagcatagtgtagctcgagacccagctttcttgtacaaagtggtgatggggatcccccaccctgcaatgtgaccctagacttgtccatcttctggattggccaacttaattaatgtatgaaataaaaggatg

SEQ ID NO: 279 - DNA, 770 bp, Zea mays
aaaaaagcaggctcctgcaggaccatggattccgacctctggatctcgcgtctcatggctgccaagcggcagtttgcgctgcagcgcgcgcagcgccagcacgccgccccggcatcccaccacgatcgattcgggtatgatgatatcgaacctgaggatgatgtgcgctcagacttcccatgcccttactgttatgaagatcatgatgttacttctctgtgcgcccatttggaggatgagcacccttttgagtctaaaattgtgtcttgccctgtttgcttggctaggatttcgaagaacttgttggatcatataacccttcagcatggctacctatttaaattgcagagacatcacagagtacgtagagttactggtaatggcaaccacaatctctcctatgcagggagagatcttcagcttcaagagacctacttaaaggtgcttcttggaaatagcagtcgaagcagcagtaccaatgcatcaagtacagtcactgattcactgctatcctcgctagttttaaatctatcttcattagaagtggaggacacgtcaaagtcttcagctccttctgtggtggaaaataattggtttaaacgatcactaccttcaaagacttggaagttaagtgctgttgattcgagccttagtcatgaagagagggagcgtaggaggaggagagcagttgtgagatcagcttttgtgcagcatctccttgtcactacccttttcgaagactagctcgagacccagctttcttgtacaaa

SEQ ID NO: 280 - DNA, 287 bp, Zea mays
aaaaaagcaggctcctgcaggaccatgggcggtctctccaccaagcttttcgtggtcctcctcctgctcgtttgttacaccgggacgcaaggcgggccggtgactatggtgtcggcgaggaagtgcgagtcgcagagcttccgcttcaagggaccttgctcgagggacgccaactgcgcaaacgtctgcctgaccgaaggtttcaccggcggcgtgtgcaagggcctacgccaccgctgcttctgcaccagggactgctagctcgagacccagctttcttgtacaaa

SEQ ID NO: 281 - DNA, 1214 bp, Glycine max
aaaaaagcaggctcctgcaggaccatggtgattgaggagggcgagatgaagtcccaaggtgaggtggaatcatggctccagcaagaagcgaagaagaaccaccattctccattattctcatcttcttcatatctgggaagacaaacatcatcgatatactctctcacactggacgagttccagcacagtctatgcgagagcggcaagaacttcggctccatgaacatggacgagttcctcagcagcatctggaacgctgaagagaacagccaagccatcaccaacaacaacgtccctctgtcgtcgaccctaacaatattaaggaaacagccaagcctccctcgccaaccctcactgtccctccctgctcctctttgtaggaaaaccgttgacgaggtttggtcccagattcaaaaagaacaaaacaagaacaacaacattagcaatgttcttaatgataataccgagtctgcccctcgccaacccacttttggtgagatgactttggaggattttttggttaaggccggtgtagttcgggaaacaacgtgtgcaccgccactaccggtgtctcactctcatcagccgcattacgcgaataataacaacaacgttgcaatggctccttcttttgttggtaggcatgttggtgcagtgagtaacgtggttgcaccgggttatcaacaagttgttggggaggcttctggtgggtatggtaagagggatcataatggtggtgggtatcattgttttggaggtggtggtggtgggtatggggtggggcccacaatgggaatgggtgggcctgtgagtccggctaattcgtctgatgggatagggaatgatggagggcagtttgggcttgacatggggggtttgagagggagaaagagggtggtggatggtcctgtggaaaaggtggtggagagaaggcagaggaggatgatcaagaatagagagtcagctgccagatctagagccagaaaacaggcatacacagtggaattagaagcagaactaaaccagttaagagaagagaactcccaactgaaacaggcgctggccgagctcgagaggggaagaaaacaacagtgttttgaggaagtgaacgttagtgttaaaaccaaagctcagaaagcaaaagagaaactgagagctttgagaaggaacatgagttgtcctttgtagctcgagacccagctttcttgtacaaa

SEQ ID NO: 282 - DNA, 1046 bp, Arabidopsis thaliana
aaaaaagcaggctcctgcaggaccatgtcggttttcgaatcggagacttcgaacttccacgtctacaacaaccacgaaatccaaacgcaaccgcaaatgcaaacgtttctgtcggaggaggaaccggtagggagacagaactcgattttgtcactaactcttgacgaaatacagatgaaaagcggtaagagctttggggcgatgaacatggacgagttccttgcgaacttgtggacaaccgttgaagaaaacgacaacgaaggaggtggggctcacgacgacggagagaagccggcggtgctgccacgtcaagggtcgttgtccctccctgtgcctttatgcaagaaaacggtcgacgaggtttggctcgagatacaaaacggtgtacaacaacatccaccgtcgtcgaattccggtcaaaactccgacgaaaatattcgccggcaacaaacccttggtgagatcactctcgaggattttcttgttaaggctggtgttgtacaagaaccgttgaagacaacgatgaggatgtcgagttctgattttggttataaccccgagtttggagttggtttacattgtcagaaccaaaacaattatggtgataaccggtcggtttatagtgaaaaccgaccgttttactcggttttgggagaatcttcaagctgtatgaccgggaatgggaggagtaatcagtatctgaccggtttagatgcttttcggatcaagaaacggataattgatggtccacctgaaattttgatggagcggagacaacggcgaatgattaaaaaccgcgaatctgcggctcggtctcgagcccggagacaagcttatactgtggaactggagttggaattgaacaacctcacggaagaaaacacgaagctgaaggaaattgtggaggaaaatgagaagaaaagaagacaagagataataagtagaagcaaacaagtgactaaagagaagagcggagacaaattgagaaagattcggaggatggctagtgccgggtggtagctcgagacccagctttcttgtacaaa

SEQ ID NO: 283 - DNA, 1037 bp, Glycine max
aaaaaagcaggctcctgcaggaccatgagcaacaacaacgcaggaaaggtggtgtgtgtgacgggtgcttctggtttcatagcttcatggatcgtcaaattccttctccaacgtggttacactgtcagggccaccgttcgctacccaagtaatctgaaaaaggtagatcacttggttaaacttgagggcgcaaaagagaggttgcagctgtttaaggcagatctgttggaagaaggttcctttgactctgttgtggaaggctgtcatggtgtttttcatactgcttcacctgtccgttttgttgtcaacgacccacaggctgaattgcttgatcctgcagtgaagggaactcttaatgttctcaaatcatgtgcaaaatcaccatctgtcaaacgggttgttttaacttcttctatttctgcagttgcatttaatcgaagacctaaaactcctcaagtggtagttgatgagacatggttttcagatccagatgtctgtagggaattagagttgtggtacacactttcaaagactttggctgaggatgctgcctggaaatttgtaaatgaaaacagcattgacatgatttctattaacccaactatggtggcaggacctctcttacaaccagagattaatgaaagtgttgagccaattttaaacctaataaatggtaaaccatttccaaataaatcttttggatgggtcgatgtgaaagatgttgctaatgctcatattctggcctatgaaattgcttcagctagtggaagatattgtttggttgagagagtcatacactactctgaacttgctacgattttacgtggtctgtaccccacattacaaattccagataagtgtgaggtagatgagccgtatatcccaacataccagatttccacagaaaaggcaaaaaaggacttgggaatagagtttactcctttggaagtgagtctcagggagactgtggaaagctttagagaaaagaagattgtcaactttaatccgtagctcgagacccagctttcttgtacaaa

SEQ ID NO: 284 - DNA, 1022 bp, Brassica napus
aaaaaagcaggctcctgcaggaccatgtcgacggaacgagaagtagtctgtgtcaccggcgcaagtggctgcatcgggtcgtggctcgtccatctgctcctcctccgcggctactccgttcacgccaccgtgaaaaacctccaggatgagaaagagacgaaacatctggaagctctcgaaggagcagccacgcgcctccatctattcgagatggatctactgaagtacgacactgtttccgccgccgtcaacggatgttccggcgttttccacctcgcatctccctgtatcgtcgacgaagtccaagatcctcagaagcaactacttgatccagcggttaaggggacattaaatgtactcacggcggcgaaagaagccggcgtgaagagggttgtggtgacgtcttccatatcggcgataaccccaagccccaactggcctgctgataagatcaagaacgaggactgttgggctgatgaagacttctgcaagcaaaatggattgtggtatccactttctaagacgcttgctgagaaggcagcttgggagtttgcagaggagaagggattagatgtggttgtggtgaatccaggaaccgtcatgggtcctgttattcctccatccatcaacgctagcatgctcatgcttcaacgcctccttgaggggtgtacagagacatacgagaacttcttcatgggttcggtgcatttcaaggatgtggcattagctcatatacttgtctatgagaacccatctgctaaaggaagacacctgtgcgttgaggccatctctcactacggtgattttgtagccaaagtagctgaactctatcctaattacagtgtccccaagttaccgagagagactcaaccgggtttactccgagccaagaacgcagcaaagaagctgatggaattggggttagagttcagttccatggaggttatcatcaaggatggtgtggagagtcttaaaagcaaaggatttatctcttagctcgagacccagctttcttgtacaaa

SEQ ID NO: 285 - DNA, 1013 bp, Glycine max
aaaaaagcaggctcctgcaggaccatggagaaggtggtatgtgtgaccggcggcagcggctgcattggttcatggctcgtccatctcctcttggatcgcggctacaccgttcacgccaccgtccaaaacctcaacgatgaagccgagacgaagcatcttcaatccctcgacggagcgtccacgcgcctccgcctcttccagatggatctcctccgccacgacaccgtcctcgccgccgtgcgtggctgcgccggcgtcttccacctcgcctctccctgcattgtcgaccaagtccacgacccccagaaggagcttctggacccggcgattaagggaaccatgaacgtgctcacggcggcgaaggaagcaggggtgcggcgcgtggtgctcacgtcctccatctccgcggttacgccgagccccaattggcccggcgatgttgccaagacggaggagtgctggaccgacgttgaatattgcaagcaaaaggggttgtggtatccattgtcgaagactttagctgagaaagctgcttgggattttgctaaagagaatgatttggatgttgtggtggtgaatcctggcactgtgatgggtcctgttattccaccaaggcttaatgcgagcatggtcatgctcgtgcgccttctacaaggctgtgccgaaacatatgaggacttttttatgggatcggtccactttaaggatgtagcattggcacatattttggtgtatgagaacaaatcagcggctggtaggcatttgtgtgttgaagctatctctcactatggtgactttgtggcaaaagttgctgaactctatccagagtataatgtgcctaagatgcaacgagatacccagccgggattattgagaacaaaggatggagcaaagaaactgatggatttgggtttgcaattcattccaatggagaagattattaaggatgctgtagaggatttgaagagcaaagggttcctttcatagctcgagacccagctttcttgtacaaa

SEQ ID NO: 286 - DNA, 1022 bp, Zea mays
aaaaaagcaggctcctgcaggaccatggggacggggaaggtggtttgcgtcaccggcgcatcagggtacatcgcgtcctggattgtcaggctcctactcgaccgcggctacaccgtccgcgccaccgtgcgagacaccgctgacccaaagaaaacattgcacctgactgcgttggatggtgctaaggataggctgcacttatttaaagctagcctgctagaagagggttctttcgatgctgcagttcatggatgcgacactgtatttcatactgcctctcccttttatcacaatgtcaaggatgctaaggcagagttacttgacccagcagttaagggaacactcaatgttctcggttcatgcaagaaagcttctattaaaaaggtggttgtaacatcatctatggctgctgtagcctacaacgggaggccaaggactcctgaggtcacagttgacgagacatggttttctgatccacaaatttgtgaaacaaatcagcaatggtatattttgtccaagacgctggcagaggaggctgcttggaagttctcaagggataatggacttgaaatcgttactataaacccagcgatggttattggtcccctgctgcagcctacactaaataccagtgctgaagcaatcctgaagttaatcaatgggtcatcgtctacatatcccaatttttgctttggatgggttaatgtcaaggatgttgccctggctcatatccttgcatacgaggtcccctcatcaaatggaaggtactgcatggtggaaagagttgttcactactcagaactggtgaacattatccgcaacatgtatcctacccttcctcttccggacaagtgtgcagatgacaagccgtttgtcccaccctaccaagtatcaaaggagaagataaaaagcataggcatcgagttgattccactggagacgagcgtcaaggagaccatcgaaagcttgaaagagaaggggttcgctagtttttagctcgagacccagctttcttgtacaaa

SEQ ID NO: 287 - DNA, 1406 bp, Arabidopsis thaliana
aaaaaagcaggctcctgcaggaccatgagctccattccgccttttctgagcaaaacgtacgatatggttgacgatccattgacggacgacgtggtgtcttggagcagcggaaacaacagcttcgtggtttggaacgtgcctgagttcgccaaacagtttctaccaaagtatttcaagcacaacaatttctccagcttcgtcagacagctcaatacttatggttttagaaaagttgatccagaccgctgggagtttgcaaacgagggctttttaagaggccaaaagcaaatactaaagagtattgtccggcgaaaacctgcacaagtgcagcctccacaacaacctcaagttcagcactcatctgtgggtgcgtgcgttgaagtgggcaaatttggactcgaagaggaagtggaaagacttcagcgcgataagaacgtccttatgcaggaacttgtaaggttgaggcagcaacaacaagttaccgaacatcatctgcagaatgtggggcagaaagttcatgtgatggagcagaggcagcaacagatgatgtcctttctagcaaaggctgtccaaagtccaggtttcttaaaccaattttctcagcagagtaatgaagcaaaccaacacatttctgaaagcaacaaaaagaggaggctacctgttgaggaccagatgaattctggcagtcatggggttaatggtcttagccgccagattgtgagatatcagtcatcgatgaacgatgcaacaaacactatgcttcaacagatacagcagatgagtaatgcacctagccatgaatctctctcaagcaataatggtagctttcttttgggcgatgttccaaattctaacatttcagacaatgggagctcctcaaatggatcacctgaagttacattggcagatgtttcatccattcctgcaggcttctatcctgcaatgaagtaccacgagccttgtgaaacaaatcaagtcatggagaccaatttgcctttttctcaaggtgatctcttacctccaacgcaaggagcagcagcttctgggagctcaagttcggatcttgttggatgcgagacagataatggagagtgtttggatccaataatggctgttttggatggcgcactcgaactagaagctgataccttaaatgagttgcttcctgaagtccaagattctttttgggaacagttcattggtgagagcccagtgattggtgagacagatgagttaatctcaggatcagtggaaaatgaactgatattggagcaactagagttacaatcaaccctgagtaatgtgtggagcaagaatcaacaaatgaaccatcttactgaacagatgggacttctcacatcagatgctctcagaaaatagctcgagacccagctttcttgtacaaa

SEQ ID NO: 288 - DNA, 1252 bp, Glycine max
aaaaaagcaggctcctgcagaccatggctgggatttgctgtggagttgttggagaagccgccgagacttcttctcccatcgaacccacctcacgcccttccgcacgccggagtttggaccttttgcccttgaaatacatagctgctgacgtgtcagtcccgccgctggagaacagccggaagcgccagaggctggataggcgcgcttctccggcaagggagtgcgataacgcggttcatagttccaaatcgaaggtagttgaggttgttccgaattattcttcgaagagtccaacgttggactccacaagtccaacagttgtcgaggagtatccgaggtatggggtaacgtccgtttgtggaaggaggagggacatggaagacgccgtttcggtccatccatcgttttgccaagaaactttatctcatgataaaaaattagggtttcatttcttcgctgttttcgacggccacggttgctcacatgttgcgacgatgtgcaaggagaggttacacgagatagtgaaggaagaggttcaccaagcgaaggagaatttggaatgggaatcaacgatgaaaaagtgtttcgcgcgcatggacgaagaggttttaaggtggagtcagaacaacgagactccaagttgcaggtgcgagcttcagaccccgcactgcgacgctgtgggctccaccgcagttgtggccgtcgtcacgccggagaaaatcatcgtggcaaactgcggagactcacgcgccgtgctttgccgcaacaacgtagccgtcccactctccgacgatcacaagccggaccgacccgacgagttgcttcggatccaagtagcgggagggcgcgtgatatattgggacggacctagagtgcttggggtgttggctatgtccagagccataggggacaattatctgaagccgtatgtaatttcggaaccggaggtaacggtaactgagcgtagtgaggaggatgagtgtttgatattagggagtgatgggctatgggacacagtgcaaaacgacatcgcatgcaaagtggtgcggatgtgtctgaacgcgcagaagccgccatcgccgccctcgtctccgaggagggagatggcggtggactgctccgacaaggcttgctccaacgcctccattctgctgaccaaattggcgttggttaggcagagttccgacaatgtgagcgtggtggtggttgatttgaggagaacctagctcgagacccagctttcttgtacaaa

SEQ ID NO: 289 - DNA, 910 bp, Glycine max
acaagtttgtacaaaaaagcaggctcctgcaggaccatggcggaatttacatccaccaccactaacactaacagtaacagcggtctcaggttgaaagccaaagtagccatagtcaccggaggtgcaagtggcatcggcgaagcgacggcgcgtgtgttcgcggagcaaggcgcgcgtatggtggtgctcgcagacatccaagacgagcttgggaatcaggtggctgcgtccattggaacccagcggtgcacctacatccactgcgacgtggcagacgaagaacaagttcaaaacctcgtccaatcaacggtcgacgcttacggacaagtggacataatgttcagcaacgctgggatccttagtccctcccaacagacggtgcccgaactggacatgtcccaactagacaggctgttcgcggtcaacgtacggggaatggcggcgtgcgtgaaacacgcggcgcgtgcgatgttggaggggcgcgtgaggggaagcatagtgtgcacggcgagcgtgggtgggagccacggtgggccaaatgcgacggactacataatgtcgaagcacgcggtgttggggttgatgcgttcggcgagcgtgcagcttgcggaacacgggataagagtgaactgcgtctcacccaatgggttggcaacgccgttgacttgtaaacagcgagggatgagcgaggaggaggggcaagaggtttaccggaaatacgcgagattgcaaggagtggtgctcacgcccaaacacgtggcagacgccgtgttgtttctcgtctctgatgactccgcctttgtcactgcccttgatcttagggtcgacggtggctttactttgcctagtatatcaatttcaaattctatactattgtagctcgagacccagctttcttgtacaaagtggt

SEQ ID NO: 290 - DNA, 1541 bp, Glycine max
aaaaaagcaggctcctgcaggaccatggcgaagcctcacagcggcacccccgcggtcgcaccgaagcccgcgtgggtcctcccgtaccgaaccgagaatctgcgcgaggtctacactctgtcccgaaaactagggcagggtcaattcggaaccacgttcctctgcacgcacaagggcacggggcgcacctacgcctgcaagtcaatcccgaagcggaagctgctctgcaaggaggactacgacgacgtgtggagggagattcagataatgcaccacctctccgagcagcccaacgtggtgcgcatccacggcacctacgaggacgccgcctccgtccacctcgtcatggagctctgcgagggcggcgagctcttcgacaggattgtgcggaagggacactacagcgagcgacaggccgccaagctcatcaagaccattgttgaggttgtggaggcctgtcactcgcttggtgtgatgcatagggacctcaagcctgagaactttctgtttgatactgtcgaggaggatgctaagctcaaaaccaccgattttggcctctccgtgttttataagccaggtgaaaccttttgtgacgttgttggaagcccgtactatgttgcaccagaggtcttgcgtaagcattatggtcctgaagcagacgtgtggagtgctggtgttattttgtacatcttattaagtggggtgccaccattttgggctgaaacagagcaggggattttccgacagattttgctaggaagactagatttccagtctgagccatggcctagcatttcagacagtgccaaagatctaattcgaaaaatgcttgatcggaatccaaaaacaagggttacagctcaccaagtactctgtcacccttggattgttgatgacaacattgcaccagataaacctcttgattctgctgttttatcacgcctgaagcagttctctgcaatgaataaacttaaaaagatggctttgcgtgttattgcagagaggctctctgaggaagaaattggtggtctgaaggaattattccggatgattgatgcagataacagtggtactataacatttgatgagctaaaagaaggcttaaagcgagtaggatctgaactaatggagtctgaaatcaaggatcttatggatgctgcagatattgataatagtgggacaatagactatggtgaattcattgctgctacggtccacttaaataagctggagagagaggaaaatttggtgtcagctttctcctattttgataaagatggaagtggttatataaccattgatgagatacaacaggcttgtaaggagttcggtttggatgatgtccatatcgatgaaattgtcaaggaaattgatcaagacgatgatggacagattgattatggggaatttgctgccatgatgagaaagggtaatggaggaattggcaggcgaaccatgaggagcacgctcaatttcagagatactctgggaattaaaggccatgggtccgattagctcgagacccagctttcttgtacaaa

SEQ ID NO: 291 - DNA, 1679 bp, Oryza sativa
aaaaaagcaggctcctgcaggaccatggggaatcagtgccagaacgggactcttgggagtgattaccacaatcggttcccaagggagcatgccgttgggtacgttcagggggatagctacttggacttgaagaagttcgatgatacttggcctgaggtgaacaacttcaagcctactgctgctagtattctcaggcgggggttggatcctacatctatcaatgtccttgggcggaagacagcggacctaagggagcattatatcattggtcggaagcttggtcagggccagtttggcacaacttacctctgtaccgagatcaatacagggtgtgagtatgcttgcaagaccatcccaaagcgcaagctcatcaccaaggaggatgtagaagatgtgcgccgtgagattcagataatgcaccatttgtcgggccacaagaatgttgttgcaatcaaggatgtctatgaggatgggcaagcggtgcacattgtgatggagctctgcgctggtggggagctctttgacaggattcaggagaaggggcattacagcgagcggaaggctgcagagcttataagaataattgtcagcattgtggctatgtgccattcgctcggggtgatgcaccgtgatcttaagccagaaaatttcctccttttggataaagatgatgatctgtcaataaaggcaatagattttggtctatccgtgttcttcaaaccaggtcaggttttcactgagctggttgggagtccatattatgttgctcctgaggtattgcacaaacgttatggaccagaatctgatgtgtggtcagctggagtgatactttacgttttgctgagtggagtgccaccattttgggcagagacacaacaaggaatatttgatgcagttctgaagggtcacattgattttcaatctgatccatggccaaagatatctgacagtgcaaaggatcttataagaaaaatgctctctcattgcccttcggagcgtttgaaggcccatgaagtgctaaggcatccttggatctgtgaaaatggagttgccactgatcaagctctggatcccagtgttatctctcggctcaaacaattctctgcaatgaacaagttaaagaagttggctctgagagtgatagctgagcgtctttcagaggaggagattgctgggttaagagaaatgttcaaggcagtggacacaaaaaatagaggtgtaatcactttcggtgagcttagagaaggtttaagaagatttggcgctgaatttaaggatacagagattggtgatataatggaagcggcacacaacgacaataatgtaacaatccattatgaagaatttattgctgcaactctacctcttaacaagatagaacgtgaggagcacctgctggcagcttttacatattttgacaaagatgggagtggttatatcacagttgacaagcttcaacgagcttgtggagaacataacatggaggattcactccttgaagagattatttcagaggttgatcaaaacaatgacggccaaattgactacgccgaatttgtagccatgatgcaaggcagcaacgttggactagggtggcaaacaatggaaagcagtttgaatgtagcattaagagacgcacctcaagtacattagctcgagacccagctttcttgtacaaa

SEQ ID NO: 292 - DNA, 1655 bp, Oryza sativa
aaaaaagcaggctcctgcaggaccatggggaattcttgccaaaatggaacctatgggaacaattaccagaacagcaaccggtttcagaatgaccgttttgcttctcggtacgttgatgggaatgatactgaggattgctactcgggctcgtcaagggccagcttagcgggtgctctgcggcaagggctgaacctaaagtcccctgtccttggatacaagactccaaatgtaagggagctctatactcttggccgggagcttggacagggacagttcgggaaaacatacctctgcactgagattagcacagggtgtcaatatgcatgcaagactatcttaaagagtaatctccgatgtgtgtcagatatcgaggacgtgcgccgtgaaatccagataatgcaccatctttcgggccagaagaatatagtgacaatcaaggacacatatgaggatgagcaggccgtgcacatcgtcatggagctctgtgcaggtggtgagctcttcagcaagattcagaagcgaggtcattacagtgaacggaaggctgcagagcttataaaaattatagttggcatcatagaaacatgccattcacatggagtgatgcaccgggatctcaagccagaaaatttcctcttactggacgcagacgatgaattctcggttaaagcaattgactttggtctatctgtgttcttcagaccaggtcaggttttcagagaggtagtgggaagtccatattatattgctccagaggtattggagaagcgttatggaccagaggctgatatatggactgctggagtgattctctatgtattgctgactggtgttcctccattttgggcagatacacaaagcgggatatatgaaaaagtactggatggacgtattgattttaaatcaaaccggtggcccaggatatctgacagtgcaaaggatcttataaaaaagatgctctgcccttatccatcagagcgtttgaaagcccatgaagtgctaaagcatccatggatatgtgataatggagtggctactaatcgagctctggatccaagtgtacttcctcgtctcaagcaattttctgcaatgaataggttaaagaaattgtctctccagattattgctgagcgtctttcagaagaggagattgttgggttaagagaaatgttcaaggctatggacaccaaaaacagaagtgtggttacatttggtgagcttaagggactgaaaagatacagctcagtgttcaaggatactgaaattaacgacttaatggaagcagctgatgacaccacctccaccatcaactgggaagagtttattgctgcagcagtgtctcttaataaaatagaacgtgagaaacacttgatggcagcctttacatactttgacaaagatggaagtggttttatcacagttgacaagcttcaaaaggcttgcatggaacgtaacatggaagatactttccttgaagagatgattctggaggttgatcaaaacaatgatggtcaaatcgattatgctgaatttgtcacaatgatgcaaagcaacaactttggacttgggtggcaaacggtggaaagcagcctgaatgtagccctgagggaggcaccccaagtatactagctcgagacccagctttcttgtacaaa

SEQ ID NO: 293 - DNA, 908 bp, Oryza sativa
gcagtcgctgtcgttaccatggaggatgagaggaacacggagagccaccagggtggcgaggctgcagagcaggtggaggtgaaggacaggggcctcttcgacaacctccttggcaggaagaaggacgatcagccggaggagaagaagcatgaggaggagcttgtcaccggcatggagaaggtctccgtggaagagccaaagaaggaggagcaccacgccgagggcgagaagaaggagagcctcctctccaagctgcaccgatccagctccagctccagctcgtcgagtgatgaggaagaggaggtgatcgatgacaacggcgaggtggtcaagaggaagaagaagaaggggctcaaggagaagatcaaggagaagctgcccggccacaaggaccatgccggtgagcatgctcctccgcccgcggcgacgggcttccccgcgccggctccgcctgcatccgtggtgacggccgcgcccacgccagctcctgctcccgtggtgactcacggcgatcaccaccacgacaccgccgtccccgtggagaagatcgagggtgatcacgccaagacggaggcgaccctgccacgtgcacccgaggaggagaagaagggcttcctcgacaagatcaaggagaagctgcccggcggccacaagaagccggaagacgcaactgctgtgccgccgccggccgcctcaccggctgctcctgccactactccggcgccagcacacccaccgccggctacagaggaagtgagcagcccggatgggaaggagaagaagggtatactgggcaagatcatggagaaactgcccggttaccacaagggctccggcgaggaagacaagaccgccgccgccgccaccggcgagcacaagagcagcgcttagaacccagcggtactcgc

SEQ ID NO: 294 - DNA, 830 bp, Oryza sativa
aaaaaagcaggctcctgcaggaccatggcttccggcaggatagctctgctctgccttcttggcttgctgctggtagcagcctcaccggctgccattgctgccaaagatgacaaaatcttctaccagattactttcatgtggccgggagcgtactgcgcgcagacgaaggccggatgctgcatgccgaagaccgacgtcgcgccggcgtccgacttctacgtcgccggcttcacggtctacaacgccaccaccaactcttccctgtccagctgcagcaacactccattcgacatgaaccaaattggggatgtcacgaggctgatgcagtactggaacaacatcaggtgccccagcaagagcggccagaagggctggaagaacgcgtgggagacgtccggcgtctgctccgacctcaccgagagcgcctacttcgacaccgccctcgccctccgcgacaagatcaaccccctttctcgcctcgtcagcaacggtattaagccggactttgggctgtacagcgtgaagaagatcaaggaggtgatcgaggaggggatcggcgcgccggcgctgatccagtgcagcaagggcccgttcaacaagttccagctataccagatatacgtctgcgtcgcggaggacgccaagacgttcgtggagtgccccagcccgaggaagccgtacacctgcggcgacgacatcctcttccaccctttcaagaagtggatgctcaagaccaactccaccaaatcctacgccgccgccgacgccatcgaccagctgctcgaagcggtcatggaaatctagctcgagacccagctttcttgtacaaa

SEQ ID NO: 295 - DNA, 608 bp, Zea mays
aaaaaagcaggctcctgcaggaccatggactccgagcactggatctcgcgcctggccgccgcgaagcgcttctacgcggcgcagctcggccacagcgatcgggccgggatggatgagctggagatggacgaggaggtcaggcccgagttcccctgcccctactgctacgaggaccacgacgtcggatccctctgcgcgcacctggaggaggagcacccgttcgaacccctctctttgctgagccgagatctacgggaagcccacttgcaggtgctcctcggaggaggcggacagagatccagcgacaacagcagcagcagcagcgccacgaacatttcggctgatcctcttctgtcgtcgttcggccttggcttccctacctcagacgcggagcaagcatccaagtcgactgtttccattcctgatgatgcaacgacggtgaaagaagcgcccgctcaggcacggaagctaagtatcgattcgtcgctcacaagtgaagaaagggagctgaagcggaagcaagcccgcgtcagagccacgttcgtgcaggacctgctgctctctactctattcggcgactagctcgagacccagctttcttgtacaaa

SEQ ID NO: 296 - DNA, 908 bp, Glycine max
aaaaaagcaggctcctgcaggaccatggctaagcatgatgttgagggtggttccttcgctgcaaaggactaccatgatcctcctccagcaccattgattgatgctgaggaactcacacagtggtccttctacagggctttgattgctgagttcattgccacaatgctcttcctttacatcacagtgctcactgtgattggttacaagagccagagtgatgtaaaggctgggggtgatgtgtgtggtggagttggcattcttggcattgcttgggcctttggtggcatgatcttcattctggtgtactgcactgctggaatctcagggggtcacataaacccagcagtgacatttgggctcttcttggctcgcaaggtgtctttgattagagcaataatgtacatggtggctcagtgcttgggagccatatgtggagttgggttggttaaggccttccaaaaggcttactacaacaggtatggtggtggggccaatgagctcagtgaggggtacagcacgggtgttggattgggtgctgagatcattggaacctttgttttggtctacactgtgttctctgcaactgaccccaagaggaatgctagagattctcatgtgccggttttggctccacttccaattggctttgctgtgttcatggttcacttggcaaccatcccagtaacaggcactggcattaaccctgctaggagtctaggagctgctgtcatgtacaaccaacagaaggcctgggatgaccattggatcttttgggttggaccatttattggagcagcaattgcagccttctaccatcaattcatattgagagcaagtgctgctaaggctcttggatcattcaggagcaaccccactatttagctcgagacccagctttcttgtacaaa

SEQ ID NO: 297 - DNA, 905 bp, Glycine max
aaaaaagcaggctcctgcaggaccatggcgaaggacgttgaggttgctgagcgtggctccttctctgggaaggactaccaggaccctccaccagcaccactcattgatgctgaggagctcacaaagtggtccttttacagggctcttattgctgagttcattgccactttgctcttcctctacattactgtgctcacagttatagggtacaagcaccagacggatcatgctgatgcgtgtggtggggttggcattcttggcattgcatgggcctttggtggcatgatcttcatccttgtctactgcactgctgggatttcaggaggtcacattaacccagcagtgacatttgggctgtttttggctcgcaaggtgtctttgatccgagccatcatgtacatggtggctcagtgcttgggtgctatctgtggagttggtttagttaaggctttccaaaagtcttacttcaacaagtatggtggtggggctaattccctcgctgatgggtacagcacaggtactggattgggtgctgagatcattggcacctttgttttggtgtacactgtcttctctgccactgaccctaagaggaatgctagagattcccatgttccggttttggctccacttcccattggatttgctgtgttcatggttcacttggccaccatcccagtcactggcactggtatcaaccctgctaggagtcttggagctgctgttatctacaaccaagataagccatgggatgaccattggatcttttgggtaggaccatttattggggcagccattgcagccttctaccaccagttcatcttgagagcaggtgcagccaaggcccttggatcattcaggagtaacccccataattagctcgagacccagctttcttgtacaaa

SEQ ID NO: 298 - DNA, 695 bp, Zea mays
aaaaaagcaggctcctgcaggaccatggctccgatgaagctgtacggggcggtgatgtcgtggaacgtgacgaggtgcgcaacggcgctggaggaggctggctccgactacgagatcgtgcccatcaacttcgccaccgccgagcacaagagccccgagcacctcgtccgcaacccgtttggtcaggttccagctctgcaggatggtgacttgtacctcttcgaatcacgagcaatctgcaagtacgctgctcgcaaaaacaagccagagctattgagggaaggaaacctcgaggaggcagcaatggtggatgtttggatcgaggtggaggctaaccagtacaccgctgcactgaatcccatcctcttccaggtcctcatcagtcctatgcttgggggaaccaccgaccagaaagttgtggatgagaaccttgagaagctgaagaaggtgctagaggtgtacgaggcacgcctgaccaagtgcaagtaccttgctggagacttcctcagcctcgccgacctgaaccatgtgtctgtcactctctgcctgttcgctacgccctacgcatctgtgctcgacgcctacccgcatgtgaaggcctggtggtctggtctgatggagaggccgtctgtccagaaggtcgctgccctgatgaagccatctgcttagctcgagacccagctttcttgtacaaa

SEQ ID NO: 299 - DNA, 1115 bp, Zea mays
aaaaaagcaggctcctgcaggaccatgataacttttggaaaggtagtttgcaggaaaaaaaatccaaactgcggagcttgtcctttcagtgcaagttgtaaatattacaatagttcacttgccaaaaagtcgctacctcttccagagaagcatgaacaaggagaacagcaaacaagcatggttgcttatgggagttgcacaccaagttctcaacaaatgtatcggtatcaaattgcaataagcagcactactactgaaacaccacccatccatagctgcgagccaattgttgagatgccaccaagcccagaatatgaatacaatgaaacacctaatgagcaagaagatttctacgaagattatgcatgtgatattgaagattttgcaccaggagtacaatatgattctgaaataaatatttgttcaaacaagcatacgctgaacaataattcttggacaccgaactgtgggaaggacttggctgtgatcaatccaaagtgtagctttggccaaagtaaaaaactaaaaaataccggtcgtcttaggacagaacacaatgcatacgtcctcccagatggtcatgtaatcctagaagagttcgaagacagagttccgggagatagatgtccttacctactagtggttatttcatgtcctgatgactacaaagttaaaggcacggttctgataccgtgtcggacagcaaatagaggaaagtttccactgaatggtacctacttccaggaaaatgaggtttttgcagattactcatctagccgaaacccaataactgtacctagggaatgtattgggatgctggagagaagcattgtatactttggttcatctatacactcgatcacaaaaggtcaaacaaggcaagatatacaggaatgcttgaaggaaggatatatctgtgtacggtcgttccaccggaagaccagaataccactacgcctatgtagcacactacatgctaccaacaccaaacctgctcgtgagaagcctatgaagcggactaggacatcgccggaggggaagaagaacgggacatcgccggaggggaagaagaacgagagcctcttctagctcgagacccagctttcttgtacaaa

SEQ ID NO: 300 - DNA, 1826 bp, Oryza sativa
aaaaaagcaggctcctgcaggaccatggctgcgatgaacgaaaaggtattggataaatgtggaagaaacataagtagcctcaagagaaagcgggacaacccagctgcacgttgcgctgatgccggcaacacctctaaattgcataagcatcccgccgataactctgttgttaggttttatgttgatgaaggtcacaaggcaaagatcaagtgccatttcaaaatgcagattatacagagttatcagaatttcatgactagtgctttacctaagcgaattctgcttcgtcaaggtggtgaatggaaagactttccaaagcaaattgtcaagcttgcccacagtgattttaggactaagaagacaatcacagaaggtgaacaccagacccatctttttttgctggattttgtgcacatgacattcatagactcaaagacaggccttcagaggccaatagcttggattgatgagaatgggaagcagtacttcccagaattttttattgaagataagacactgtataggaaaaaggaattgggaaatggtaataatgtatacataattgtcgagcccaatgggacacaagaaatgaacgaccactttggaacatcagaaagttcagcagaaagctcgaattttgaatctagcactgatgatgtttccagccctaagagagccaaggctgagaggagtgtcgcaggaaacaaaactggtggtgtcaaagaaactattggagagaatgagccacacgccttgctgcctattccctgcagatctctaccacaagataagctgggtgaccattcacgtgttcaactagctatttctgctgttcagaaattgttgctgcagggtctgggcactgttcttggttccaaggacatcgttgggatctacagaacaccagcagtagataaccataaagaatttcgttataatcttttcaaaaagcaggcagagcatactaaatgtaagcgtggcaatgcaaatgtccgctatgcctggcttgcttgctcaaaagatgctgtggatgaaatgatgttgaatggtgtcatgcactttgagaagactgttaagtgcccagactacggaattggcacaatccttgctccagcaaattgctccaatacctgtgtgaattactctgatgttgatgaaaatggcattgtccatatgatgttgtgccgtgttgtaatggggaacgtagaaatagttcaccatggatctaagcagcatcggcctagtaacgagtatttcgatagtggtgtagatgacattaaaaaccctcaacattacattgtgtgggatatgaatgtgaatagtcacatctattctgaatttgtagtcaccatcaaattgccttctagagtcaaagattctcctgccaccgaagaagattgtcacaatttatcagaggtttcatcactgatcttgagctctggttcgcctgatagtgtatcacaggacatgaaccttcaggcttctccagcattgggaggtcattatgaagcccccatgttaggagataaagtggaaagggctccaagcacgccttggatgcctttctccatgttatttgcagcgatttcaaccaaagtttctgctgagaatatggacatggtcaacagttgttacgaagaattcaagagcaagaaaataagccgagtcgacctagtgaagaagttaaggcatatagttggtgacagaatgcttatatcaacaataatgcgactccaagataagttgccccctatgtcgaggcatgaagcacccaaacacgtgggccaagatgatggctagctcgagacccagctttcttgtacaaa

SEQ ID NO: 301 - DNA, 959 bp, Zea mays
aaaaaagcaggctcctgcaggaccatgcactcgctggagaggtccgccgtctcggacgccttcttcgaggaccccaactcattcaagaaggtgccctgcccgtcggttttggatcctcctgagaaatatatttcgttgatagttcctgcctacaatgaggagtatcgactccccgaggctcttacagaaacactcaactacttgaagcggcgatcaactgctgacaagtccttttcatatgaggtattgattgtcgatgatggtagcactgatgggacctctaaagtcgctttcagttttgtaaagcaacataagattgataatgttagagttcttctacttggaagaaatcatgggaaaggtgaagcagtccgaaaaggaatgcttcattcacgtggtgaactattactcatgcttgatgctgatggtgcaactaaagtgaccgatttggaaaagcttgaagctcagattcatgcattggctaagaaagctaagtctagcccagggacatctactagttcatctcagaatctatctgatgttgaagttgctgtttttggttcccgggctcatctagagaagcaggctcttgcaacaaggaaatggtatagaaactttcttatgaaaggtttccatttggtagttttgttgactgccggtcctgggatcaaagatacacagtgtgggtttaagatgttcacacgagcagctgcaaggaagcttttcacaaatatcagattgaagaggtggtgtttcgatgttgaacttgtatacctgtgcaagcgcctcaggatcccaatggtagaagtatccgttaattggaccgagatacctggatccaaagtgcgcatgacgagcatcatgcacatggtattcgagctcctgctgatcaaagtaggttatggactggggatatggaaaatcggctcgtagctcgagacccagctttcttgtacaaa

SEQ ID NO: 302 - DNA, 1538 bp, Zea mays
aaaaaagcaggctcctgcaggaccatggcgaggaagatgctcatcgacggggaggtggcggccgtcgcggatggtgggcactatgactacgatctcttcgtcatcggggcgggcagcggcggcgttcgcggctctcgcaccgccgcctccttcggagctaaggttgcgatttgtgagctcccattccaccccatcagctcagagtggctaggaggacatggtgggacttgcgtgatacgtggttgcgtacctaaaaagatactcgtgtatggtgcatcattccgtggagaatttgaggattcgaagaattttgggtgggagattaacggagatattaacttcaattggaaaacgctattggaaaataagactaaagaaattgttagattaaatggtgtgtatcagaggatccttaccagtgccggtgtgacaatgattgaaggggcaggcagtctagttgatgctcatactgttgaagttagccagcctgatggttcaaagcaaaggtatacagcgaagcacattttgatcgcgactggtagccgtgctcaacgtgtcaacatacctggaaaggatctggctattacttctgatgaggccttgagcttggaggagcttccaaagcgcgctgtaatcctgggtggcggatatattgctgttgaatttgcttctatctggagggggatgggtgctgaagtagatttgttttatcgaagagatcttcctctaagaggttttgatgatgagatgagagctattgttgcaagcaaccttgagggaaggggaatcaagttgcatccagggacaaatctctctgagttgagtaaaacggctgacggaataaaagttgtaactgataaaggagaagagctcattgcagatgttgtcctatttgcgacagggcgcacaccaaactcccagagactgaacttgcaagctgcaggcgttgagattgaccgggttggagccatcaaggttgacgaatattctcgtacttctgctcctagtgtatgggctgtgggtgatgtaacaaaccggattaatttaacacctgttgcattgatggaggcaacttgctttgctaaaactgtgtttggtggccagcaagttaagcctgatcacagagatgttccttgtgctgttttctccattccaccactatctgtagtgggcctcagcgaagaacaggccttggaggaagctaatggtgatattcttgttttcatctcatcattcaacccaatgaagaacagcatatccaagcgccaggagaagactatcatgaaactggtagttgatgctgaaactgacaaagtacttggtgcatccatgtgtggaccagacgcacctgaaattatccagggcatcgctattgcggttaaatgtggagccaccaaagcagacttcgacagcactgtcggaatccacccttccgctgctgaagagttcgtgaccatgcgcaccgtgacgaggcgcttgagcccgacatccaagccaaagacgaacttgtagctcgagacccagctttcttgtacaaa

SEQ ID NO: 303 - DNA, 1553 bp, Glycine max
aaaaaagcaggctcctgcaggaccatggcgatggcaaacttggctcgacggaagggttacgccgtcgttttgtcgtcgaggtcgtcgctttgtctgacaaggtggagggggttcgcgtccggatctgacgaaaacgacgtcgtggtcatcggcggcggtcccggcggctacgtggcggccattaaagcggcgcagctgggtctgaaaaccacttgcatcgaaaaacgtggcactctcggcggtacctgcctcaacgtcggatgcatcccttccaaggcacttttgcattcttcccacatgtatcatgaggctaaacatgcatttgccaaccatggggtcaagttttcatctgtcgaggttgatttgccagccatgatggcccaaaaagataaagcagtttctaatcttaccaagggtattgaaggtctattcaagaaaaacaaggtaaactatgtcaaaggttatggcaaattagtttcaccatctgaggtctctgtggacaccactgaaggtggaaatactgttgtgaaaggcaagcatattataattgccactggctcggatgtgaaatctctgcctgggatcactattgatgaaaagaaagttgtttcatcaacgggagctcttgctttgactgaaatccccaagagactcatagtcattggggcaggctacattgggctggaaatgggctcagtatggggccgacttggctccgagataacagttgttgagtttgcatcggagattgttccaaccatggatgcggaggtccggaagcagtttcagcgttctcttgagaagcaaggcatgaaattcaagctgaagactaaggtggttggagttgatacttctggggatggtgtgaagctaactcttgaaccagcagctggtggtgatcagactacacttgaagcagatgttgtcctggtatctgctggtaggaccccattcactgccgaacttgggttggacaagataggagttgaaactgacaagattggacggattttggtaaatgaaagatttgccacaaatgtctctggtgtttatgcaattggagatgtaattccaggcccaatgttggcacacaaggcggaagaagatggtgttgcttgtgttgagtacatagctggtaaggttggtcatgtggattatgacaaagtccctggcgttgtctatacaatgcccgaggttgcatctgttgggaagacagaggagcaggtgaaggaacttggagttgaataccgtgttggcaagttcccattcctggctaatagcagagctaaggcaattgacaatgctgaaggactggtgaagatattggctgaaaaggagacagacaagatattgggagtgcacattatggcgcccaatgcaggagagcttattcatgaagctgcaatagcactacagtatgatgcatcaagtgaggacattgcacgtgtgtgccatgcacatccaacaatgagcgaggctgtgaaagaagccgcaatggccacttatgacaagcccattcacatctagctcgagacccagctttcttgtacaaa

SEQ ID NO: 304 - DNA, 1540 bp, Oryza sativa
aaaaaagcaggctctgcaggaccatggctaggaagatgctcaaggacgaggaggtggaggtggccgtcaccgacggcgggagctacgactacgacctgttcgtgatcggcgccgggagcggcggcgtccggggctctcgcacctccgcgtccttcggggctaaggttgcgatttgcgagctcccgttccatcccatcagctcggattggcaaggagggcatggtgggacgtgtgtgatacgtggttgtgtgcctaaaaagatactggtgtatggttcatctttccgcggagaatttgaggatgcaaagaattttgggtgggaaatcaatggggacattaacttcaactggaaaaggctgctggaaaataagactcaagaaattgttagactaaatggagtataccagaggattcttggcaattctggtgtgacaatgattgaaggggcaggcagtttggttgatgctcatacagttgaagtcacaaagccagatggttcaaagcaaagatatacagcaaagcacatattgatagcaactggtagccgagctcaacgtgtcaacattcctgggaaggagttagctattacttcagatgaggccttaagtttggaggagctaccaaaacgtgctgtaatccttggtggcggatatattgctgttgaatttgcttctatatggaaagggatgggtgcgcacgtagacttgttttatcgaaaagagcttcctctaagaggtttcgatgatgagatgaggacggttgttgcaagtaaccttgagggaaggggaatcagattacatccagggacaaatctatctgagttgagtaaaacagccgatggcataaaagttgtcactgacaaaggagaggagatcattgcagatgttgttctgtttgctacaggtcgcacaccaaactcccagaggttgaacttggaagctgctggtgttgaagttgataatattggagctataaaggttgatgattattctcgtacatcagtcccaaatatatgggctgtgggtgatgtaacgaaccggataaatttaacacctgttgcactgatggaggctacctgcttttctaaaactgtgtttggtggccagccaactaaacctgattacagagatgtaccttgtgctgttttctccatcccaccactatcagtagtgggcttgagtgaacagcaggctttggaggaagccaagagcgatgttcttgtttacacttccagcttcaacccaatgaagaacagcatatccaaacggcaggagaagaccgtcatgaaactggtggttgattcagagactgataaagtacttggtgcatcaatgtgtggaccagatgcaccagagattatccagggtatggctgtagcgctgaagtgtggagccaccaaggcgacctttgacagcactgttggtattcacccgtctgctgctgaagagtttgtgacaatgcggaccttgaccaggcgcgtgagcccatcatccaagccaaagacaaacttgtagctcgagacccagctttcttgtacaaa

SEQ ID NO: 305 - DNA, 551 bp, Glycine max
aaaaaagcaggctcctgcaggaccatggccacctcaagcgccaaatcagtccatgatttcaccgttaaagatgccaagggaaatgatattaatcttggtgactacaaaggaaaggtccttatcattgtcaatgttgcctcacaatgtggcttgactaattcaaattacactgagctcagtcagttgtatgagaaatacaaacagaaaggtctggaaattctggcatttccatgcaatcagtttggggcacaggagcctggatctaatgaacagatacaagagtttgtttgtactcgcttcaaggctgagtttcccgtttttgacaaggttgatgtgaatggtgacaaagctgctccactgtacaagtatctaaaatcaagcaaaggtggactctttggggatggtatcaaatggaacttctccaagttccttgttgataaagagggaaatgtggttgatcgctatgcacccacaacttctcctctgagcattgagaaggacttgctgaagttgttggatgcatagctcgagacccagctttcttgtacaaa

SEQ ID NO: 306 - DNA, 557 bp, Zea mays
aaaaaagcaggctcctgcaggaccatggccgcctcgtcgaccgccacctccgtccacgacttcatcgtcaaggatgcgagcggcaaagacgttgacctcagcacctacaaggggaaggttcttctcattgttaacgtcgcatcccagtgtggcttaactaactccaactacactgagctggcccagctctacgagaagtacaaggaccaaggctttgaaatcctggctttcccatgcaaccagtttggtgggcaggagcctggtaccaatgaggagattgtccagtttgcctgcacacgcttcaaggctgagtaccccatcttcgacaaggttgacgtcaacggtaacaatgctgcgcccatctacaagttcctgaaatctagcaaaggtggccttttcggcgacagcatcaagtggaacttttccaaattcttggttgacaaggagggacgtgttgtggatcgctatgctccaaccacttcacctctgagcattgagaaggatatcaagaagctgcttgggagctcttagctcgagacccagctttcttgtacaaa

SEQ ID NO: 307 - DNA, 563 bp, Zea mays
aaaaaagcaggctcctgcaggaccatgggggcggccgaatccgtgccggagacctccatacacgaattcaccgtcaaggattgcaacggcaaggaagtgagcctggaaacctacaaggggaaggtcctccttgttgttaacgtcgcctccaaatgtgggttcacggagaccaattacacgcagctgacggagctttatcagaagtacagggacaaagacttcgagatattggcattcccttgcaatcagttcttgcgacaggagccaggtactgatcagcagatacaagactttgcttgcaccagatttaaagctgaatacccagtttttcagaaggtgcgcgtaaacgggccagatgcggcgccggtttacaagtttctgaaagctagcaagcctggtttgtttgggtcatcaaggatcaaatggaactttaccaagtttctggtggacaaagatgggaaggtcatcgagagatacggaacctcgacagctccaatggcaattgagaaggacatccagaaggcccttgaggaatagctcgagacccagctttcttgtacaaa

SEQ ID NO: 308 - DNA, 3310 bp, Zea mays
aaaaaagcaggcctcaggaccatggcgctcgccttcgacgagttcgggcgccccttcatcatcctgcgggagcaggagaagaagacgcgccttagggggctcgacgcgcagaaggccaacatcgcctcggccaaggccgtcgcgcggatcctccgcacgtcgcttggacccaagggcatggacaagatgctccagtcccccgacggcgacgtcatcatcacaaatgatggagcgaccatcctggagcagatggatgttgacaaccagatagcaaagctgatggtggagctgtcccgtagtcaagactatgaaatcggggatggtaccaccggggtggtagtcatggcaggggctcttctcgagcaggccgagaagcttctggagcgtggtattcaccccattagggtggctgaaggctatgagatggcgtcaaaggtagcttttgaccacctagaacatatctctgaaaagtttgagttcagtgcagacaacattgaacccctggtccagacctgcatgacaactctatcctcaaagattgttaaccgttgcaagcgggcgttggcagagattgctgtcaaagcagtacttgcggttgcagatttggagaggaaggatgttaacttggatctaattaaagtagaaggcaaggttggtgggaagctggaggacactgaacttgtatatggaattattgttgacaaagatatgagccatccacaaatgccaaagagaattgaggatgctaagattgccatcttgacatgcccatttgagcctccgaagccaaagacaaagcataaggttgacattgacactgttgagaaattccagacactgcgtgagcaagagcagaaatactttgatgaaatggttcagaagtgcaaggatgctggtgcaaccctggttatttgccagtggggttttgatgatgaagccaatcatttattgatgcacagaaatctgccagcagttagatgggttggtggtgttgaattggaattgattgccattgctacaggagggcggattgttccgagattccaagagttgagtcctgaaaagcttggaaaggctggattagtcagagagaaatcattcggaacaacaaaggaccggatgctttacattgagaagtgtgccaattctagagctgtaaccattttcatccgtggtggaaacaaaatgatgattgaggagaccaagcgcagtcttcatgatgctctttgcgtggcaaggaatctgatccggaataactcaattgtgtacggtggcggctcagccgagatatcttgctcaattgctgttgaaactgctgcagataggcacccgggagttgagcagtatgctatcaggtcattcgctgatgcattagatgctgttccactagcgttggccgaaaacagtggtttgtcaccaattgataccttaactgcggtaaaagctcaacaagtcaaggagagcaacccccactgcggcatagactgcaacgacgttggcaccaccgacatgaaagaacagaacgtcttcgagaccctgattggcaagcagcaacagatcttgcttgccacccaggtggtgaagatgatcctgaagatcgacgacgtcatctcaccgtccgagtactagctcgagacccagctttcttgtacaaaaaaaaagcaggcctcaggaccatggcgctcgccttcgacgagttcgggcgccccttcatcatcctgcgggagcaggagaagaagacgcgccttagggggctcgacgcgcagaaggccaacatcgcctcggccaaggccgtcgcgcggatcctccgcacgtcgcttggacccaagggcatggacaagatgctccagtcccccgacggcgacgtcatcatcacaaatgatggagcgaccatcctggagcagatggatgttgacaaccagatagcaaagctgatggtggagctgtcccgtagtcaagactatgaaatcggggatggtaccaccggggtggtagtcatggcaggggctcttctcgagcaggccgagaagcttctggagcgtggtattcaccccattagggtggctgaaggctatgagatggcgtcaaaggtagcttttgaccacctagaacatatctctgaaaagtttgagttcagtgcagacaacattgaacccctggtccagacctgcatgacaactctatcctcaaagattgttaaccgttgcaagcgggcgttggcagagattgctgtcaaagcagtacttgcggttgcagatttggagaggaaggatgttaacttggatctaattaaagtagaaggcaaggttggtgggaagctggaggacactgaacttgtatatggaattattgttgacaaagatatgagccatccacaaatgccaaagagaattgaggatgctaagattgccatcttgacatgcccatttgagcctccgaagccaaagacaaagcataaggttgacattgacactgttgagaaattccagacactgcgtgagcaagagcagaaatactttgatgaaatggttcagaagtgcaaggatgctggtgcaaccctggttatttgccagtggggttttgatgatgaagccaatcatttattgatgcacagaaatctgccagcagttagatgggttggtggtgttgaattggaattgattgccattgctacaggagggcggattgttccgagattccaagagttgagtcctgaaaagcttggaaaggctggattagtcagagagaaatcattcggaacaacaaaggaccggatgctttacattgagaagtgtgccaattctagagctgtaaccattttcatccgtggtggaaacaaaatgatgattgaggagaccaagcgcagtcttcatgatgctctttgcgtggcaaggaatctgatccggaataactcaattgtgtacggtggcggctcagccgagatatcttgctcaattgctgttgaaactgctgcagataggcacccgggagttgagcagtatgctatcaggtcattcgctgatgcattagatgctgttccactagcgttggccgaaaacagtggtttgtcaccaattgataccttaactgcggtaaaagctcaacaagtcaaggagagcaacccccactgcggcatagactgcaacgacgttggcaccaccgacatgaaagaacagaacgtcttcgagaccctgattggcaagcagcaacagatcttgcttgccacccaggtggtgaagatgatcctgaagatcgacgacgtcatctcaccgtccgagtactagctcgagacccagctttcttgtacaaa

SEQ ID NO: 309 - DNA, 635 bp, Glycine max
aaaaaagcaggctcctgcaggaccatggccaccagtggaggcgatgaggggcagaacaaccctgccctcgacccggatttggatgctccggatgacccggatcacgagttcgctgagttcgggtcgggttgcttctggggtgctgagttggcctttcagcgagttgtgggtgtggtgaagactgaggttggttacactcagggtcacactccggatccgaattacaaactggtttgcaccggaaccactaaccacgttgaagtggttcgggtccagttcgacccgaaggtttgcccctacaatgatctactcgctctcttttggtctcggcatgaccccacttccatcaaccgtcagggcaatgatgtgggtgcacagtatagatcaggaatatactactacaacgatacccaagctcgtttaggccaggaatcaaaagatgcaaaacaattggaactgaaggagaagattgtgacagaaatacttccagcaaagaggttttacaaagcagaggaataccatcaacaatatctggagaagggtggaggtcaaggcaacaaacaatccgcagaaaaaggctgcactgatcccatcaggtgctatggctagctcgagacccagctttcttgtacaaa

SEQ ID NO: 310 - DNA, 1535 bp, Arabidopsis thaliana
aaaaaagcaggctcctgcaggaccatggttttgacaaaaaccgcaacgaatgatgaatctgtctgcaccatgttcggatctcgctatgttcgcactacacttcccaagtatgagattggtgagaattcgataccgaaagacgctgcatatcagatcataaaagatgagctgatgcttgatggtaacccgaggcttaacctagcttcgtttgtgactacatggatggaaccagagtgtgacaaactcatcatggactctatcaacaagaactacgttgatatggatgagtaccctgtcacaactgagctccagaaccgatgtgtaaacattatagctcgactgttcaatgcgccactcgaggaatctgagacggcggtgggagtagggacagttggttcttcagaagccatcatgttagccggattggccttcaaaagaaaatggcagaacaaacgcaaggctgagggtaaaccctatgacaaacccaacattgtcactggagccaatgttcaagtttgctgggagaaattcgctcggtacttcgaggtggagctaaaggaagtaaacctaagtgaaggttactacgtgatggatccagacaaagcagcagaaatggtagacgagaacacaatctgtgtcgcagccatattgggatccacactcaacggtgagttcgaagacgtgaaacgtctcaatgacttgctagtcaagaaaaacgaggagactggttggaacacaccgatccacgtggatgcagcaagtggagggttcatagctccgtttatctatcctgaattagaatgggactttagacttcctttggttaagagtatcaacgtgagtggtcacaagtatggactggtctatgctggtattggttgggtcgtgtggagggcagcagaggatttgcctgaagagcttatctttcatattaattatcttggtgctgatcaacccactttcactctcaatttctccaagggatcgagccaaattattgctcaatactaccagctcattcgtcttggattcgaggggtacaaaaatgtgatggagaattgcatagagaacatggtggttctcaaagaagggatagagaaaacagagcgtttcaacatagtctcaaaggaccaaggagtgccagtcgtagccttctctctcaaggaccatagtttccacaacgagttcgagatctctgagatgctacgtcgttttggctggatcgtcccagcttacactatgcctgccgatgcacagcacatcacggttctgcgtgttgtcatcagggaagatttctcaagaacactcgcggagagacttgttgctgatatttcgaaggtgcttcatgagctagataccttgccttccaagatatctaagaagatgggaatagaagggatcgcggaaaatgtaaaggagaagaagatggagaaggagattctgatggaagttattgttggatggaggaagtttgtgaaggagaggaagaagatgaatggtgtgtgctagctcgagacccagctttcttgtacaaa

SEQ ID NO: 311 - DNA, 1310 bp, Oryza sativa
acaagtttgtacaaaaaagcaggctcctgcaggaccttgacgaaatggcctcctccgccatggagctctccctcctcaacccggcggcaatgcgcggcctctccgccgccaagccccgcgtcgtgtcttccaggcgcatcgtgcggttccgcgtggcgtcgtcagccgcggcgccgcccgcggcgaagcccgggacgcccaagaagcgcgggaagacggagatccaggagacgctgctgacgccgcggttctacaccacggacttcgacgagatggagcggctgttcaacgccgagatcaacaagcagctcaaccaggaggagttcgacgcgctgctgcaggagttcaagacggactataaccagacccacttcgtccgcaacccggagttcaaggccgccgccgacaagatggaggggcctctcaggcagatcttcgtcgagttcctcgagcgctcctgcaccgcggagttctccgggttcctcctctacaaggagctcggccgcaggctcaagaaaacaaacccagtggtggctgagatcttctcgctcatgtccagggatgaggcccggcacgctgggttcttgaacaaggggctgtctgatttcaacttggcactggacctcgggttcttgaccaaggctaggaagtacaccttcttcaagcccaagttcatcttctacgcgacctacctgtcggagaagattgggtactggaggtacatcaccatcttcaggcacctcaaggcgaacccggagtaccaggtgtaccccatcttcaagtactttgagaactggtgccaggatgagaaccgtcacggtgatttcttctccgcgctgctcaaggcgcagccgcagttcctcaacgactggaaggccaagctctggtcacggttcttctgcctctcggtgtatgtgaccatgtacctaaatgattgccaacgtactacattctatgaagggattggtctggacaccaaagaattcgacatgcatgtgataattgagaccaaccgcacaacagcaaggattttccccgctgttcttgacgtcgagaaccctgaattcaagaggaagttagacaggatggtggagatcaacaaaaagatcattgccataggcgagtctgacgatatccccctggtgaagaacctgaagaggattcctcacgttgccgctctggtgtctgagatcattgctgcgtacctcatgcccccaatcgagtctggctctgttgatttcgctgaattcgagccccagcttgtctactgattctgtagctcgagacccagctttcttgtacaaagtggt

SEQ ID NO: 312 - DNA, 1282 bp, Glycine max
acaagtttgtacaaaaaagcaggctcctgcaggaccatggggggagaagaagtagcaagagtcaaagcagagttgttcgacgacaacgaaagcgatcgcaacgacgacgacgttttgagcgagagcaaggactcgggagtgacgacggctcacgcagtgaaagaagagatggatgacggcgccgctaactggtcttcgtcgtcgtcgacttcgcccaaaccgatggaagggttgcacgaggtgggcccccctccgttcctgaagaagacgtttgaaatggtggaggaccctcacaccaaccccattgtgtcgtggagccaaactcgccatagtttcgtcgtttgggactcgcacgagttctccaaaacccttctcccaaagtacttcaagcacagtaatttctcaagcttcgttcgccagctcaacacctatggctttaggaaggttgattcggaccgttgggagtttgcgaatgaaggattccaaggagggaagaagcatttgctgaagaacataaggaggaggagtaagtgcaacaaactgcatcagggagcattcaatatgatgaagccagacgtggattctgaagtggagaagctgaagaaagaccagaacattttgaaggtggagattctgaagctgaggcagcagcaggaaaattctcatgttcagctcacaaatgttcaggagagaattcggtgtgcagagatgaagcagtttcagatgatgtatttcctcaccagaatggctagaaggcctgcgtttgttgagcagttagtccataagattaggcgaaaaagagagattgatggtaatgacatggttaagaggcctagattgatgggaaatccgtgccatgtacccttccctaagacaatggaaacaacacctaattttgattatagacaccaacaaggtcataaacaatttgcaacattgcaatctgagctcaatgtgacagaagtgaactccagtaggatggagcacccaactccctctcctttagaagatgaattaggcaactctttgcaagggttaagggctcatggttgttctagagcaagggcacaagatgcatcttcttctgcctatcatgttatgtcagaaaaactaatgagagaaaattctatagttgatgaagaactagatgtgaatgactccaatatctatcttgaattagaggatttgattactaagcctacagattggtctgttggatctgcaagtggattggtggaacaaactagttagctcgagacccagctttcttgtacaaagtggt

SEQ ID NO: 313 - DNA, 937 bp, Glycine max
acaagtttgtacaaaaaagcaggctcctgcaggaccatggctccgccgctcgaacacaacggcgtttccaccagcggtgactctctgagatctattccgacgccgtttctcaccaaaaccttccaactcgtcgacgatcacaccatcgaccatgtgatttcgtggaacgattctggatcgtccttcatcgtctggaacaccaccgctttcgccaaggatttgcttcctaaatatttcaagcacaacaacttctccagcttcgttcgccaactcaacacttatggattcagaaaagttgtacctgaccgctgggagttctcgaacgagtatttccgaagagacgagaagcggctcctctgcgaaatacagcgacggaagatcctcccggcaacgccgccgacccgagcgactgcgaccgcggcggttctatctccgctgccgctatctacgattccgccggcgaagctgatcgtgtcgccgtcgaactcagcggaggagcaggtgatttcgtctaactcgtcgccggcggagctgttggatgagaacgaccggctgaggaaggagaacattctgttaacgaaggaattggaggagatgagatcgctctgcaacaatatattcaatctcatgtcgaattacgctaacgttcaagcggacggtggttccgcgggggtggcggcgcggtgcttcggcgaggatgcggtggaggagatgaatccgaagctgtttggggtggtgattggtacgaagcgagcgagagaagagaatgatacggttttgagtctgcatcagccgttccatgcggacgtgaaatccgaagcgttggatttcgcaagacgtggcgaaaataaaaaaacgccgtggctaaatcaatgtcatagagcaaatcagagagtgtgtaattagctcgagacccagctttcttgtacaaagtggt

SEQ ID NO: 314 - DNA, 1243 bp, Oryza sativa
acaagtttgtacaaaaaagcaggctcctgcaggaccatggagccggctcatgcccccggcagagacaggctcagcgccctcccggacaacgtcctccgccgcatcatgtccttcctcaacgcgcgccagtccgtgcagacgtgcgtgctgtcgcggcggtggcgccacctctggcgctccctgccacgcatcaacgccgactacaccgagttctgcttcgcctgcttggatgagaagaaagagaaggtgcaggaggcgcggttcaagaagttcgtgagcacgctgctgctacgccgtgaccccgtccccttgctggacaagttctggctcaggtaccaggtgtctgacggcaacaacaacgagaaagcttcagcagaagctggtctgtggatcagccatgcgttgcagttgcagaccccggtcgtggaggttctcacatttcaatttccattgatgctagaccatgctgtatttacctcagactacttgagaaaattgggcctctccaatgcttatctccgcatgggtttcttcgagcaactcagcagaggctgcccacagttggaagatgtgttcttgaatgattgcatcattctggatgatgagatttcctcaaccactctcaagactttgaacatctatgcttctcggttttcggaggactaccgtgcttctatttctactccgagcctcacttctctgacattgtataaacctgatgccagtgtaccttcactaaaggacatgaaatcactagtgtctgcttccattattctcgacgataatactgatatccatgagttgctcatgagcctttctggtgtcagaaatttggacttggagtgcccgcagaaaatggtcacaatcgcaaaaaatacgcaatggtgtccagaattcaaagatcttgtaaacctgagtctgggtcagttttgtctgggctcaaagttatatgcattaactgtcttccttaagaactcaccgaaactagagaagctgactctggacccccctgaggtaatcattgataagcttgaagaaagatcatttgaatgtgagcaccttaagattgttgaagtcatatgctcggaggatgatagtactttgctcaagctcgtggaggacatctttgttactagtggcatgaactctcttcagattaatcgcaaaagcagttacaagcagtactattcagatgatttttttcagatttagctcgagacccagctttcttgtacaaagtggt

SEQ ID NO: 315 - DNA, 1540 bp, Glycine max
acaagtttgtacaaaaaagcaggctcctgcaggaccatggacggcggcgggtccactccggcggcgccgattccgaacgcgaacgcgccgccgccttttctgagcaagacctacgacatggtggaggacccttccaccgacgcgatcgtgtcgtggagcgcaacgaacaacagcttcatcgtgtgggaccctccgcagtttgccagagaccttttgcccaaatacttcaaacacaacaacttctccagcttcgttagacagttaaacacttacggtttcaggaaggttgatccagatcgctgggaatttgcaaatgagggttttttgaagggtcaaaagcacttgcttaggagtattacacgacgaaaacctgcccatggtcaaaatcatcaacagcctcagcaaccgcatggacagagttcatcggtaggggcatgtgtagaagttgggaagtttgggcttgaggaagaggttgagaggcttaaaagagataagaatgtgctcatgcaagagcttgtgaggttgaggcagcagcaacagaccactgataaccagctgcaaacaatggttcagcgccttcagggaatggagcaacgacagcagcaaatgatgtcattccttgccaaagctgtccagagccctggcttctttgctcagtttgtacaacagcaaaatgacagcaataggcgcataactgaagtcaacaaaaagcgtcggcttaaacaggaaggtatggctgaaacagagcatgctgctactccagatggacaaattattaaatatcaacctatggtgaatgaagcagcaaaagcaatgcttaggcagatcatgaaatgggatacttcttgtgtagaatctttgaataaaaattctgataactacgtgattggtgatgcttcatcatcttccagtggaatggacagtagcagctcttcaggctggacttctggagtaactcttaaagaggtctctccagcttcggtgcagtcttcacatgttccagctgcaactgggactcaagggcatgtcccctcaaccgttaaacctgaaattttatctgtaccacaagcagtagcttctgaaaaagttatgaaagatggagcacatgatccaccttctatccctgtgtctcaagcagatgtaatgatccctgatcttcctccaataacagagatggtgacaggaaatattcttgatattcctgaagaaaattatatggcaactgagacagatgagggatacatggattcttcattgggggctggtgggtcatttcccattgatttcgaaggtatttcacctgatgcagacattgatgatttgttagccaatcctatttgggatgaaattttgcaaacttcagttccagaggatatcgataccaatgtggctgaagcatccaaagggaatgaggtccaaccaatggaaaatggatggggcaaaactcaacatatggatcaccttacagagcagatgggtcttctttcttccgatgcaaaaagagtttagctcgagacccagctttcttgtacaaagtggt

SEQ ID NO: 316 - DNA, 944 bp, Glycine max
acaagtttgtacaaaaaagcaggctcctgcaggaccagtgaggttgaaatgttgcaacaacgatcggtgccggcaccgttcttgacgaagacgtatcagttggtggaggatccggggacggacgaggtaatatcgtggggtgaaagtgggaacacttttgtggtgtggaagcatgcggattttgcaaaggatttgcttccaaaatatttcaagcacaacaacttctccagctttgttcgacagctcaacacctatggatttcgaaaaattgtgccagacaaatgggaattcgcgaacgaacacttcaagcgagggcagaaggagcttctctcggagatcaaacgccgcaagaccgtgcctcagtcgtcgacacattccccggatgccggaaaacccggcgccgaaggcaactctccgtcgaaccccggcggctgcgacgacgcgggctccacctcaacctcgtcctcgtcctccggttccaagaaccagggatcggtggaaacaaacacaacgccttctcaccagttatcgagcgagaacgagaaactgaagaaggataacgaaacgctgagttgcgagctggcacgtgcgaggaagcagtgcgatgagctcgtggcttttctcagggaccgtctgatggtgggtcccgatcagatcgatcgcatcatgcggcaaggaagttgcggatctgaaaacgcggtaggtgaaggcggtggtggaggacactgtttgaaactgtttggtgtttggttaaaaggggatacactaacagacaaaagaaacaaccacaagagaggccgcgaagaccaaatgggcttcggtgggcctcgcctcaaggagtcaaagcccgttgttgactttagtaggaataggatgatgatgattaatgaaaaaggaaaaggctaagcggtagctcgagacccagctttcttgtacaaagtggt

SEQ ID NO: 317 - DNA, 916 bp, Glycine max
acaagtttgtacaaaaaagcaggctcctgcaggaccatgtcacagcagcagcgttcgacgccggcgccgttcttgacgaagacgtatctgctggtggatgaccccgccaccgacgacgtcgtttcgtggagcgaaggtggcaataccttcgtcgtttggaaacacgccgatttcgctaaggacttgcttccgaagtacttcaagcataataatttctccagcttcgttcgccaactcaacacctatggattccgaaaaactgttcccgacaaatgggaatttgccaatgagtatttcaagcgaggacagacggatcttctcgccgagatcaggcggcggaaggtggtgtctccggtgaccggaaaatctaccggcggtggcgttaacatctcggcgtcccactccggcggcgacgacatggggtcgacatcgacgggatcgatggaggcggcaacggcggcgggcgctgatatatcgggcgagaacgagaaattgaagaaggacaacgagaaattgagcggcgagttagcgctggcgaagaaacaatgcgaggagttggtggcgtttcttagagactcgctgaacgtgagccccgatgtgatagagcgcatcattcggcaaggaacgtgtgtgtccagcaacaatgatgcggtgcgttttgatgctattattaataatgatcttgatgacgacgaaaatgcggtaggtgagtgtgaaccacaacaaccaccacccaaaggtgacaatggagaaagtttgaaactatttggggtttggttgaagggtcaaaatgggaaagagaattcaattggtaaatgccgcaagagagggcgccaagactaccctattgctgccactgccaaggaattgaagaccctagtctagctcgagacccagctttcttgtacaaagtggt

SEQ ID NO: 318 - DNA, 532 bp, Glycine max
acaagtttgtacaaaaaagcaggctcctgcaggaccatgtcattgattccaagtattttcggtggcccaaggagcaacgtgttcgatccattctcactcgatatgtgggatcccttcaaggattttcatgttcccacttcttctgtttctgctgaaaattctgcatttgtgaacacacgtgtggattggaaggagacccaagaggcacacgtgctcaaggctgatattccagggctgaagaaagaggaagtgaaggttcagattgaagatgatagggttcttcagattagcggagagaggaacgttgagaaggaagacaagaacgacacgtggcatcgcgtggagcgtagcagtggaaagttcatgagaaggttcagattgccagagaatgcaaaagtggagcaagtaaaggcttgtatggaaaatggggttctcactgttactattccaaaggaagaggttaagaagtctgatgttaagcctatagaaatctctggttagctcgagacccagctttcttgtacaaagtggt

SEQ ID NO: 319 - DNA, 529 bp, Glycine max
acaagtttgtacaaaaaagcaggctcctgcaggaccatgtctctgattccaagtttcttcagtggcccaaggagcaacgtgtttgatcctttctcacttgacgtgtgggatcccttcaaggattttcactttcccacttctgtttctgctgaaaattctgcatttgtgagcactcgggtggattggaaggagaccccagaagcacacgtgctcaaggcagatattccagggctgaagaaagaggaagtgaaggtgcagattgaagatgatagggttcttcagataagcggagagaggaaccttgagaaggaagataagaacgacacgtggcatcgagtggagcgtagcagtggcaagttcatgagaaggttcagattgccggagaatgctaaagtggagcaagtgaaggcttctatggaaaatggggttctcactgttactgttcccaaggaagagattaagaagcctgatgttaaagccatagaaatctctgcttagctcgagacccagctttcttgtacaaagtggt

SEQ ID NO: 320 - DNA, 2476 bp, Zea mays
acaagtttgtacaaaaaagcaggctcctgcaggaccatggctgccaagctgactcgcctccacagtcttcgcgaacgccttggtgccaccttctcctcccatcccaatgaactgatagcactcttttccaggtatgttcaccagggcaagggaatgcttcagcgccatcagctgcttgcggagtttgatgccctgtttgatagtgacaaggagaagtatgcaccctttgaagacattcttcgtgctgctcaggaagcaattgtgctccccccatgggttgcacttgctatcaggccaaggcctggtgtctgggattacattcgggtgaatgtaagtgagctggctgtggaggagctgagtgtttctgagtacttggcattcaaggaacagctggtggatggacaatccaacagcaactttgtgcttgagcttgattttgagcccttcaatgcctcctttcctcgtccttccatgtcgaagtccatcggaaatggagtgcaattccttaaccgacacctgtcgtccaagttgttccaggacaaggagagtttgtaccccttgctgaacttcctcaaggctcataactacaagggcacgacgatgatgttgaatgacagaatccaaagccttcgtggtctccaatcatccctgagaaaggcagaggagtatctactgagtgttcctcaagacactccctactcggagttcaaccataggttccaagagcttggtttggagaagggttggggtgacactgcgaagcgtgtactcgacacactccacttgcttcttgaccttcttgaggcccctgatcctgccaacttggagaagttccttggaactataccaatgatgttcaatgttgttatcctttctcctcatggctacttcgctcagtccaatgtgcttggataccctgacactggcggtcaggttgtgtacattctggatcaagtccgtgctttggagaatgagatgcttctgaggattaagcagcaaggccttgatatcactccgaagatcctcattgttaccaggctgttgcctgatgctgctgggactacgtgcggtcagcggctggagaaggtcattggtactgagcacacagacatcattcgcgttccgttcagaaatgagaatggcatcctccgcaagtggatctctcgttttgatgtctggccatacctggagacatacactgaggatgtttccagtgaaataatgaaagaaatgcaggccaagcctgaccttatcattggcaactacagcgatggcaacctagtcgccactctgctcgcacacaagttgggagtcactcagtgtaccatcgctcatgccttggagaaaaccaaataccccaactcggacatctacttggacaagttcgacagccagtaccacttctcttgccagttcacagctgaccttattgccatgaaccacactgatttcatcatcaccagcacattccaagaaatcgcgggaagcaaggacaccgtggggcagtacgagtcccacatcgcgttcactcttcctgggctctaccgtgtcgtccatggcatcgatgttttcgatcccaagttcaacattgtctcccctggagcagacatgagtgtttactacccgtatacggaaaccgacaagagactcactgccttccatcctgaaatcgaggagctcatcaacagcgacgtcgagaactccgagcacaagttcgtgctgaaggacaagaagaagccgatcatcttctcgatggcgcgtctcgaccgcgtgaagaacatgacaggcctggtggagatgtacggcaagaacgcgcgcctgagggagctggcgaacctcgtgatcgtcgccggtgaccacggcaaggagtccaaggacagggaggagcaggcggagttcaagaagatgtacagcctcatcgacgagtacaagttgaagggccatatccggtggatctcggcgcagatgaaccgcgtccgcaacggggagctgtaccgctacatttgcgataccaagggcgcattcgtgcagcctgcgttctacgaagcgttcggcctgactgtgatcgagtccatgacgtgcggtctgccaacgatcgcgacctgccatggtggccctgctgagatcatcgtggacggggtatctggcctgcacattgacccttaccacagcgacaaggccgcggatatcctggtcaacttctttgacaaatgcaaggcagatccgagctactgggacaagatctcacagggcggcctgcagagaatttatgagaagtacacctggaagctctactccgagaggctgatgaccctgaccggcgtgtacgggttctggaagtacgtgagcaacctggagaggcgcgagacccgccgctacatcgagatgttctacgccctgaagtaccgtagcctggcaagccaggttccgctgtccttcgattagctcgagacccagctttcttgtacaaagtggt

SEQ ID NO: 321 - DNA, 3146 bp, Zea mays
acaagtttgtacaaaaaagcaggctcctgcaggaccatgtggaagcagctcctcagcaagctgccccggaagtcgccggcctgcggggattcgggccagtgcagcaatggcaccggtatacagcgcaccagcagctgcgggagcatcccgcccggccgcccggcctccgccatccggcgcatgtcttccgcggtcttcccctcgagtgtcgtggccggtatcgagccgctggtctcgttcaaggatgtccccaactcggagaagcagaacctgttcgtcagcaagctgagcctgtgctgcgtcgtcttcgatttctcggacccgaacaagagctcagtggagaaggatatcaagaggcaggcattgctggatcttatagagtttgtcgagtcgaccaacgctcgcttctcggaggcagccatcgcggcctgctctaggatgtgtgccatcaacctgttccgggcgttccctccgagttgcagatctggctcatcaggtggtggtgagggcgacgaggaagagccaatgttcgaccccgcgtggtgccacctgcagcttgtttatgagctgctgctgaaatttatcggatcctcgtccttggacgcgaaggtagggaagaagcactttgatcactcattcatcgtgaagctccttaatcttcttgactccgaggatccaagagagagggattgcttgaaaactattctgcacagggtatacgggaagttcatggtacaccgtcctttcatccgcaaagcagtgagcaacatattctaccagtttgtctttgagactgatcggcacaatgggatcgcggagctgctggaggtctttggcagtgtcattagtgggtttgccttgcctctgaaagaagaacacaagatctttctttggagagttctgattcctttacacaaaccaaaatctgttggggtgtatcttcagcagttgacctactgtgtaacacagtttctggaaaaggacccaaagcttgcaagctcagtgatcattggtttgttaagatattggccgataacaaactgtcagaaggaagtgatgtttctcagtgagattgaagagatcttggagtctaccagccaagcagaatttcagaaatgtatggtaccattgtttcggcgaattgctcattgtattaccagttcccacttccaggttgctggaagagcgctcttcgtatggaacaatgatcacattatcagcttgattgcacaaaaccgccaagtgatcatgcctcttgttgttccagcgctagagcagaacattcagaatcactggaaccaggcggtcctgaatctgaccgtgaatgtcaagaaaatgttatctgagatggacgacgatctcttctcgtcatgcctggccaagtacaaggacgaagaagaaaaacgcgcgtcgctagaagcgaagcgtagacttacgtgggagaagctcgagtcagctgcagctttccagccagtgactggccatacagccgtcctagtaggccaccggccgtcagcaaatctgatcgccaccatgatctagctcgagacccagctttcttgtacaaagtggtacaagtttgtacaaaaaagcaggctcctgcaggaccatgtggaagcagctcctcagcaagctgccccggaagtcgccggcctgcggggattcgggccagtgcagcaatggcaccggtatacagcgcaccagcagctgcgggagcatcccgcccggccgcccggcctccgccatccggcgcatgtcttccgcggtcttcccctcgagtgtcgtggccggtatcgagccgctggtctcgttcaaggatgtccccaactcggagaagcagaacctgttcgtcagcaagctgagcctgtgctgcgtcgtcttcgatttctcggacccgaacaagagctcagtggagaaggatatcaagaggcaggcattgctggatcttatagagtttgtcgagtcgaccaacgctcgcttctcggaggcagccatcgcggcctgctctaggatgtgtgccatcaacctgttccgggcgttccctccgagttgcagatctggctcatcaggtggtggtgagggcgacgaggaagagccaatgttcgaccccgcgtggtgccacctgcagcttgtttatgagctgctgctgaaatttatcggatcctcgtccttggacgcgaaggtagggaagaagcactttgatcactcattcatcgtgaagctccttaatcttcttgactccgaggatccaagagagagggattgcttgaaaactattctgcacagggtatacgggaagttcatggtacaccgtcctttcatccgcaaagcagtgagcaacatattctaccagtttgtctttgagactgatcggcacaatgggatcgcggagctgctggaggtctttggcagtgtcattagtgggtttgccttgcctctgaaagaagaacacaagatctttctttggagagttctgattcctttacacaaaccaaaatctgttggggtgtatcttcagcagttgacctactgtgtaacacagtttctggaaaaggacccaaagcttgcaagctcagtgatcattggtttgttaagatattggccgataacaaactgtcagaaggaagtgatgtttctcagtgagattgaagagatcttggagtctaccagccaagcagaatttcagaaatgtatggtaccattgtttcggcgaattgctcattgtattaccagttcccacttccaggttgctggaagagcgctcttcgtatggaacaatgatcacattatcagcttgattgcacaaaaccgccaagtgatcatgcctcttgttgttccagcgctagagcagaacattcagaatcactggaaccaggcggtcctgaatctgaccgtgaatgtcaagaaaatgttatctgagatggacgacgatctcttctcgtcatgcctggccaagtacaaggacgaagaagaaaaacgcgcgtcgctagaagcgaagcgtagacttacgtgggagaagctcgagtcagctgcagctttccagccagtgactggccatacagccgtcctagtaggccaccggccgtcagcaaatctgatcgccaccatgatctagctcgagacccagctttcttgtacaaagtggt

SEQ ID NO: 322 - DNA, 1156 bp, Arabidopsis thaliana
acaagtttgtacaaaaaagcaggctcctgcaggaccatggctgagaatcttgcttgtggtgaaaccagcgagtcatggatcattgacaacgacgatgatgatatcaactatggcggcggatttacgaacgagattgattacaatcaccaactttttgctaaagacgacaactttggcggcaacggatcaattccgatgatgggttcttcttcatcgtccttgagtgaagacagaatcaaagagatgttggtgagagagattgagttttgccctggaactgattatgttaagagattgctttctggtgatttggatttgtctgttcgaaaccaagctcttgattggattctaaaggtttgtgctcattaccattttggacatctgtgcatatgcctatccatgaactacttggatcggttcttaacatcctatgaattgccgaaagacaaggattgggctgctcagttactagctgtgtcttgcttatcattagcatccaaaatggaagaaactgatgtgcctcacattgttgatttacaggtggaagatcccaagtttgtttttgaggccaaaacaataaaaaggatggagcttttggttgtcaccactttgaattggagattgcaagctctaactccattctccttcattgattatttcgttgacaagatcagtggtcacgtgtcggagaatttgatctatagatcgtcaagattcatcttaaacaccaccaaagcaattgaattcttagacttcaggccttctgagatagctgcagctgctgcagtgtctgtttccatttcaggagaaacagaatgcattgatgaggaaaaggcactgtctagtctcatatatgtaaaacagcaggagagggtgaagagatgtttgaatctgatgagaagtctcactggggaggagaatgtgcggggaactagtttatcgcaggagcaggcgcgagttgcggtaagagctgtacctgcaagtccagttggagtgttggaagcaacatgtttgagctataggagtgaagagagaacagttgagtcatgtacaaattcctcacagagtagtccagacaacaacaacaacaacaacaacagcaacaagaggaggagaaaacactagctcgagacccagctttcttgtacaaagtggt

SEQ ID NO: 323 - DNA, 1198 bp, Arabidopsis thaliana
acaagtttgtacaaaaaagcaggctcctgcaggaccatggcgattcggaaggaggaagaaagtagagaagaacagagcaattcgtttcttcttgatgctctctactgcgaagaagagaaatgggacgatgaaggagaagaagttgaagaaaactcttccttgtcttcttcttcttctccattcgttgttttgcaacaagatttgttctgggaagatgaagatctggttacactcttctccaaagaagaagaacaaggactcagctgtctcgatgatgtttatctttccacggatcgaaaagaagctgttggttggattctgagagtcaacgctcattatggcttctctactttagcagctgttttagccataacttatctcgataggttcatctgtagctacagcttacagagagacaaaccatggatgcttcagctcgtttctgtcgcgtgtctctcattagctgctaaagtcgaagaaacccaagtccctcttcttctagactttcaagtggaggagacaaagtatgtgtttgaagcaaaaaccatacagagaatggagctactgattctgtctactctcgagtggaagatgcatctcattactccaatttcgtttgtagaccacattatcaggagattgggacttaagaacaatgctcactgggatttcctcaacaaatgccaccgtctcctcctctctgtaatctccgattcaagatttgtcgggtacctcccatcagtagttgccgcagctaccatgatgcgaattatagagcaagttgatccctttgaccctctttcataccaaactaatctcctcggtgtccttaacttaaccaaggaaaaggtgaaaacttgctacgatctaatcctccaactaccagtggaccgcatctgtttacagatccaaatccaatcttccaagaaacgcaagagtcacgattcatcatcatcgttgaacagtccaagctgcgtgattgatgcaaaccctttcaatagcgacgaaagctcaaacgattcgtggtcagcgagttcgtgcaacccaccaacgtcgtcgtcgtccccgcagcaacaacctccattgaagaagatgagaggagctgaagagaatgagaagaagaagccgattttgcatctgccatgggcaatcgtagccactccatagctcgagacccagctttcttgtacaaagtggt

SEQ ID NO: 324 - DNA, 1016 bp, Arabidopsis thaliana
gatgctctctactgcgaagaagagaaatgggacgatgaaggagaagaagttgaagaaaactcttccttgtcttcttcttcttctccattcgttgttttgcaacaagatttgttctgggaagatgaagatctggttacactcttctccaaagaagaagaacaaggactcagctgtctcgatgatgtttatctttccacggatcgaaaagaagctgttggttggattctgagagtcaacgctcattatggcttctctactttagcagctgttttagccataacttatctcgataggttcatctgtagctacagcttacagagagacaaaccatggatgcttcagctcgtttctgtcgcgtgtctctcattagctgctaaagtcgaagaaacccaagtccctcttcttctagactttcaagtggaggagacaaagtatgtgtttgaagcaaaaaccatacagagaatggagctactgattctgtctactctcgagtggaagatgcatctcattactccaatttcgtttgtagaccacattatcaggagattgggacttaagaacaatgctcactgggatttcctcaacaaatgccaccgtctcctcctctctgtaatctccgattcaagatttgtcgggtacctcccatcagtagttgccgcagctaccatgatgcgaattatagagcaagttgatccctttgaccctctttcataccaaactaatctcctcggtgtccttaacttaaccaaggaaaaggtgaaaacttgctacgatctaatcctccaactaccagtggaccgcatctgtttacagatccaaatccaatcttccaagaaacgcaagagtcacgattcatcatcatcgttgaacagtccaagctgcgtgattgatgcaaaccctttcaatagcgacgaaagctcaaacgattcgtggtcagcgagttcgtgcaacccaccaacgtcgtcgtcgtccccgcagcaacaacctccattgaagaagatgagaggagctgaaga

SEQ ID NO: 325 - DNA, 2708 bp, Arabidopsis thaliana
acaagtttgtacaaaaaagcaggctcctgcaggaccatggtgacttctcgttcgattgttcctcaacaatccacggatgatgttgttgtggtagatggcaaaaacgtagcgaaaggaagaaaccgtcaagttcttggtgatataggtaatgttgttcgaggaaattacccaaagaacaacgaaccggaaaagatcaatcatcgtcctcgtacacgatctcaaaatcccacgcttcttgtggaggataatctcaaaaaacctgtagtcaagagaaacgcagtaccaaagccgaagaaagtggctgggaaaccaaaggtagtagacgtgattgagataagttcagacagtgatgaagaacttggtttagttgctgctcgagagaagaaggctactaagaagaaagcgaccacttacacatctgttcttactgctagaagcaaggctgcttgtggtttagagaagaaacagaaagaaaagattgttgatatcgattctgctgatgttgagaatgacctcgcagctgtggaatatgtggaagatatttacagtttttacaagtctgttgagagtgaatggaggccacgagattacatggcatctcagcctgatattaatgaaaagatgagactgatcctggtggagtggttgattgatgtgcatgtccgattcgagctaaacccggaaacattttacctcactgttaacattctggatcggttcttgtcggttaagccagtgcctcgaaaagaactgcagcttgttggtctcagtgctcttctcatgtcggccaagtatgaagaaatttggccaccacaggtggaggatctagttgatattgcagaccatgcatacagtcacaaacagattctggtgatggagaagacaatactgtctacacttgagtggtacttgacagttccgactcattatgtcttcctagctcgtttcatcaaagcttccattgcagacgaaaagatggagaatatggtgcactatttggctgagttaggcgtaatgcattacgatacgatgataatgttcagtccatcaatggtagctgcttctgcaatctacgcagcaagatcttctctccgccaagttcccatatggaccagcactctcaagcatcacactggctattctgagactcagctcatggactgtgcaaagctgttggcgtatcagcaatggaagcaacaagaagaagggagtgagagcagtactaagggagctttacgaaagaaatactccaaggacgaacgcttcgctgtggctttgatccctccggccaaagctttgttgaccggaactgaatctgcgtagctcgagacccagctttcttgtacaaagtggtacaagtttgtacaaaaaagcaggctcctgcaggaccatggtgacttctcgttcgattgttcctcaacaatccacggatgatgttgttgtggtagatggcaaaaacgtagcgaaaggaagaaaccgtcaagttcttggtgatataggtaatgttgttcgaggaaattacccaaagaacaacgaaccggaaaagatcaatcatcgtcctcgtacacgatctcaaaatcccacgcttcttgtggaggataatctcaaaaaacctgtagtcaagagaaacgcagtaccaaagccgaagaaagtggctgggaaaccaaaggtagtagacgtgattgagataagttcagacagtgatgaagaacttggtttagttgctgctcgagagaagaaggctactaagaagaaagcgaccacttacacatctgttcttactgctagaagcaaggctgcttgtggtttagagaagaaacagaaagaaaagattgttgatatcgattctgctgatgttgagaatgacctcgcagctgtggaatatgtggaagatatttacagtttttacaagtctgttgagagtgaatggaggccacgagattacatggcatctcagcctgatattaatgaaaagatgagactgatcctggtggagtggttgattgatgtgcatgtccgattcgagctaaacccggaaacattttacctcactgttaacattctggatcggttcttgtcggttaagccagtgcctcgaaaagaactgcagcttgttggtctcagtgctcttctcatgtcggccaagtatgaagaaatttggccaccacaggtggaggatctagttgatattgcagaccatgcatacagtcacaaacagattctggtgatggagaagacaatactgtctacacttgagtggtacttgacagttccgactcattatgtcttcctagctcgtttcatcaaagcttccattgcagacgaaaagatggagaatatggtgcactatttggctgagttaggcgtaatgcattacgatacgatgataatgttcagtccatcaatggtagctgcttctgcaatctacgcagcaagatcttctctccgccaagttcccatatggaccagcactctcaagcatcacactggctattctgagactcagctcatggactgtgcaaagctgttggcgtatcagcaatggaagcaacaagaagaagggagtgagagcagtactaagggagctttacgaaagaaatactccaaggacgaacgcttcgctgtggctttgatccctccggccaaagctttgttgaccggaactgaatctgcgtagctcgagacccagctttcttgtacaaagtggt

SEQ ID NO: 326 - DNA, 3218 bp, Zea mays
acaagtttgtacaaaaaagcaggctcctgcaggaccatggggggatgggagcgagataacgtgctgctcgccagcttcatctgcctctgctgtctccgcaagaagcgccgccgcgcgccgccgccgcctcagcactacggatacccgccgcccccgccgccgtacaaggaggatccatatggtggaacgtaccagagttggcagcaaaatgcgcctcctgctccaccccctgaacatgtggtcaagatgcacccttcgcctccgccagcatatgccaatcgtcctccacagccgccagcgccgccaccaccagcgatgctaaatagtagtggtggatctggttctaattactctggtggcgagatcctacctccaccatcccctggtgctgttcttggcttctcgaagagcacattcacctacgaagagctgttgagggctactgatggattctcggatgctaatctccttggacaaggtggttttggctatgttcacagaggattgctgcctaatggcaaagagattgctgtaaaacaattgaaactgggaagtggccagggagagcgtgagttccaggctgaggttgagattatcagccgagtacatcacaaacaccttgtgtctttggttggctattgcatttctggaggcaagaggctgcttgtctatgagtttgtccccaataacacattggaattccacttacatgcgaaaggtcgaccaacaatggagtggcctgctagattaaagatcagtttgggtgctgccaagggtttagcttatcttcatgaagactgccatccaaagatcatccatcgtgacataaaggcatctaacattcttcttgacttccaatttgaagctaaggttgctgactttggacttgcaaagttcactactgataacaacacccatgtttcgacaagagtaatgggcacctttgggtatttggcacctgagtatgcatcttctggcaagctaacagaaaaatccgatgtattttccttcggagtcatgcttcttgagcttattactgggcggcgaccagttgacacaacccaaacatatatggatgacagcttggttgactgggcaaggccattactgatgcgagcacttgaggatggtgaatatgatgctttagtggatcctcggctgggaaaggacttcaatcctaatgagatggcaagaatgatagcctgtgcagctgcatgtgtacgccattctgcacgtcgtcggccacgtatgagtcaggtcgttcgggctttggagggcaatgtgtctttggaggaccttaatgaaggtgttcggcctggccatagccgcttctttgggtcatacagcagctccgattacgattctggccagtacaacgaggacatgaagaagttcaagaagatggcattcaacaacaactataccagcagccaatacagcgcgccaaccagtgaatatggacagataccgtctgcatcaagcagcgagggccaccagacgcaggagatggagtcgggtgcaatgaagaaaggtggctacagtggtggctacagctcaggatacagcggagcctcgtagctcgagacccagctttcttgtacaaagtggtacaagtttgtacaaaaaagcaggctcctgcaggaccatggggggatgggagcgagataacgtgctgctcgccagcttcatctgcctctgctgtctccgcaagaagcgccgccgcgcgccgccgccgcctcagcactacggatacccgccgcccccgccgccgtacaaggaggatccatatggtggaacgtaccagagttggcagcaaaatgcgcctcctgctccaccccctgaacatgtggtcaagatgcacccttcgcctccgccagcatatgccaatcgtcctccacagccgccagcgccgccaccaccagcgatgctaaatagtagtggtggatctggttctaattactctggtggcgagatcctacctccaccatcccctggtgctgttcttggcttctcgaagagcacattcacctacgaagagctgttgagggctactgatggattctcggatgctaatctccttggacaaggtggttttggctatgttcacagaggattgctgcctaatggcaaagagattgctgtaaaacaattgaaactgggaagtggccagggagagcgtgagttccaggctgaggttgagattatcagccgagtacatcacaaacaccttgtgtctttggttggctattgcatttctggaggcaagaggctgcttgtctatgagtttgtccccaataacacattggaattccacttacatgcgaaaggtcgaccaacaatggagtggcctgctagattaaagatcagtttgggtgctgccaagggtttagcttatcttcatgaagactgccatccaaagatcatccatcgtgacataaaggcatctaacattcttcttgacttccaatttgaagctaaggttgctgactttggacttgcaaagttcactactgataacaacacccatgtttcgacaagagtaatgggcacctttgggtatttggcacctgagtatgcatcttctggcaagctaacagaaaaatccgatgtattttccttcggagtcatgcttcttgagcttattactgggcggcgaccagttgacacaacccaaacatatatggatgacagcttggttgactgggcaaggccattactgatgcgagcacttgaggatggtgaatatgatgctttagtggatcctcggctgggaaaggacttcaatcctaatgagatggcaagaatgatagcctgtgcagctgcatgtgtacgccattctgcacgtcgtcggccacgtatgagtcaggtcgttcgggctttggagggcaatgtgtctttggaggaccttaatgaaggtgttcggcctggccatagccgcttctttgggtcatacagcagctccgattacgattctggccagtacaacgaggacatgaagaagttcaagaagatggcattcaacaacaactataccagcagccaatacagcgcgccaaccagtgaatatggacagataccgtctgcatcaagcagcgagggccaccagacgcaggagatggagtcgggtgcaatgaagaaaggtggctacagtggtggctacagctcaggatacagcggagcctcgtagctcgagacccagctttcttgtacaaagtggt

SEQ ID NO: 327 - DNA, 808 bp, Zea mays
acaagtttgtacaaaaaagcaggctcctgcaggaccatgtcgttcgtgcagctctctggtgctggagtcgctgcagtggccttcacgaacaagagcctagtctctcggcacgcagcgctacgggtctgctcgtcgaggcgctcgatccgtagcctggtcgttaaggctgcaactgtcgtcaccccaaagtacacttcactgaagcctctgggagatagggtgcttgtgaagcttggtgccgcagaggagaagacagttggtggcattttgcttccatctactgcccagactaaaccacaaggaggtgaggttgttgctgttggagcaggaaggaccatcggggacaagaaaatagctgtggatatagagactggagcacaagtagtatactcaaagtatgctgggactgaggttgaattcaatgactcaaagcatcttattctcaaagaagacgatatcattggtattcttgagacagatgatgtgaaggacatgaagcctctcaatgaccgtgttctcatcaaggttgcagaagccgaagacaaaactcctgggggccttatcctcactgaaacaactaaagagaagccgtccataggaacggttgtagctgttggcccgggtcctctggacgaggaaggcaagagacagccactgtcagtgtcggcgggcagcacagtgctgtactccaagtatgcagggagtgagttcaagggcgcggatggcacggcctacattgtgttgagagcgtcggatgtgatggctgtcctgtcttagctcgagacccagctttcttgtacaaagtggt

SEQ ID NO: 328 - DNA, 838 bp, Zea mays
acaagtttgtacaaaaaagcaggctcctgcaggaccatggccgatccggcggaggagaacgttgtctcgccgccaccgacccctgcggccccagccgtgggcgcctcagacccgcccctgcagcctgctgctgacagcgcctcaacggagaaggtgtctgctccggcgccggaggtaaggtcccggggattcaggcttcttggagaggacacttccgtgcacaaatcccttgggggcggtaaaactgctgacgttctcttatggaaagacaagaaaacttctgctgttgtaataggcggcgcaactgtcatctgggttctgttcgaagtgcttgattaccacctcctgaccctgatatcccatgtactgattggtgtgcttgccaccttattcctgtggtccaaagcaaccaccttcatcaagaagagtccaccagatattccagtagtgcaggtatctgaggaccttgttgtgaatgtttcacgggcattacggaatgacatcaacagagcgcttcacttgttccgtgagatcgcaatggggcatgatctgaagaagtttttgggtgtgatcgtggggctgtgggttctctccggagttggaagcagctgtgacttcctcacgttgacatacattgccgtcctgatgctccacacggtgccaatcttgtacgacaagtaccaggacaaggtggaccatttcgctggaagggcacacaccgaggccctcaagcagtacaaggtgctggatgccaaggtcctgagcaaaatccccaggggtgcggtcaaatccaagaagcagaactagctcgagacccagctttcttgtacaaagtggt

SEQ ID NO: 329 - DNA, 871 bp, Zea mays
acaagtttgtacaaaaaagcaggctcctgcaggaccatgttccccagcctgatccaccacgctagccacggccgacccgacgtcgccgtcgccgaggacgcaccacgcagtggctgcgggttagggctgcccgggcacggcggcgggcccagcgtggtgctcacggccgatcccaagcctaggctccgctggacggccgacctccacgaccgtttcgtcgatgccgtcgcccagctcggcgggcctgataaagcaacaccgaaagctatcatgaggacaatgggagtgaagggcctcaccctttttcacttgaaaagccatcttcagaaatacagattgggaagacagtctggaaaagagttaacggagcaatcaaaagatgcttcttaccttatggaagctcaaagtggaacaactttgtctcctagaggttctactccagatgtgaaagagagtcaagaagttaaagaagcactcagagcacaaatggaagtgcaacgaagattgcacgaacaagtggaggtccagaagcatatgcagatccgaatggaggcgaaccagaagtacatcgacacgatactagataaggcgttcaagatagtatctgagcaactgagtggcttcagcatatctgaccaagacctaccgattctcacctctgctagggccatgcttagccctgcagatcacttgagttcgtctgtcttcccccagctctccgtcagctccgttagccttcacaatcctggtcctggaggagggaaaggccttccgcatgttgccgacagccacgtgttctcccagaggccacctgaacaattcaagcgcaaatcacgttagctcgagacccagctttcttgtacaaagtggt

SEQ ID NO: 330 - DNA, 1597 bp, Zea mays
acaagtttgtacaaaaaagcaggctcctgcaggaccatggcgtcgctctggctagcgagagcgtcgtcccagctggcgcgccgtgccgccgccaggaggcctcctccgcgtcctgcgcgccacggctccgaccaacccaccagttcgtggttcctgggctcagtgccgccgccggcccttgggtcagcagcggcggacacctgccgccgcggcttctgctccgtccggcgcttcgcaggggagagcagcgctgctgctgctgcggcggctgtcgtcgacgaggagccggagagcgggttcgcagccggcgatcagcaggcagttgactttcctggagggaaagtatcctttgtggcagaaatgaacttccttccagaatcgacgagggaaaggatcaactgctaccgcgtgcttgacgacgacggcagaacgatatcaggaagtagattccaagaggtcagtcgggagctggctctgaagatgtacagcgagatggtgacgctccagatcatggataccatcttctacgaggctcagaggcagggcaggatctcgttctacctcacttccaacggcgaggaagcgatcaacatagcctctgctgctgcgctcagcatggatgacattgtgctgcctcagtacagggaacctggtgttcttctatggcgtggcttcactctgcaggaatttgcaaaccagtgctttgggaacaagctggactatggtaaagggaggcagatgcccattcactatgggtcgaaccgtctgaactatttcacagtctcgtcacctatcgcaacacagctcccgcatgctgttggagctgcctactctctgaagatggacaagaaggacgcgtgtgccatcacatactttggggacggtgggacaagtgagggagacttccatgcagcgctcaacttcgcggctgttatggaggcaccggtgatcttcttctgccgcaacaatggctgggccatcagcactccgactactgaacaattcagaagtgatggagttgtcatccgtggccaggcttatgggatccgtggcatccgagtagatggcaatgatgctcttgctgtgtacagcgcaatccatgctgcccgagaaatggctgtaactgaaggaagaccaattttagttgaggcactgacttaccgagtcggccatcactcgacatccgatgattcgaccaagtacaggccagttgatgagattgagcattggcgaacagcgagggatccgatttccagatacagaaaatgggttcagggtaatgactggtggtctgatgctgaagaatctgagctcaggagcagagtgagaaaagagcttctccaagccatccaggttgcagaaagaatgccaaaaccaccagttactgagcttttcactgatgtttacgacaagatcccttccaacctgcatgaacaagagcaattgctgcgggatacaatcatgaggcaccctgcagactacccaactgatgtacctgttggggtcgtgcttcggtatgccgaaggtctcacacgaagaagcagcttcggccaaagtcgtttctagctcgagacccagctttcttgtacaaagtggt

SEQ ID NO: 331 - DNA, 910 bp, Zea mays
acaagtttgtacaaaaaagcaggctcctgcaggaccatggagttcgaagaccgctgccacaaggtccaggagcccaagttcgactgcctgctcttcgacctcgacgacaccctgtacccgctgagcgccgggatcgcaggccatgtcaagaagaacattgaagattacatggttgagaagctgggtattgacgagaccaagatcgagaacctgggcaatctgctgtacaagaactacggcaccacgatggctggcctcagggccatcggctacagcttcgattacgatgagtaccacgccttcgtccatggaaggctgccgtacgacaacatcaagcctgaccccattctcaagcacattctcaagaacctgcgcatccgcaaactcatattcaccaacggtgacatggtccacgccgtgagagccctcaagaggctgggcctggaggactgcttcgaggggatcatctgcttcgagaccctgaacccgccctgcccgccgcagggagaccaggagcccgagatcttcgacatcgccgaccacttcgcccgctccggcaccgccgacgagctgcccaagacccccgtgctgtgcaagcccaacgtggacgccatggaggaggcgctcaggatcgccaacgtcaacccgcacaaggcgatcttcttcgacgacagcgtacgcaacatccaggccgggaagcagattggcctccacacggtgctggtgggcaaatcgcagcgggtgaaaggcgcggaccacgcgctggagagcatccacaacatcagggaagcgctgccggagctgtgggaggaggccgagaaggcggaggacgtgctctaccccgaacgcgttgcgatggagacctcggtcaccgcgtagctcgagacccagctttcttgtacaaagtggt

SEQ ID NO: 332 - DNA, 930 bp, Oryza sativa
acaagtttgtacaaaaaagcaggctcctgcaggacctgcctcatgcaggagttccagtccatcccggggctcgccgggcggctgttcggcggcgcggcggcggctgacatccggcgcgcgcaggcgcagcagggcccggcgtcgcggtgcggcgggataccgtcgccggaggcggtgaagtgcccgcggtgcgagtcgaccaacaccaagttctgctactacaacaactacaacctctcgcagccgcgccacttctgcaagagctgccgccggtactggaccaagggcggcgtcctccgcaacgtccccgtcggcggcggctgccgcaagaccaagcgtagcggcagctcgtccgctgcgtcctcggccccgtcgacgccgacggcggcaactgacaacgccaagaaccagcggcgcgcctcggcgtcgtccccacgatccagtagcggcggtagcggcaacacgagccccacggccgccgcggcgacgaccccgacgacaccggccacgccgtcgtcgaacaccatcgccgtcataaaccacgcgacgacgacgacgacgacgacgaaccccttcccgacagacgtgccacctccggcgccgattttcgccgaccaagcggcagcgctcgcgtcactgttcgcccctcctccgccgccgcctctcccggtgttcagcttcgcagcgcaggcgaagaccgaggacgggattgcctccgttctactcgccggacagacgacggcgcccactgccgccaccgttgccgacatgacgccgttcacgtcgctggacgcggggatcttcgagctcggcgacgtgccgccggcggcgtactggaacgccgggagctgctggacggacgtcccggacccgaatgtctacctaccctagctcggtagctcgagacccagctttcttgtacaaagtggt

SEQ ID NO: 333 - DNA, 714 bp, Zea mays
acaagtttgtacaaaaaagcaggctcctgcaggaccatgagtaagttgcattccgagcttctcaaggattgcatctcccagatagttcaggatgccaagaagaataggaagttcactgagactgttgagcttcagattagtctgaagaattatgatccacaaaaggacaagcgtttcagtggctctgttaagttgcctcacatccctcgtccaaagatgaaggtgtgcatgcttggtgatgcccagcacgttgaggaggctgagaagatgggacttgactacatggatgttgaggccctcaagaaaatgaacaagaacaagaagcttgttaagaagcttgccaagaagtaccatgcttttttggcatcagagaccatcatcaagcaaattccccgtctccttggtcctggtctcaacaaggcaggcaagttccccactctggtcactcaccaggaatccctggaatccaaggtgaatgagacgaaggctacagtcaagtttcaactgaagaaagtcctttgcatgggtgtcgcggtcggtaacctgtctatggaggagaagcagatccaacagaacatccagatgagcatcaacttcctcgtgtctcttctgaagaagaactggcagaatgtaagatgtctctacatcaagagcaccatggggaaaccattcaggattttctagctcgagaccagctttcttgtacaaagtggt

SEQ ID NO: 334 - DNA, 2455 bp, Oryza sativa
acaagtttgtacaaaaaagcaggctcctgcaggaccatggtgggcatcgacctcaacaccgtggaggaggaggaagacgaggaggagggcggcgccaccggcaccgtcacggcgcctgcggaggcgagggcggggggcgcggtgtgcctggagctgtggcacgcctgcgctggccccgtggcgccgctgccgcggaagggcagcgccgtcgtgtacctgccgcagggccacctcgagcacctcggggccgcgcccggctccggccccggcgccgcggtgccgccgcacgtgttctgccgcgtcgtcgacgtcagcctccacgcggacgccgcgacggacgaggtgtacgcgcaggtctcgttggtcgccgacaacgaggaagtggagaggcggatgcgggagggagaggacggcgcggcctgcgacggcgagggcgaggacgccgtgaagcggccggcccggattccccacatgttctgcaagacgctcacggcctccgacaccagcacgcacggcggcttctccgtgcctcgccgcgccgccgaggactgcttcccgccgctggactacagcctgcagaggccattccaggagctcgtggcaaaggatctgcacggcacggaatggaggttcagacatatctatcgaggccaaccacggaggcaccttttaaccactggatggagcgggtttatcaacaagaagaagctagtatctggggatgcagtgctattcctcagaggtgaagatggagagcttcgattgggagtgcgccgagctgctcagctaaaaaatgcatctccttttcctgcacttcataaccagatctcaaatactagtagtcttagtgaagttgcacatgctgtggccgtgaaaagtatttttcacatctactacaatcccaggttaagtcagtctgagttcattataccatattggaagtttatgagaagcttcagtcaacccttttctgttggaatgcgattcaaattgagatatgagagtgaggatgcttctgaaagaaggcgtactggaataataattggaagcagagaggcagatccaatgtggcatggttcgaagtggaaatgtttagtggtgaaatgggatgatgatgtggagtgccgtcggcctaatggggtatctccttgggagattgagcttagtggatcagtttcaggatctcatctgtccactccccattcaaaacggctgaaatcatgcttcccccaagttaatccagatattgtgcttccaaatggaagtgtttcttcagattttgcggagtctgccagattccacaaggtcttgcaaggtcaagaattgttgggtttaaaaactcgtgatggtactgttaatacagcttctcaggcgactgaggcaagaaattttcagtacactgatgaacgaagttgctctatcaacatgagtaacaatatcttaggggttccgagacttggggtgaaaactccaagtggaaaccctgggttttcctaccattgctcaggctttggggaatctcaaagattccaagaggtcttgcaaggtcaagaagtgtttcgtccttaccgaggagggactttgtccgatgcctgtataagaggttctggcttccgtcaacctgatggcaaccatgcacctggtgcagcatttaaatggcttgcaccacaaggatgtgatcatcatgggataaccacatcagttctgccgcaagcatcctctccatcatctgtcttaatgtttccacaaactagttcaaagatgcctggccttgaatacatatacggatgcctggatagaaatgagaatagccgacattttaagattggacctacacaagatatgacaagaactgatcaaacattacgactctggcctcatcttatttcaggcaaagtgctagatgagtgtacgagaaatgagaagctgcactctccagtcagtggtgctgagcatgaatcaaataacaagtgtcttaatacaaatggctgcaaaatctttggtatatcattgactgaaaaggcccaagcaggcgatgaagtggattgtggcaatgccagttatcattctcggctccagtctttaaaaccacagatgccaaaatcattgggcagcagttgtgccacggtccatgaacaaaggcctgttgttggcagggtcgttgatatttcagcagtgaatacgatgatctgatacatttactgtatccagggagtatgcttgcagaaatagggaccaacattagtatcatactcactggtgctgaggacacaacttccattctggctatctcgtccctctacgtgcttgttgcctcaacttcagcatttccacaggctgtgctaccgcatccaggatgatgacaggggaaatgcagatgatacacgaaggatgcttgtcaagtttgttgtaatgcacttctagctcgagacccagctttcttgtacaaagtggt

SEQ ID NO: 335 - DNA, 2583 bp, Oryza sativa
acaagtttgtacaaaaaagcaggctcctgcaggaccatggctccccctcccccgccgcagggctcctccacaggggatccgctctacgacgagctgtggcacgcctgcgcggggccgctcgtcaccgtgccgcgggtgggcgacctcgtcttctacttcccgcaggggcacatcgagcaggtggaggcgtccatgaaccaggttgccgacagccagatgcgcctctacgatctgccctccaagctgctttgccgtgtcctcaacgtcgagctcaaggcggagcaagacaccgacgaggtctacgcgcaggtcatgctcatgccggagcccgagcaaaatgagatggcggtggagaagacgactcctacgtccggccctgtgcaggcaaggccgccggtgaggtccttctgcaagacgctcaccgcgtctgacaccagcacgcacggcggcttctctgtactccgccgccacgctgatgagtgcctccctcccctggatatgacccagtcgccacccacacaggagctcgtggccaaggatctgcacagcatggactggcgcttccgtcacatctttcgcgggcaaccgaggaggcatctccttcagagtggttggagtgtgtttgtcagttccaaaaggcttgttgctggggatgctttcattttcctcagaggagagaatggtgaactccgtgttggtgttagacgagctatgaggcagctgtccaatgtgccttcttcagtcatatctagccaaagcatgcacctgggagtccttgctactgcatggcatgctatcaacacgaagagtatgttcaccgtctactacaaacctaggacgagcccttcagagttcattataccatatgatcagtatatggagtccgtcaaaaacaattactctgttgggatgaggttcaggatgaggtttgaaggagaagaggcaccagagcagaggtttactggtactataattggcagtgagaatctcgacccagtgtggcctgaatcaagttggagatccctgaaggtgcggtgggatgaaccatcaactattccgcggccagatagagtctctccttggaaaatagagcctgcttcatcacctcctgttaacccccttcctctttctagggttaaaagacctaggccaaatgctcctccagcatctcctgaatctcctattcttacgaaagaagctgctactaaggttgacactgatcctgctcaagcacaacgaagtcaaaacagtacggtcttgcaaggtcaagaacaaatgaccttgaggagcaaccttactgagagtaatgactctgatgtcactgctcataagccaatgatgtggtctccatccccaaatgctgcaaaagcccaccccttgacatttcagcagagaccccctatggataattggatgcagttgggaaggcgtgaaactgactttaaggatgtccgttctggctctcaatcttttggtgattccccaggcttctttatgcagaattttgatgaggctcctaaccgtcttacttctttcaagaaccagtttcaggatcaaggttctgctcggcacttctctgacccatactactatgtatctccacagccttccctaactgttgaatcaagcacacagatgcacacagacagtaaggagttacatttctggaatggccagagtactgtgtatggtaattcgagagaccgaccacagaatttcagattcgaacagaactcatcaagttggttaaatcagtcatttgcccgacctgaacagccaagagtgattagaccgcatgcatcaatagctccagttgagttggaaaaaacagaaggcagtgggtttaagatttttgggtttaaagttgatacaaccaatgctcctaacaatcacttgagctccccgatggctgcaacacatgagcctatgcttcaaactccatcatcattgaatcagttgcaacctgtacaaactgattgcattcctgaggtatcagtaagcacagctggaacggcgactgagaatgagaaaagcggtcagcaagctcaacagagttcaaaagatgttcaaagcaagactcaggttgcttcgacgaggagttgtacaaaggtccataagcaaggcgttgcacttggcagatctgtggatctttcaaagttcagtaactatgatgaactcaaagctgagctagacaagatgtttgaattcgatggtgaattggtgtcttcaaacaaaaactggcaaattgtttatactgataatgagggtgatatgatgcttgttggagacgacccatgggaagaattctgcagcattgtgcggaagatttatatttacaccaaggaggaggtccagaagatgaattcgaaatcaaatgccccaaggaaagatgactcttcagaaaatgagaaaggtcatctgccgatgcccaacaaatcagataactaggttcagtgaagcgagatgatacaagaggtagatcgcatggagtcttgagagagagatgccattctgcgggtcccagtcaagtaaaccccctgatgtgttggtagctcgagacccagctttcttgtacaaagtggt

SEQ ID NO: 336 - DNA, 1210 bp, Zea mays
acaagtttgtacaaaaaagcaggctcctgcaggaccatggcgccgcagctcgccgcagctggcccgaccttatacgcgcctcgctttggcaccgccctcccctgccgcgcccggacaaggaagccggtctctcggcgccgggccgcgctccccaaggatgaggattattacttgatcgatgcggatgagtccattggggatggcttctcgttcagtggagggaagtacggggatggaccaagtaagtcggatgagtggtttgctcaagggaaaatggtaaacgcttacccagtatatggggacaaagggaaggcaaaagatccattctttggcctgacgatgggatcaggatctcaatcttcatatgatattttcagatggttctgtgtggaggctgggagctcttctagtcctaaagtgcttttaattcacggcttgccatcgcaggcatactcttaccgcaatgtgatgcctgtactggcggacaaatatcatgccattgcttttgattggctcgggtttggattttctgataagcctcaaccaaaatatggttttgactatacacttgatgagtatacttcatccttggaatttctagtcaatgctgttgctcctgataagctctctattgttgttcagggctactttgctccggttgcagtcaaatatgctagtgaacaccaagacaaattgaatcatcttgtactagtgaatccaccaataaccgataaacatttgaaccttccatccaccctggcttcgttcagcaacttcttgttgggtgagatattttctcaggatcctctcagagctagtgataaggtattgactagttgtggtccatacatgatgaaggaagaagatgctatggtgtatagaaggccataccttgtctctggttcctcggggtttgcacttaatgcaataagcaaagctatgaaaaaggaccttaaggcttatattgaatccatgagaagcatattaagaagcagttcgtggaaaacaaagacaacagtatgctggggcatgagagatcgttggctaagctatgatggggtggaagaattttttggaggcctaaaccagaagattgtagaactgccaatggcggggcaccatgtgcaggaggaccgtggtgaagaattaggcaatataatcaaaagtatactgaggtagctcgagacccagctttcttgtacaaagtggt

SEQ ID NO: 337 - DNA, 691 bp, Zea mays
acaagtttgtacaaaaaagcaggctcctgcaggaccatgttggcaagaccatcagcaccgcctttggtgactgctcaaactcctgaagtcggcatcttcattacagctcgcaacgtctcgggtgcactggtcgccaagcttcctggtaacaaaaacaattgtggaggaagatcgaatgtccggcagcagaatagtcgtcgggagtggcgggcgctctcagcagctgaccaagcgcaggcttctaccccggacgtagacgaggagtgcaaacgggtgctcactccattgggtttctccagcgaagacgccgagaagatgctgaagaaagcgtttggctggacccactcgccgtactggagcgaggagagggagaaggaggttccgaccgccgaggcggtagctggagtgctggactacatcaggagcctggggctgtcggacgaagaccttggcaggctgctgaagaagttccccgaggttcttgggtgcgacctcgacggcgaggtgaggccgaatgtgggcaagctggacagtgactggggaataaacgggaagaccctgcggagccttctgctgaggaaccccaaggttctgggctacaacgttgactgcagaggggattgcatggcccagtgcacccgctgttgggttaggttctagctcgagacccagctttcttgtacaaagtggt

SEQ ID NO: 338 - DNA, 967 bp, Zea mays
acaagtttgtacaaaaaagcaggctcctgcaggaccatgatggggtggggagaggaggtggtggctctgtccctgcgaggctacggctatggcaacgaggaggacgaccggccggagaagccgcggcggtacggggtgacggagatgcggagccccttctactccttccgccccgcaaaccaggcgctccaggaaatattggattctcttagtccattcgttgatggtttgaagttctctggcggatgccatagtttgatgggaaaggagttggttagagagatcactgatctagcacacaggcatgacatttatgtgagcacaggtgattgggcagagcatttgctgcgccaaggaccctcttctttcaagcaatatgtagaggaatgcaaggccttagggtttgacacaattgagctgaatgctgggtctctcaacctccctgaagaggctctgttgagactagtccgcctcatcaagagtagtggtttaagggcaaagccaatgttttcggtgaagtttgacagttctgatattcctgcgtctggtgatagggcctttggggcttacatagctccagtcaaagggaagacctcagaaagagttgaagatgttgacctgctgattaggagggcagagagatgcttggaagcaggcgctgatatgatcatgatcgatgctgatgatgtttgccagcgtgctgaatctctgaggacagacatcatcgccaagattgtaggccggctcgggcttgataaaaccatgtttgaagcttccaactccaacacctcggagtggttcgtcagacgttatggcccaagggtaaatctctttgttgaacactctgacgtgatgaatctggagcgcctccggggcttcaacatgcgcagaagcaactcggcctcccgttttgcctcgccgttcttcctgatctagctcgagacccagctttcttgtacaaagtggt

SEQ ID NO: 339 - DNA, 691 bp, Zea mays
gttcatcggtagtttttcttttcatgatttgtgacaaatgcagcctcgtgcggagcttttttgtaggtagaccgcgggatatcacaagtttgtacaaaaaagcaggctcctgcaggacctcctcccttcgcctgtgatcatgtcgtcttgctgcggcggcaagtgcgggtgcggctccagctgctcctgcggcagcggatgcaacggctgcggtatgtaccctgacgtggagaccgccgccaccagcagcgtcaagaccacggtcctcgccgcgccgaccaccaaggccagcgccggcggcttcgaggcggccaccgagggcggcggctgcgactgcaacacctgcaagtgcggcaccagctgcggctgctcctgctgcagctgcaactgagctggcctagctcgagacccagctttcttgtacaaagtggtgatggggatcccccaccctgcaatgtgaccctagacttgtccatcttctggattggccaacttaattaatgtatgaaataaaaggatgcacacatagtgacatgctaatcactataatgtgggcatcaaagttgtgtgttatgtgtaattactaattatctgaataagagaaagagatcatccatatttcttatcctaaatgaatgtcacgtgtctttataattctttgatgaaccagatgcattttattaaccaattc

SEQ ID NO: 340 - DNA, 1834 bp, Zea mays
acaagtttgtacaaaaaagcaggctcctgcaggaccgaagacatggcctcgacgttcggtgccacttctacagttggccttatggctgctccaacggggaagaatgtgcgccttcagaggagggctaacttcagagtaaaagcggctaaggagctgtacttcaacaaggatgggtcagctatcaagaagctccagactggagtcaataagcttgcagacctagttggagttacactcggaccgaagggaaggaatgtcgttttggagagcaagtacggctctcccaagattgttaacgatggcgttacagttgcaagagaggttgagctggaggaccctgtggaaaacattggagctaaattggtcaggcaagctgcagctaagaccaacgatcttgctggagatgggacaaccacctctgtggtccttgctcaggggctgattgctgagggtgttaaggtggtagcagctggtgctaatcctgttcagattactcgtggtattgagaaaacagctaaagcactagttgaagaactacggaagttgtctaaggaggttgaagatagtgagcttgcagatgttgctgcagttagtgctggcaacaactatgaaattggtaacatgatagcagaggccatgagcaaggtcggtcggaagggcgttgtcacccttgaagaggggaagagttctgagaactttctctatgttgtggagggaatgcaatttgaccgtggttacatctctccgtactttgtaacagacagtgagaaaatgactgcagagtacgagaactgcaagctgcttttggttgataagaaaatcaccaatgcaagggatcttatcaacgttttggaagaagccatcagaggtgcatacccaatcctgataattgcagaggatattgagcaggaggctcttgctacccttgtcgtcaacaagctcagaggatcactgaagatcgctgccatcaaagcccctggttttggagagcgcaagactcagtacttggatgatattgccatccttactggagcaactgtaatcagagatgaagttgggctatcacttgacaaggccgacaagtcagttcttggaacagccgcaaaggttgtccttacgaaagagtcgacaacaattgttggtgatggcagcacccaggaagaagttactaagagggttgcacagattaaaaatctcattgaggcagcagaacaagaatacgaaaaggaaaagctcaatgagaggatagcgaagcttgctggtggtgttgctgtcattcaggtgggagcacaaacagaaactgaactaaaagagaagaagttgagagttgaggatgccctaaatgcaactaaggctgccgttgaggaaggtattgttgttgggggagggtgcactcttttgcggcttgcagctaaagtcgacgccatcaaggatacactggagaacgacgagcagaaggttggagctgaaatagtgaggagggccctgagctacccacttaatttgattgctaaaaacgccggtgtcaatggcagtgttgtcactgagaaggtcctttctaatgataacttcaagtatggttacaatgctgctactggacagtacgaggacctgatggctgctggtatcattgaccccaccaaggtggtgagatgctgcttggagcacgccgcgtcggtggccaagaccttcctgacatcagatgttgtggtcgtcgatatcaaggagccggaggctacacctgtcgcaaacccgatggacaactctggctatggatactgatgagatgctatgccagccctgctcgagacccagctttcttgtacaaagtggt

SEQ ID NO: 341 - DNA, 1845 bp, Zea mays
acaagtttgtacaaaaaagcaggctcctgcaggaccgcctccttccgcagtcatgtaccgcgcggccgctagcctcgcctccaaggcgcggcaagccgggaacagcctcgccgcccgccaggttggaagcaggcttgcctggagcaggaactatgctgcgaaggacatcaagtttggtgttgaggcccgtgctctgatgttgaggggtgttgaggagttggcagatgccgtcaaagtgacaatgggacctaagggccgcaatgtggttattgagcaaagctttggtgcaccgaaagtcacaaaggatggtgtgactgtagcaaagagcattgaatttaaggatagagtaaagaatgttggtgcaagccttgtgaaacaggttgctaatgcaactaatgacactgctggcgatggtaccacatgtgccactgttttgacaaaagcaatatttactgaggggtgcaaatctgttgcggctggaatgaatgcgatggatttaaggcgcggaatctcaatggctgttgacgctgttgtgaccaatctgaaaggcatggccagaatgatcagcacttcagaagaaattgcacaggtgggtacaatatcagcaaatggggaaagggaaattggtgagcttattgccaaggctatggagaaggttggcaaagagggtgtcatcactattgcggacggtaacaccctttataatgagcttgaagttgtggagggtatgaaattagacagaggttacatctctccgtacttcattaccaactcaaaaacccagaaatgtgaattggaagacccattaatcttaattcatgacaagaaggttacgaacatgcatgctgtggttaaggttttagaaatggctctgaagaaacaaaagcctctactgattgttgcagaagatgtggaaagtgaagcattgggcactttgattattaacaagcttcgtgcaggcatcaaggtctgtgctgtcaaagctcctggttttggggaaaacaggaaggcaaacttacaggaccttgcaatccttactggaggagaggtaataactgaagaactaggaatgaaccttgagaattttgagcctcacatgctgggtacatgcaaaaaggtgaccgtctctaaggatgacactgttattcttgatggagccggagacaagaagtccattgaagagagggcagagcagattagatcagcaattgagaatagcacttcagattatgataaggaaaagctccaggagcggttggcaaagctctctggaggtgttgctgttctgaagattggaggagccagcgaagcagaagttggtgagaagaaggatagagtgacagatgcactgaatgctactaaagctgccgttgaagagggtattgtaccaggtggtggtgttgctcttctctatgcatcgaaggagcttgataaattgcagacagcgaacttcgatcagaagattggtgtgcaaatcattcagaatgctttgaagacacctgtacacacaattgcctccaatgctggggtggagggagcagtagttgtaggaaagcttttggagcaagaaaatactgacctgggttatgatgctgctaaaggtgaatatgttgacatggtgaagaccggtatcattgacccgctaaaggttatcagaactgctttggtggatgctgctagtgtgtcgtccctgatgacaaccacggaatccataattgtagagattcccaaggaagaggcaccggctccagcaatgggtggcggcatgggtggcatggattactaatgcatcacacccacatacacatcaatagctcgagacccagctttcttgtacaaagtggt

SEQ ID NO: 342 - DNA, 1925 bp, Zea mays
acaagtttgtacaaaaaagcaggctcctgcaggacctccgaccaatccatggcttcagcgttcgggaccgcctccacttgcggcattaaacatgcacctgccggcgttgcgcttgctgcgcccatgaagcacctttccctcgtctcgccctcgctggtttcgcttccgcgcaagatgaggccgcgaaggaagtacaacttcagggtaaacgctgcaaaggagctgcatttcaacaaggatggctcggctatcaggaaaatgcaaaatggggtcaacaagcttgcagatctcgtcggggttactcttggaccaaaggggcgaaatgtagtcctcgaaagcaagtatggctcacctaaaattgtcaatgatggtgtcactgtggcaaaggaggttgaacttgaggaccctgttgaaaatattggtgctaaattggtccgccaagctgctgctaaaacaaatgacttggctggtgatgggacaaccacttcggttgtccttgctcaagggatgattactgagggtgtaaaggttgtagctgctggtgctaatccagtgcagatcacccgtggtattgagaaaacagccaaagcactagtcagtgaactccaaaagatgtccaaggaggttgaggacagtgagcttgctgatgttgctgcagttagtgcgggaaataactatgaaattgggaatatgatagctgaggctatgaaaaaggttgggcggcagggagtggtcacacttgaagaaggaaagagtgctgaaaataacctctattctgttgagggaatgcagtttgaccgtggctatatttctccctactttgtgactgacagtgaaaaaatgacagtcgagtatgagaactgcaagcttctccttgtggacaagaaaattaacaatgccagagatcttatcactatcctggaggatgctattagaagtggatatccaattctaatagtggcagaggacattgagcaggaagctcttgcaacccttgtggttaataggcttagaggtgcattgaagattgctgctattaaggcccctggttttggagagcgcaaaagtcaatatcttgatgacattgctactctcactggaggcactgtcatcagagaagaagttggattatccttagacaaggcagacaatgcggtcctaggaactgctgctaaggttgtagttaccaaggattcaacaacaatagtgggagatggcactacacaggaggaagtgaacaaaagggtgacacaaatcaagaaccagattgaggctactgaacaagaatatgagagagaaaaactaaacgagaggatagctaaactctctggtggtgttgctgtcattcaggtaggagcacagacagaaactgagctcaaggaaaagaaattgagggttgaggatgccctgaatgctacaaaggcagcagtcgaggaaggtatcgttgtaggtggtggctgtacccttttgaggcttgcatcaaaagttgatgcaattatagagacccttgagaacgatgaacagaaggttggggctgaaattgtaaggaagtccttgagctatccacttaaattgattgcaaaaaatgcaggcgttaatggcagtgtggttactgagaaggttcttgccaatgagaacttcaggtatgggtacaatgcggctacaggggagtatgaggacttgatggctgctggtatcattgatcccaccaaggttgtgaggtgctgcttggagcatgctgcatcggtggcgaaaaccttcatcacctctgatgccgttgttgttgacgccaaggtggctgagcaagcaccatcatctcctgcaaacccaatggcaatgggtggtggctcaggttttgggttctaaattgttcagctgcccttcgttccattagctcgagacccagctttcttgtacaaagtggt

SEQ ID NO: 343 - DNA, 1834 bp, Oryza sativa
acaagtttgtacaaaaaagcaggctcctgcaggaccatggctgcgccaaccggaattgtatcagacaagaagccatcttctctatcttcggtgtcatctgtttctgttgccagccgaccacgcaatgcacgccttcagaggaagtgcaacttcagggtaaaagctgccaaggagttgtacttcaacaaggatggctcggctatcaagaagcttcagactggagtaaacaagcttgctgaccttgttggagttacactgggaccaaagggaaggaatgttgttttggagagcaagtatgggtcccctaggattgtcaatgatggtgttacagttgcaagagaggttgaactggaggatcctgttgaaaatattggagctaagttggttaggcaagcagcagcaaagaccaatgatttagctggagatggcacaactacttctgttgtgcttgctcaggggctgattgctgagggtgttaaggtcgttgcagctggtgccaatcctgtgcaaattacacgtggtatcgagaaaactgcgaaagcactagttgaagagctaaagaaattgtcaaaggaggttgaagacagtgagcttgcggatgttgctgcagtcagtgctggcaacaattatgaaatcggtaatatgatagcagaggctatgagcaaggttggcaggaagggtgtggttacccttgaagaagggagaagttctgagaataatctctatgttgtggagggaatgcagtttgaacgtggttatatctccccgtattttgtaactgacagcgagaaaatgtctgcagaatatgagaactgcaagcttcttttggtggacaaaaaaatcaccaacgcaagggatcttatcaatgttttggaggaggccataagaggtgcatacccaattctgataattgctgaggatattgagcaggaggctcttgctactcttgttgtcaacaagcttagagggtcattgaaaattgccgctatcaaagcccctggttttggtgagcgcaagacccagtacttggatgatattgccattctaactggagcaactgtaatcagggatgaagttgggctgtcacttgacaaggcagacaaatcagttttaggaacggctgcaaaggtggtccttaacaaagagtcaacaacaattgttggtgatggcagtacacaggaagaagtgactaagagggttgcacaaataaaaaatctcatcgaggctgccgaacaagaatacgagaaggaaaagctcaatgagaggattgcaaagcttgctggtggtgttgcagtcattcaggtgggagcacaaacagagaccgaactaaaagagaagaagttgagagttgaggatgccctaaatgctaccaaggctgctgttgaggaaggtattgttgttggtggagggtgcactcttctgagactggcagctagagttgacgccatcaaggacaacctggagaatgatgagcagaaggttggagctgaaattgtaaggagagcgctgagctacccgcttaaattgattgctaagaatgctggtgttaatggaagcgttgttaccgagaaggttctctctaacgataacttcaagtttggttacaatgctgcaactggacagtacgaggatttgatggctgctggtatcattgaccccactaaggtggtgagatgttgtcttgagcatgctgcgtcggtggccaagacattcctcacatcggatgtcgtcgtcgtcgagatcaaggagcctgagcctgcgcccgtcaccaacccgatggacaactccggctacgggtactagctcgagacccagctttcttgtacaaagtggt

SEQ ID NO: 344 - DNA, 571 bp, Zea mays
acaagtttgtacaaaaaagcaggctcctgcaggaccatggccggcgccgagggcgagaggtgggtggggctagcaacggacttctcggaggggagccgggcggcgctgcggtgggcggcggccaacctgctgcgagccggcgaccacctgctgctgctgcacgtcatcaaggagcccgactacgagcagagcgaggccatcctctgggaatccaccggctccccgttgattcccctctcggaattctctgaccctatcattgcgaagaaatatggagcaaagccggacatagaaaccttggacatcctgaacactacagctacccagaaggatatcgtggtggttgtgaaagtcctgtggggtgatccgcgtgagaagctctgtcaagttatccatgataccccgctgagctgcttggttataggaagcaggggccttggcaagctcaagagggtgctcttgggaagtgtcagcgactatgttgtgaacaatgcaacctgccctgtcaccgtcgtcaagtcaacaagcaccgaaggttagctcgagacccagctttcttgtacaaagtggt

SEQ ID NO: 345 - DNA, 643 bp, Zea mays
acaagtttgtacaaaaaagcaggctcctgcaggaccatggcaatcgccgggcagtgctcctcctgctattatacgtcacccaccctgcagctccagctccaacgacggcacagccacctgccgctgcagccccaagccgcacgaagagcgcggcggccgaggttgcaggtggccacagctgccggcagcgggcccatcagggcggccacggacgccgagttcttccagccttccgacaccaggccaatcatgctcttcgacggcgtctgcaacctctgcaacggcggcgtccgcttcgtgcgggagcacgaccccaacaggagcatcaggtacgtgccgctgcagagcgagtccgggaggaagctcctgcagaggtcagggaggtcccctgacgacatctccagcgttgttctcgtcgagaaagacaggtctttcatcaagtctgaagcggtgctgaggataatggagtacctcaacctgcccttcccgcagctcgccgtcttcctcaagttcgtccctctgttcctgagggacttcgcgtacgacaacgttgcgaacaacaggtacgccatgtttggccggtccgaagcagaagcatgcgagatactgtagctcgagacccagctttcttgtacaaagtggt

SEQ ID NO: 346 - DNA, 1414 bp, Zea mays
acaagtttgtacaaaaaagcaggctcctgcaggaccggatttgagctccgggcccgcctcatggagtccatggcgcaggaaagggacgcgttggattcacctgccttgtcgattgacaaaaggctgcggtcggatgctgtcgaatcacccctggtggatgatgcaacgcaacccaaggagggggcggacggttaccctgtcaaggttcggaagccttacacgatcacgaagcagcgagagaagtggacagaggaagagcatgggaagttcctggaggcactgaagctctatggtcggtcttggcgccagatacaagaacacattggcacaaagactgctgtccagattcggagccatgctcagaagtttttctccaaggtcgtgcgtgaacctggggccagtaattcaattgagatcccaccccctaggccaaagagaaaaccactgcacccataccctcgcaagtgtgccgactccaccgtgacaaatgctccaatgggcgaaccgaagaatgctcctgtttcatcaccatctggttctgaccaagagaatggttcgcctgtctcggtgttatctgcaatgcagtcggatgcttttggttcatcaatatcaaacccatcaactgggggcacgtctcctgcgtcatcagatgatgggaataatgtccctgagatagtgaatggggaggaaaatttgctcactcagcaaatagaagaccgatcccatcaggaatcaaagcaggacaacagtgatggtgagctgtctgaagaagattcatcacgagtccaagaaaccagtttgaagctttttgggaagacagttatcatcccagacccaaagaaagtctgttcctcggatgggggagctggagatgatacacaagaagtgatgcaaacatcctgggttggaggaggggtggcagcataccctgcccataacggatggtttcttccgttccattctttccctgctcatatgtatgagtcaggggatgctaggatttcccctcttcatatgtggtggccttactacggttttccggccggccatccaagagggtttggcacagggctgcttaacgaaggcgccattgagagtgatgccgacaatagcccatcggttgaaactaattctgatcgcacgggcaatgttcatgttcagacgacgacccctaccattcacaacaatgctgtcaaggagtcagttgggccagttgagatgccagagtcgggtccgagcattgagctgaaacccagcgcgaactcggcctttgtaagagtgaagccgagcagcagcgtcagcggagaccaatcactggtaagggggttcgtgccatacaaaagatgtaaggtcgaataacccaacccaacgacatacctgtagctcgagacccagctttcttgtacaaagtggt

SEQ ID NO: 347 - DNA, 1981 bp, Oryza sativa
acaagtttgtacaaaaaagcaggctcctgcaggaccatgacggagctggagagtgatgtcgtcgtggaagtaggagaaatgtcattttacctccacaagttcccgctgctgagccggagcggtgtgctgcagcggatgatcagcgagtaccaagcgccgcaggaggacggcggcggcggcggaggcatgtgcacgctgcagctggacgacatcccggggggcgccaaggcgttcgagctggcggcgaggttctgctacgacgtcaagatcgagctcaacgcgcacaacgtggtgtgcctccggtgcgccgccgagtacctgcggatgaccgacgactacgccgagggcaacctcatcacgcaggcggagtccttcctcgccgacgtgctcgccaactggaaggactccatcaaggcgctcgagacatgcgagggcgtgctccccaccgccgaggacctccacatcgtctcccgctgcatcaccgcgctcgcctccaaggcctgcgcctccgacgccgccgcgtgttccaccggccacgccgccgcctccgcctccgccgtggccgtggccgccaagaatgccagctacgacgcgctgtggaatggcatcggctcggggggcacgccacggggcgggggcggcgcagcgggcgcggcggcggggtgctccgggatggactggtggtacgaggacgtgtcgttcctgagcctgcccatgttcaagcgactgatccaggcgatggaggggaaggggatgcgccccgagagcatcgccggcgcgatcatgttctacgcggggcggttcctgcccgggctgaagcggaacaccagcttcagcaacgccagcttcggcggcgactgcggcgccggcagccgcagcatcacgccgcgcgccgccaacgtgtcggcgccgtcggagggcgaccagaggtacttcctggaggagatcgtggcgctgctgccggcgaagaagggcgtcgcctccaccaggttcctgctcgggatgctccgcacggcgatgctcctccacgccagcccgctgtgccgggagaacctggaacggcggatcggcgcgcagctggaggacgcctgcctcgacgacctgctcgtcccaaacctcggctacaccgtcgagacgctctacgacatcgactgcgtgcagaggatactggactacttcatgtcgtccacggacgggctcgggaccgggtacacgtcgccggcggtggtggaggagggcagccagcttggggcgctccatgccgggagcccctcgtcgctgtcgccgatcaccatggttgccaagctcatggacgggtaccttgccgaggtggcgcccgacaccaacctcaagctgcccaagttccaggcgctcgccgccgtcgtacccgactacgcgcgccccgtcgacgacggcatctaccgcgccatggacatatacctcaagtcgcacccgtggctgtcggagtcggagagggagcagctgtgcaggctgatgaactgccagaagctgtcgctggaggcgtgcacgcacgcggcgcagaacgagcgcctgccgctgcgggtggtggtgcaggtgctcttcttcgagcagctccgcctccgcacgtccatcgcaggctggttcttcgtgtccggcaacgcggcggcgggcggcgacggcgctccgcagccgcacccggggggcagcgccatcgtgcctaagggcgcggcggcggccgggcagtccgacgccgacgcggaggccgacgaggggaaggggaaggagctccccgccgaggccatcaccgacgtgaaggcgagggtgtcggagctggagaaggagtgcatgagcatgaagcaggagatccggcggctggggaagccgaggagatcgtggagcctcctcaccaggaagtgcaggttcgggaccaaggtgcagcaagcgcagcccaccatgagcagcaaatagctcgagacccagctttcttgtacaaagtggt

SEQ ID NO: 348 - DNA, 1786 bp, Arabidopsis thaliana
acaagtttgtacaaaaaagcaggctcctgcaggaccatgtcttcttgtcttcttcctcagttcaagtgcccacctgattctttctctattcacttccgaacctctttctgtgcccctaaacacaacaagggttcagtcttcttccaaccgcaatgtgcagtatccacttcaccggcgttattaacttctatgcttgatgtcgcaaagcttagactaccctctttcgatactgattcggattcccttatatcagacaggcagtggacttatacaaggcccgatggtccttccactgaggcgaagtatttagaagctttagcctctgagacacttctcacaagcgatgaagcagtagttgtagcagcagcagctgaagcagtcgcccttgcaagagctgctgtcaaagttgccaaagatgcaacattatttaagaacagtaacaacacgaacctattaacttcgtcaacggccgacaaacgctccaagtgggaccagtttactgagaaggaacgtgctggcatattggggcatctagcggtttcggacaatggaattgtgagtgataaaatcactgcatctgcctctaacaaagagtctattggtgatttagaatcagaaaaacaagaagaagttgagcttctggaggagcaaccttcagtgagtttagctgtgagatctacacgtcaaactgaaaggaaagctcggagggcaaaagggttagagaaaactgcatcaggtattccgtctgtgaagactggttcgagccctaaaaagaaacgtcttgttgcgcaggaagttgatcataatgatcctttgcgttatctaagaatgacaacaagcagttccaagcttctcactgtcagagaagaacatgagctgtcggcaggaatacaggaccttctgaagttagaaagacttcaaacagagcttacagagcgtagtggacgtcagccaacctttgcgcagtgggcttctgctgctggagtcgatcagaaatcattaaggcaacgtatacatcatggcacactatgcaaagacaaaatgatcaaaagcaacattcgactcgttatttcgattgcaaagaattatcaaggagctgggatgaacctccaagatcttgtccaggaagggtgcagagggcttgtgaggggagcagagaagtttgatgctacaaagggttttaaattttcgacttacgcgcattggtggatcaagcaagctgtgcggaagtctctctctgatcagtccagaatgataagattgccttttcacatggtggaagcaacatatagggtgaaagaggcacgaaagcaactgtacagtgaaaccggtaagcacccaaagaacgaagaaattgcagaggcaacagggctgtcgatgaagagactcatggcggttctactctctcctaaacctccgaggtcgctagaccagaaaatcggaatgaatcaaaacctcaaaccttcggaagtgatagcagatccagaagcagtaacgtcagaagatatactgataaaggaattcatgaggcaggacttggacaaagtgttggactcgttgggtacaagggagaaacaagtgatacgttggagatttgggatggaggatgggagaatgaagacgttgcaagagataggagagatgatgggagtgagcagggagagagtaagacagatagagtcatctgcattcaggaaactaaagaacaagaagagaaacaaccatttgcagcaatacttggttgcacaatcatagctcgagacccagctttcttgtacaaagtggt

SEQ ID NO: 349 - DNA, 586 bp, Zea mays
acaagtttgtacaaaaaagcaggctcctgcaggaccatggatcgcgagctcagccccaggggcaatgctccagggagagggagcggcggcgcgtcgtcatcgaagcacaagaacggcggcggcggcaagaagccgatcaaggtgctttacatcgccaaccccatgcgcgtccagaccagcgccgagggtttccgcgccctcgtgcaggagctcaccggccaacacgccgatccctccaagtacagccccggcgaccttgactccggcgctgccgcacagggtctgagccccagggccagggtcgcggacgtttcgtcggaaaccatcgtcgcaagccacagccctggcagtaaggccgcgccgcacggaggggactactacgacgtcgaggaagacgaagatgacgtcttcaggtcgcctcacatgctgctggagaacaattatacggtgttctcgccgccgacgctactatatgaccatcacccgcacagcaaggctacttctgaatcggaggctgggttcgcagcggagcatgacaatttctggtccaaatagctcgagacccagctttcttgtacaaagtggt

SEQ ID NO: 350 - DNA, 1330 bp, Arabidopsis thaliana
acaagtttgtacaaaaaagcaggctcctgcaggaccatgttagctctgtctccggcgacaagagatggttgcgacggagcgtcagagtttcttgatacgtcgtgtggattcacgattataaacccggaggaggaggaggagtttccggatttcgctgaccacggtgatcttcttgacatcattgacttcgacgatatattcggtgtggccggagatgtgcttcctgacttggagatcgaccctgagatcttatccggggatttctccaatcacatgaacgcttcttcaacgattactacgacgtcggataagactgatagtcaaggggagactactaagggtagttcggggaaaggtgaagaagtcgtaagcaaaagagacgatgttgcggcggagacggtgacttatgacggtgacagtgaccggaaaaggaagtattcctcttcagcttcttccaagaacaatcggatcagtaacaacgaagggaagagaaaggtgaaggtggattggacaccagagctacacaggagattcgtggaggcagtggaacagttaggagtggacaaagctgttccttctcgaattctggagcttatgggagtccattgtctcactcgtcacaacgttgctagtcacctccaaaaatataggtctcatcggaaacatttgctagctcgtgaggccgaagcggctaattggacacgcaaaaggcatatctatggagtagacaccggtgctaatcttaatggtcggactaaaaatggatggcttgcaccggcacccactctcgggtttccaccaccaccacccgtggctgttgcaccgccacctgtccaccaccatcattttaggcccctgcatgtgtggggacatcccacggttgatcagtccattatgccgcatgtgtggcccaaacacttacctccgccttctaccgccatgcctaatccgccgttttgggtctccgattctccctattggcatccaatgcataacgggacgactccgtatttaccgaccgtagctacgagatttagagcaccgccagttgccggaatcccgcatgctctgccgccgcatcacacgatgtacaaaccaaatcttggatttggtggtgctcgtcctccggtagacttacatccgtcaaaagagagcgtggatgcagccataggagatgtattgacgaggccatggctgccacttccgttgggattaaatccgccggctgttgacggtgttatgacagagcttcaccgtcacggtgtctctgaggttcctccgaccgcgtcttgtgcctagctcgagacccagctttcttgtacaaagtggt

SEQ ID NO: 351 - DNA, 2704 bp, Oryza sativa
acaagtttgtacaaaaaagcaggctcctgcaggaccatgttctcgcgatcctacaccaacctggtcgatctcgccaacggcaacctctccgccctggactatggtggcggagggggagggggcggcggcggcaacggggccgggggccggccgccgcgggcgaggcggatgcagcggacgatgacgacgcccgggacgctggcggagctcgacgaggagcgggccgggagcgtcacctccgacgtgccctcgtcgctcgccagcgaccgcctcatcgtcgtcgccaacaccctccccgtgcgctgcgagcgccgccccgacgggcgcgggtggagcttctgctgggacgaggactccctcctcctccacctccgcgacggcctccccgatgacatggaggtcctctacgtcggctccctccgcgccgacgtgccgtccgccgagcaggacgacgtcgcgcaggcgctcctcgaccggttccgctgcgtcccggctttcctccccaaggacgtcttggacagattctaccatggcttctgcaagcagacgctgtggccgctcttccactacatgctccccttcacctccgaccatggcggccgcttcgatcgctcccagtgggaggcatacgtcctcgccaacaagctcttctcccagcgcgtcatcgaggtcctcaaccccgaggatgactacatctggatccacgattaccacctcctcgccctcccgtccttccttcgccgtcggttcaacaggctccgcatcggtttcttcctgcacagcccgttcccttcgtcggaactctaccgttccctccctgttcgcgacgagatcctcaaatcactgctaaactgcgatctgattgggttccacacctttgattacgcgcggcatttcctgtcctgctgcagccggatgctggggatcgagtaccagtcgaagaggggatatatcggtctcgattactttggccgcactgttgggataaagatcatgcctgttgggattaacatgacgcagctgcagacgcagatccggctgcctgatcttgagtggcgtgtcgccgaactccggaagcagtttgatgggaagactgtcatgctcggtgtggatgatatggacatatttaaggggattaatctgaaagttcttgcgtttgagcagatgctgaggacacaccccaaatggcagcgcaaggcagtgttggtgcagattgcaaacccaaggggtggtggtgggaaggaccttgaagagatacaggctgagattgatgagagttgcaggaggataaatgcacaattttcacggccaggatatgttcctgtggtgattatcaatagagccctttcaagtgtggagaggatggcttattataccgtggcagagtgtgtcgttgtaactgcagtgagggatgggatgaacctcacaccatatgagtatattgtctgtagacagggatttccagatttggatggttctggggatgatgggccaaggagaaagagtatgttagttgtgtccgaattcattggttgctcaccatcacttagtggagcaattcgggtaaacccttggaacattgatacaacagcagaggcaatgaacgagtcgattgctttatcagagaacgagaagcaactgcggcatgagaagcattacagatatgtcagctcacatgatgttgcctattggtccaagagctatattcatgatttggagagaagctgcagggaccattttaggaggaggtgctggggtattggactaggatttggatttagagtagttgctcttgaccgcaacttcaaaaagcttactgtggattctatcgttactgattacaagaattctaagagcagggttatactgctagactacgatggaacgctagtaccacaaactacaatcaacaggactccaaatgaaagtgttgttaaaatcatgaatgctctttgtgacgataagaagaatgttgtttttattgttagtggacgaggaagggatagccttgagaaatggttttccccttgccaggatcttggcattgctgccgaacatggctactttatgaggtggaccagagatgagcaatggcaattgaataaccagtgctcagaatttggatggatgcagatggccaagccagttatgaacctgtatacagaagcaaccgatggatcatatattgaaaccaaagagagtgctttggtctggcaccaccaagatgctgaccctggttttggatcttcacaagctaaagagatgctagatcatttggaaagtgttcttgctaatgagcctgtctgtgtaaagagtggccaacagattgtggaagtgaaaccgcagggtgtcagcaaaggatttgttgctgagaagatcctatcaacgctgacagagaacaagagacaggcagattttgttctctgcataggcgatgatagatcagacgaggatatgtttgaaggaattgctgatatcatgagaaggagcatagttgatccccaaacatcattatatgcgtgcacagtcggccagaagccaagcaaggctaagtactatttggacgatactaatgatgttttgaacatgcttgaggcgcttgcagatgcatcagaggagactgattcacaggaagatgcagaagagataacatctatcccggacccggaatagctcgagacccagctttcttgtacaaagtggt

SEQ ID NO: 352 - DNA, 802 bp, Oryza sativa
acaagtttgtacaaaaaagcaggctcctgcaggaccatggcagccgccaccagcagtgcgctgtcaaagcttgctccactggaggcgatcttgtttgacatcgatggcaccctctgcgactctgatcctatccatttctgcgccttccgcgaactgctgcagcaggttggtttcaacaatggcgtgcccatctccgaggagttctacagcgccaatatcagcggggggcacaacgatgacctcgcaagggccttgttcccggatttggatcatgacaaggcaatgaagttcatggacgacaaggaagcattgtacagaaggttggctccagaacagttggtggcagtagaaggcctgcatgatctgtgcagatggataaaagatcacaagctgaaacgcgccgccgtaacaaatgctccaaggtcaaatgcagagctcatgctgtcactccttgggctcactgaattcttcccggtgctcgtaatcgggagcgagtgtgaccgagccaagccattccctgatccttacctcaaggctcttgagcttattggtgcatcacctgatcacacattcatttttgaggactccgcgtcagggattcgagccggtgtagctgcaaatgttcctgtagttggtctgacaactaggaatccagagaaagttctgcaagatgcaggagcaagcttgctgataaaagatttccaggacccaaagctactgtccatacttgaagagatagaacctacggttgccgccgtcgagcaagtctagctcgagacccagctttcttgtacaaagtggt

SEQ ID NO: 353 - DNA, 1776 bp, Oryza sativa
atgttggagaagaaggcgacgaggagtactagggtggatggggtgagcggcgaggcggtgatcgaggagttcgagcgggtgacgcgcgacgcggccaatgtgcagcgggagacgctgcggcggatcctcgccgagaacggcggcgtcgagtacctccgggggctgggcctcgccggcgccaccgacccggccaccttccgcgcgcgcgtcccgctcgccacccacgccgacctcgagccctacattgaccgcatcgccgacggcgacgcctcccccgtcctcaccgccaagcccgccacctccatctccctcagctccggcacgacgcaggggaagcgcaagtacctgctattcaacgaggagctcgtcaagtccacgatgcagatataccggatctcctacgcgttccggaacagggagtttccggtggagaacgggaaggcgctgcagttcatctacagcagcagggagacgaggacgaagggggggcttacggcgacgacggcgacgacgaacgtgtaccggagcgaggagttcaaggcgacgatgagggacatccagtcgcagtgctgcagccccgacgaggtgatcttcggcccggacttcgcgcagtcgctctactgccacctcctcgccggcctcctcgccgccggcgacgtgcagatcgtgtccgccaccttcgcccacagcgtcgtcctcgcgttccagacgttcgagcgcgcctgggaggacctctgcgccgacatccgccgcggcgaggtgtcgccgtcgcgggtcacctcgccggccgtccgccgcgccatggcggcgctcctcgccgcgcccaacccgggcctcgccgacgaggtcgcccgcaagtgcgccgccctgagcaactggtacggcgtcatcccggcgctgtggcccaacgccaggtacgtgtacggcatcatgacggggtccatggagcactacgtcaagaagctccgccactacgccggcggcctgccgctcgtcgccgccgagtacggcgcctccgaggggtgggtcggcgccaacgtcgagcccgggacgccgccggagcgcgccaccttcaccgtgctccccgacatcgcctacttcgagttcatccccctcaagcccgtcgccggcgacggcggctacgccgaggcggagcccgtcggcctcacggaggtcgccgccggcgagctctacgaggtcgtcatgaccaccttcgcagggctttaccggtatcggctgggggacgtggtgaaggtggcagggttctacaacgcgacgcccaagctcaagttcgtgtgcaggaggaacctgatgctgtcgatcaacatcgacaagaacagcgagcaggacctgcagctggcggtggacgcggcggcgagggcggtgctcgccggcgagaagctggaggtggtggactacaccagccacgccgacgtgtcgtcggacccgggccactacgtcgtcttcctggagctcaacgccgccgaccccgccgccgtcgacggcgacgtgatgcaggcctgctgcgacgagctggacagggcgttcgccgacgccggctacgtcgggtcgaggaagtccggcgccatcgccccgctcgagctccgcgtgctgcagcgtggaaccttccagaaggttctccgccactacctctccctcggcgcccccgtcagccagttcaagtccccccgctgcgtctcccgctccaactccggcgtcctccagatcctcgccggctgcaccgtcaacgtcttcttcagctccgcctacgactag

SEQ ID NO: 354 - DNA, 1836 bp, Oryza sativa
acaagtttgtacaaaaaagcaggctcctgcaggaccccattacaatgacgatctgcagctgtgaggagacgatcaatgagtttgagatgttaacgcgtgatgctgcgcgtgtgcagaaggatacactgaaaaagatccttgagataaatgctagtgctgagtacctgcagaactttgggcttggggggaggactgatgccgagagctacaaatcctgcatcccattgtgtgtgcacaatgatattgagccctatatccagcggattgttgatggcgatacctcaccagtggtcactggagaacccatcaccaacctctctctcagttccggtacaacacacggaaagcccaagttcattccattcaatgatgaattacttgagaccacacttcaaatataccgtacatcttacgcgtttaggaaccgtgaataccctattggccaaggaaaagcactgcagtttgtttatggtagcaagcaagtcataacgaaaggtggcattcttgcaacaactgcgacaacaaacttgtataggagacagcgctataaggaaggcatgaaggatatccagtcgcagtgttgcagtcctgatgaagttatctttggccctgatttccaccaatccttgtactgtcacttgctgtgtgggttaatatactcagaggaggtccattcagtgttctcaacatttgctcacagcctagtccatgcattccaaacattcgaggaggtttgggaagatctatgcactgatataagagacggtgttctctcaaagaaagttacagcaccatcaattcgtgaggctgtttcaaaaatcctgaagcccaatcctgaacttgctgactcaatatacaagaagtgtattggtttgagcaattggtatggagtgatcccagcactgtggccaaatgcaaagtatgtgtatggtatcatgacaggatccatggagccatatctgaaaaaattaaggcattacgcagggaacttgccacttataagtgctgactatggcgcatcggaaggatgggttggctctaacatagaccctactgtgccaccagagcaggtgacatatgctgttctcccacaagttggttattttgagttcattcctttggagaaaccaataggggaggagacagaaaactccgcctccattcattacatagaatcagatccagttggcttgactgaagttgaggtcggcaaaatctatgaagttgtaataactaactttgcaggtctatatcggtacaggctaggagatgtcgtgaagatagcacgcttccacaactccacacctgagctccaattcatctgtcgcagaagcctagtgctgagcatcaacatcgacaagaacaccgagaaagacctccagttggctgttgaggaggcatcaaagttcctggaaggagagaagctcgaagtcatggatttcacgagcttcgtggaacgatcaagcgatccagggcgctacgtgatcttctgggagctgagtggcgatgcgagtgatgaggtcttgagcagctgcgcaaatgccttggatctagccttcattgacgcaggctacacgggctcgaggaagatcaagacgatcggcccccttgagctccggatcctcagaaagggaaccttcaaggagatcctagatcatttcctaagccttggtggtgcggtgagccagttcaagacaccaaggtttgtgaacccatcaaacagcaaggtgttgcagatactgagtagaaatgtcacccaaagttatttcagtactgcctatggattttgatacaaagaaacatagctcgagacccagctttcttgtacaaagtggt

SEQ ID NO: 355 - DNA, 1843 bp, Oryza sativa
acaagtttgtacaaaaaagcaggctcctgcaggaccatggatgatcataacttagactacaagggaagtggtgctcttgaagagcttgagatgttaacagtgaatgccaaagaagcccaagagctcatattgacgaaaatccttgagaggaatcaggctaccgagtacctgagcaaattcatgaatgggtcaacaaatatttctgccttcaagagacatgttcctgtagtaacatatgataaggtacatccatacattctcaggattgcaactggtgaggaatcttcaattttatgtggagaatatatcttggagctgcttagaagctcggggacttctcgaggtgagccaagattgatgccgtccatcttaaaggatcttgaccgtcgaacctacctctatagtctgatcatgcctatcatgaacaagtatatatcaggccttggtgaggggaaagctatgtaccttctctttgtgaaagctgaaacactgacagattctggaattccagttcgatcagtcctcactagctactataagagccctcatttccttcaccgcaaacacgatttatacaacaactataccagtcctgatgaggtcattctttgccctgatagccagcagagcatgtactgccagctgctctgtggcctggtagaacgccagcatgttcttcgtatcggggcagtctttgcctcagcattccttcgatctatcagcttccttgagcagcattggcgtgaccttgtcaatgacatacgaattggtcagctcaactccagtatcaccagtccagcatgccgtttggccatgctgaacttccttgcattgcccaacccagagctagctgatcaggttgaggcaatatgcagctgcggttcatggaaggggattctgggaaggctatggcctaatgttaaatatatcgaagctgttcttacgggcacaatggcacaatatatccccatgctggaattctatggtggtggtgcgattcctttcgtctgcacgatgtatgcttcctcagaaagctatttcggtgtcaatctgagtccactatgtagcccagctgatgtgtcttacaccatcctcccaaacatggcttactttgagttcataccattagaggacggcctcaggttgactgatcacgaggaggtgatagagaatgacaagcttgtcagcctggtagatgtcaaggttggatgttactatgagcttgtagttaccacattttcaggtctttacaggtacagggttggtgatgtgcttcaagtgacaggcttctacaaccgagctccgcagttcaaattcatttgccggagaaatgttatcctcagcatcgattctgacaagaccaacgaggaggatctccacaacagtgtcaccactgctaagaaaatcctggagaaccaaaattacctcctcctggagtacactagctacactgatatttccactgtccctggccactacgtgctgttctgggagatcaagtccacccacgatgaaaggccggcccctcttgacgctcagctcctcgagagctgctgtgctgctgtcgaggagtcactggactacgtctaccgtcgttgcagagcccatgacaggtccatagggcctctggagatacggcttgttgaagctggtgcatttgatgctctgatggatctattggttagccatggcagctccattaaccagtacaagacacccagatgcatcgaatctagccttgcactgaagctgctgaactccaaggtcattgcctgctttttcagtccacaggatcctgaatgcggcatgtagctcgagacccagctttcttgtacaaagtggt

SEQ ID NO: 356 - DNA, 1900 bp, Oryza sativa
acaagtttgtacaaaaaagcaggctcctgcaggaccatgccggaagcaccgaccgccaagacagcaccggcctacggctacgcccccggggcgcacgccgaggcgctcgagttcatcgagcacgtcacggcgaacgccgggcaggtgcagcggcgcgtgctcggcgagatcctggcgcagaacgcgccggccgagtacctgcgccggtacggaatccccgggtcccccgacgttgtcgacgccttccgccgcctcgtcccgctcgtcacatacgagggcctccagccagacatcctccgcatcgccaacggcgacacctcgccgatcttctccgggaagcctatctccgaattcctcacgagctcgggcacgtcgggaggggagaggaagctcatgccgaccatcgccgacgagatgaacaggcggtcgctgctgtacagcctgctgatgccggtgatgagccagtcggtgtccgggctcgacaaaggcaaggcgatgtacctgctcttcgtgaaggcggagtcgcgcacgccgggcgggctcgcggcgcggccggtgctcacaagctactaccggagccggcagttcctcgaccgtccgcgcgacccctacacatcttacacgagccccgacgaggccatcctgtgcgtggactcctaccagagcatgtacgcgcagctgctctgcggcctcgtccaccgcgccgacgtgctgcgcgtgggcgccgtgttcgcctccggcttcctccgcgccatccatttcctcgagaagcactgggcgcgcctctgccacgacatccgcaccggcgagctcgacccggagatcaccgaccgcgtggtgcgcgacgccgtcgggcgggtgctccgcgccgacccggcgctcgccgacgcgatcgaggacgagtgcgctagggcgtcgtgggagggcatcatccggcgcctgtggccacgcaccaagtacatcgacgtgatcgtgaccggcaccatgtcgcagtacatcccgacgctcgagttctacggcggcggcctgccgctgacgtgcaccatgtacgcctcttcggagtgctacttcggcctcaacctgaatcccatgtgcaagcccagcgacgtcgcctacacgctcatccccaccatgtgctactacgagttcctccccgtcaattgcaacaatgccactgccgaggcgagccaccgcgacctcgtcgacctggtcgacgtaaagctcgggcacgagtacgagctcgtggtcaccacgtattccgggttgtatcgttatcgcgtgggcgacgtgctgagggtggcggggttcaagaacaaggccccgatgttcagcttcgtgcggcggcagaacgtggcgctgagcgtcgactcggacaagacggacgagacggagctgcacgcggcggtgagcggcgcggtgcagcacctggcgccgttcggcgcgtcgctggtggagtacacgagctacgcggacgcggccaccatcccgggccactacgtgctgttctgggagctgcgcgccggcagcacggcggtgccggcgtccgtgttcgaggagtgctgcctgtccgtggaggaggcactgaacagcgtctaccggcagggccgcgcgtgcgacaggtccatcggcccgctcgagatacgcgtcgtggcggagggcaccttcgacaagctcatggactacgcgatcagccggggcgcgtccatcaaccagtacaaggcgccgcggtgcgtgcgccctggcccggtcgtcgagctgctcgacgcgagggtgcagggcaagtacttcagtcccaagtgccccaagtggagccccgggaacaagcaatggaacaaaagcaaggatctggtcggcaagggagacgcctagctcgagacccagctttcttgtacaaagtggt

SEQ ID NO: 357 - DNA, 790 bp, Triticum aestivum
acaagtttgtacaaaaaagcaggctcctgcaggaccatggggcgcggcaagatagtgatccggcggatcgacaactccacgagccggcaggtgacgttctcgaagcggcggaacgggatcttcaagaaggccaaggagctgggtattctctgcgatgccgaggtcggtctcgtcatcttctccagcaccggccgcctctatgagtacgccagctccagcatgaagtcagtgatagatcgatatggacgagccaaggaggagcagcaacttgttgcaaaccccaactcggagcttaagttctggcaaagggaggcagcaagcttgagacaacaactgcacaacttgcaagaaaatcatcggcagttgatgggacaagatctttctggaatgggtgtcaaggaactacagactctagaaaatcaactggaaataagcctgcgttgcatccggacaaaaaaggaccaaatcttaattgatgagattcatgaactgaatcacaaggggagtcttgtccaccaagaaaacatggaattatacaaaaagattaacctaattcgtcaagaaaatgctgagttacacaaaaagctctctgagacggaggcagcgactgaagttaaccgagattcaagaaccccatacaattttgcagttgttgaagatgccaatgtttctgttaatcttgaactcaattccccgcagcaacaaaatgatgttcagcatactgcgccccctaaactaggattgcaactacatccatagctcgagacccagctttcttgtacaaagtggt

SEQ ID NO: 358 - DNA, 1357 bp, Synechocystis sp. PCC 6803
acaagtttgtacaaaaaagcaggctcctgcaggaccatgaaacgtgtcttagcgattatcctgggcggtggggccgggacccgcctctatcctttaaccaaactcagagccaaacccgcagttcccttggccggaaagtatcgcctcatcgatattcccgtcagtaattgcatcaactcagaaatcgttaaaatttacgtccttacccagtttaattccgcctcccttaaccgtcacatcagccgggcctataatttttccggcttccaagaaggatttgtggaagtcctcgccgcccaacaaaccaaagataatcctgattggtttcagggcactgctgatgcggtacggcaatacctctggttgtttagggaatgggacgtagatgaatatcttattctgtccggcgaccatctctaccgcatggattacgcccaatttgttaaaagacaccgggaaaccaatgccgacataaccctttccgttgtgcccgtggatgacagaaaggcacccgagctgggcttaatgaaaatcgacgcccagggcagaattactgacttttctgaaaagccccagggggaagccctccgggccatgcaggtggacaccagcgttttgggcctaagtgcggagaaggctaagcttaatccttacattgcctccatgggcatttacgttttcaagaaggaagtattgcacaacctcctggaaaaatatgaaggggcaacggactttggaaaagaaatcattcctgattcagccagtgatcacaatctgcaagcctatctctttgatgactattgggaagacattggtaccattgaagccttctatgaggctaatttagccctgaccaaacaacctagtcccgactttagtttttataacgaaaaagcccccatctataccaggggtcgttatcttccccccaccaaaatgttgaattccaccgtgacggaatccatgatcggggaaggttgcatgattaagcaatgtcgcatccaccactcagttttaggcattcgcagtcgcattgaatctgattgcaccattgaggatactttggtgatgggcaatgatttctacgaatcttcatcagaacgagacaccctcaaagcccggggggaaattgccgctggcataggttccggcaccactatccgccgagccatcatcgacaaaaatgcccgcatcggcaaaaacgtcatgattgtcaacaaggaaaatgtccaggaggctaaccgggaagagttaggtttttacatccgcaatggcatcgtagtagtgattaaaaatgtcacgatcgccgacggcacggtaatctagctcgagacccagctttcttgtacaaagtggt

SEQ ID NO: 359 - DNA, 1460 bp, Oryza sativa
atgaatgtattggcatctaagatcttcccttcccgctccaatgttgccagcgagcaacaacaatcgaagcgcgagaaagcaactattgatgacgctaagaactcgtccaagaacaaaaatcttgaccgcagtgtcgatgagagtgtgcttggaatcattcttggaggtggtgcagggactagattgtatcccctcaccaagaagcgtgccaagcctgccgtgcctctgggtgccaactacaggcttattgatatccctgtcagcaactgtttgaacagcaacatatccaagatctatgtgctgacacaattcaactctgcctctctgaaccgtcacctgtcaagagcctatgggaacaacattggcgggtacaagaatgaagggttcgttgaagtcctcgctgcacagcagagcccagataatcctaactggtttcagggtactgcagatgctgtaagacagtacttatggctatttgaggagcataatgttatggagtttctaattctggctggagatcacctttaccgcatggactatgaaaagttcattcaggcacacagagaaacagattctgatattactgttgctgccctgccaatggatgagaaacgtgcaactgcattcggcctcatgaaaattgacgaggaagggagaatagttgaatttgcagagaaaccaaaaggagaacaattgaaagcaatgatggttgacactaccatacttggccttgacgacgtgagggcaaaagaaatgccttatattgctagcatgggtatctatgtgattagtaaaaatgtaatgcttcagctcctccgtgaacaatttcctggagctaatgactttggaagtgaagtcattccaggtgcaacaaacatcggaatgagggtacaagcttacttgtatgatggttactgggaagacattggtaccattgaggcattctataatgcaaatctgggaataacgaaaaagcctgtaccagatttcagtttctatgaccggtctgctccaatttatacacaacctcgacacttgcctccttcgaaggttcttgatgctgatgtgacagacagtgtcattggtgaaggttgtgttattaaaaactgtaagatacaccattcagtagttggactccggtcctgcatttctgaaggcgcaataatagaggactcattactcatgggagctgactactacgagactgaagcagacaagaaactccttggtgaaaaaggtggcattcccattggtattgggaagaattgccacattagaagggcaatcatcgacaagaatgctcgtattggagataatgtgaagataatcaatgttgacaatgtccaagaagctgcaagagagactgatggatactttatcaaaagtggcattgttaccgtgatcaaggatgctttgctccctagcggaacagttatatgaatagttcgagacccagcttt

SEQ ID NO: 360 - DNA, 1440 bp, Oryza sativa
acaagtttgtacaaaaaagcaggctcctgcaggaccaggagggggaagccatgagggagatcctccacatccagggcgggcagtgcgggaaccagatcggggccaagttctgggaggtgatctgcgacgagcatggcgtggacgcgacggggcggtacgcgggggactccgacctgcagctggagcggatcaacgtctactacaacgaggcgagcggcgggaggtacgtgccccgcgccgtgctcatggacctcgagcccgggaccatggactccgtgcgctccggccccttcggccagatcttccgccccgacaacttcgtcttcgggcagtccggcgccggaaacaactgggccaaggggcactacaccgagggcgccgagctcatcgactccgtcctcgacgtcgtccgcaaggaggccgagaactgcgactgcttacaaggattccaagtttgccattcattgggaggaggcactggatctggcatgggaacccttcttatttctaagattagggaggagtacccggatagaatgatgttgacattttccgtcttcccatcaccaaaggtctcggatactgttgtggagccttacaatgctaccctttctgttcaccaacttgttgagaatgctgatgaatgtatggtgcttgacaatgaagctctctacgacatatgcttccgcacactaaagcttgctacccctacctttggtgacctcaatcatcttatctctgcaaccatgagtggtgttacatgctgcttgaggttccctggtcagctcaactctgatctgcgcaaacttgctgtgaatctcatccctttcccccgtctccacttcttcatggttggctttgcgccattgacttcacgcggatcacagcagtaccgtgctctcaccgttcctgagctgacacagcaaatgtgggatgcgaagaacatgatgtgcgctgctgatccccgccatggccgctacctcacagcttctgccatgttccgtgggaagatgagcaccaaggaggtggacgagcagatgctcaatgttcagaacaagaactcctcatactttgtcgagtggattcccaacaacgtcaaatccagtgtctgtgacattccgcccagggggctgaagatggcggcgaccttcgtcgggaactccacctccatccaagagatgttccgccgggtcagcgagcagttcactgccatgttcaggaggaaggctttcttgcactggtacacaggcgagggaatggacgagatggagttcaccgaggcagagagcaacatgaacgatctcgtcgcggagtaccagcagtaccaggacgccacagccgatgaagagtacgaagacgaagaggaagaagctgaggccgaatagcattgagccccatttgccctttagctcgagacccagctttcttgtacaaagtggt

SEQ ID NO: 361 - DNA, 1420 bp, Oryza sativa
acaagtttgtacaaaaaagcaggctcctgcaggaccatgagagagatcatcagcatccacatcggccaggccgggatccaggtcggcaacgcgtgctgggagctctactgcctcgagcacggcatcgagcccgatggcaccatgcccagtgatacaacggttggcgtcgcacacgatgcgttcaacactttcttcagcgagacgggcgctggcaagcatgtgcccagggccatctttgtcgacctggagcccactgtcatcgacgaggtgcgcactgggtcgtaccgtcagctcttccaccctgagcagctcatctctgggaaggaggatgccgctaacaactttgcccgtggccattacactgttggaaaggagatcgtagatctatgcctggaccgtgtgcgcaagttggcagacaactgcactgggctgcagggattcttggtgttcaatgctgttggtggtggaactggatcaggacttggttctcttctgttggagcgtctctctgttgattatggaaagaagtccaagcttggcttcacaatttacccttccccccaggtctcaacagctgttgtagaaccatacaacagtgtcctctccacccactccttgcttgagcacactgatgtggcagttctcctagacaatgaggctatctatgacatatgccggagatcccttgacatcgagaggccaacctacaccaacttgaacaggctcatctcacagatcatatcttcactcaccacctctctgaggtttgatggcgctatcaatgtggatgtcactgagttccagaccaaccttgtcccataccctcgcatccatttcatgctttcatcctatgcccctgttatctctgctgagaaggcttaccatgagcagctttctgtgcctgaaatcaccaatgctgtttttgagccctcaagcatgatggctaagtgtgaccctaggcacgggaaatacatggcttgctgcttgatgtaccgtggtgatgttgttcccaaggacgtcaatgccgcagttgcaaccatcaagacgaagagaactgtccagtttgttgactggtgccctactggattcaagtgtggcatcaactaccagccaccctctgttgtccctggtggtgacctggctaaggttcagcgtgcagtgtgcatgatcagcaacaacactgctgttgctgaggttttctcgcgcatcgaccacaagttcgacttgatgtatgctaagcgtgcgtttgtgcactggtacgttggtgagggaatggaagaaggtgaattctcagaagcccgtgaggacttggctgcccttgagaaggactatgaggaagtcggcgccgagggtgcagacgacgagaacgacgatggagaagactattagctcgagacccagctttcttgtacaaagtggt

SEQ ID NO: 362 - DNA, 2329 bp, Zea mays
acaagtttgtacaaaaaagcaggctcctgcaggaccatgggctgcgtcagttccaagcaattccacggcggggacgaccatggggacggcaagccgcgccggcggccctcgagcaactcgctgaagcgcctggttagttacagttccagcaagaggcatgaggagttggaggaggaggatgaggtgggggcggctgtggcggccacgtcctcgagcggcggacgccgcgctgggaatgacgccagcacggcgaggctgatccggaagccgccagcactggtggtcgaggctgtgccggcattgtcggaggaggctgccactttggcggttggtgtagttgatgcagaaagggcggttgctgcagcgactgggaatcggaagcggcctcctgcagatgtacatatcaatggcgcggcagagcaaggactgagtagcgttggtgttagaacggagggggaggccaaaccaaggatcagggacgtgcccaatggcgtccagggggagcatgtggtggcagggtggccgagatggctcacagaggtggcggcagaggcggttcgtgggtggcaacctcggagggctgagtctttcgagaagctggacaagataggacaaggtacatatagcagcgtttataaagcacgtgatcttgagaatggaaaaattgtcgctctgaagaaagttcggtttgccaatatggaccctgagagtgtccgatttatggcaagggaaatccacatcttaagaaggcttgatcatccaaatgttatcaaacttgaaggtttggtgacgtcacgcatgtcaagcagcttgtatcttgtatttgaatacatggagcacgaccttgcaggacttgcagctacacctggcttaaaattctcagaacctcaggtcaagtgttacatgcaacagctactttctggacttgatcattgtcacaaccgtggtgttttgcatcgggatataaagggtgcaaatctcctacttgacaacaatggcattcttaaaatagcagattttggtctagctacattctttaatcccaaacaaaaacaacatttgacaagtcgtgtagtaacattgtggtaccggcctcctgagcttttgttgggtgctactaactatggtgctgctgttgatctatggagtgccggttgcattcttgctgagttgctatcagggaagcctatcatgccaggacgaactgaggtggaacagttgcacaaaatttttaagctctgcggttcaccatcagaggagttttgggctaatttgaagttatcccgagctaccatattcaagcctcagcatccgtaccgccgatgtgtgaatgatgtatataaggactttcctactactgctttaacacttttggaccatctacttgccgtagaacctgggaataggggtaccgctgcatctgcccttgacagtgaattttttacaacaaagccatatgcctgcgatccatcaagtctacccaagtatcccccaagcaaggaatatgatgctaagcttcgagatgaagaagctaggaggcaaagagcagctgctaaaggacaggaagctgaagctggacggaggaagcaacctcctgcacctgatggtaatagtggattgcagcaccgccgagttcagatgaatcctaaaagcagcagttacaagttcactccaaaggaggatgctgtttctggatttccaattgatccgccagcaagagctgctgcagacaatggttaccctcagcgcgttcctctgatgcaagctggccgttcttcctccactctgggtagatcaagtgggatggatccaaaggcccaaagattccacacctcccaaattgtcactactgagatgtccggccaatctactgcatctgggcagcgaggcaatgctcctaagatgtctaacctcggggaaagtgccaggagacaatatcttcgagagcatcggtccagttcaagatacagtcaactcactgctgcggacccttctgacaggcctgaatggaaccatcaattccaagagcggccatcgtcttcccatcggaaggatgatgctgtggcaaacaaggagcatacggtggtgaacgggacaaagaagaacagaatccactattcggggccattgatgcctcctggagtgaacatggatgagattcttagagagcacgagcgacagatccaacaagcagtgcgaagagcgcgccttgacaagggaaagggaaagcacagcggtgagagagaccagtcggagtcactgctgtgtaccaccgggaatctcagggctgatcgctagctcgagacccagctttcttgtacaaagtggt

SEQ ID NO: 363 - DNA, 1384 bp, Oryza sativa
acaagtttgtacaaaaaagcaggctcctgcaggaccatggagatgaagctgaccatcaagcgggtgcccaccgtggtttccaactaccaggaggatgctgccgccaccgccggcgaacgcccccgcgccggctgcgggagggattgcctcggggattgctgcttgcccgattccaagcttccgctgtatgctttcaaggcgagtccgaaaaagccgtcttcgcaggaggatgcttccaacgatgagttctttgtcaatctcctgctcggcctgtgggaagacaggatggcccgaggtttgttccgatatgatgtcactgcctgtgagaccaaggttatcccaggcaaccttgggtttgttgcacaactgaatgaaggacgccacctcaagaagcgccctactgaattccgcgtggaccgtgtgcttcaaccatttgatgctgccaagttcaacttcaccaaagttggccaggaggaggtgctcttccaatttgagaatggtggtggtgatgacagcttctttgtggagagctccccaatcagtgttgctgatcgtgctcctaatgttgttgcaatcaatgtaagcccaattgaatatggccatgttcttctcattccccgtgtactggaccgcctgcctcagaggattgaccaggagagcttcttgcttgcactgcacatggctgctgaagccgcaagcccatacttcaggcttggctataatagtttgggtgcctttgcaaccatcaaccacctccactttcaggcatactacttgacagtgcctttccctgttgagaaggcagctaccaagaggattttccttgctgagggcacaatgaatagtggagtaaaggtgtccaagctgatgaactaccctgtgaggggactggtttttgagggaggcaactcactgagcgatctggccaatgtggtttccagcgcttgtatctggctgcaggacaacaatgtgccttacaatgttcttatctctgactgcggcaaaaagatcttcctcttccctcagtgctatgccgagaagcaggctctgggagaagtgagccaggagctactggacacgcaggttaacccagctgtgtgggagatcagtggccacatcgtgctgaaacgaaggagtgattacgaggaggcatcagaagcttctgcgtggagactcctcgctgaggtttccctgtcggaggaacgcttcgaggaagtgaaggcctacatctttgatgccgctggtctggttcagtccgacgaggaggaagtcagcgaagacgaggacgccacctacacgcctgtctccattgcccctcctgctgtcgcggaaggctgcctcgtccttcagtagctcgagacccagctttcttgtacaaagtggt

SEQ ID NO: 364 - DNA, 1066 bp, Zea mays
acaagtttgtacaaaaaagcaggctcctgcaggaccatggcgaaggaaccgatgcgcgtgctcgtcactggcgccgcagggcaaattggatatgctcttgttcccatgattgctaggggagttatgcttggtgcagaccagcctgttattctgcacatgcttgatattccgccagcagctgaagcccttaatggtgttaagatggagttggttgatgctgcatttcctcttctgaagggagtcgttgcgacaactgatgttgtggaagcgtgcactggcgtgaatgtggccgtcatggttggtggattccccaggaaggagggaatggaaaggaaagatgttatgtctaaaaatgtttcaatctacaaaacccaagcatctgctcttgaagcccatgcggcccccaactgcaaggttctggtggttgccaacccagcgaacaccaatgctcttatcttgaaagaatttgctccatcaattcctgataggaacgttacttgcctgacccggctggaccacaacagggctcttggccagatttctgagagacttagtgtccaagtcagtgatgtgaagaatgttatcatctggggtaaccactcgtccactcagtaccctgatgttaaccatgccacagtgaagacttccactggggagaagcctgttcgtgagcttgttgctgatgatgagtggctcaatggcgaattcatcacaactgtccaacagcgtggtgctgcaatcatcaaagcgagaaagttctccagcgctctctcagctgctagctctgcttgtgaccatattcgtgattgggttcttggaacccctgaggggacatttgtttccatgggtgtgtattccgatggttcatatggtgttccttccggacttatttactcattcccagtaacatgcagtggtggtgaatggaaaatcgttcaaggcctcccgatcgacgagctctcaaggaagaagatggatgccactgcccaagagctgtcggaagagaagtcgcttgcttactcatgcctcgagtagctcgagacccagctttcttgtacaaagtggt

SEQ ID NO: 365 - DNA, 1453 bp, Oryza sativa
acaagtttgtacaaaaaagcaggctcctgcaggaccatggagaaggcgatcaacaggcagagggtgcttctcgcccacctggagcccgccgcgagtcccgccgccgccgcgccggccatcaccgcgagcgcgtgcgccgcgggggacagcgccgcgtaccaccgcggggcgtgcttcgcagacgacgtcgtcatcgtcgctgcctataggacagcaatttgcaagtccaagagaggtggtttcaaggatactcccgcagaggacctcttggttccagtattcaaggctttgatagataaaacgaagttgaacccaagtgaagttggtgatattgttgttggtactgttttagctcctgggtcccaaagggcaattgaatgcagaatggctgcattttatgctggattccctgataccgttcctcttatgactgtaaacaggcaatgttcgtctgggcttcaagcagttgcaaatgttgcttctaacattaaagcaggactttatgacattggtattgctgctggcctagagtccatgacagtgaaccaagttcgccttgatgggcaagtgaaccccaaagttgagctgttttctcaagcacgcgattgccttctcccaatgggcctcacgtccgagaatgttgcaaaacgatttggcataacacgaatggagcaagaccaggctgctgttgagtcccacaggaaggctgcggctgcagctgcttctggtaaattcaaggaagaaattgttccagttcacacgaagattgtggatccaaaaactggtgaggaaaaggagatagtggtctcggcagatgatggaatccgaccaggcacttcattggcagtcctgtcaaaactcaaaccagcattctctaaagatggcaccactactgctggaaacgctagccaagtaagcgatggtgctggagcagtcttactaatgagacgtgacattgctatgcaaaagggtcttccaatagttggcgtcttcaggagctttgcagcagttggagttgatccagctataatgggtgttggtcctgctgttgccatccctgcggcagtgaaagctgctggtcttcaaatagatgatgttgaccttttcgagattaatgaggcctttgcatcacagtacgtatactgctgcaagaagttgggacttgatcctgcaaaagttaacgttaacggaggtgcaatggctcttgggcatccattgggtgctacaggtgcacggtctgtcagtacccttctcaacgaaatgaagcgacggggcaaagactgtcgatttggtgtgatttccatgtgcataggttctggcatgggggctgctgctgtctttgagcgtggggatgcagtggatgagctcactaatgctcggtgcatcccgacccataaccggctttcgaaggacgccatgtagctcgagacccagctttcttgtacaaagtggt

SEQ ID NO: 366 - DNA, 757 bp, Zea mays
acaagtttgtacaaaaaagcaggctcctgcaggaccatggcggtttctttcgcaaacctcaacaccgaggcagggcttaaaaagcttgatgagtaccttctcactcgcagctacatcactggctaccaagcttccaaggatgacttggctgtctacacttcgttttcgtctgctccctcgtccaagtatatcaacgtagcaaggtggtttaatcacattgatgcgctcgtgaggctgagcggaattactgcagagggccaaggtgtgaaggttgaatcctcagcagttccttcagccccaactccagatgttgctgaagcacaggccccagctgctgaggaggaggacgatgatgatgttgacctttttggtgaggagaccgaagatgagaagaaggctgctgaagagcgtgctgcagctgccaaggcttctggcaagaagaaagaatctgggaagtcatcagttttacttgatgtgaagccatgggacgatgagactgacatggccaagcttgaggaagctgttaggagtgtccagatggaagggctgctctggggcgcatccaagcttgtcccagtcggatatggtatcaagaagctgcaaatcatgatgaccatagtcgacgatcttgtctctgtcgacactctcattgaggactatctgtgcgctgagccagttaacgagtacgtccagagctgcgacatcgttgccttcaacaagatctagctcgagacccagctttcttgtacaaagtggt

SEQ ID NO: 367 - DNA, 1103 bp, Zea mays
gcagtcgctgtcgttaccatgtcggcctactgcggaaagtacaaggatgagctcatcaagaatgctgcctacattggcacccctggcaagggtatccttgctgctgatgagtccactggcaccattggcaagcgcctttccagcatcaatgtcgagaacgttgaggagaaccgccgtgccctccgtgagctcctattctgctgccctggtgctctccagtacatcagcggtgtgatcctcttcgaggagaccctgtaccagaagaccaaggatggcaagccttttgttgatgtcctcaaggagggaggcgtcctccctggcatcaaggttgacaagggcaccattgaggttgttggcactgataaggagaccaccacccaaggccatgacgaccttggcaagcgctgcgccaagtactacgaggccggtgcccgctttgccaagtggcgcgctgttctcaagattggccccaatgagccatcacagcttgccatcgacctgaacgctcagggtctggctcgctatgccatcatctgccaggagaatggtctggtgccaattgttgagcctgagatccttgttgatggccctcatgacattgatcgctgcgcttacgtcactgagaccgtccttgctgcctgctacaaggcgctcaacgagcaccatgtcctcctggagggtaccctcctgaagcccaacatggtgactccaggctccgactccaagaaggtgactcctgaggtgattgctgagtacaccgtccgtaccctccagaggaccgtccctgctgctgtgcctgctgttgtcttcctctctggtggacagagcgaggaggaggccacccgcaacctcaatgccatgaacaagctcagcaccaagaagccgtggtccctgtctttctccttcggccgtgccctccaggcgagcaccctcaaggcctgggctggcaaggtggagaacttggagaaggctagagctgccttcctcgccaggtgcaaggccaactctgaggctaccctcggcacctacaagggtgatgctgccgccgacaccgagagcctccacgtcaaggactacaagtactagaacccagcggtactcgc

SEQ ID NO: 368 - DNA, 691 bp, Zea mays
acaagtttgtacaaaaaagcaggctcctgcaggaccatggtgtcgctgaaggtgccaaagcgcctcgccgcaagcgttctcaagtgtgggaaaggcaaagtgtggcttgaccccaatgaagttagtgagatctccatggcgaactcccgccataacatccggaagttggttaaggatgggtttatcatcaagaagcctcagaaaatccactctagatctcgtgcaagaagggcgcacgaggctaagcagaagggacggcactcaggatatgggaagcgtagaggtaccagggaggctaggctccccaccaaggtactgtggatgaggaggatgcgcgtgctgaggcgcctgctccgcaagtaccgcgaggccaagaagatcgacaagcacatgtaccacgatatgtacatgaaggtcaaaggtaactcgttcaagaacaagagggtgcttatggagagcatccacaagtccaaggctgagaaggccagggagaagacgctctccgatcagttcgaggccaggcgcgccaagagcaaggcgagtcgcgagaggaagaatgctaggagggaagagaggctggcccagggcccaagagaaataccaccaccagtctcagccacagctcccactaccggggcaccgaagaaagcaaagaagtagctcgagacccagctttcttgtacaaagtggt

SEQ ID NO: 369 - DNA, 1676 bp, Zea mays
acaagtttgtacaaaaaagcaggctcctgcaggacccgcagccatgaacggtgacggcagcaaggaggacgccaacaggcgcctcgagtgggccaccttgaacctggagcgcggcgtcgtcgtgagcgagacgacgaagggcgacggcaatggcaatgcaggccggaaggcgccgataagcatcgtccggctcttcttggcctgcatggtctccggcggcatccagtacggctgggcgctgcagctctccctcctctcgccctactctcagactcttgggatctcgcacagctacgtgtctctgacatggatctgcgggcctatcgccggatttgtggtgcaacccatcgtgggctactacagcgaccggtgcacctcgaagatgggccggaggaggcccttcatcctcgcgggatgcatcatcatctgcctctctgtgttggtgatcgggttctcggcggacatcgggcggcgcctcggcgacaccaaggagcactgcagcacgttcaccggctcccgctggtccgccgccgccgtctacattgtcggattttggttccttgacttcgccaacaacacggtacagggaccggctcgcgcgatgatggccgacctggcagctggacagcacggccccaacgttggccaggcgatcttctccctgtggatggccctcggcagcgtgctcggatacttgtccggcgccaacgcgaaatggcacgactggctcccttggctcaaaaccgcggcgtgctgcgatgcgtgcgccaacctcaagggcgccttcttgactgcggtggtcctcattataatcagcatgtctgtcaccttgtggctcgccggcgaggagcggctcgacaaggaaagcgtcgacacctccggcggcgcgtgctccgcgttcatggatctcttcaagaccctcaagaagcttccgcctgccatgttcagcgtgctcgccgtcacggccgtcacatggctctcgtggttccccttcttccagtacaacaccgactggatgggccgggagatcttccacggcgagccgcagggcgcgggcggaaaggcggacctgtacgaagccggcgtccgcgagggcgccatcggcctcctattctgctccgtcgcgctcggtgtcacctccttcttcatccccaggctgtgccggaagctcacgtcccgggtcgtctggtccgtcagcagcctgatggtgttcgtcctcatgacggccatggtcgtcctcggcatggtctccatgaagggctacaggccctcgctcgccgcctccctctctggccccgaccactcgttcaagggcggcgccctcgccatcttcgcgctcatcggcatccctcaggccgtgctctacagcgtgccttgggccgtggcgtctgaggttgccaccgaggacggcggtggtcaaggtctcaccattggcgtcctcaacattgcaatcgtccttccacagctggtgatcgcgctgggcgcaggccccatcgacggcgccttcaacaaaggaaacaccccggccttcggcatcggcgccgccttcgcccttatctgcgcggtcctggcgctcatcctcctcccaaagacgagaggcgtctccaacgccaccgtcatggccggcgggcactgatctatttagctcgagacccagctttcttgtacaaagtggt

SEQ ID NO: 370 - DNA, 730 bp, Zea mays
acaagtttgtacaaaaaagcaggctcctgcaggaccatggggagaaggcctgcgagatgctatcgccagatcaagaacaagccataccccaagtccaggtactgccgtggtgtccctgaccccaagatcaggatctacgatgttggcatgaagagaaagggtgttgatgagttcccctactgtgtgcaccttgtctcttgggagaaggagaatgtctccagtgaggctcttgaggctgcccgtattgcctgcaacaagtacatgaccaagtctgcaggaaaggatgccttccaccttcgggtccgggttcaccccttccatgtccttcgtatcaacaagatgctttcgtgtgctggggctgataggctccagactggaatgaggggtgcctttggcaagcctcagggcacctgtgctagggtggacattggtcaggtcctcctttctgttcgatgcaaggacaacaatgctgcacatgccagtgaagctctgcgtcgcgccaagttcaagttccctggccgccaaaagattattgagagcagaaagtggggcttcaccaagttcagccgtgccgactacctgaagtacaagagtgagggtagaattgttcctgatggtgtcaacgcaaagctgctcggtaaccatggaagacttgagaagcgtgctcctgggaaggctttcctcgaggccgttgcttagctcgagacccagctttcttgtacaaagtggt

SEQ ID NO: 371 - DNA, 547 bp, Zea mays
acaagtttgtacaaaaaagcaggctcctgcaggaccatggcggaacagactgagaaggctttcctcaagcagcctaaggtgttcctcagctcaaagaaatctggcaagggtaagaagccaggcaagggtggcaatcgattttggaagagcattggccttggtttcaagactcccagggaagcaattgaagggacctacattgacaagaaatgtccattcactggaaccgtttctatcagaggcagaattattgctggaacatgccacagtgctaagatgaacagaaccatcattgttcgcaggaactatctccactttgttaagaaataccagaggtatgaaaagaggcactccaacattccagctcacatctccccatgcttccgtgtgaaggaaggcgaccatgtcatcattggccagtgcaggcccctatcaaaaactgtgaggttcaatgtcgtcaaagtcattccagctggatctgctgctgccggcaagaaggctttcaccgcagcctagctcgagacccagctttcttgtacaaagtggt

SEQ ID NO: 372 - DNA, 490 bp, Zea mays
acaagtttgtacaaaaaagcaggctcctgcaggaccatggctgaacaggaggccccagtcgtggttgaggcaccaaccccagttcttggggagcctatggacttgatgactgctctgcagctcgtgatgaagaagtcaagtgctcatgatggacttgtgaagggtctccgtgaggctgccaaggccatcgagaagcacgccgctcagctttgcgtgcttgctgaggactgtgaccagccagattatgtcaagctggtgaaggcactctgcgcggagcacaatgttcacctggtcactgttcctgccgctaagacccttggcgagtgggctgggctttgcaagattgactctgagggcaaggcaaggaaggttgtaggctgctcctgtgtcgtcgtcaaggactacggtgaagaatctgagggccttaacatagtgcaggagtatgtcaagtcgcactagctcgagacccagctttcttgtacaaagtggt

SEQ ID NO: 373 - DNA, 1279 bp, Oryza sativa
acaagtttgtacaaaaaagcaggctcctgcaggaccatggccgacccttccagatcctcccccaccgcggccgccgccggcgacgccctcctggcggcggcggcggcgcccggtgacgcgccggacgcgaccgccctcgccgtggcggccgatgcggacgcggagttcgggttccagcgcgcggagctcgggacggagaagctggccggcacggtgcagttccacgagcgccacgtcttcctctgctacaaggggcccgaggtgtggccgtcccacgtcgaggccgcggagtctgaccgcctcccccgcctcctcgccgccgccatcaagacccacaagtcggacttgaagaagaaaaccaaattgaccatttgtgaaggagaagatggcactgagtcatccaatggagacgtgttgatctttccagatatgatcagatacagagggctgacccactttgatgttgacaactttgttcaagaagtgcttgtgaaagatactgaatggcttcctggatctcctgaggctataaaaggttcctatgtttttgtttgctgccatgcaagcagggataagaggtgtggtgtctgtggacctgctttgattaagaggttcaaggaagagataggtgtacaaggccttgctgatcaggtgtcagtcagtgcatgctcacatgtgggaggccataagtatgcaggaaatgtcattgttttcagtgcagatgccaagggagaagtgactggtcattggtatggttatgtttctcctgatgatgtgcctgtcttgctacataaacatattggacaaggagagatcgtggaccatctatggaggggtcagatgggtttgtctgaagaagagcagaggaaagccctggagtctaaacacgtgacaaatggtgtgaccgaggatggtgcccatgaatcccctgaagaaactaccaacggttctgcttgcaaccctgtcgctgcaggtggttgctgccagggcaatggaggctttacctgctgccagagtgatctgccaaaggaggataagagcatcacagctgagcagaaccagaagagctccgagaagggggctgacaaagagtgtgctgctggcagcaagaagaggcacatgaagatgtgttccatgccaacctggtttgagacatgggaaacggctgacacctatgctgctcttggtattgttgcagctgctgcatcggtgttcgtcgctttcaggatctacaagaacctcaattagctcgagacccagctttcttgtacaaagtggt

SEQ ID NO: 374 - DNA, 518 bp, Zea mays
acaagtttgtacaaaaaagcaggctcctgcaggaccatgtcgaggaggaagaccagggagccaaaggaggagaacgtcacccttggacccactgtccgtgaaggagagtatgtctttggtgttgctcacatctttgcatccttcaatgacactttcattcatatcaccgatttgtctgggagggaaactctggttcggatcaccggtggcatgaaggtgaaggctgaccgtgacgagtcgtcaccttacgctgctatgcttgctgctcaagacgtcgcacagcgctgcaaggagcttggcattactgcactgcacattaagcttcgtgccaccggaggcaacaagaccaagacccccggacctggtgcccagtctgccctcagggcgcttgctcgttctgggatgaaaatcggacgcattgaggatgttaccccggtccccacggacagcactcgcagaaagggcggtaggaggggaaggaggctgtagctcgagaccagctttctgtacaaagtggt

SEQ ID NO: 375 - DNA, 1033 bp, Zea mays
acaagtttgtacaaaaaagcaggctcctgcaggaccatgtttttgaaagcctgtttgtattcgcgtcgtagttggggctatttatgcagactatccgatttaagtagattcaagtggcattattctctcggacgcgtgggcgccgccgacgtccaccttggcaccaagaactgcgatttccagatggagcgctatgcctttaagcgccgcaccgacggcatctacatcatcaaccttggcaagacatgggagaaactgcagcttgcagcgagggttatcgttgccatcgagaacccgcaggacatcatcgtccagtccgcccgcccctatggccagcgtgctgtcctcaagttcgctcagtacactggcgctcatgccatcgctgggaggcacacccctggtaccttcactaaccagctccagacctccttcagcgagcctcggctgctcatccttaccgacccaaggactgaccatcagccaattaaggagtctgctctggggaacatccccaccattgccttctgtgatactgactctcccatgcggtatgtcgatatcggcatcccagcgaacaacaaggggaggaacagcattggatgcctgttctggcttttggccaggatggttctgcagatgaggggcactatcctccctgggcacaagtgggaggtcatggtggatttgttcttctacagggacccagaggaagcaaaggagcaggaggaggaagctgctgttgcccctgagtttgccgcaatcactgattaccaaggagctgatcagtggggtggtgaccagtggacctctgatgtgactgcgccgcctgttgctcctactggtgctgattggggtgctgctccagctccggttcctactggtgatggctgggatcaagctggggcccctgcacctgtggtggacggcactgtacctcctgtggttgctcctactggttgggaccaagcagccccgccaccgactgcccaaggctgggagtagctcgagacccagctttcttgtacaaagtggt

SEQ ID NO: 376 - DNA, 988 bp, Zea mays
acaagtttgtacaaaaaagcaggctcctgcaggaccatggccagcctccaagtcactcctacttcggcgttcactcagtggaatgagctgaagttcgaaggcctgtacttgttccacaagtaccagggctcaggcgccaaccaaactcaggtcataagcaacaaggcgccgattggcatcggtgccaccgtagttaacaactggacagtgtgtgacgggccagggccgaacgcaaagctcgttgcccgtgcacagggcttgcatatccaagccggcaactgggtcaactccttcagcctagtgttcgtggatcaaaggttcagtgggtccacgcttgaagtgaccgggatagtagttgaatccggggagtgggctattgttgggggcaccggtcagtttgccatggcaaacggtgtcatctccaagaagttacatgggaagaccagcgaaggggacatcatacaactcaccatccatgctttctgtccggtgctcggaccgacaaagcgctcggccacaaaagttggaccgtggggtgggagcggcgggtctccgatggacatcacggcagagccccagcgtctgaagagcatcaccgttgctactggcatcgccgtgacctcgattgccttctcctacgtcgactccgccggccaaacccaatctgctggtcgctggggcggttccggtggagaaactgagccggtgatccagctcggcgactccgaggtgctcacggagctgtccgggacgatcggcaacgtcgacggcctcaccgtcataacctccatcaagttcgtcacaagcctcaagacctacgggcctttcggagcatggggggacgggagtgacactccattcgcgatccccgtgcagcaagggagtgccatcgtcggcttcttcgcacgagctgggatctacctcgacgcccttggcgtttacgtgcgatccctgtagctcgagacccagctttcttgtacaaagtggt

SEQ ID NO: 377 - DNA, 1639 bp, Oryza sativa
acaagtttgtacaaaaaagcaggctcctgcaggaccatgctgatgatgctaggggcggcctcccagtggatcctggccgccgccgcggcggcggccgtggcggcgctgctgtggctggccgtgtcgacgctggagtgggcctggtggacgccgcggcggctggagcgcgccctccgggcgcagggcatccggggcaaccggtaccgcctcttcaccggcgacgtgccggagaacgtccggctcaaccgggaggcccggaagaagccgctgccgctcggctgccacgacatcatcccgcgcgtgctgccgatgttcagcaaagccgttgaggagcacgggaaaccatcattcacttggtttggcccaacgccaagagtgatgatttcagaccctgaatcaataagggaagttatgtctaataagtttggccactatggcaaaccaaagcctacccgtctcggaaagttgctagcctccggagttgtaagctatgaaggcgagaaatgggcaaagcaccggagaattctgaatcctgcctttcaccacgagaaaataaagcggatgctgccagttttttctaactgctgcacggaaatggttacaagatgggagaattcaatgtctattgaaggaatgtcagaggtagatgtttggcctgagttccaaaatcttacaggagatgtcatatcaaagacagcattcggtagcagctatgaggaaggaaggagaatttttcagctgcaagcagagtcagccgaacgcataatacaagcctttcggacaatttttataccaggatattggttcttaccaactaaaaacaacagaaggttgagagaaattgaaagagaggtcagcaaacttctacgaggaataattggaaagagagagcgggctattaaaaatggtgaaaccagtaatggtgacttgttgggcttattggtggagtcaaatatgagggagtcaaatgggaaagcagaactaggaatgactacggacgaaattattgaggaatgcaagctattttattttgcaggaatggagacaacatcagtattgctcacttggacattaattgtgctaagtatgcacccagagtggcaagagcgagcaagagaagaagtgctacaccactttggaagaaccacaccagactatgatagcttaagtcgtctgaagattgtaacaatgattctgtacgaggttcttaggttgtatccgccagtggtgttcttgaccagacgaacatacaaggaaatggagctcggcggcatcaaatatcccgctgaagtgacccttatgttgcccattttatttattcaccatgatcccgatatttggggaaaagatgcaggtgaattcaatccagggaggtttgctgatggcatctccaacgcaacgaagtatcagacctctttctttccatttggatggggtccccgaatctgcatcggccagaactttgcactattggaagccaagatggctatctgtacaatccttcagcggttctcctttgagctttcaccatcgtacatccacgcaccattcactgtgataactctccacccacagcatggtgcacaaattaagctgaagaaaatctagctcgagacccagctttcttgtacaaagtggt

SEQ ID NO: 378 - DNA, 1177 bp, Zea mays
acaagtttgtacaaaaaagcaggctcctgcaggaccatggatatgggcagcggctcgtcacctgtcatcaccgatccgatatcgataagcccaccgctgctgggaggcttgacgtcgaacctgatgccgttctcggtcatgtccggaggctgctcctccagtcctagcatgagcaacagcagcaggcgtaaaatcgaggaggtccttgtcaatggcctgctagacgcgatgaaatcgtcgtcgcctcgcaagaagcacaacctcgccttcggacaggataattcgcccgacgaagatcctgcttacactgcatggctgtcaaaatgcccttctgcgctggcctccttcaagcacatagtagccaacgcaaaaggcaggaggatcgctgtgttcttggattacgacggcaccctgtcgccgatcgtcgacgatcccgacaaagcgttcatgtcccctgtgatgagagctgctgttagaaatgtcgcgaagtacttccctaccgcgattgtcagcggaaggtcccgtaagaaggtgtttgaatttgtaaaactgacggaactgtactacgctggtagtcacgggatggacatagtgacatctgcagcagcacatgctactgaaaagtgcaaagaagccaatctcttccaacctgcttgcgagtttctccctatgattaatgaggtttccaagtgcctcgtggaggtcacgagttcaattgaaggtgcaagagttgagaacaacaagttctgtgtatctgtacattaccgcaacgtagcagagaaggactggaaagtggtcgcagggctcgtgaaacaagtcttggaggccttccctcgtctcaaagtaaccaacgggcgaatggttttagaggttcgcccggtgatcgactgggacaagggaaaggctgtcgagttcctgcttcggtcgctcggcctaagcgactccgaagatgtggttcctatctacatcggagacgatcgaacagacgaagacgccttcaaggtactgcgagagcgaagctgtggatacggaatcctagtctcccaggtgcccaaggacactgaagccttctactcgctgagagacccgtctgaagtgatggggttcctcaattccttggtgagatggaagaagcacccgctgtagctcgagacccagctttcttgtacaaagtggt

SEQ ID NO: 379 - DNA, 995 bp, Glycine max
acaagtttgtacaaaaaagcaggctcctgcaggacctgtttcttctcagatcttcttccatggaacagtacgagaaggtggagaagataggcgagggaacatacggcgtcgtttacaaggctcgcgaccgcgtcaccaatgagaccatcgctctcaagaagattcgcctcgagcgggaggacgaaggcgttcccagcaccgccattcgcgagatttctctcctcaaagagatgcagcataggaacattgttaggttgcaggatgtagtacacagtgagaagcgattgtatctggtttttgagtatctggacttggatctaaagaaacatatggattcatctccagagtttgtgaaagatccacggcaagtaaagatgttcctttatcaaattctctgtggcattgcttactgtcattcacatagagttcttcatcgagacttgaaaccacagaatttgttgatagatcgccgtactaattcactaaagcttgcagattttggattggctagggcatttggcattcctgtcaggacatttacacatgaggtggtgacattatggtacagagctccagaaatattgcttggatctcgtcattattctacgccagttgatgtttggtcagtgggatgtatatttgcagagatggtaaaccgacgacctctattccctggggactctgagattgatgaattatttaaaatattcagaatcttgggtaccccaaatgaagacacatggcctggtgtaacttcattgcctgattttaaatcaacatttcccaaatggccatccaaggacttggcaaatgtggttccaaatcttgatgcagctggtcttaatcttctttctagtatgctttgcttggatcccagcaaaagaatcaccgccaggagcgctgtggagcatgaatacttcaaagacattaaatttgttccctgattccatatcttgatggctagctcgagacccagctttcttgtacaaagtggt

SEQ ID NO: 380 - DNA, 1393 bp, Zea mays
acaagtttgtacaaaaaagcaggctcctgcaggaccggaggtgcttggggacccgcccccatggcgagcgccggcaacagcggcagcggggacgacgatgcaggagggaagctcctggcggatcgctaccagaagggcgaggtcctcggcgagggcacgtatggagtcgtcttcaaggccatcgacaccaagactggaaatacagtcgcggtaaagcgaatccggataggaaaggacaagaaggaaggtgtcaacttcactgcgttgagggaaattaaactacttaaggagctgaaagatcctaatattatagagctgattgattgtttcccttacaaggaaaatttgcaccttgtgtttgagtttatggagaccgatctggaagctctcataaaagataagaacataatactctctccagctgacacaaaatcatatgtccagatgatgttaaaaggtctagcgttctgccataagaaatgggtgctacacagggatatgaaaccaaataatttactcattggtgccgatgggcagctcaagcttgctgacttcggtctggcccgtgtgttcgggagtccaggaaggaacttcactcaccaggtctttgcacgttggtaccgggcaccagaattattatttggctcgaagcagtacggatctggggtggatatttgggccgctggatgtatttttgctgaactgcttactcgcagagcctttctccagggttctagtgacattgatcaacttgggaagattttcgcagcacttgggaccccaaaatcttctcaatggcctgacatggtttatcttcctgattatgttgaataccaatatgttgctgcacctccactacgtacgttgtttccaatggccagcgatgatgctttggatcttctgtcaaaaatgcttacctatgatccaaaagcaagaatcagtgctcagcaggctctagaacacaggtacttttcatcgttacctgcaccaacaagaccatcgcagcttccaaggccacgtcggaaaggagatcaagggaataacaagattcctgatctcaacctgcaggatggccctatggtgctctccccgccaagaaagttacgtagggtgacagcgcatgaagggatggaaggtatgcacaggacagataaagtggacgaacatccttctgggatgaggcacaccgatgacatgcccagtcagagttctagaattccaatgtcagttgatgttggggctgtgtttggcacacgacctgcacctaggccaacattgaacagtgcggacaagtctcgtttaaaacggaaacttgatatggatccagagtttggatacgcggagtagaaggaacacatgtagctcgagacccagctttcttgtacaaagtggt

SEQ ID NO: 381 - DNA, 640 bp, Zea mays
acaagtttgtacaaaaaagcaggctcctgcaggaccatgctgccaagaaggcagagcatcttccacctcggggaggagggtggcgccgccgccgtgcaccaccgcgtcagcgtcgtcggagcggcgtcttcgtccatggccatgggcggcggccggcgtgctcgcgagcgtgagcgcctcgtcgtggggctccagatcctggtgcaccaccaccaccacggccggcacgggcacgggcacgcgcacgcggcgaacgtagtcctgaagcagatggtgaggccgcgcgccgccgtcgccgccgccgctggttcgcgccacggccacggcagccacgccttctcgtgcagtttcctcaaggcctgctacctctgcaagcgggagcttagccctgacaaggacgtctatatgtatagaggtgaccaggggttctgcagcgaggagtgccggtggcagcagatactggtggacgaggcgcgcgagcgcgaggcggcggcggtgatgagcaacaaggagctgcagcggcgagcgcaggcccgccaccacagcccccaccgcacgcccatgcccatccgtggcaggccgccgaggaagacacttgccgtagcctagctcgagacccagctttcttgtacaaagtggt

SEQ ID NO: 382 - DNA, 986 bp, Glycine max
cggtagtttttcttttcatgatttgtgccaaatgcagcctcgtgcggagcttttttgtaggtaggccgcgggatatcacaagtttgtacaaaaaagcaggctcctgcaggacccggaacaatttgacaattgcatgaagaagcaagtagaagcaattgcgcgagttttgcatttatttcaatcctacaaagaggacaatattccgtgcaaaatcgacgagggtctctatttgggttcgattgccactgcagctaacaagcctgctttgaaagactgtaatattactcacgttttgactgtggctggtagaataccacctgcacatcctcacgattttgtctataaaattatagacgttgttgacaaagatgatgaagacttaaaacaatacttcaatgagtgttttgattttattgatgaagccaaaagacacgatggaggtgttttggttcactgttttgctggaagatccaggagtgtgactatagttgtggcatatctgatgaagactcgtggaatgagcttttttgaagctctgcaacatgtaaggagtatacgaccagcagcaggtcccaatcagggtttcatttgtcagctgcaggattttgaaaagtctcttcaaggtgccaataaattgcattagtctagctcgagacccagctttcttgtacaaagtggtgatggggatcccccaccctgcaatgtgaccctagacttgtccatcttctggattggccaacttaattaatgtatgaaataaaaggatgcacacatagtgacatgctaatcactataatgtgggcatcaaagttgtgtgttatgtgtaattactaattatctgaataagagaaagagatcatccatatttcttatcctaaatgaatgtcacgtgtctttataattctttgatgaaccagatgcattttattaaccaattccatatacatataaatattaatcatatataattaatatcaattggggaa

SEQ ID NO: 383 - DNA, 667 bp, Oryza sativa
acaagtttgtacaaaaaagcaggctcctgcaggaccatgtcgatgccggaggcggggcgctcggagagggacgggcgggagcaggacgacgactacgagcagcagcaggccagggtgctcatggcactgatgcagggcttctgcgccgcacgctaccggaaggccgacaacatcccgtgccccatcgtccaggggctatacttgggatctgttggggcagcaatgaacaaggatgctttaaagagcttgaacataacccatatcttgattgttgccagatcattaaatccagcctttgcagctgaatttaactacaagaagattgaagtacttgacagcccagacattgatttggcaaagcattttgatgaatgctttagtttcattgatgaatctatcagctctggtggcaatgttctggttcattgctttgctggacggtcaagaagtgtcacgattattgttgcatatctgatgaagaagcatcaaatgagccttgagaacgcgttgtcgctagttagaagcaaacgacctcaagtggctcctaatgagggattcatgtctcagctggagaactttgagaaatccatgcaagtggagcaggagaggaaacttatgcaacctgtgcagaactagctcgagacccagctttcttgtacaaagtggt

SEQ ID NO: 384 - DNA, 1613 bp, Oryza sativa
acaagtttgtacaaaaaagcaggctcctgcaggaccagtagagatcgggagggcggcgccatgaacaggggcggcggcgtcggcgtcggcgatgagagcggaagcgactacgagagcggcggcggcatgcggaagccgctgctgatgcacacggggagctggtacaggatggggtcgcggcaggggagcctcaccggcgcggggacctcgtccatggccatcctacgcgagtcccacgtctccgccttcctctgcacgctcatcgtcgcgctcggccccatccagttcggattcacggggggcttctcctccccgacgcaggacgccatcatccgagacctcgacctcaccctctccgagttctcggtgttcggatcgctgtccaacgtcggcgccatggttggggcgattgccagtggtcagatggccgagtacattgggcgcaaagggtcattgatgattgctgcaattccaaacatcattggttggcttgccatctcctttgcaaaagactcatcgtttctttatatgggacgattgctcgaggggtttggtgttggtgtcatctcttatacggtgccagtttacatagcagaaatatcacctcaaaacatgagaggtgctcttggctcagtgaatcagttatctgtaaccgttggtatattgttggcatatttgctcggcatgtttgttccttggaggcttcttgctgtaataggaatcttgccttgcactgtgttgatacctggcctattcttcattccagaatccccaagatggttggcaaagatgaacatgatggatgattttgagacttctttacaagttctgaggggatttgagactgacatcagcgcggaagtgaatgatataaagagagcagtagcgtcagcaaacaaaaggacaacgatccgttttcaagaattaaaccagaagaaataccgcacacccctaatactaggaattggcctacttgtactgcaacagctaagtggaatcaatggaatattgttttatgcaggtagcatcttcaaagcagcaggtctcacaaacagtgacttggctacatgtgcacttggtgctatccaggttcttgctacaggagttacaacctggttattagacagagctggccgacggatcctccttatcatctcttctgctgggatgactctaagcctccttgcagttgctgttgtatttttcctcaaggatagcatttcacaagattctcacatgtactacaccttaagtatgatctccttggttgctcttgtggcttttgtaatcgccttctccttcggtatgggtgccattccatggatcataatgtcagagatcctcccggttagtatcaagagtctcgcaggaagctttgcgacgctcgccaactggcttacatcctttggaataacaatgacagcaaacttgatgcttagctggagtgctggagggacctttgtgtcctacatggtcgtgagtgctttcaccctcgtgttcgtcatcctttgggtgccagagacaaaaggaagaactctcgaagagatacaatggtccttccgctgagccttgtggtctttagctcgagacccagctttcttgtacaaagtggt

SEQ ID NO: 385 - DNA, 1525 bp, Zea mays
acaagtttgtacaaaaaagcaggctcctgcaggacctggctcccaacatggagacatataccacagacgacgcgcttaccattatggggtttggaaaattccaagcgcttgttcttttctacgctggaatgggctgggttgcagaagctatggagctcatgctcttgtcgtttctcgggccattcatacgagaggagtggaacgtctccccagagaacgagagccccctttcgagtgttgtctttgctggcatgctgctaggtgcctgtgcttggggctttgtttccgacaaatatggacggaggactggtttaatattttcaactctatttactagtggaatgggttttctaagcgctttatctcctaactacttatgcttggtggctcttcggtttctggttggagtaggagtgggtggcagccatgtgtttatatcttggtttttggagtttgttcctgcacaaaatcgtggcacttggatggttattttctcccttttctggactctcggcacgatcttggaagcttcacttgcatgggtcgtattgccagcattgaattggaggtggctgctagtcttcaccgcccttccatgcttcctcttgcttcctttctttggactaacacctgagtctccgcgctacctttgtgcacaaaatagaatgtctgatgccacatctgttctagagagaatggccaacgcaaaccaatcagctcttcccccgggagttctcacgtacaatagacaaacaaaatgtgaccacgacgttctcgctcccgagagtgaatgtcttcttcctgtcagagagaaggaatgcacagttgacaatgccaagagctccgaatctggcagtcttgctgcactgcgcatgctattatcgcgcgaactgctcagatcaactctgcttctttggtttgttttctatgcaaattcctttgcttattacgggttagtattgctgacatcgcagttgagtgatgcaaataaaagttgtgcatctggtgtgtcttttggtctgcgccaaaaggaaatcaatctttacaaagacactttcatcactagtttagcagaaatcccaggtttatttttgtctgctgttcttgttgattggtttggtcgaaaagcttcgatgtggtctatgatgttcgcatgctgtgctttccttggaccacttgtacttcaacagactgagttgttgacaactattcttctatttggtgcccgtgcatgtgccatggggagctttacagtcttgtgcctttatgctccagaggtgtatccaacatttgtccggtcaaccggtgcaggaattgcgaccgccattggtaggattggtggggttgtttgccctctcgttgctgtcgccatgctgcggagctgccatcagatggaagcactcattgtgtttgaggtgatattatgccttgctgcagttgcctgcatgttcttccctgtagagaccaagggccgtggaatggactgatgcatagctcgagacccagctttcttgtacaaagtggt

SEQ ID NO: 386 - DNA, 1132 bp, Zea mays
acaagtttgtacaaaaaagcaggctcctgcaggaccatgccgtacctcgtccgcgagcggctctacttcggcggcatcaaagacgccattgccgccctcacggagtcttcctccacgccggacttcacccacgtcctctccgtggtcagttccgcctccatctccttcatcaccgattgccgcccgggcctcgagatccccaccgaggaggtcctccgcgtagtcgccggcgaggagggcgcggcaccgactgccgcggttcccccggggacgctgatgcgggtggtggagcgcgccgggcacgggctgcgggtcacgcgcatggccgtgccgctgcgggacaccgaggaggaggacctgctcgaccgcctcgagccctgccttgagttcatcgatgagggcaggaaggtcgggaatgtcctcgtccattgctttgctggggtgtcgaggagcgcttccatcattgttgcttatcttatgagagcagaacagaaatctcttgaagaagcattagaagctctgaaggagatttctgagtcggcgtgcccaaacgatggttttcttgaccagctgaaattatttgaagaaatgggcttcaaagttgatacttcaagtcctttgtacaagagattccgcttgaaattattaggccaatcctacatatctggggagaaaataagcagctatatgtttgaagatgaccctggcctttctctagagtctggctcttgtcaagattcttcaaaggttgagcaacgtaaaacagcttaccgctgcaggaaatgcaggagagttattgctgtagagggcaatgttataagtcatgttcctggtgagggtgaatcttgctttgattggaaccgaagaaagagtggtcatccatacaacaacaaagaacatggttgctcatctttgtttgtcgaacctctgaaatggatgactccagtagaagacggcgctttggagggaaagctatcatgcatccactgtggagctcggttgggatacttcaactggtcaggaatacagtgcaactgtggtagctgggttactcctgccttccaaattgttaagagcaaagttgatatcagcaccatctagctcgagacccagctttcttgtacaaagtggt

SEQ ID NO: 387 - DNA, 2848 bp, Oryza sativa
acaagtttgtacaaaaaagcaggctcctgcaggaccatggaacagcgggaggcgcggcaagaggaggaggaggaggaggagcgcgacgcgccggcggttcctcccggggaaaacgacgaggaaagagatcgaaacctatcctctcgtgtggtttctttgttatttggtggtgatatctcagcgcagacattcgagaaatgggtatcattggtacgtaaacgaagtggggcattccggccatcagggttcccacgccggaattcgaggattgaagtcatgccgagtgggagtttctcacttttcagtgcagcagacttaagtgagcaagtggttacagcagagctaataggcaaagaagatataccattgacaagcagtcagcctacagaaataagtttgtgggagagacttggaaatgcttctgcactagatattgaatcacctgacttttcatggaatatgctgtcatctctgcaccatacagagcatagtagtagttcggaccactctgaagatgaaatgtgcaaacctcttgaggtgactgtgaactctggtggtgtagtgttctttgctctatttaattcttcaagtaatgtcttaccaaaagaagcagctgctgttataaagttctcatcatcaaagatgtcaactcaggcagaacggttgggttatgaatttgctagattgcttggagttcagacaccacaagctagagtggtacacaattctagcctagagtggcaggatattagaaaggctgcagaaaatgcacgatcagtagcagtttcaaatagtgatgaggttggtgagatgacatgctcagaattgttggaagctcttgagctaagccgttgtcttcttctaatgagttatattcatggatctccccttcttgagagttcaaaggcatttagtccacgggaagctgcttgcgttactgcttcatcattgggtagggtcttgatgctagatctgatactcagaaatgaggacagactcccatgccgtcagcttggttggcgtggcaatcctgcaaacctgatgatttccgatagaccttctgcacccagtgtggacagattggatgattccaagtgcactacagaaagttctattccaacgattactcaattggtgcagagtgacaagcggactcacactgcaaatgcaaccataaattctccagaattggtgtccatgtcaccaaaaccagatgcattgaaaagtgtaagaggaaatgctgatagtttggatggccctgtccacattgtagcaatcgacactggagtgccacgtcgcccccctgcagggagacgggtgaaagatcatgagcgttatcccaaagttgtgcagcttatgttgaataattcagattactcctcgaatatattgtatgagatttctggtggtaagctagggactccaggacctgatgaagcaatcgctttcactgattcttgttgttccatttctgatgaagacaatactgctgcgattcatgaattccgaggggcatttcgtgcagctctgagggatcttgaggggttccatctatttcttctccagctataccaaaaactagatggtgttttgcgagttttcttgtccatagttactaaaggctctgaagaatccgacaacaatgatgctacagttcctgattttccatcacccggtgctaactacagtactccttgcgctcctagtaagcagcagaatagtgaattgcacggtgattctgaaatactgaaatcaacgacaaagccttcttctgcgggatcccgtggaagctcagactcagtatctcctctgtccagggagagttggagtaataagtatttcaaagggagtgcagagggtccccgaagtttaagaatgacaatgaagctccgtgatttttacaagactccgaaggttgatcctgaattagtcaaagaaatagaacaatggaatgaggcgcttaagtctgatgtgatcaaattttgcgaggagaacaattttcattctggattttttgatggcaatgagaataacatggtagctgatgcatatgaattgaaggtgcgtctagaacacatcattgaaaggatagccttggtctctgacgctgcaaataccgagcgaccttctcttgttatcaacaacttgttcataggtggggctctggctgcaagatctatgtacacccttcagcatctgggcattacccatatactatgtttgtgttcaaatgagattggtcaatctgattcccaatttcccgatctttttgaatacaagaacttttcaattagtgatgatgatgatgcaaatatcagtgatctttttgaagaagcctcagattacttcgatcatgtagatcatgttggaggcaaggttcttgttcattgctttgaaggaaaaagtcggagtgccacaattgtgcttgcctacctgatgctcagaaagggcctcactcttgcgaaagcttggaacttactgaagaaagtgcatcgtcgggcacaaccgaatgacggtttcgcaaaggctctgctagcgcttgacaggaagctgcatggaaaggtgtctatggattggcagcacaagcgacctgagatgaaggtgtgcccaatctgcagcaagaacgtcggactgagcacgagctcactcaaactgcatctgcagaaggctcacaagcggctatctgcaggtagtgtggacagcgccatgaccttggagattcagaagtcgatccagtcgctccggatcagccgcggtgggagcctgagcccttctcagaagcttaccaaggcgttcgctgatgagctcagcttctagctcgagacccagctttcttgtacaaagtggt

SEQ ID NO: 388 - DNA, 1616 bp, Oryza sativa
acaagtttgtacaaaaaagcaggctcctgcaggaccagatataccgcccgcgcatcgctccatggcggtcggcggcgacgacgacagcatggagcgggacttcgccgccaggctgcgcctcgcgcattcgccctccccggccacgcctgccgccgccgcctcatcctcccccaccgccgctggggggatcgccttccgcgcgccgcaggagcagttcaccgccgacgacttcgtactcggcaagatctacggcgtcggctcgtactccaaggtggtgcgggccaagaagaaggacactggtcgcgtctacgcgcttaagatcatggacaagaagttcatcaccaaggagaacaagatctcctacgtcaagatggagcgtattgtactcgaccagctcgaccaccctggcgtcatcaggctcttcttcactttccaggacacatactccctctacatggcgctcgagtcgtgcgaaggcggggagttattcgaccaaattgttcggaaaggtcggctctctgaggactatgcacggttctatgctgctgaaattgttgatatattggagtacttgcatggccttggcctaattcatcgggatgtcaagccagaaaatctactgcttacttctgatgggcacatcaagattgctgactttggtagtgtgaagcctacaagggatactcctatcaaagttctcccaaattcaactactgaaagggcctgtacatttgttggaaccgctgcatatgtaccacctgaggtcctgaactctgccccagcaacctttggaaatgatttatgggcattgggatgcacactgtaccaaatgctttctggctcttcgccatttaaagatgctagtgagtggttaattttccagagaatcattgcaagggacctcaaatttccagagtatttttcagctgaagctagagatcttgttgacaaattgctggatgttgatccaggcaaaaggccaggtgcaggacctgatggttattcttccttgaaggagcatcctttcttcagaggcatagactggaagaacctgaggaagacacggccacctaagctcgcaatcgatgcaaatgtaaatgaagatgaggatagccaagattcaaattggttggcacacatgggaagtgtggcagtcaaccaacagtcaaatactgttggtaataatggtgccccgtcatcatctgaagtgcgctcccatatatctaaattagcttccatcgactcctttgactcaaaatggcaagaattcctggaccccggcgagtctgtagtcttaatatcaaagctgaagaagattaataagctagcaaacaagaagatccagttgatcctcactgacaaacctcaattgatctgtgttgacccttcaaaaatggtggccaagggaaacattatttggtctgatgacccaagtgaactcagtgtgcaagtatcagattcttcacattttagaatatgcacgccaaagaaggtgtcaacatttgaggatgcgaaacagcgtgcttggcaatggaagaaggcaattgaagacctccaacgctgccaaaggaattaattttcatagctcgagacccagctttcttgtacaaagtggt

SEQ ID NO: 389 - DNA, 1501 bp, Oryza sativa
acaagtttgtacaaaaaagcaggctcctgcaggaccatggagaagccggcggcgagcgtggaggagccgctgcttgttggcgctggcgagaagaagggcgagagcgcggccgcggcggagctgaagcggctgctccggctggcggggccgctggtggcgagcggcgtgctgcggaacgtggtgcagatggtgtccgtcatgttcgtcggccacctcggcgagctccccctcgccggcgcctccctcgccacctccctcgccaacgtcaccggcttcagcctgctcttcggcatggcgagcgcgctggacacgctgtgcgggcaggcgtacggcgcgcgccagcaccacctcctcggcgtctacaagcagcgcgccatgctggtgctcgccgtggccgccgtgcccatcgcgctcgtctgggccagcgccggcgagatcctcctcctgttcggccaggacccggccatcgccgccgaggccggcgcgtacgcgcggtggctgatcccgtcgctcgtcccgttcgtgccgctggtgtgccacatccggttcctgcaggcgcagagcgccgtgctgccggtgatggcgagctgcggcgtcacggcggcgagccacgtggccgtgtgctgggcgctggtgcgcaaggccggcatgggcagcaggggcgccgcgctggcgaacgccgtctcctatggcgtcaacctcaccataatgtctctctatgtcaggctgtcgcgctcctgcgagaagacatggactggcttctccatggaggccttcagggagctccgccagtatgcggagctcgccatccccgcggcaatgatggtctgtttggagtggtggtcatttgaatttcttgtgatgctctctggtcttctgcccaatcctaaacttgaaacctcagtgttgtcgatatgtctcaacactggtgctctgctggtcatggttccaattggtctcagcacagctataagcacgcgtgtttggaacgaactaggtgccggcaatccccaggcagcgaagctggcaactcgagtggtcatatgtatggccatgaccgaaggctcggtggttgcgtttacgatgattctgttgcgcaattcctggggtcacatgtacagtgatgaggctgaagttgtcacctacattgctcgtatgatacctgttctagccatatcattcttcattgatgggatgcacagcgctctttcaggagtgctcactggatgtggcaagcagaagatcggcgcacgggtaaatcttggcgcattttacttggcaggcattcctatggccgtctttcttgcatttgtgctacatctgaatggaatgggcctttggcttggcatcgtttgcgggagcctcagcaagcttatcttgctcttttggatcacaatgagtataaactgggagaaggaatcaaccagggcgaaagaattggtgttcagttcatctcttcctgtagcatagctcgagacccagctttcttgtacaaagtggt

SEQ ID NO: 390 - DNA, 1432 bp, Zea mays
acaagtttgtacaaaaaagcaggctcctgcaggaccctggtgtcccctccctctcacccatggcttcggcggcggcggcaactcaggtggggacttacttcctgcggaactactacaacctgctgcaacaaacccccgatgtcgtccaccagttctacagcgaagccagcaccatggtccgcgtcgacgacctcaccggcacgaccgcggctgccaacaacatgatggacatacactcactcatcatgtctttgaacttcacccaaattgagatcaagactgccaattttgtgaactcatggggcgatggggtgctagttatggtctctggtctagtgcagaccaaggagtacagccaccaaaggaaatttatccagatgttcttccttgcccctcaagagaagggttactttgtcctcaacgattactttcacttcgttgaccaagaacatgtgcagcctgcgccagtgattgctcaggaagactacgagagcaatttggcacccaacacagttgttgagaccgctcctgagtacgttcacgaggaagaagctcaacaaatagcacctgaagtacatgatgtggtcgaaaactatacttattctgagccacaacagcaagtagtgtcggacaactggggagaggagcctcttcctgaagaaccgccttctttctcaaatgaaatggcagtcgctcctgaggagccagtgcaagctccacctgtgccacttcctcacgtggatgagcctgtttgtgaaccagtaaagaagacttatgcttccatcctaaaaaccgcaaaggctcctcctgcattcccagtagcccagcaagtacctgtgagtaagacttctcaccctacaacagagtcaaaccaaacccagcattcagttatggcttcatcaatgggaaccgagaaaccgaggtctgatgtctttggtgagggtgcttcccatgatgacgaagagagcaaatctgtgtatgtcggcaacgtgccatcatctgtaagtgaggctgatcttgaaaacgagttcaagaaatttggccggcttattcctgacggtgttgctatcagaagccgaaaggagactggcggctattatgctttcgtggaattcgaggaactcagcggtgtacacaatgcgttaaaggcttcaccaattgaaataaatgggcggcagatatatgttgaggagaggaagccaaatagcggaataagaggtggaaggaggggaggacgtggccgtttcagtggtggaggccggggatattcgagaggtggaggcgacgagtacaatagtaaccgtgggaggtcaaacggttacggtcgtgctcctcaccaagagaggggcatacttgggagccacactccaaggaactgattcagtcgagcagcaaacatagctcgagacccagctttcttgtacaaagtggt

SEQ ID NO: 391 - DNA, 511 bp, Glycine max
ggtaccggcgcgccaccatgaccaccacattggaaagaggtttctcggaagagcaagaagctctggtggtgaagtcatggaatgtcatgaagaagaattctggagagttgggtctcaagtttttcttgaaaatatttgagattgctccatcagctcagaaattgttctcattcttgagagattcaacggttcctttggagcaaaatcccaagctcaagccccatgccgtgtctgtctttgtaatgacctgtgattcagcagttcagctgcggaaggccgggaaagtcactgtcagagaatcaaacttgaaaaaattaggtgctacccattttagaaccggcgtagcaaacgagcatttcgaggtgacaaagtttgcactgttggagaccataaaagaagctgtaccagaaatgtggtcaccggctatgaagaatgcatggggagaagcttatgatcagctggtcgatgccattaaatctgaaatgaaaccaccctcctcttaggcgatcgc

SEQ ID NO: 392 - DNA, 553 bp, Glycine max
acaagtttgtacaaaaaagcaggctcctgcaggaccatgaccaccacattggaaagaggtttctcggaagagcaagaagctctggtggtgaagtcatggaatgtcatgaagaagaattctggagagttgggtctcaagtttttcttgaaaatatttgagattgctccatcagctcagaaattgttctcattcttgagagattcaacggttcctttggagcaaaatcccaagctcaagccccatgccgtgtctgtctttgtaatgacctgtgattcagcagttcagctgcggaaggccgggaaagtcactgtcagagaatcaaacttgaaaaaattaggtgctacccattttagaaccggcgtagcaaacgagcatttcgaggtgacaaagtttgcacttttggagaccataaaagaagctgtaccagaaatgtggtcaccggctatgaagaatgcatggggagaagcttatgatcagctggtcgatgccattaaatctgaaatgaaaccaccctcctcttagctcgagacccagctttcttgtacaaagtggt

SEQ ID NO: 393 - DNA, 691 bp, Glycine max
acaagtttgtacaaaaaagcaggctcctgcaggaccatggcaactctgagcaattcaactaatatcttttggcaagattgtcaagtaggaaggcttgaaaggcagaagctacttaaccaaaagggatgtgttgtatggattactggactcagcggatcaggaaaaagcacattggcatgttccctaagcagagaactgcactcaaagggaaagttatcttatgtccttgatggagataaccttcggcatggactaaacaaggatcttggtttcaaagccgaagatcgcgctgaaaatattcgcagaactggagaagtggcaaaactgtttgctgatgctggcttaatatgtgttgctagtctgatatctccttacagaagagaccgagacacttgccgtgccatgttacctgatgcaaattttattgaggttttcatgaacatgcctctagaattgtgtgaggcacgagatccaaaaggcctctataagcttgctcgtgcggggaaaatcaaaggttttaccggcattgatgatccttatgaaccacccataaactgtgagattgaaataaagcaggaaaatggggattgtccaacacccactttgatggctggacaagtagttacttacttggagaataaaggatttcttgaatcctagctcgagacccagctttcttgtacaaagtggt

SEQ ID NO: 394 - DNA, 972 bp, Oryza sativa
atggcggggaggagcgagctggtggtgagcttcggggagatgctgatagacttcgtgccgacggtggcgggggtgtcgctggcggaggcgccggcgttcgtcaaggcgccagggggggcgccggcgaacgtggccatcgcggtggcgcggctcggcggcggggccgcgttcgtcggcaagctgggggacgacgagttcgggcggatgctcgcggccatcctccgcgacaacggcgtcgacgacggcggggtcgtgttcgacgccggggcgcgcaccgcgctcgccttcgtcaccctccgcgccgacggggagcgcgagttcatgttctaccgcaaccccagcgccgacatgctcctcacccacgccgagctcaacgtcgagctcatcaagagggctgccgtcttccattatggatcaataagcttgatagctgagccctgccggtcagcacatttgcgtgccatggagattgcgaaagaagctggtgcgctgctatcttatgacccgaatctcagggaggcattgtggccctcccgtgaggaggctcgcaccaagatcttgagcatctgggaccaggcagacattgtcaaggtcagcgaggtcgagcttgagttcttgaccggcattgactcagtagaggatgatgttgtcatgaagctatggcgccctaccatgaagctcctccttgtgactcttggagatcaaggatgcaagtactatgccagggatttccgcggagctgtcccatcctacaaagtacagcaagttgatacaacaggtgcaggtgatgcgtttgttggtgctctgctgcgaagaattgtccaggatccatcatcgttgcaagatcagaagaagcttgaggaagcgattaaatttgccaatgcgtgcggagcaatcaccgccacaaagaaaggggcaatcccatcactgcccaccgaagttgaggtcttgaagttgatggagagtgcttag

SEQ ID NO: 395 - DNA, 1075 bp, Zea mays
acaagtttgtacaaaaaagcaggctcctgcaggaccatggcgcctctaggagacggcggagctgctgccgcggcggcgtccaacaacctggtggtgtcgttcggcgagatgctgatcgacttcgtccccgacgtggccgggctgtcgctggccgagtcgggcggcttcgtcaaggcccccggcggcgcgcccgccaacgtcgcctgcgccatcgccaagctcggcggctcctccgccttcgtcggcaagttcggcgacgacgagttcgggcacatgctggtgaacatcctgaagcagaacaacgtgaactcggaggggtgcctgttcgacaagcacgcgcggacggcgctggccttcgtgacgctcaagcacgacggggagcgcgagttcatgttctacaggaacccgagcgcggacatgctgctgacggaggcggagctggacctgggcctggtgcggcgcgccagggtgttccactacggctccatctcgctcatctccgagccgtgccgctcggcgcacatggccgccatgcgcgcagccaaggccgcgggcgtgctctgctcctacgaccccaacgtgcgcctcccgctctggccgtcgcccgacgccgcacgcgagggcatcctcagcatctggaaggaggccgacttcatcaaggtcagcgacgacgaggtggccttcctcacgcgcggggacgccaacgacgagaagaacgtgctgtccctgtggtttgacgggctcaagctgctcgtcgtcaccgacggggacaagggatgcaggtacttcaccaaggacttcaagggcagcgtgtccggcttcaaggtcgacaccgtcgacaccaccggcgccggcgacgccttcgtcggctccctcctcgtcaacgtcgccaaggacgactccatcttccacaacgaggagaagctccgcgaggctctcaagttctccaacgcctgcggcgccatctgcaccaccaagaagggcgccatcccggcgctgcccacggtcgccaccgcccaggacctcatcgccaaggccaactagctcgagacccagctttcttgtacaaagtggt

SEQ ID NO: 396 - DNA, 979 bp, Glycine max
acaagtttgtacaaaaaagcaggctcctgcaggaccatgactttggaaactcttcaatccaatgagttctccaacttcattatctatgacactatctctgcaactccatttagcagccatggctccccagaggctagtttcttggaaagttttgtgaactatcaggagcagcatgaccaccctacatttgataattgcgcaatgaggacccgaaagcgtgaagccagcgaaccagaaagcattggccggaggcagaattcggtggcagtgcaagggaggaagaagaggagaaggaagccaagggtttgcaaaaacacggaagaggctgagacacaaaggatcacacacattacagtggaaagaaaccgccggaagcagatgaatgagcatcttgctgtccttcgttcactcatgccggagtcctacgtccaaaggggtgaccaggcctctatagtgggtggtgccatagagtttgtaaaagagctggagcacctcttgcaatcacttgaagctagaaagctgcaacttttgcaccaagaagtggcacaaaccaatgaaaatacggccatttccaaactcatgcaacctccttttgcacattgtttttcgtatccacagtacacatggtcccagactcctaacaaatacacatccaagaccaaagctgccatagctgatatcgaggttactttaatcgagacccatgcaaatcttcgaattctcaccaggagaagcagccacgggcagctaacaaagttagtagctggttttcaaacgctgtgcctcaccgtcctacatcttaatgtcaccaccatagaccctttggtgttctattccttcagtgctaaggttgaagaaggattccaacttggttcagtagatggtattgcaacggcagtccatcatttgcttgcaagaattgaagaagaggcttccctttgctgttagctcgagacccagctttcttgtacaaagtggt

SEQ ID NO: 397 - DNA, 1048 bp, Arabidopsis thaliana
acaagtttgtacaaaaaagcaggctcctgcaggaccatggatttggatagcatggactgtacatcaaccatggatgtgacagatgatgaagagatccaccaagatcgccattcctacgcttctgtttccaagcatcatcatactaataacaacaccaccaacgttaatgctgctgcttctgggcttctccctaccaccaccagtgttcatgagcttctcgaatgtcctgtctgcaccaattctatgtaccctcccattcatcagtgtcacaatggacatacgttgtgttcaacctgtaaagccagggttcacaaccgctgcccaacttgtagacaagagctcggtgatatccgttgtttggcactggaaaaagtagccgaatcacttgaactaccttgtaaacacatgtcacttggatgtcctgaaatcttcccttattacagtaagctcaaacatgagactgtatgtaacttcagaccttatagctgcccttatgctggatccgagtgttctgttacgggcgatatccctttcttagttgctcatctgagggatgatcataaggtggatatgcattctgggtgtactttcaaccatcgttatgtcaagtctaatcctcgtgaagtcgaaaacgccacatggatgttaactgtctttcactgcttcggtcaatacttctgtcttcactttgaggcattccagctcggaatggctccattctacatggcgttcctgcgtttcatgggggacgagacagaagctcgaaactacaattacagtttagaagtgggaggttatggtcggaagctgatatgggaaggaacaccaagaagcgtaagagacagccacaggaaagttagagacagtcatgatggactaattatacaaagaaacatggctctcttcttctcaggtggagataggaaagagctgaaacttcgagtcactggaaggatatggaaagagcaacaacaaagtggtgaaggtggaggagcttgtatcccaaacttgtcttagctcgagacccagctttcttgtacaaagtggt

SEQ ID NO: 398 - DNA, 1002 bp, Zea mays
acaagtttgtacaaaaaagcaggctcctgcaggaccagaggtttccccatggcatcagttacttatattgatgatagccatgctgaggttattgatcctccaaagaatgaggaaatgctggatgccactgaacttgttggtgatcatattcagaattcaccaaaaccaaatgtggcaagctatggcaacgtgcgtgagctactggaatgccctgtgtgtttgagtgccatgtatcctccaattcatcagtgctccaacggacatactctgtgttctggatgcaagccaagggttcataatcgctgtccaacatgcaggcatgaactgggtaacataagatgccttgctctggaaaaggtggctgcatcactagagcttccatgcaagtaccagaactttgggtgcttgggcatatatccttactattgcaagctgaaacacgaatcgcaatgccaatacagaccatatacttgtccatatgctggatctgaatgcacggttgctggtgatattccgtatctagtaaatcacttgaaagatgaccataaggtcgacatgcacaatggaagcaccttcaatcatcgttatgtcaagtcaaatcctcatgaagtcgagaatgctacctggatgctcacggttttcagctgcttcggccagtacttctgcctgcacttcgaggctttccagctgggcatggcgcccgtgtacatcgccttcctccggttcatgggggacgacgctgaggccaagaactacagctacagcctggaggtcgggggcagcgggcgcaagatgacatggcagggcgtgcctcggagcatcagagacagccaccggaaggtccgggacagctacgacgggctcatcatccagcgcaacatggcgctcttcttctcgggtggcgacaggaaggagctcaagctgcgggtcaccgggaggatctggaaggagcagtgagtcgcgtgcattagctcgagacccagctttcttgtacaaagtggt

SEQ ID NO: 399 - DNA, 2348 bp, Arabidopsis thaliana
gcagtcgctgtcgttaccatggtggcgcctgctttgttaccggagctctggacggagatccttgtaccgatttgtgcggtgattggtatcgccttttcgcttttccaatggtacgttgtatctcgcgtgaaactcacctctgacctcggcgcatcgtcttccggtggagctaacaatgggaagaatggatacggtgattatctaatcgaggaagaggaaggtgttaatgaccagagtgttgtcgctaagtgcgctgagattcagactgctatttccgaaggtgcaacttcattcctattcacggagtacaaatatgttggtgtcttcatgattttctttgctgctgttatctttgttttcctcggctctgttgagggattcagcactgataacaagccttgtacttacgacaccaccagaacctgcaagcctgcattggctactgcagctttcagtaccattgctttcgtgcttggtgctgttacctctgttctatctggtttccttgggatgaagattgctacatacgctaatgctaggaccactttggaggcgaggaaaggtgttggaaaggcgttcattgttgcattcaggtctggtgctgtgatgggtttccttcttgcagcgagtggtctattggtgctttacattactatcaatgtgttcaagatctattacggagatgactgggaaggtctttttgaggctattactggttatggtcttggtgggtcttccatggctctctttggccgtgttggtggtgggatctacactaaggctgctgatgtcggcgctgaccttgtcggtaaaattgagaggaatattccagaggatgatccaagaaacccagctgtcattgctgataatgtcggtgacaatgttggtgacattgctggtatgggatctgatctctttggatcatatgctgaagcatcatgcgctgctcttgttgttgcctcgatctcatctttcggaatcaaccacgacttcactgccatgtgctacccattgctcatcagttcaatgggaatcttggtttgtttgatcacaactctctttgccactgacttctttgagattaagcttgtcaaggagattgaaccagcattgaagaaccagctcattatctcaactgttattatgactgttggtattgctattgtgtcatgggttggcttaccgacctcctttaccatcttcaactttggaacacaaaaagttgtcaagaactggcagctattcctttgtgtttgtgttggtctttgggctggactcattattggtttcgtcactgagtactacactagtaacgcctacagccctgtgcaagatgttgcagattcatgcagaactggtgcagctaccaatgttatcttcggccttgctcttggttacaaatccgtcattattccaatctttgctattgctatcagtatattcgttagcttcagctttgctgctatgtatggtgttgctgttgctgctcttggtatgctcagtaccattgccactggtttggcaattgatgcttatggtcccatcagtgacaatgctggtggtattgctgaaatggctggaatgagccaccgcatccgtgaaagaactgatgctcttgatgccgctggaaacaccactgctgctattggaaagggatttgccattggctctgctgccctagtctccttggctctctttggtgcctttgtgagccgtgcagggatccacaccgtagatgttttgacccctaaagttatcattgggctccttgttggtgccatgcttccttactggttctctgccatgacaatgaagagtgtgggaagtgcagctcttaagatggttgaagaagttcgcaggcagttcaacaccatccctggacttatggaaggaaccgcaaaaccagactacgccacatgtgtcaagatctccaccgatgcttccatcaaggaaatgatacctcctggttgccttgtcatgctcacacctctcattgttggtttcttctttggagttgagaccctctctggtgtcctcgccggatctcttgtatccggtgttcagatcgccatatcagcatctaacactggtggtgcctgggacaacgccaagaaatacatcgaggctggtgtatcagagcacgcaaagagccttggaccaaagggttcagagccacacaaggcagctgtgattggagacacaattggagacccattgaaggatacttcaggaccttcattgaacatcctcatcaagctcatggctgttgagtctcttgtctttgctcccttcttcgccactcacggtggtatccttttcaagtacttctagaacccagcggtactcgc

SEQ ID NO: 400 - DNA, 2338 bp, Arabidopsis thaliana
ggtaccggcgcgccaccatggtggcgcctgctttgttaccggagctctggacggagatccttgtaccgatttgtgcggtgattggtatcgccttttcgcttttccaatggtacgttgtatctcgcgtgaaactcacctctgacctcggcgcatcgtcttccggtggagctaacaatgggaagaatggatacggtgattatctaatcgaggaagaggaaggtgttaatgaccagagtgttgtcgctaagtgcgctgagattcagactgctatttccgaaggtgcaacttcattcctattcacggagtacaaatatgttggtgtcttcatgattttctttgctgctgttatctttgttttcctcggctctgttgagggattcagcactgataacaagccttgtacttacgacaccaccagaacctgcaagcctgcattggctactgcagctttcagtaccattgctttcgtgcttggtgctgttacctctgttctatctggtttccttgggatgaagattgctacatacgctaatgctaggaccactttggaggcgaggaaaggtgttggaaaggcgttcattgttgcattcaggtctggtgctgtgatgggtttccttcttgcagcgagtggtctattggtgctttacattactatcaatgtgttcaagatctattacggagatgactgggaaggtctttttgaggctattactggttatggtcttggtgggtcttccatggctctctttggccgtgttggtggtgggatctacactaaggctgctgatgtcggcgctgaccttgtcggtaaaattgagaggaatattccagaggatgatccaagaaacccagctgtcattgctgataatgtcggtgacaatgttggtgacattgctggtatgggatctgatctctttggatcatatgctgaagcatcatgcgctgctcttgttgttgcctcgatctcatctttcggaatcaaccacgacttcactgccatgtgctacccattgctcatcagttcaatgggaatcttggtttgtttgatcacaactctctttgccactgacttctttgagattaagcttgtcaaggagattgaaccagcattgaagaaccagctcattatctcaactgttattatgactgttggtattgctattgtgtcatgggttggcttaccgacctcctttaccatcttcaactttggaacacaaaaagttgtcaagaactggcagctattcctttgtgtttgtgttggtctttgggctggactcattattggtttcgtcactgagtactacactagtaacgcctacagccctgtgcaagatgttgcagattcatgcagaactggtgcagctaccaatgttatcttcggccttgctcttggttacaaatccgtcattattccaatctttgctattgctatcagtatattcgttagcttcagctttgctgctatgtatggtgttgctgttgctgctcttggtatgctcagtaccattgccactggtttggcaattgatgcttatggtcccatcagtgacaatgctggtggtattgctgaaatggctggaatgagccaccgcatccgtgaaagaactgatgctcttgatgccgctggaaacaccactgctgctattggaaagggatttgccattggctctgctgccctagtctccttggctctctttggtgcctttgtgagccgtgcagggatccacaccgtagatgttttgacccctaaagttatcattgggctccttgttggtgccatgcttccttactggttctctgccatgacaatgaagagtgtgggaagtgcagctcttaagatggttgaagaagttcgcaggcagttcaacaccatccctggacttatggaaggaaccgcaaaaccagactacgccacatgtgtcaagatctccaccgatgcttccatcaaggaaatgatacctcctggttgccttgtcatgctcacacctctcattgttggtttcttctttggagttgagaccctctctggtgtcctcgccggatctcttgtatccggtgttcagatcgccatatcagcatctaacactggtggtgcctgggacaacgccaagaaatacatcgaggctggtgtatcagagcacgcaaagagccttggaccaaagggttcagagccacacaaggcagctgtgattggagacacaattggagacccattgaaggatacttcaggaccttcattgaacatcctcatcaagctcatggctgttgagtctcttgtctttgctcccttcttcgccactcacggtggtatccttttcaagtacttctaggcgatcgc

SEQ ID NO: 401 - DNA, 1150 bp, Glycine max
acaagtttgtacaaaaaagcaggctcctgcaggaccatggggaggcctccttgctgtgacaaagttggcatcaagaaaggtccatggacacctgaggaggatattatccttgtctcttacatccaagaacatggtccaggaaattggagatcagtgcctactaatactgggttatcaaggtgcagcaaaagttgcaggcttagatggacaaattacctaaggccaggaatcaagagagggaacttcaccccccatgaggaagggatgataattcatttgcaagctctactgggtaacaaatgggcagccatagcttcctatcttccacaaagaacagacaatgacataaagaattattggaacacacatctaaagaagaagctgaagaaatttcaagcagctttggatcctcactcagcatcagactcaacagccagtggtcaatttctaccaaagagctttagtgacagaagaagtactttagacatcagcagcaacaacaacaataatcatggctcgtccattaggcttagtcatcatcaatctcagtcctcttccacaacaacatatgcctcaagcactgagaatatctcaagactcttggaaggttggatgagatcttccccaaagcaactcaacaagggatcaataatatcccaatatgatgaagatcatcagctccaaggcatcaatgatgatgatgataataacaacaacaactttgtaagcactactaagctagtgaaccttcatcatcttcatcagcacaaaattagaaacaaagatcatgagcaagagggtggtggagtagataataacatggtttctcatcatgaagagttcgattctattttgtcctttgagaaccaaaacaatgctgcttgggacaagtccacttgtgattccatgccagaaaagagttctgaagcttctgctgctgctgatcatcatcatcatcatcatcatgatatagctgctgctcatgagaggaacaatgtcaggcaaaaatctgagaatagtagtggtgctcctccattgtcatttcttgagaagtggctcttggatgaaaacgttggtcatcaagtggaggagatgatggagttgtctccgatgttctagctcgagacccagctttcttgtacaaagtggt

SEQ ID NO: 402 - DNA, 1849 bp, Zea mays
acaagtttgtacaaaaaagcaggctcctgcaggaccatggggacctcttctggcgcgaatttccatcagcaacctcctccgacccaggggatgttgcctccaaggcatggtccacgcccctcagggttgcagacctcgctctcgctggcctcttcggagcaggttggctcgcctgacatgcaggagcctggttcaaactcggagccagggcatgattccgccactgagagcgccagttccaaagacacatggccagctgagccgaaccagagcaatggtggggtggctgccagtgatgttgtgagtaaggcggcggagaaggaggtggcaaatggtgtatccaagccgcaggttatccatggaccctcctcccgtgtgagtgggatgcttctgcgggaggttgcacgggagagggttgatctggtcgctgagaagatgaagatgatgtcggatgagcacctagaggaggtcaagaatgagctcaggtcgattctggagggcactggaggttctcaccacatcgaggagttcttgtacttgcagaagcttgtccaggacaggcatgatttgacaccatccatgctttcagtggcacaccatgtgcagcttgagatccttgttgcaatcaagactggaatacaggcctttctgcaccccagtgttaccattccacacaatcgcttggtggaggtcttcttgtacaagaggtgccggaacattgcttgccagagtgctctccctgctgaggagtgcagatgcaacgtgtgcgctagcaggaatggtttttgcaacctgtgcatgtgtgtcatctgcaacaagtttgattttgaggtcaatacatgccgttggattggctgtgatttttgctctcactggacacatacagattgtgcaattcacaatggccagatcggaatgggacaatcagtgaaaagcagcattggtcatgctgaaatgctttttaggtgccgagcttgccagaggacctcagagctgctgggttgggttaaggatgtcttccaacaatgcgctcctggttgggatagggatgctttgttacgcgagcttgagttcgtttgtaagatattccgtttaagtgaggatgcaaaagggagagtgttgttcaggaaatgtctagatctgattgaaaggctgaggaacactccagctgattccatcaatcctaggatgatactacaagcactccaagagcttgagatggactcccccaagatctctgaaaatgaagatgttgggcatctgatcacaccccaggaagcctgcaaccgcatagcagaggtagtccaagaggccgtgagaaagatggagctcgtggcagaagaaaagatgcgactttacaagaaggctcgcctcgccgtggaggcctgcgaccgagagctggaggagaaggttagggaagcccaggagctgaaggcagagcgtcagcgcaagaagcagcaggtggaggagctggagagcatcgtgcggttgaagcaggcggaagcggagatgttccagctgaaggcgaacgaggcccggcaggaggcggagcgtctgcagagcattgcgctcaccaagtccaagacagccgagcaggactatgccagcatgtacctaaagcggcgcctggaggaggcggaggcagagaagcagttcctcttcgagaagatcaagctgcaggagaatcagaggccaacggtcggcgtgggcagcagcagcggtgcgggaggggactccacgccgatgatgatgctatccaagattcaggatctgctcaagaacgtccgcagcatgccagcaaagtcggagggtcactagctcgagacccagctttcttgtacaaagtggt

SEQ ID NO: 403 - DNA, 943 bp, Glycine max
tcctctatataaggaagttcatttcatttggagaggaccaggtggtaccatggcgaaccctgaaggcagtagcagaggctctagatggtcccttaagggaaccactgctctcgttactggaggaacgcgtggaattgggcacgctgtggtggaggaactagcggagtttggtgccacagtgtacacttgttcgaggaatgaagaagagctgaatgcatgcttgaaggagtggaaagagaagggattttcggtttctgggttggtttgtgatgcgtcttctccaccccatagagagaacctcattcaacaagtggcctctgctttcaacggcaagctcaacatacttgtaaacaatgttggaacaaatgtgaggaagccgacaattgagtatacagccgaagaatattcaaaattgatggcaactaacttggactccacataccatttgtgccaacttgcatatcctcttcttaaagcatctggaaatggaagtattgtgtccatttcctctgttgcaagtcagacaagcgtaggttctggagccatttacgcagcaactaaagctgctattgatcagcttaccaaatattttgcttgtgaatgggcaaaagacaatataaggagcaacggtgttgcaccctggtataccataacttcacttgtggaacctttgcttgcgaacaaacagcttgttagtgagataatatctcgaacgccgataaagcggatggcagaaacacatgaagtttcatccttggtgactttcctttgcctgccagcagcatcctacatcactggacagattgtttcagttgatggaggattcactgctaatggatttcaacccagcatgagaatttcttaggcgatcgcgggccctgatcacctgtcgtacagtatttctacatttgatgtgtgatttgtgaagaacatcaaacaaaac

SEQ ID NO: 404 - DNA, 943 bp, Glycine max
cccactatccttcgcaagacccttcctctatataaggaagttcatttcatttggagaggaccaggtggtaccatggcgaaccctgaaggcagtagcagaggctctagatggtcccttaagggaaccactgctctcgttactggaggaacgcgtggaattgggcacgctgtggtggaggaactagcggagtttggtgccacagtgtacacttgttcgaggaatgaagaagagctgaatgcatgcttgaaggagtggaaagagaagggattttcggtttctgggttggtttgtgatgcgtcttctccaccccatagagagaacctcattcaacaagtggcctctgctttcaacggcaagctcaacatacttgtaaacaatgttggaacaaatgtgaggaagccgacaattgagtatacagccgaagaatattcaaaattgatggcaactaacttggactccacataccatttgtgccaacttgcatatcctattcttaaagcatctggaaatggaagtattgtgtccatttcctctgttgcaagtcagacaagcgtaggttctggagccatttacgcagcaactaaagctgctattgatcagcttaccaaatattttgcttgtgaatgggcaaaagacaatataaggagcaacggtgttgcaccctggtataccataacttcacttgtggaacctttgcttgcgtaggcgatcgcgggccctgatcacctgtcgtacagtatttctacatttgatgtgtgatttgtgaagaacatcaaacaaaacaagcactggctttaatatgatgataagtattatggtaattaattaattggcaaaaacaacaatgaagctaaaattttatttattgagccttgcggttaatttcttgtgatgatctttttttttattttctaattatatatagtttcctttgctttgaaat

SEQ ID NO: 405 - DNA, 973 bp, Oryza sativa
acaagtttgtacaaaaaagcaggctcctgcaggaccaggagaggagatggagcggccggcgccggtgaggaagtcccacacctcgacggccgacctcctcgcctggccgcagcagcagcaccagcccgacggccacgccgcctccaccccctcccccgctcgccgcccccaccagccatcggaggcgctgaggaaggtggtgttcggtggccaggtcacggaggaggaggccgagagcctcaacaagaggaagccatgctccgcgcccaagtggaaggagatgaccgggagcggcatcttcgcggccggcgccgacggggaggcggaggagcccggcagcgccgccgcgcccggccgcgccgccccgcgcaattaccagccagttactgtgagccacatttcatttgctgaggatggaagtgttcctcccaaaaagccaacttcagtggctgaggtagcaaagcagcgtgagcttagcggtactctgcaaagtgaagcagacagtaagatgaagaagcagatttcaaatgcaaaatcaaaggaactcagtggccatggcctttttgaccctcaagatgtaaggcctaatggggcaaggaacacagcaaatggcaccggtgcctcacacacacctgtgagaaatgcaaatgtgagcagcttctcgtttggggaggccaacactgacagcgtgacgaaaactgcaaagaagataactggcaagaaattcaccgatctcacaggcaacaacatattcaaaggagacgaggcccctgcttctgcggagaagcatctgagcaccgcgaagctgaaagaaatgactgggagcaacatattcgcggaaggacaggcgccaacccgagagtatcatagcgggaaccgcaagcctcctggcggcgagagcagcattgcgctggtttagcattctggtggacaccgtcgtagctcgagacccagctttcttgtacaaagtggt

SEQ ID NO: 406 - DNA, 1030 bp, Glycine max
acaagtttgtacaaaaaagcaggctcctgcaggaccatgtcaaccgcggcagcggcggggggcgacatggaggcgggtttcgcgaagctccagggcgaggactttgagtattacatgcagacctactccatcgtcctcggccgcaactccaagaagtccaccgtggacgtcgacctatccagcctcggtggtggcatgaacatctcccgccaccacgctcgcatcttctatgactttgcccgacgccgcttcgccctcgaggtcctcggcaagaatggctgcctcgtcgagggcgtcctccacctccccggcaacccccctgtcaagctcgattcccaagatctcctccagattggggacaaggagttctattttctcctgcccgttcgcagcatcttgggcgggcccgtgggcccgaggcattaccctaaccacgctactcccgggccggttgttcctcactataataattaccatttgggccccggcccggtgaagaaggcaccgcggagggagtattatgaggaggagtttgacgatgaagatgatgttggtggaaggaagatgcggagggatgggtatgatggctatggctacgctggtggcaagtcttcgctgtcagcacctatggataagaagtctgaaggcagatcccgagtagatcgagatgctgataatcttcagcttcagcagctggaagaaaaggatgtagtatcatctgtagctactgttctttctgatctctgcggtcctggagagtggatgcctatggagaaacttcataccgagctgttggagcaatatagcagtgtttggcaccacaacagagtgaggaggtatctcacatcagaagattggcctggtcctgaatccaaagggaagccttggtatggcttgcttatgctgttaaggaaatacccggagcattttgtcatcaacacaaggtccaagggccgtgtcacccatgagtttgtttctcttgtctctcttctatcgtagctcgagacccagctttcttgtacaaagtggt

SEQ ID NO: 407 - DNA, 859 bp, Zea mays
acaagtttgtacaaaaaagcaggctcctgcaggaccatgtcagagctgaaatcatccagtagctgtagtaatctagcctggtctggtgacattcgtctgaaagaagtccatttctcttatccattgagatctaatgtggagattttaaatggccttgaccttacaattgagtgtggaaaagtcacagcacttgtcgggcctagtggtgctgggaaaagcacagtggtacaacttctagcacggtattatgagccaactcaaggttccatcactgtcgcaggagaagacatccgtgtatttgacaaaagggaatggtctcgagtagtatctctagtcaatcaggatccggtcctattctccgtgtctgttggagaaaatattgcttatggtctcccagatgatgttgtctctaaggatgagataataaaagctgctaaagctgccaatgctcatgaattcatcatctctcttccacaggggtatgatactcttgttggagagcgaggtagtctcctaagtgggggacaaaggcagaggattgcaattgcacgagccctcttgaaaaatgctcctattctaatacttgatgaggctactagtgcactggacgcgacaagtgagcgactcgtgcaggaagctctcaatcacttgatgaagggaaggacttctctggtcattgctcacaggttgagtaccgtacagaatgcacatcgaattgctgtttgttcagagggcaggataactgaactggggacacaccgagaactggttgctaagggaggcagttatgcatcacttgtcgggacacagagacttgctttcgagtagctcgagacccagctttcttgtacaaagtggt

SEQ ID NO: 408 - DNA, 529 bp, Glycine max
acaagtttgtacaaaaaagcaggctcctgcaggaccatggcaacttgtttcgctccgttctccgtttcaggtggatctcatgagctgtggttaacaaagcgagttggacctaagctcactgttcaaaggagatcaaaccttgtgatcaagaggaaccacacttcttcaattagtgcagaataccgtgataatagaggaggtggaggtggggattttgttgctggctttcttctgggtggtgcagtttttggaactctagcttatatctttgctccccagatcagaagatctctgctaaacgaagatgagtatgggtttcgcaaggccaaaagaccaatatattacgatgaagggttagagaggaccaggcagaccttgaatgagaagataggccaactaaactctgccattgataatgtatcttcccgtttgagaggtggcaacaacgtacctgctgcaaagatagaaagtgatcctgaggtggaagctaccatgtagctcgagacccagctttcttgtacaaagtggt

SEQ ID NO: 409 - DNA, 499 bp, Glycine max
acaagtttgtacaaaaaagcaggctcctgcaggaccatgacggaggcatatataaggaagaagcccgggatggcgagcgtgaaggacatgccggttctccaggacggtccaccaccaggcgggttcgctccggtccggttcgcccggcgcatccccaacaagggccccagcgccgttgccatcttcctcactgctttcggcgctttctcttggggcatgtaccaggtcggccagggcaacaagatccgaagggcactgaaggaagaaaagtatgctgcccgccgatccatactgcctgtgctacaggctgaagaggatgagagatttgttaaagagtggcataaatatctcgagtatgaggcagaagtgatgaaggatgtgcctggttggaaagttggtgaaagtgtgtatcactctgggagatgggtgcccccagcaagtggtgagttgcgtcctgatgtatggtagctcgagacccagctttcttgtacaaagtggt

SEQ ID NO: 410 - DNA, 646 bp, Glycine max
acaagtttgtacaaaaaagcaggctcctgcaggaccatggccaagaagagaaaatccatatccacaagcctcgacgaggtggatcgaaccatctactcttccttctccagtgccaccaattccctctctcacctctacactctctccatgaaccaccagaaactctccttccaagccggtgaacgccactcccttgaaaaactctatcagtgggtctggaggcaacaagagagtggatcaagagttgcaactgttgatatactcagctacattcagaatgagctggattactgtggagaggagccatgcatgtcccctagagctccactgcatcaacaacagtcacaaccggtaatgcaagtcactactggtgcaggttttccagtaactacaggattttctggccaaactattgtggggcaggagctcagacctgagcactgtgataatcaatcaaagaattctatgttttcaaatgctttgtcaaaccctgttcgtcaaattggtgagggagggaaccacccaagtggtctttccatggggaatggaaaccagagcaccgactctgctgctttcagttccaatgattctgccatggacatgcatgcagactagctcgagacccagctttcttgtacaaagtggt

SEQ ID NO: 411 - DNA, 1354 bp, Arabidopsis thaliana
acaagtttgtacaaaaaagcaggctcctgcaggaccatggcgacggctttcgctcccactaagctcactgccacggttcctctgcatggatcccatgagaatcgtctcttgctcccgatccgattggctcctccttcttctttcctcggatccacccgttccctctcccttcgcagactcaatcactccaacgccacccgtcgatctcccgtcgtctctgtccaggaagttgtcaaggagaagcaatccaccaataataccagcctgttgataaccaaagaggaaggattggagttgtatgaagatatgatactaggtagatctttcgaagacatgtgtgctcaaatgtattaccgaggcaagatgtttggttttgttcacttgtacaatggccaagaggctgtttctactggctttatcaagctccttaccaagtctgactctgtcgttagtacctaccgtgaccatgtccatgccctcagcaaaggtgtctctgctcgtgctgttatgagcgagctcttcggcaaggttactggatgctgcagaggccaaggtggatccatgcacatgttctccaaagaacacaacatgcttggtggctttgcttttattggtgaaggcattcctgtcgccactggtgctgcctttagctccaagtacaggagggaagtcttgaaacaggattgtgatgatgtcactgtcgcctttttcggagatggaacttgtaacaacggacagttcttcgagtgtctcaacatggctgctctctataaactgcctattatctttgttgtcgagaataacttgtgggccattgggatgtctcacttgagagccacttctgaccccgagatttggaagaaaggtcctgcatttgggatgcctggtgttcatgttgacggtatggatgtcttgaaggtcagggaagtcgctaaagaagctgtcactagagctagaagaggagaaggtccaaccttggttgaatgtgagacttatagattcagaggacactccttggctgatcccgatgagctccgtgatgctgctgagaaagccaaatacgcggctagagacccaatcgcagcattgaagaagtatttgatagagaacaagcttgcaaaggaagcagagctaaagtcaatagagaaaaagatagacgagttggtggaggaagcggttgagtttgcagacgctagtccacagcccggtcgcagtcagttgctagagaatgtgtttgctgatccaaaaggatttggaattggacctgatggacggtacagatgtgaggaccccaagtttaccgaaggcacagctcaagtctagctcgagacccagctttcttgtacaaagtggt

SEQ ID NO: 412 - DNA, 1162 bp, Zea mays
acaagtttgtacaaaaaagcaggctcctgcaggaccatggaacttgccgggacatggaggaaggtgatgccttacatggccatggtgtttcttcagttcggcttcgccggaatgttcctcatctccgtcgcgtccctgcggcagggaatgagccactatgtccttgttgtctaccggaacgtagtggcagccattgtcatggctccattcgcgctatggtttgagaggaaaacaaggcctaaaatgagcctaccggtgttcatcaagatccttgctttgggattactcgaacccgtgcttgaccaaaacttcatctacatgggagtgaatagcacatcagcaagcttctcctctgcgttaaccaacatattgccagctctaacttttgtaaatgccatcatactcaggatggagaggatagtgattaaggagcgacgaagccaggctaagattgcaggcacagccataacagtctgtggtgccttgcttatgatacttttcaagggccccatcatcaacttcccatggagcaagcacgccagccacgccgtatctgacagcggcgtccacaacagcggacactggctcatgggcacgttcatgatcctgttaagctgcttctgctggtctgccttcttcatactccagtcatatacgttgaggagttacccatctgagctctctttaaccactctgatatgcgcaatgggcgccacggagagtggcgcggtcgccctagtcatggagcgtgacaccaaggcttggtccatcgggtttgacatgagactcttcacggccatatactcgggaataatgtgctctggagtagcttactacgtgcaagggatagtgattaaggacaggggcccagtgttcgtgactgcgtttagcccgctctgcatgattttagtgactgtgctaggctccttcattctttctgaggtcgtcactttaggaaggctcattggtgcgacagtcattgttgttggactctatgcgctcatctggggcaagaacaaggaccatgtgaagtcgcaaaacagttttgacaagcacgacacatttgagctgccgttctctacttctgccgttaacaatacaaccggtcccgtcctggcaacatctatttagctcgagacccagctttcttgtacaaagtggt

SEQ ID NO: 413 - DNA, 1876 bp, Oryza sativa
acaagtttgtacaaaaaagcaggctcctgcaggaccatgaagtacgtgctggtgacaggaggggtggtgagcggcctcggcaagggcgtgaccgcgagcagcatcggcgtcgtgctcaaggcctgcgggctccgcgtcaccaccatcaagattgacccatacctcaacactgatgctggaaccatgtctccgttcgagcatggtgaggtcttcgttttggacgatggtggagaggtggacttggaccttggaaattacgaacgttttctggacatcaaattgacccgtgataacaacataaccacgggaaaaatatatcagtcagtcattaacaaagaaaggagaggagactacttggggaaaaccattcaggttgtgccacatattacagatgaaattcaagattggattgaacgtgtagcgatgaatccggtcgatggtaaagaaggacctcctgatgtttgtgtcatagaacttggtggcaccataggggatattgaatcaatgccctttattgaagcattaggtcaattttcctaccgtgttggacctggaaacttctgtctggtccatgtcagtcttgttccagttttaaatgtagttggtgaacagaaaactaaacctacccagcatagtgttcgtgggctaagaggccttggattggcacctgacattttagcatgtcgcagtaccgagccactggaagaaaacgtgaaagcaaagctctcacaattttgtcacgttccagtctcaagtattattaatctccatgacgttacaaacatttggcacatccccttgttgctaagggaccaaagggcccatgaagctattctgaaagttctagaccttcaatttgtcggtaaagtaccacgagaacccaagttggttgaatggaccgaaagagccagcaagtttgacaagttgaaggctacggttaagattgcgatggttggaaaatatactgggctgtccgattcctacctgtctgttctaaaggcacttttgcatgcatcggttgctatgggaagaaagcttgtagtggagtgggttccttcctgtgatcttgaagattctgcagccaaagagacccctgaagcccataaaaaagcatggaagctactcaagggtgcagagggtatacttgtccctggaggctttggagatagaggtgttcagggaaaaattcttgctgcaaaatatgcacgagaaaataatgttccttatctcggcatttgcttgggtatgcaaattgcagtgattgattttgcctgttctatcatgaaattaccgggtgcaaatagcacagagtttgacccagatacaatgtcaccctgcgtcattttcatgccagagggttccaaaacccatatgggggcaactatgcggcttggatcaaggagaacatatttccatgccactgcatgcaaatctgcaaagctgtatggtaatgctagattcgtagacgaaagacatcgacacagatatgaggtaaatcctgaaatggtaccagagtttgagaaggccggactttcatttgttggcaaggatgagagtggaagacgcatggagattattgaactacccagtcataaatttttcattggagtacagttccatcctgaattcaagtcaagaccagggaagccatctccacttttcttaggattaatagcagcagcatctggacaactagaaactttgctccaaccaagttccaacattgtcaatccaaatcctatgcccagatttcccattcccaaaaagacgatttaccatgccaagaagccactggacagcttggtaaacggatactttgcaaatggcaacgtcatccacacttagctcgagacccagctttcttgtacaaagtggt

SEQ ID NO: 414 - DNA, 1879 bp, Zea mays
acaagtttgtacaaaaaagcaggctcctgcaggaccatgaagtacgtgctggtgaccggaggggtggtgagcgggctcggcaagggcgtgacggccagcagcatcggcgtcgtgctcaaggcctgcggcctccgcgtcaccaccatcaagatcgatccatacctcaacaccgatgctggaaccatgtcgccgttcgagcacggggaggttttcgttttggacgatggcggagaggtggacttggaccttggaaactacgaacgttttctggacatcaaattgacccgcgacaacaatataaccacgggaaagatcttccaggctgtcattaacaaggagaggagaggcgactacctagggaagaccgtccaggtagtgccgcacatcacggatgagatacaggactggatcgaacgcgtcgcggtggtcccagtggacggcaaggaagggcctcctgacgtctgcgtcatcgagctcgggggcactataggggatatcgagtcaatgcctttcattgaagcgttaggtcaattctcgtaccgtgttggacctggaaacttctgtctcgttcatgtcagtcttgttccggttctaaatgtagtcggtgaacagaaaactaagcctacacagcacagtgttcgagggcttagagggcttgggttagcgccggatgttttagcatgtcgcagtactgagccattggaggaacatgtgaaggccaagctttcacagttttgccatgtcccggtctcaaatatagtgaacctccatgacgtgacaaacatctggcacatccccttgctgctaagggaccagaaggcccatgaagcgattctgaaggttttagacctccagtatgatggaaaggtgcctcgggaacctgagctaacaaagtggactaaaagagccaccaagtttgacaagttgaagactccggtcaagattgccatggttggaaaatacactggcctgtcggattcctacctgtctgtcataaaggctcttttgcatgcatcggttgctatggaaagaaaacttgtagtcgagtgggttccttcctgcgacctggaagattcttcagctaaagagacccctgaagcccataaaaaagcatggaaattgctgaagggcgcagatggcgtactcgtccctggagggtttggggacaggggagtccagggcaaaatcctcgccgcgaaatacgcacgcgagaacaacgttccttatcttggcatctgcctgggaatgcaaatcgcggtgatcgagtttgcccgctcggtgatgaagctacgaggcgccaatagcacggagttcgatccagctacgacgtcaccctgtgtcatcttcatgccagagggctcaaaaacccaaatgggagccacgatgaggcttgggtcgaggaggacctatttccatgtcagtggctgcaaatctgcgaagctgtacggcaacgccagctctgtagatgaaagacatcgccacagatacgaggtgaaccctgacatggtcccagactttgagaaggccgggcttcagttcgtgggcaaagatgagagtgggaaacgcatggggatcgttgagcttccctctcacaagttcttcatcggtgcacagttccatcctgaattcaagtcgagaccagggaagccatctccgcttttcttagggctgatagccgcggcgtctgggcagctagaaccattgcttcagcgcagcaacccgacaacgaaagcatgttcgatcagtaaagtcccgaaactgaaactgtaccccactgggcctgtgaataatccactgaacagcttggtgaacgggtactacccaaatggcactgggatccacacctagctcgagacccagctttcttgtacaaagtggt

SEQ ID NO: 415 - DNA, 1631 bp, Zea mays
gcagtcgctgtcgttaccatggatgggaatgctgagacgatccaattctcatggggcaagcgtcgagggaaaggtggtgctaagatggatacacagttctttgggtccttcacattggacaatgtgaagtattcactgtttgactgtgtctatctatttaagcatggtgatcctgaaccgtacattggaaaaatagtgaagatctgggagaaagataatgataaaaaagtaaaaattctttggtttttccaccctgatgaggttcagaactatttaagtggccctgtgatgggaaaggagatttttcttgcctgtggtgaaggtgctgggcttgcagatatcaacccgctggaagctgtcgctggaaaatgcactgttatatgtacttcaaaggataagaggaatcgtcaaccatcccctcaggaactacaaattgctgattatatcttctatagggtctttgatgttaaaagtctaacactttctgatcagttaccagataaaattgctgcatttacagttgatcttcttctgaatccaaaagatgagctagtcatacctgcaaatgttctggtgaatccaaatgtggatgagggtatggttgccacagttcctacacccccttcagcagttaaattggaggatcgaagtcaggctgctgcacttccccttacgcagacaggccaggtggatgaaaatctgcctgccacagttccccttccccaatcagaggtcaaggaggaacagaaaccagtcattgccattcccatttcccagactgtggtcaagaaagaggataagaaatcactttctgacattcccctttcccattcagcagtcaaggaggatgagacaccagttgcttcaattggccctccacagtctgcagttatggagaacattcccaaacatacacagttacaggatgctcatgctggggagaggccaccaaaaaagttgaaattatcccaagaaactacagagcaggacatagatccaacgaatactgaacaaagacctttggagctacagccaaagaatattgacagaagcaaatggtttaacattgaatggaatgacagactaaagatggctgatgataaggggacacttgtctatattcaaaatctcgatattcggtttggacctgctgacatagaggagttagttcgtaaagcattacagctaaattgtactgcgaagcccattaaccaccccacatatgatgatccaaacaatggcaaagcatatgctatattcagaactaaagatgctgctgatgctgccatttcaaaaatcaattctggtttggttgttggtggaaggcccctgtactgcagcaaagggttacttgaggttccaaaaccttcagcgaatcttgttgggcacctctcctcatatgttaagattggtcaaaagcagcgcgacgagcagaagaaggctgtagcaacctcgcattgttcccagcccaacacgatcgagtacgacttggccttggactggatgcttcttcgggaaaagcaagaccagagcttcagagtacttcacaagaagcacagagaagccaggaaagggttcgcaagcctggtcggcaaaggatccaaggcagagtagaacccagcggtactcgc

SEQ ID NO: 416 - DNA, 457 bp, Glycine max
acaagtttgtacaaaaaagcaggctcctgcaggaccatggggaggttgtttgtggtgaatctggaagggaagatctatagctgcaaacactgccatacccatcttgcgctttacgatgacatctactccaggacattccattgcagacatgggaaagcttatctcttcaataaggttgtgaatgtttctattggcgaaatggaggacagaccgatgatgactgggttacataccgtggctgacattttctgtgtgggttgtggatcaatcgtgggttggaaatatgagactgcctatgaaaaaaaccagaagtacaaggaaggaaaatcagtgcttgaacggtacaaagtgtcaggtcctgatggaagcaattattggatcagcaatgaggcacatgttggtggaagtgatgcagatgatgcttagctcgagacccagctttcttgtacaaagtggt

SEQ ID NO: 417 - DNA, 1780 bp, Arabidopsis thaliana
acaagtttgtacaaaaaagcaggctcctgcaggaccatggaagaaaaagatgtgtatacgcaagatggaactgttgatattcacaaaaatcctgcaaacaaggagaaaaccggaaattggaaagcttgccgcttcattctcggaaatgagtgctgtgaaagattggcctactatggcatgggcactaaccttgtgaattatcttgagagccgtctgaatcaaggcaatgctacggctgcaaataacgtcacgaattggtctggaacatgttatataactcctttgattggagcctttatagctgatgcttaccttggacgatattggactattgcaacttttgttttcatctatgtctccggtatgactcttttgacattatcagcttcagttcctggacttaaaccaggtaactgcaatgctgatacttgtcatccaaattctagtcagactgctgttttctttgtcgcgctttatatgattgctcttggaactggcggtataaagccgtgtgtttcgtcctttggagctgatcagtttgatgagaatgatgagaatgagaagatcaagaaaagttctttcttcaactggttttacttctccattaatgttggagctctcattgctgcaactgttctcgtctggatacaaatgaatgttggttggggatggggtttcggtgttccaacagtcgcgatggttatcgcggtttgctttttcttcttcggaagccgtttttacagacttcagagacctggagggagtccacttactaggatctttcaggttatagtagcggcttttcggaagataagtgttaaggttccagaggacaagtctctgctctttgaaactgcagatgatgagagtaacatcaaaggtagccggaaacttgtgcacacagataacttaaagttttttgacaaggcagcggttgagagtcaatctgatagcatcaaagacggggaagtcaatccatggagactatgttctgttactcaagttgaagaacttaagtcaataatcacacttcttccagtttgggccacaggaatagtcttcgccacagtgtacagccaaatgagcacaatgtttgtgttacaaggaaacacaatggaccaacacatgggaaaaaactttgaaatcccatcagcttcactctcacttttcgacactgtcagtgtactcttctggactcctgtctatgaccagttcattatcccgctggcaagaaagttcacacgcaatgaacgaggcttcactcagcttcaacgtatgggtataggtcttgtggtctccatctttgccatgatcactgcaggagtcttggaggttgtcaggcttgattatgtcaaaactcacaatgcatatgaccaaaaacagatccatatgtcgatattctggcagataccgcagtatttacttatcggttgtgcagaagttttcacctttataggtcagcttgagtttttctatgatcaggctcctgatgccatgagaagtctctgctctgctttgtcgttgaccacggttgcgttggggaactatttgagcacagttcttgtgacggttgtgatgaagataacgaagaagaacggtaaaccgggttggataccggataacttgaaccgaggccatcttgattactttttctacttgttggcaactctcagtttcctcaacttcttagtgtacctctggatttcaaaacgctacaaatacaagaaagctgttggtcgagcacattagctcgagacccagctttcttgtacaaagtggt

SEQ ID NO: 418 - DNA, 1543 bp, Arabidopsis thaliana
acaagtttgtacaaaaaagcaggctcctgcaggaccatgttggcaatggagaaagaatttgattcaaagcttgttcttcaagggaactcatccaacggtgctaatgtttctagaagcaaaagcttctcctttaaagctcctcaagaaaatttcaccagccatgatttcgaatttggcaagatctatggtgttggttcttactctaaggttgttagggcaaagaagaaggaaactggaactgtgtatgctttaaagattatggacaaaaagtttatcaccaaggagaataaaactgcttatgtgaaattggaaaggattgttcttgatcaacttgaacatcctgggatcattaaactttacttcacgtttcaagacacatcctcactatatatggcacttgaatcttgtgagggtggcgagcttttcgaccaaataaccagaaaaggtcggctatcggaggatgaagctcggttctacactgcagaagttgtggatgctcttgagtatatacatagtatgggactgattcatcgagatattaagccggagaatctgttgctgacttcagatggacacattaagattgcggattttggaagtgtaaagccgatgcaggatagccagatcacagttctacctaatgcagcttctgacgataaggcgtgcacttttgtcgggactgctgcatatgttcctccagaagttctcaactcctctcccgcaactttcgggaatgatctttgggctctcggctgcactctctatcagatgctttcggggacttccccatttaaagatgcaagtgaatggctgattttccaaagaattatagccagagatataaagttcccaaatcatttttcagaagcagcaagagacctcatcgaccggttgctggataccgagccaagcagaaggccaggtgctggctcagaaggttatgttgctcttaagagacatcctttctttaatggagttgactggaagaatctaaggtcccagactcctccaaaactagctccagatcctgcgtctcagacagcatctcccgagagggatgacacacatggttctccatggaacctgacacatattggagattctttagccacacagaacgaggggcacagtgctcctcctacatcttctgaatcatcgggttccataactcgacttgcttcaatagactcttttgattcaagatggcaacagtttttagagccaggagaatcggttctgatgatatcagcggtgaagaagcttcagaaaataacgagcaagaaggtgcagctaatactcaccaacaaacccaagctgatctatgtcgacccgtcaaaactagttgtgaaaggaaacattatatggtctgataactcgaatgacctcaacgttgtagtcactagcccttcacatttcaagatttgcacgccaaagaaggttttatcatttgaagacgcaaaacagagagcttcagtgtggaaaaaggcaatcgagactcttcagaaccgctagctcgagacccagctttcttgtacaaagtggt

SEQ ID NO: 419 - DNA, 1669 bp, Zea mays
acaagtttgtacaaaaaagcaggctcctgcaggaccatggagcagtacgaggtggtggagcagatcggccggggcgcctacggctccgcctacctcgtcctccacaaggccgagcgcaagaggtacgtcatgaagaagatccgcctctccaagcagaacgacaagttccagcggaccgcttaccaggagatgtccctgatggcaagcctcagcaacccgtacatcgtcgagtacaaggacggatgggtggacgaggggacctccgtctgcatcgtcacaagctactgcgaaggaggggacatggccgagaggatcaagaaggcaaggggcatcctattctcagaagagagggtgtgtcggtggttcacgcaattgctcctcgccctcgactacctgcactgcaaccgtgtgctccaccgtgatctcaagtgttccaacattttattgacaagggataacaatatcagactcgctgactttgggctggcaaaactgctcatggaggaccttgcctcatcggttgtaggaaccccaaactatatgtgcccagaaatactagcagacataccttatggatacaaatccgatatatggtcacttggttgctgtatgtttgagattttagcacaccgacctgcatttaaagctacagacatggcagcattagtcaacaaaataaacagatcttcaatatctccaatgcccccaatatactcatcagcactgaagcagatcgtgaagagcatgctaaggaaaaatccagaacataggcctactgctggggagctgctgaggcatccacatctgcaaccatatctttctgaatcgtccaactgttcaccgatctatcttccggtgaaacccaccaaaggtaacctggtagacaagcagtcaaagaagccaagcagtggcagaaagcgagctgtcaaagccaatggatccaatggaacattagaaactgcagcagagcacgctgtggaagcaagagacagctccacaaacttctcagatgtatcaactataggtacccaggaagccttgatattgcaaatgccggtggatcctgatgccggaagcaaagaagagcagaacgttgatgttgtaccgtttcagcatgcggcagagaatctgatggcgacaaccgatagacaggtcgatgcgaccatacgtcttaaagccataagaaccagtaacgcaaaagaggcggccccggtcacagttgcagaccaaaagttcaacgaggcgccaataccaaatgaggaactgacaatcggggtagtgcaggaacaaaggaaggacgtgaagccacgctcttaccaggcaggaaaaccagagatgtgtgacacaaccgtaacggaggaatcgtcgcccatcagcacgctaaagctggcgcacacggagagcgcgcccgcggagtgggaccacctgaacatagtccagcagagggccgacgcgctggagtcgctcctggagctctgcgcgaagctcctggagcaggagaggctcgacgagctcgcgggcgttctccggccgttcggcgagggcgccgtgtcgtctagggagacggcgatctggctgaccaagagcctgatgacccccccacccaagttcggagagtccccgacgaagcttctgtagctcgagacccagctttcttgtacaaagtggt

SEQ ID NO: 420 - DNA, 2002 bp, Zea mays
acaagtttgtacaaaaaagcaggctcctgcaggaccatggatcagtacgaggtgctggagcagatcggcaaaggagcatttggctctgctctgctggtcaggcacaagctggagaggaagaagtatgtgttgaaaaagatccgtcttgcgcgtcagacagaccgcactcgccggtccgcccaccaagagatgcagctcattgctaatgtgaggaatccattcattgtggagcacaaggattcatgggtggataagggttgctacgtctgcattgttatagggtactgcgagggaggagacatggctgaagctattaaaagggctaatgatacccacttttctgaggagaagctttgccagtggctagtgcagcttctcatggcccttgactatttgcatgcacatcacattcttcaccgtgatgtgaagtgctcgaatatatttctcactagggaccaaaacataagactcggtgactttggtctcgcaaaaatattgaccgccgatgatctggcatcctcgattgtaggaacaccaagttacatgtgcccagaactcctcgccgatataccttatggtaccaaatctgatatttggtcactaggatgctgcatgtatgaaatggctgcgctcaaacctgcttttagagcttttgatatgcaaaaccttatcaacaagattaccaagtcgatagtatcacctttgccaacaagatattctggtgcatttcgaagacttgttaggagcatgctacggagaagtccagagcataggcctagtgcagccgaactacttaagcatccacatctggaaccgtacgtcctgcaactccatctgaagtcacacctttctcgcagcatagttcctgttcaccagtctccaagtgagaagaggatgacattcgccgcagagcccgtttgcaggagcaagggcaggaggaactctttaggcagcgaaaggatgatagcagcctttagcaaaccttctcctgatagaagttctgtcagctctattcggagtgtcaaggacgagtacaccgccacacagagtgtcagagagctatccgttgatgacagcatggtcgaggttgccagtaaacccgtggcatcaaggacctcagatgtcatgaggactccgaaggcgactccgtggaagatgatgacgactctgaggaatcggctagaagctccacaagcatcatatgaccatacagagttttcaagaacaccggttgacaagaggaacagccgcgtggcccgcagagcatcgcttcctctgcccgtatttgagaccccgaagcagcgcagcagcatgagcgtcctggagcagctggagtcccccgacgtctccgtgaactcgcctcgcatcgacagaatcgccgagtttccgctagcttcgtgcgaggaccccttgttctcgaccgtgaagccaccgacacccgccagcgccagcgccagcgccacgcctccgttcgtggaccggtccatcaccaaggacaagtgcacggcccagacgctccggtccgcggcccgcgacggtggcaacggcagaagcgaggacggcggcggtttgtcctcgggtcgcaccaccaccacggcagcgtcaagcggtgggacgtcggggtcgttgcagccgaaggggcggttcgacacgacgtcgtaccagcagcgcgcggaggcgctggagggcctgctggagttcagcgcgcagctgctgcagcaggagcggtacgaggagctcggggtcctgctgaggccgttcggccccgacgagatggtgtcccccagggagacggccatctggctcaccaagagcttcaaggaggcgatggccacgggcttgcagcggtggcctccttgcaccggcatggacggatcaggaattcaggatcgcccatcagccttgcaggctgtagacggccggatggcatcgccggtgctggcgtgtgtaggtcaggtaggtaggctatagctcgagacccagctttcttgtacaaagtggt

SEQ ID NO: 421 - DNA, 664 bp, Arabidopsis thaliana
acaagtttgtacaaaaaagcaggctcctgcaggaccatggcgaccgatgatgtgaacgagcctctcccggcggcggcggaattaccggcgacagaggcggagaaacaaccacacaagctcgaaagaaagtggagtttctggttcgataaccaatcaaagaaaggcgccgcctggggagcttctcttcgtaaagcctatactttcgacaccgtcgaagatttttggggattgcacgagactatatttcagactagcaaattgacagcgaatgctgaaattcacttgttcaaagctggtgttgagccaaagtgggaagatccagagtgtgctaatggaggaaagtggacttgggttgttactgctaataggaaggaagctttagacaaaggctggcttgaaactttgatggctttgattggagagcaatttgatgaagcagatgagatttgtggtgtggttgctagtgtccgtccacagtcgaagcaagacaagctctccttgtggactaggacgaagtctaatgaagctgttctgatgggtattgggaagaagtggaaggagatacttgatgtcaccgacaagataactttcaataaccatgatgattccagaagaagccggttcactgtctagctcgagacccagctttcttgtacaaagtggt

SEQ ID NO: 422 - DNA, 781 bp, Glycine max
acaagtttgtacaaaaaagcaggctcctgcaggaccatggttgtagaagatacccaaaagtcagtcatcacggaggaccaataccctagcagggtcgtcagcgacaacaacaacgacgacgacgacgatgatctcgaagagggtgagatccccgtcgacggcgaagatagcggcgccaccgccacaacgaagcctccggccgccctcgcccgaaacccccaccctctggagaattcctggaccttctggttcgacaacccttcctccaagtccaaacaagccgcatggggcagctccatccgacccatctacactttcgccaccgttgaagagttttggagcatttacaataacattcaccacccgagcaagttgggtttgggggcggactttcactgcttcaagcacaagattgagccaaagtgggaggaccctatctgcgccaatgggggaaagtggactatgaccttcccaaggggaaaatctgataccagttggttgtatacgttgttggcgatgattggagaacagtttgatcacggagatgaaatatgtggagctgttgtgaatgtcagaagtaggcaggataaaattgctatttggactaagaacgcttcaaatgaagctgctcaggtgagcattggaaagcagtggaaggagtttcttgattacaatgacacaattggctttatatttcatgaggatgcaaagaagctggacagaggtgctaaaaataaatacgttgtatagctcgagacccagctttcttgtacaaagtggt

SEQ ID NO: 423 - DNA, 778 bp, Glycine max
ggtaccggcgcgcctcagcagtcgctgtcgttaccatggttgtagaagatacccaaaagtcagtcatcacggaggaccaataccctagcagggtcgtcagcgacaacaacaacgacgacgacgacgatgatctcgaagagggtgagatccccgtcgacggcgaagatagcggcgccaccgccacaacgaagcctccggccgccctcgcccgaaacccccaccctctggagaattcctggaccttctggttcgacaacccttcctccaagtccaaacaagccgcatggggcagctccatccgacccatctacactttcgccaccgttgaagagttttggagcatttacaataacattcaccacccgagcaagttgggtttgggggcggactttcactgcttcaagcacaagattgagccaaagtgggaggaccctatctgcgccaatgggggaaagtggactatgaccttcccaaggggaaaatctgataccagttggttgtatacgttgttggcgatgattggagaacagtttgatcacggagatgaaatatgtggagctgttgtgaatgtcagaagtaggcaggataaaattgctatttggactaagaacgcttcaaatgaagctgctcaggtgagcattggaaagcagtggaaggagtttcttgattacaatgacacaattggctttatatttcatgaggatgcaaagaagctggacagaggtgctaaaaataaatacgttgtatagaacccagcggtactcgctgaggcgatcgc

SEQ ID NO: 424 - DNA, 775 bp, Arabidopsis thaliana
acaagtttgtacaaaaaagcaggctcctgcaggaccatggcggtagaagacactcccaaatctgttgtaacggaagaagctaagcctaattcaatagagaatccgattgatcgataccatgaggaaggtgatgatgccgaagaaggagagatcgccggaggagaaggagacggaaacgttgacgaatcgagcaaatccggtgttcctgaatcgcatcctctggaacattcatggactttctggttcgataatcctgctgtgaaatcgaaacaaacctcttggggaagttccttgcgacccgtgtttacgttttcaactgttgaggaattttggagtttgtacaacaacatgaagcatccgagcaagttagctcacggagctgacttctactgtttcaaacacatcattgaacctaagtgggaggatcctatttgtgctaatggaggaaaatggactatgactttccctaaggagaagtctgataagagctggctctacactttgcttgcattgattggagagcagtttgatcatggagatgaaatatgtggagcagttgtcaacattagaggaaagcaagaaaggatatctatttggactaaaaatgcttcaaacgaagctgctcaggtgagcattggaaaacaatggaaggagtttctcgattacaacaacagcataggtttcatcatccatgaggatgcgaagaagctcgacaggaatgcaaagaacgcttacaccgcttagctcgagacccagctttcttgtacaaagtggt

SEQ ID NO: 425 - DNA, 909 bp, Zea mays
atggcatcagttacttatattgatgatagccatgctgaggttattgatcctccaaagaatgaggaaatgctggatgccactgaacttgttggtgatcatattcagaattcaccaaaaccaaatgtggcaagctatggcaacgtgcgtgagctactggaatgccctgtgagcttgagtgccatgtatcctccaattcatcagtgctccaacggacatactctgtgttctggatgcaagccaagggttcataatcgctgtccaacatgcaggcatgaactgggtaacataagatgccttgctctggaaaaggtggctgcatcactagagcttccatgcaagtaccagaactttgggtgcttgggcatatatccttactattgcaagctgaaacacgaatcgcaatgccaatacagaccatatacttgtccatatgctggatctgaatgcacggttgctggtgatattccgtatctagtaaatcacttgaaagatgaccataaggtcgacatgcacaatggaagcaccttcaatcatcgttatgtcaagtcaaatcctcatgaagtcgagaatgctacctggatgctcacggttttcagctgcttcggccagtacttctgcctgcacttcgaggctttccagctgggcatggcgcccgtgtacatcgccttcctccggttcatgggggacgacgctgaggccaagaactacagctacagcctggaggtcgggggcagcgggcgcaagatgacatggcagggcgtgcctcggagcatcagagacagccaccggaaggtccgggacagctacgacgggctcatcatccagcgcaacatggcgctcttcttctcgggtggcgacaggaaggagctcaagctgcgggtcaccgggaggatctggaaggagcagtag

SEQ ID NO: 426 - DNA, 1849 bp, Zea mays
acaagtttgtacaaaaaagcaggctcctgcaggaccatggagagcacgctcaaggggatacgcggcagcgatgcgccgtgcgttctggacctggacgacgcggccaccgtggcgggcggcgtcgaggacacctacggcgaggatcgcgccaccgaggagcagctcgtcacgccctggaccgtctccgtcgccagcggttacaatctgcttagggatccccgttacaacaagggacttgcgttcacagagagggaacgtgagacgcactacctccgtggccttctgccaccagctattgtatcccaggagctccaggagagaaagatcatgaataatattcgacaataccagttgcctttgcagcgctacatggcactcatggatctccaggaagggaacgagaggcttttctacaagttgctcattgacaacgtcgaggagttacttccaatcgtgtacactccaaccgttggcgaggcctgccaaaaatatggatccatatttagtcgccctcagggtctttatatcagtttgaaggagaagggaaagatccttgaggtgttgaagaactggccagagaggagcattcaggttatagttgttactgatggtgaacgtattttggggcttggagatctcggatgccaggggatggggattcctgttggtaaactttccctttacactgccctgggaggagttcgtccatctgcttgcttgccgatcacattggatgttggtacaaataacgaggagctgcttaatgacgaattttacattggcttgagacaaagaagagccactggccaggagtacactgattttctgcaagaatttatgactgctgtgaaacaaaactatggggagaaagttcttattcagtttgaggattttgccaaccataatgcttttgatcttcttgcaagatatggcaccactcaccttgtattcaatgatgatattcagggaacagcttctgtggttcttgctgggcttattgcagcacaaacattacttggtggttcattggcagatcacacttaccttttccttggtgctggagaggctgggacaggtatagctgaacttatagctcttgagatctcacgtcagacgaaagctcctatagaggagtgccgcaagaaaatctggcttgttgattcaaagggcttgattgtcagtacacgaaaggagtcccttcaacacttcaagaaaccatgggctcatgagcataaaccactcagcaacctcttagatgctgttaatgctatcaaaccaacagtgttgattggcacatccgggaaggggcaaactttcacaaaagacgttgttgaagcaatctcctcatttaacgagagaccaatcattcttgccctatcgaacccaacatcacaatctgaatgcacagctgagcaagcttacacatggagcaagggacaagcagtgtttgcgactgggagtccatttgatcctgtggagtacaatggcaagatacatgttcccggacaggcaaacaatgcctatatcttcccagggtttggcctcggcgtggtgatgtctggagctatccgcgttcatgacgacatgcttctggcagcatcggaggctctggcccagcaggtcacagaagaaaattttgagaaggggctgatttatcctcccttctcaaacatcaggaagatctctgcccacattgcagccagcgttgcagcaaaggcatatgaacttggtttggcaagtaggcgccctcggccaaaggacctggtgaaatatgcagagagttgcatgtacagccccatctaccgcaactaccgttagctcgagacccagctttcttgtacaaagtggt

SEQ ID NO: 427 - DNA, 1447 bp, Zea mays
acaagtttgtacaaaaaagcaggctcctgcaggaccatgatcgaggaggtggagcgcagcctcgccacgcccacggcgctgctgcggggcatcgcggacgccatggtcgccgagatggagcgcggcctgcgcggggacatccacgcgcagctcaagatgctcattagctacgtcgacaatctccccaccggagatgaacatgggctgttttatgcactggatcttggagggaccaacttccgtgtgctgcgagtccaactaggaggaagggagaaacgtgttgtcaaacaacagtacgaggaggtttccattccaccgcatttgatggtcgggacttccattgaactatttgatttcattgctgctgcattggctaaatttgttgatactgaaggtgaagatttccacctcccagagggtaggcagagagaacttggtttcacgttttccttcccagtgaaccaaacatcaatatcatcaggaacactcatcaagtggacaaagggcttttccatcaatggcacggttggtgaagatgttgtttctgagttgagcagggccatggagaggcagggactagatatgaaagttacggcattggtcaatgatacagttggcacattggctggtgggagatatatggataacgatgtagttgcagccgtaatattgggcactggtacaaatgcagcatatgtggagcatgcaaatgcaattcctaaatggactgggttactgcctaaatctggaaacatggtaattaatacggaatggggaagctttaaatccggcaagcttcctctctcagaatacgacaaagccatggactttgaaagtttgaaccctggagagcagatatacgaaaaaatgatttctggcatgtatctgggagagattgttcgaagaattttactcaagttggcacatgacgcttctctatttggagatgttgttccaactaagctggagcagccatttatattgaggacgccagatatgtcagccatgcatcatgactcttcgcatgacctcaaaactcttggatctaaactgaaggatatagttggggtcgcagatacttccctggaagtaagatacattacccgtcacatctgtgaccttgtcgcagagcgtggagcacgcttggctgccgcaggtatatatagcatcctgaagaagataggccgggacaaagtaccaagcagtggcagtaaaatgccaaggactgtaattgccttggatggtgggctctatgagcattacaagaagttcagcagctgcgtcgaagcaactcttacagacttgctcggcgaagaggcctcttcctccgtggttgccaagctggccaacgatggctctggcattggagctgctctccttgcagcctcacactcccagtatggcgagagtgactagctcgagacccagctttcttgtacaaagtggt

SEQ ID NO: 428 - DNA, 775 bp, Zea mays
acaagtttgtacaaaaaagcaggctcctgcaggaccatgggtgctggtggtgtcatccctcctccaaagacctattttgacaaggtccaagcaatcgtcaagaagtatgacattcttttcatagcagatgaggtgatcactgcatttggaaggctgggaactatgtttggatgcgattactataacatcaagccagatctagtttcactggccaaggctctttcaaacgcctacgtacccatcggggcaactcttgttagcccagagatatcagatgtgatccattcccagagcaataagcttggttcatttgctcatggattcacgtactccggccatccggttgcctgtgctgtggccattgaagctctgaaactttatcgcgaaagggacattcccggccatgtcaagcaaatcgccccaaagttccaggacgggattagggcgctggcagacagtccgattataggggagatacgtggcttggggatgattatggggaccgaattcacaaacaacaagtcaccgactgatctgttccctgccgaatggggggttggtgccatcttcggcgaagagtgccagaagcgcggcatgctggtcagggtcgctggcgacgccatcatgatgtcgccgacgctgatcatgacgcccggcgaagtcgacgagttggtgcgcatctacggggaagccctcaaggccacggaggagagggtggcagccctgcagtccaagaagaactagctcgagacccagctttcttgtacaaagtggt

SEQ ID NO: 429 - DNA, 1049 bp, Zea mays
gcagtcgctgtcgttaccatgggcaagatcaagatcggaatcaacggtttcggaaggatcggcaggctcgtggccagggtcgccctgcagagcgaggatgtcgagctcgtcgccgtcaacgaccccttcatcaccacggattacatgacctacatgttcaagtacgacaccgtgcacggccaatggaagcacagcgacatcaccctcaaggactccaagacgcctctcttcggcgagaagccggtcaccgtctttggcatcaggaaccccgaggagatcccgtggggtgaggctggtgctgagtatgtcgtggagtccaccggtgtcttcactgacaaggacaaggctgctgcacatctgaagggtggtgccaagaaggttgttatctctgccccaagcaaagatgcacccatgtttgttgttggtgtcaatgaggacaagtacacctccgatgttaacattgtttccaatgctagctgcaccacaaactgccttgctccccttgctaaggtcattcatgacaactttggcattattgagggcttgatgacaactgttcatgccatcactgccacccagaagactgttgatggaccctcagccaaggactggagaggtggcagggctgccagctttaacatcattcccagcagcaccggtgctgccaaggctgtcggtaaggttcttcctgaattgaatggcaagctcactggcatgtccttccgggttcccaccgtggatgtgtcagttgtagacctcactgtcagaatcgagaagggggcctcctacgaggaaatcaagaaagctattaaggccgcttctgagggcccactcaagggtatcatgggctacgtggaggaggatctggtttccaccgacttcaccggtgacagcaggtcgagcatcttcgacgccaaggccgggattgccctgaacgaccacttcatcaagctcgtctcgtggtacgacaacgagtggggctacagcaaccgcgtcgtcgacctgatccgccacatgttcaagacccagtagaacccagcggtactcgc

SEQ ID NO: 430 - DNA, 1495 bp, Zea mays
acaagtttgtacaaaaaagcaggctcctgcaggaccatggggcggcacggcgtggaccagatcggcgctgtggcagcgttcgtctgggtcaccctccttcccttgctgcttgtgtgcgtcgtgtggccgggcgcccaggccggccatacaagcgagtaccggcgccaactcggctccgccatcgacatgccactcgacgccgatgtcttccgccctcccccgggctacaatgcgcccgagcaggttcacatcacacaaggcaatcatgatggcacagccatgataatctcatgggtgacaacaagtgagcctggctcgagtactgtgatctacgggacttcagaggataacctcaactatactgcaaatgggaagcatactcagtatactttctacaactacacctcaggatacattcatcattgcacaataaaaaagttggagtttgacacaaagtattactatgctgttgggattggacaaacggtgaggaagttttggtttttgacccctccaaaaagcggcccagatgttccatatacactcggtctcataggtgatcttggtcagagctttgattccaatgttacgctcacccattatgagtccaatgcaaaagcacaagcagttctttttgttggggacttgtcatatgcagataactacccatatcatgataatgtgagatgggatacttgggcaagatttgtagaaaggagcgttgcgtaccagccttggatctggactgctggaaatcatgagatagatttcgctcctgaacttggtgaaacaaagccattcaagccattcagccataggtatcccacaccctacaaggcttctggtagcacggcaccttattggtattccatcaaaagggcctctgcctacattattgtcttggcatcgtactcagcatacggaaaatacactcctcagtacaagtggcttgaagctgaatttcccaaggtcaacaggagcgaaacgccatggttggttgtcctcatgcatgctccatggtacaatagctataactatcactacatggaaggtgaaaccatgagggtgatgtatgagccatggttcgtgaagtacaaagttgacgttgtgtttgcaggacatgtccacgcctacgaacgcacacacaggatatcgaatgtcgcatacaatgttgtgaatggcctgtgcactccaatccctgatcaatcggccccagtttacatcaccatcggtgatggagggaaccaggaaggattggctaccaacatgtcgcagccgcagccgagctactcggccttcagggaggcgagcttcgggcacgccatcctggacatcaagaaccggacacacgcgtactacacgtggcaccgcaaccaggacgggagcgcggtggccgccgactccatgtggtttaccaatcggtactgggaaccgacggacgattcggccgacgatttccaatagctcgagacccagctttcttgtacaaagtggt

SEQ ID NO: 431 - DNA, 1372 bp, Zea mays
acaagtttgtacaaaaaagcaggctcctgcaggaccatgttgggggaccagcgcatgatactgggcttagactcggcaacctcatcaagcactgcccctgatttgacccgcgctgaagaggatccttctgtgagcaggagctgcgtgatcgaccgcctgcaggtggggtgggcgcagaagggaggacaggtggagggtctggtgaattgttatagcaagaagaacaagaccggcagtggttcgaggaatcttgcagccagagcctggtcctccgagatggagggttctgatgagggtggtgaagtcaacacgggcgacctcattggcgggatcggcagggagttggccatttcatgcctgctccgtcttccccggtcttactattatgatgtggcatgtgttaatcgatctttctactcccttgtgaggtttggggagctttacaggttgaggcgtgaggctgggatcgtcgagcagatgatctactgctcatgcaatgttctcgagtgggaaggttttgatccgcgccgccaacggtggttcagcatcccttccatgcctcccatagaatgcttcacacttgctgataaagaatccctggccgtgggcaccaacatcctcgtctttgggaagagggtggaagcccatgttgtgctgaggtatagccttctcactaactcttggactacaggagagatgatgaacacaccaaggtgcttgtttggctccgcaagcttcggtgagaaggctattgtagctggcggtattggccagaacggtacattggactctgctgagctttatgattctgagatgcagacatggaccactcttccaagcatgaatagggcacggcagatgtgctctggtttcttcatggatggcaagttctatgtcatcggtgggaaatctgagaggcacaatgagatccttagttgtgctgaggattttgacttggagagcagcacctggcgcttgatcccagatatggcacagggccttaatggtggaagtggtgctccacctcttgttgctgttgtgaataatgaactttatgctgctgactatgcaacgagggaggtcaggaaatatgacaaggaaagtaatgcatggatcactcttggattgttacccgggaggtatacatcagttcatggctggggcattgctttccgtagttgtggaaatatgctcattgtaattggtgcaatgagtgctggtggtagcggggtgattgaaatttgttcctgggtacccaataatggactgccagattggaagatcattggcacccgccgttccggaagctttgtgtacaattgtgctgtgatgagttgttagctcgagacccagctttcttgtacaaagtggt

SEQ ID NO: 432 - DNA, 1225 bp, Zea mays
acaagtttgtacaaaaaagcaggctcctgcaggaccatgtcaggcaggggcaagggcggcaaggggctcgggaagggcacccctcgtgttcccttttcgtccttgttcctcaacgtcgccggtgcgcccgcctcctgcctctctccccctgcgagcgatcgtgaggggatcgggatggcctcccaccattccgagcccctcgaccccgccgacgctgacgacccctcagataacaacccagaattaccatgcccctcctatcatatcgttaccaaacctggtcaactcccagtcgagtttcttgaacccccagctacccagaagttggtaattggatttgactgtgaaggtgttgatctctgccgcaatggtgctctctgtattatgcagcttgcattccctgatgctgtttacctagttgatgctattgagggtggaaaagaacttattcaagcttgtaagcccgcacttgagtctgatcatatcaccaaagttattcatgattgtaaaagggacagtgaggctttgtattttcagtttggcataaaactgcataatgtgatggatacacagattgcttattctctgatagaagagcaggagcaggaaggaaaaaagatgacatctgatgattacaattacatatcttttgtcagccttcttgctgataaacgatactgtggcatactatatcctgaaaaggaagaagtccgtacccttctaaggcaggaccctaacttttggacaattaggcccttgtctgatatgatggttcgagctgccacagatgatgtccgcttccttctcagtatatatgcgaaaatgatggaaaagttaagcaaagtatctttatggcgtctggcagttcgcagtgagctgtactgtaggtgcttttgcttaagcgacaaccagtttgcagattggtcacctcttcctcctgtccctgatgacattgaggctgatgtttatgttcctgaagccgatatcctgtcagtcttagatgtgcctcctgggaaaatgggacgagttattggcagaaaggggtcaacgataatggctgtgaaagaatgttgcaaggttgaaatacatattggtggtgctaaggggcctccagacagggtgttcatcattggaccagagaaggaggtcaggaaagctgaggccatctttcgaggccgaatgctggagttctagctcgagacccagctttcttgtacaaagtggt

SEQ ID NO: 433 - DNA, 1462 bp, Zea mays
acaagtttgtacaaaaaagcaggctcctgcaggaccatgccaccaccccctcaaaggccacggaatcgtcctaagcatcctcaggggccaggagatgctcctaaaggttcagaaagccacactgttcaaagtaacaagaagcaaggccttgggacaggtccgcttgtgggcataattgctggatcaatagttgctgttttatgtgtgtttctgcttctgttatgctgcatgtgcaatgctcagaaaagaactgatgatgccagcagtgaatcaaaagattttggaggacctctaacagtaaacattgagagagcttctagcagggaaatcccagagcagatggatgacacgtctatagcaactgtgaagctcccacctgctgagaaaatgactcctgagagagtttacggtaaaaatggttctgtaagaaagacaaaggtccccataactgcaacaccttatactgtcgcttctctccaagttgctactaatagtttctgtcaagattctcttctgggtgagggctcacttggtcgtgtttataaggccgatttcccgaatggaaaggttcttgctgttaaaaagatagatagcgccgcactttctttacaggaagaagacaatttccttgaggctgtatcgagcatgtctcggctaaggcatccaaacatcgtgccattgacaggatattgtgttgaacatgggcaaagacttcttgtctatgagtacattgtaaatggaacgctgcatgatatgttgcacttctctgttgaaataagcaggaagcttacatggaacatccgcgtaaggatagcactaggcactgctcgagcacttgagtacctgcatgaggtgtgcatgccgtctcttgttcatagaaatttgaagtcttcaaacattctactagatgaggagcataatccacacctatctgactgtggacttgctgccttgactccaaatactgaaagacaggtttcaactgaagtatttggatcatttggctatagcgccccagagtttgcaatgtctggcatttatactgtaaagagcgatgtatacagttttggagtggtaatgttagagctattgacagggcggaagccactagacagttccagagagaggtcagaacagtctcttgttagatgggctacccctcaacttcatgatattgatgcacttgctaggatggttgatccagcattaaacggaatgtacccagctaaatcactctctcgttttgcagacgtaattgcactctgcgttcagcctgagccagagttccgcccacccatgtcagaggttgtccagcaacttgtgcgcttgatgcagagggctagcatcgtgaggcggcaatcaggagaagagctagggttttcatacagagtcccagaacgagaaggagacctgagagacatttccttatagctcgagacccagctttcttgtacaaagtggt

SEQ ID NO: 434 - DNA, 1369 bp, Zea mays
acaagtttgtacaaaaaagcaggctcctgcaggaccatgtcaacggccaccgcgccgtctccgtccccgtccccttctccctcgtctggaactcgccctctgctccggatcggcgcggcccgtcgtttcgccatggcatttccgccatgggcggctctgctctttgcgggggttctggtggtggtgttggcggcggcgggagcggaagcgggaggagggagcgtctgcttcgaccggatgttcagcttcggggactcgctcacggataccggcaacttcctgctctccgtgcccgacgacttcccggaccccgcgcggaaccttccctacggccagaccttcttcggccgcccctccggccgttactccgacggccgcaacctgctcgacttcttcgcggaggcatttgggctgccgtatgtgccaccatacctaggcggcggggacttccagaatggtgcaaactttgcggtcggcggggcaactgccctcaatggctcgttcttccgtgaacgcggcgtggagcctacatggacgcctcactcccttgatgagcagatgcaatggttcaagaagcttctcacatccattgcaccgttggagacagagcaaaacaaaataatttccaagtcacttttctttgtgggagaggtcggcggaaatgattacaaccatttaatcgttagggataaatctgttgatgagctacatgaagttgttcctaatgttgttggtgccataagctcggccatcacggatcttataaatcttggagcaaagaagttagttgttccagggaacttcccaatagggtgcgtcccattatatcttgcaatctttcagagccaaaaagaggattactatgaggaacaaacaggctgcattaagtggctcaatgatcttgctgagtaccataataagatgcttcaggaggagttggagaaactcaggaatcttcaccctgatgtgaccatcatttatgctgattactatggtgctgcattgaacatattccgtgccccactccagtttggtttcacagtcccattgaatgcgtgttgtggaagtgatgccccatacaactgttccccttcaatatcgtgcgggcgtcctggatctacagtgtgccctgacccatcaaaatacatctcatgggacggcctacacttcactgaggcgagttacaaagttgtcattcaaggagtacttggggggtatgccaagcctcccctttcagaaacctgcaagggtgcggaattcaaagtttctcagcttcaccaatgtacagataatccaacaaacactgtatcatacgatgctttgagctcttttatttagctcgagacccagctttcttgtacaaagtggt

SEQ ID NO: 435 - DNA, 1672 bp, Zea mays
acaagtttgtacaaaaaagcaggctcctgcaggaccatggctgctatggccgccgctggcggcgtcgggctccacctcattggcgctgccacggccacgctcatcgtggcggtccttgttgcggccgtgctggggcgccgccgccgggcccgggcccgggcccaggcgcctccggtggaagggaaacccgcgccggaggcaggctgcgcggtcggtgacggcgcgggtcccgacgtcgggacggacgtcatcatcgtcggcgccggagtggctggatctgcgctggcgtacacgctcggaaaggatggccgccgggtgcatgtcatcgagagggatctgacagaacctgacagaattgtgggcgagctgttgcaacctggaggttacttgaaattaattgagttaggcctccaagattgtgtggaagaaattgatgcccaacgggtgcttggttacgcattattcaaagatggaagaaacacaaagcttgcttatcccttagagaagttccattctgatgttgctggtaggagctttcacaatgggaggtttatacagaggatgcgtcagaaagctgcgtctttgcccaatgttcaattagaacaaggaactgttacatcacttcttgaagaaaatggtactgttaaaggtgttcaatacaaaaccaagtcaggtgaagaactaaaagcttatgcgcccttgacgattgtatgtgatggctgcttttcaaatctacggcgtgccctttgctctccaaaagttgatgttccatcatgttttgttgggctggtattggagaattgccaacttccacatccaaaccatggccatgttatcttggccaatccttcgccaatactattttacccaattagcagcacagaggtgcgctgtttggttgatgtccctggtcagaaggtgccttccatagctagcggtgaaatggcaaattatctcaaaaccgtcgttgcaccccagattcctccagaaatatatgactctttcatagcggccattgataagggaagcataagaacaatgccaaacaggagcatgccagcggctccacttcctacccctggcgcacttctgatgggggatgccttcaatatgagacaccctttaactggtggaggaatgactgttgcattatccgacatcgttgtcctacgtaatcttctcaagcctctccgcaatctccacgacgcatcttccctgtgcaagtacctcgaatcattctatacgctgcggaagccggttgcctccaccataaacacgttggccggtgctctgtacaaggtcttcagcgcctcgcctgatcaagctaggaacgagatgcgccaggcctgttttgattacttgagcctcggaggcgtcttctcgaatgggcctattgccttactctcgggtcttaatcctcggccactgagtttagttgcacacttcttcgctgtcgctatctacggtgtcggtcgcttgatgctccctcttccttcacctaaacggatgtggattggagccaggctgatttctggtgcatgcggcatcatcctcccgatcatcaaagctgaaggcgtgagacagatgttcttccctgccactgtgcccgcatattaccgggctgcgcctacgggagaatagctcgagacccagctttcttgtacaaagtggt

SEQ ID NO: 436 - DNA, 744 bp, Zea mays
atggcgatggacgcggagcggcggcaggcggagctgatcgcgcagttctccgctcaggcggcggcgctttcgtccgcgccccagctcgccgcgctggtgcttgaggccacctcccacccggccctcttcgccttctccgagctcctcaccctcccggccctctccaagctcactggcacgcagtacgcgtcgtcactggacttgctccggctcttcgcctacggtaccctgaatgactacaagagtaattctggattccttccagcactgttgcctgaccaggtccgaaagctaaagcagctcagcgtgctaactctggcagagtcaactaagatactaccgtatgatcagctcatgcaagagttagacgtttcaaatgtaagagaactcgaagatttcctaatcaatgagtgcatgtattcgggtatcgttagaggcaaactggatcagctgagaaggtgctttgaggtacaatttgcagctggaagagatcttacacctgatcagctaaagaacatgatagagactttgtctgattggttgggaacatcagatagactgttgcatcaaattcaggagaaaatcaagtgggctgacacaatgagtgaggtgaacaagaagcaccagaaagaatttgaagacagagtggaagaggccaaaaaatcaatcaagaagttaaacaatttaagcaggcagacattgacttacgggggcatgacgagtttctctctgaatctggaggaa

SEQ ID NO: 437 - DNA, 444 bp, Sorghum bicolor
atgtcgtcgtcacgcgggagctcgagccccgacagcaacaacaacacggacgtgagcggcggcggcggaggcgggttcgccgcggacgagcggaagcggaagcggatgctgtcgaacagggagtcggcgcgtcggtcccgcgcgaagaagcagcagcggctggaggagctggtggcggaggtggcccgtctgcaggcggagaacgcggcggcgcagtcccgcatcgcggcgttcgagcgcgagttcgccaaggtggacggcgacaacgccgtgctgcgcgcccgccacggggagctgtccagccggctcgagtcgctcggcggcgtcctggaggtgcttcagatggccggcgccgccgtcgacatcccggagatggtcactgaagaccccatgctccgcccctggcagccgtcgttccccccgatgcagcccatcgggttctga

SEQ ID NO: 438 - DNA, 1377 bp, Arabidopsis thaliana
atgactctcacgttttcctcctccgccgcaaccgttgccgttgctgctgcaaccgtaacctcctccgctagggttccggtttatccactcgcttcgtcgactcttcgtggattagtatctttcagattaaccgcgaagaagctgtttctgccgcctcttcgttctcgcggcggcgttagtgtgagagccatgtctgagctagttcaagataaagaatcgtccgtcgcggcgagcattgctttcaatgaagccgccggtgagacgccgagtgagcttaatcattcccgtactttcttggatgcgcgaagtgaacaagatcttttatctggtatcaagaaggaagctgaagctggaaggttgccagcaaatgttgcagcaggaatggaagaattgtattggaactacaaaaatgcagttttaagtagtggagcttccagggcagatgaaactgttgtatcaaacatgtctgttgcttttgatcgcatgcttcttggtgtggaggatccttatacttttaatccatatcataaagcagtcagagaaccatttgactactacatgtttgtccatacatacatccgtcctcttattgatttcaaaaattcgtacgttggaaatgcttctatattctctgagctggaagacaagattcgacagggacacaatatcgtgttgatatcaaaccatcaaagtgaagctgatccggctgtcatttctctattgcttgaagcacaatctcctttcataggagagaacattaaatgtgtggctggtgatcgagtcatcactgatcctctttgtaagccgttcagtatgggaaggaacctcatatgtgtttactcgaaaaagcacatgaatgatgatcctgagcttgttgacatgaaaagaaaagcaaacacacgaagcttaaaggagatggctacaatgctaaggtctggcggtcaacttatatggattgcaccaagcggtggaagggaccgcccgaatccttctactggggaatggtttcctgcaccctttgatgcttcttcggtagacaacatgagaagactggttgaacattctggcgctcctggacatatatatccaatgtctttgctttgctatgacatcatgccccctccaccccaggttgagaaagaaatcggagagaaaagattagttgggtttcacggtactggactatcaattgctcctgaaatcaacttctcagacgtcacagcagactgcgagagccctaatgaggcgaaagaagcatacagccaagctttgtacaagtcggtgaatgaacaatacgagatcttaaactctgcgattaaacacagaagaggagtagaagcatcaacttcaagggtctctttgtcacaaccttggaat

SEQ ID NO: 439 - DNA, 456 bp, Glycine max
atggcatgttctgatcactcaagcgcgagcactaccacagaaatcaatgctcagtattatcaacaagaatctgcaaagctgcgacagcaaatacagatgctgcaaaattctaacaggcacctgatgggtgatgccttaagcacactgactgtgaaggaacttaagcagttggagaatagacttgaaagaggaatcactagaatcagatctaagaaacatgagatgctactggctgaaattgaatacttccagaaaagggagattgaactggaaaatgaaaatctttgcctccgaactaagataactgacgtggagaggattcagcaagtaaacatggtttctgggccagaactgaatgccattcaggcattagcttcccgtagcttcttcaatccaaatatgttggaaggtggaactgtttaccctcactcagataagaagattcttcatcttggg

SEQ ID NO: 440 - DNA, 972 bp, Arabidopsis thaliana
atggagacggaagaagagatgaaggaaagtagtataagcatggtggaggcaaagttgcctccgggattcagatttcacccgaaggacgatgagcttgtctgcgattacttgatgagacgatcgcttcacaataatcatcgaccacctcttgtcctgatccaagtcgatctcaacaagtgtgagccttgggacatcccaaaaatggcatgcgtgggagggaaggattggtatttctacagccaaagagaccgaaaatacgcgacggggctgagaactaaccgagcaacggccaccggatattggaaagccaccggcaaagacagaaccattctaagaaagggtaagctagttgggatgaggaagacattggttttctatcaaggtcgagctcctcgaggccgtaaaaccgattgggtcatgcacgaattccgtctccaaggatctcatcatcctcccaatcattctctgagctctccaaaggaagactgggtcttgtgtagggtattccataagaatacggaaggagttatatgtagagacaacatgggaagctgttttgatgagacagcctctgcatcgcttcctccactgatggatccttacatcaactttgaccaagaaccctcttcttatctcagtgatgatcatcactacatcatcaatgagcacgtaccctgcttctccaatttgtcacagaaccaaaccttaaactcgaacctaaccaactcagtctctgaactcaagattccatgcaagaaccctaaccccttgtttactggtggttcagcctcagccacgctcacaggcctcgactcattctgttcttcagatcagatggttctcagagctctactcagtcagctcactaagattgatggaagcctcgggcctaaagaatcacagagttatggagaaggtagctcggagagcctcctgaccgacatcggtattccaagcactgtttggaattgc

SEQ ID NO: 441 - DNA, 1185 bp, Arabidopsis thaliana
atggctaattcgttttcacaagtacctcctggcttcagatttcatcctactgatgaagaacttgtagactactacttgaggaaaaaagttgcatcaaagagaatagaaatcgatatcatcaaggatgttgatctttacaagattgagccatgtgatcttcaagagttatgcaagataggaaacgaagagcagagcgaatggtacttctttagtcataaagacaagaagtatcccacgggaactcgaaccaatagagccacgaaagcaggattttggaaagccactggaagagacaaggctatatatataagacatagtcttatcggtatgaggaaaacacttgtgttttacaaaggaagagccccaaatggtcagaaatccgattggatcatgcacgaatatcgcttagaaacaagtgaaaatggaacccctcaggaagaaggatgggtagtatgtagggtattcaagaagaaattggcagcgacagtgaggaaaatgggagattaccattcatcaccatcgcagcattggtacgatgatcagctctcttttatggcctccgagatcatttctagttctccacgacagtttcttcccaatcatcattataaccgccaccatcaccagcagacattgccttgtggcctcaatgcattcaacaacaacaatcctaacttgcaatgcaagcaagagctcgagttacattacaatcaaatggtacaacatcaacaacaaaaccatcatcttcgtgaatctatgtttctccagcttcctcagctcgaaagccctaccagtaattgcaattctgacaacaacaataacacaagaaatattagtaacttgcagaaatcatcaaatatatctcatgaggaacaattgcaacaagggaatcaaagtttcagctctctgtattacgatcaaggagtagagcaaatgactactgactggagagttctcgataaatttgttgcttcacagcttagcaatgatgaagaggctgcagccgtggtttcttcttcttctcatcaaaacaacgtcaagattgacacgagaaacacgggttatcatgtgatagatgagggaataaatttgccggagaatgattctgaaagggttgttgaaatgggagaagagtattcaaatgctcatgctgcttctacttcttcaagttgtcagattgatctc

SEQ ID NO: 442 - DNA, 1734 bp, Arabidopsis thaliana
atggctacgacggagcaagctttgttgtctatggaagctttacctttaggtttcagattcagaccaacggatgaagaactcatcaatcattacctaaggttaaaaatcaacggccgtgatttagaggttagagtcatccctgagatcgatgtttgcaagtgggaaccatgggacttacctgggctatcggtgataaagacagatgatcaagaatggttctttttttgtcctcgtgatcgaaagtatccgagtggtcatcgttctaatagagctactgatattggttactggaaagctactgggaaagatcgaactattaagtctaagaagatgattattggtatgaagaagactcttgttttctatcgtggaagagctcctagaggagagcgtactaattggattatgcatgagtatcgtgctacagacaaggaactagatggtactggacctggtcagaatccgtatgttttgtgtcgcttgttccacaagcctagtgatagttgtgatcctgcacactgtgaggaaatagagaaagttaattttactccaaccaccaccactagatgctctcctgatgacacatcttctgaaatggtccaagaaacagctacatctggtgtacatgctctagatagatcagatgacactgagaggtgtttaagtgacaagggcaataatgatgtgaaacctgatgtttcagtgataaacaatacttctgtcaatcacgctgaaacttctcgtgccaaagaccgtaatttgggcaagacgttagtagaggaaaatccacttctaagggacgttccaactcttcatggacccatcttgagtgagaaatcatattatccaggacagtcaagcatcggttttgctacatctcacatggattctatgtattctagtgattttggaaactgtgattatgggctacattttcaagatggtgcctctgaacaagatgcatctttaacagatgtcttggatgaagtattccataaccataatgaatcctctaatgacaggaaagactttgtacttccgaatatgatgcattggcctggtaatacaagactgttgtctactgagtacccatttctcaaagattctgttgcttttgttgacggcagtgctgaagtttccggctcacagcaatttgttcctgacattttagcttctagatgggtcagtgaacagaacgttgatagcaaggaggcagtagagattctatcttcaaccgggtcctctcggaccttgacgccacttcataacaacgtttttgggcaatatgcttcatcgtcttacgcagctatcgatccatttaactataatgtcaatcagcctgaacagtcatcctttgagcaaagccatgttgaccgcaacattagtcccagtaacatttttgagttcaaggctaggtctcgagagaatcagagagatctggactctgttgtggaccaaggcactgctcctagaagaattcggctgcagatcgaacagccattgacgccagttaccaacaagaaagagagagatgcggacaactatgaagaagaagatgaagtacaatctgccatgtccaaggtcgtagaggaagaaccggctaatttaagtgctcaggggactgctcagaggagaatccgcctgcagacgagattgaggaagcctctcataaccctaaacaatacaaaaagaaactcaaatggcagagaaggagaagcaagccataggaaggta

SEQ ID NO: 443 - DNA, 879 bp, Arabidopsis thaliana
atggctatgaaggttgatcaagattattcgtgtagtataccgcctggatttaggtttcatccgacagatgaagaacttgtcggatattatctcaagaagaaaatcgcctcccagaggattgatctcgacgttatcagagaaattgatctttacaagatcgaaccatgggatctacaagagagatgtaggatagggtacgaggagcaaacggagtggtatttcttcagccatagagacaagaagtatccgactgggactaggacaaaccgagccaccgtggccggtttctggaaagcaacgggccgggacaaggcggtttacctcaactccaaacttatcggtatgagaaaaacgcttgtcttttaccgaggtcgagcgcctaatggccaaaagtccgattggatcattcacgaatactacagcctcgagtcacaccagaactctcctccacaggaagaaggatgggtagtgtgtagagcatttaagaaacgaacgaccatcccaacaaaaaggaggcaactttgggatccgaactgcttattctacgacgacgccactctcttggaacctctcgacaagcgagccagacataatcctgattttaccgccacaccgttcaagcaagaactactctccgaggccagtcacgtccaggatggagatttcggatctatgtaccttcaatgcatcgatgatgatcaattctcccagcttcctcagctcgagagcccctctcttccgtcggaaataactccccatagtactactttttctgagaacagtagccggaaagatgacatgagctccgagaagaggatcactgactggagatatctagataagttcgtggcgtctcaatttttgatgagtggagaagac

SEQ ID NO: 444 - DNA, 1741 bp, Arabidopsis thaliana
acaagtttgtacaaaaaagcaggctcctgcaggaccatggaagctttcatcggcggcggctccgatcattcttctctttttcctccacttcctcctcctcctcttcctcaagtcaacgaagataatctccagcaacgtctccaagctttaatcgaaggagcaaacgagaactggacttacgccgtcttctggcaatcatctcacggtttcgccggagaagacaacaacaacaacaacacagtgttgttaggttggggagatggttattacaaaggagaagaagagaagtctagaaagaagaaatcaaatccagctagtgcagctgaacaagagcatcgtaagagagtgattagagagctcaactctttaatctccggtggtgtaggaggaggagatgaagctggagatgaagaagttacagatactgaatggttcttcttagtttcaatgacacagagctttgtcaagggtactggtttacctggtcaagctttctcaaattcagacacgatttggttatctggttctaatgctttagctggatcaagttgtgagagagctcgtcaaggtcagatttatgggttacaaacaatggtgtgtgtagcgacagagaatggtgtcgttgagcttggttcgtcggagattattcatcaaagttcagatcttgttgataaagttgacacctttttcaattttaacaatggtggtggtgaatttggttcttgggcgtttaatttgaatccagatcaaggagagaatgatccaggtttgtggattagtgaacctaatggtgttgactctggtcttgtagctgctccggtgatgaataatggtggaaatgactcaacttctaattctgattctcaaccaatttctaagctttgtaatggaagctctgttgaaaaccctaaccctaaagttctgaaatcttgtgaaatggtgaattacaagaatgggattgagaatggtcaagaagaagatagtagtaataagaagagatcaccggtttcgaataatgaagaagggatgctttcttttacctctgttcttccatgtgactcgaatcactctgatcttgaagcttcagtggctaaagaagctgagagtaacagagttgtggttgaaccggagaagaaaccgaggaaacgagggagaaaaccggcgaatggaagagaagagcctttgaatcatgtagaggcagagagacagagaagagagaagttgaatcagagattctattctttaagagctgtggttcctaatgtgtctaagatggataaagcttctctattaggagatgctatttcgtatatcagtgagcttaagtctaagttgcaaaaggctgaatctgataaagaagagttgcagaagcagattgatgtgatgaataaagaagcgggaaatgcgaaaagttcggtaaaagatcgaaaatgtttgaatcaagaatcgagtgtgttgatagagatggaggtcgatgtgaagattattggttgggatgcaatgataaggattcaatgtagtaagaggaatcatcctggtgctaagttcatggaagcacttaaggagttggatttggaagtgaatcatgcgagtttatcggtagtgaatgatcttatgatccaacaagcgactgtgaaaatggggaatcagtttttcacgcaagatcaactcaaggttgctctaacggagaaagttggagaatgtccatagctcgagacccagctttcttgtacaaagtggt

SEQ ID NO: 445 - DNA, 1206 bp, Arabidopsis thaliana
atggactatatgtatggaccagggagacaccatctgtttgtaccaggaccagtgaacataccggaaccggtaatccgggcgatgaaccggaacaacgaggattaccggtcaccagccattccggcgcttacgaaaacattgttggaggatgttaagaagatattcaagaccacatcagggacaccttttctgtttcccacgaccgggactggtgcttgggagagtgccttgaccaacacgttatctcctggagacaggattgtttcgtttctgattggacaatttagcttgctctggattgaccagcagaagaggcttaatttcaatgttgatgtggttgagagtgattggggacaaggtgctaatctccaagtcttggcctcaaagctctcacaagacgagaatcataccatcaaagccatttgcattgtccacaacgagaccgcgaccggagttaccaatgacatctctgctgtccgcacactcctcgatcactacaagcatccggctttgctgctagtggacggtgtttcgtccatctgcgcgcttgatttccgaatggatgagtggggagtggacgtggccttgactgggtctcagaaagccttatctcttccaacaggacttggtattgtctgcgccagtcctaaagctttggaagctaccaaaacttctaaatctctcaaagtattctttgactggaatgactaccttaagttttacaagctaggaacctattggccatacacaccttccattcaacttctctacggtcttagagctgctcttgatcttatctttgaggaaggacttgagaacatcatcgcccgccatgctcgtttgggaaaggccaccaggcttgcggtggaagcatgggggctgaaaaactgcacacagaaggaggaatggataagtaacacagtgacagcagttatggtgcctccgcatatagacggttcggagattgtgagaagggcatggcagaggtacaacttaagtcttggtcttggtctcaacaaggtggctggaaaggttttcagaattggacacctaggaaatgtgaatgagttgcaacttctcgggtgtcttgcgggagtggagatgatactgaaggatgttggatacccagttgtaatgggaagtggagttgcagctgcctctacttatcttcagcaccacattcctctcattccctctagaatctag

SEQ ID NO: 446 - DNA, 1224 bp, Oryza sativa
atggcgtcgtcgtccgtcttcgctggcctcgcgcaggcgccggaggaccccatcctcggggtgacggtcgcgtacaacaaggatcccagccccgtgaaggtcaatctcggcgtcggcgcctaccggaccgaggaagggaagcccctggtgctgaatgtggtcaggcgcgctgagcagatgctgatcaacaacccgtcacgtgttaaggagtatttgccaatcactggactggccgatttcaataagctgagtgctaagcttatttttggtgctgacagtcctgccattcaagagaatagggtggctacagttcagtgcttgtcaggaactggttctttaagggtgggaggtgaatttcttgcaaggcattatcatgaacgcactatatacatcccacagccaacctgggggaatcaccccaaagtgttcactttagctggcctgactgttaggagttaccgctactatgatcctgcaacccgtggactggatttccaagggctgttagaagatctcggttcagctccttcaggtgcaattgtactgcttcatgcttgtgcccacaaccctactggagtagacccaactttggaccagtgggaacagatcaggcagttgatgagatcaaaagcattgctgccattctttgatagcgcttatcagggatttgcaagtggaagtcttgaccaagatgctcaatcagtgcgcatgtttgttgctgatggtggtgaattgctcatggctcagagctacgctaagaacatgggattgtatggagagcgtgtcggtgctttaagcatagtttgtggaagtgctgatgtagctgtcagggttgaaagtcaacttaagcttgtaattaggcctatgtattcaaaccctcctattcatggtgcatctatcgtggctaccatacttaaggacagtgcaatgttcaatgaatggaccgtggagctgaagggcatggctgataggattattagcatgaggcaacagctttttgatgctctgaaaacgagagaaactcctggagactggagtcacatcattaagcagatcggaatgttcactttcactgggctcaacagtgatcaagtggctttcatgaggcaggaataccacatttacatgacatctgatgggaggatcagtatggctggtttgagcgggaggaccattccgcatcttgcagatgcaatccatgccgcagtcacaaaactgaagtag

SEQ ID NO: 447 - DNA, 890 bp, Zea mays
aaaaaagcaggctcctgcaggaccatggccgaacgaacgaagccacaagcagcgccgcgagccacagctagcaccaccaccttgcaccgcacccgcaccgagacgaacagatcgaccatggctgccggcggcgacgacaccaccatcgcgcaggtccacagcggcatcgacagcagcaacaagacgctgctcaagagcgaggccctctacaagtacgtgctggacacgtcggtgctgccgcacgagccggagagcatgcgtgagctgcggctggtgaccgacaagcacgagtgggggttcatgcagtcgtccccggacgaggcgtcgctgctgcggatgctgatcaagctgagcggcgcgcgccgcaccctggaggtgggcgtgttcacgggctactcgctgctggccacggcgctggcgctgcccgccgacggcaaggtcatcgcattcgacgtgagccgcgagtactacgacatcggcaggcccttcatcgagcgcgccggggtggcgggcaaggtggacttccgggagggccccgcgctggagcagctggacgagctcctcgccgacccggccaaccacggcgccttcgacttcgcgttcgtcgacgccgacaagcctaactacgtccggtaccacgagcagctgctccgcctggtgcgcgtcgggggtaccgtcgtgtatgacaacacgctgtgggcgggtactgtggcgcttccccccgacgcgccgctcagcgacctcgaccgcaggttctccgccgccatcagggaactcaacgtccggctttctcaggatccccgcgtcgaggtctgccagctcgccatcgccgacggcgtcaccatctgccgccgcgtcgtctagctcgagacccagctttcttgtacaaa

SEQ ID NO: 448 - DNA, 1475 bp, Zea mays
atgccgctgtactacgggaccccggcctcttgctcaggattgagctcggtgagcttgagcaccagcatgcagggggcaatggccagggtgagggccccattcacgccgtcccagtggatcgagctggaacaccaggccctgatctacaagtacctggccgcgaacagccccatacctcacagcctcctcatccccatcaggaggagcctcgctgcgtctccctacccgccttcatacttcggcacgagcacattggggtggggctctttccagctgggctactccggcaatgcggatctggagcctgggcggtgccgccggacggacggcaagaaatggcggtgctccagggacgcggtcgccgaccagaagtactgcgagcgacacatgaaccggggacgccatcgttcaagaaagcatgtggaaggccagcctggccatgccgcgaaagccatgtccgcggtggcggcggcggctgctgctgctacccagcctgctgctatggccggcgccggagctcctgccgctggcctcactgtcaatcagcaccagctgacggcgaagagctacgccacgggtgcgactgacccttgctctctgcaatataacagggaactggtgaacaaacagaacgagagcgaaaacatgcaggactccgacaacctctcgatgctgacttccatgaacacaggaaacacaggcagcgtgttcccattctcgaaacaaaacaccaatccttttgaagtgaccagctcaaggctagagttcggcctcgtttcatcggattcactgatgagttcccctcacagttccttggagaacgtcaacctgctcggctcacagagtatgaatgaacaccagaacccagcctccctgcaacacttcgtggactggcccaggacgcctgcccagggaggcctttcatggcccgaggcagaagacatgcaggctcagaggtcacagctctccatatctgctccgatggcatcctccgagctatcgtcggcctccacatcccccatccacgagaagctgatgctgtcgcctctgaagctgagccgcgagtacagtccgactggtctcggcattgcggcgaacagagacgaggttagccagctagaagcaacctgggcgacgatgttccgtgactcttcgatgggcggtccgttgggggaggttctggccaagaacggcaacgtggaagcgagaaattacctgtcggcgcctctgaaccttctcaccgactactgggattcaagccacgggatggagtcctcccctgtgggcgttctgcagaagacgaccgccttcggatcggtctccagcagtacagggagcagccctagggctgagaaccacggcgcctacgacggtttcggcaacctgcgggatgatctcggctcaattgtagtgcgccatccaagcatccgccttgtgtagctcgagcctgcagggacccagctttcttgtacaaa

SEQ ID NO: 449 - DNA, 2135 bp, Zea mays
aaaaaagcaggctcctgcaggaccatggcctcgtcggcgttcctgcccgagctgggcacgcaggtggtggtgcccgtcgcggccgtggtaggcatcgcgttcgcggtgctgcagtgggtgctggtctccaaggtgaagctctcccccgagccgcgccgcggcgacggctccgccgggaagagcggcgccggcgccggcgccagcgagtacctcatcgaggaggaggaggggctcaacgagcacaacgtcgtcgtcaagtgcgccgagatccagaacgccatctccgaaggagcaacttctttccttttcaccgaatacaagtatgtgggactattcatgggcatttttgctgtcctgatcttcctcttccttggttctgttgagagcttcagtaccaagagtcagccatgccactacagcaagggcaagacgtgcaagcctgcccttgccaatgctatcttcagcaccattgcctttgtgcttggtgcagtcacctctcttgtttctggtttccttggaatgaagattgccacatatgcaaatgccaggacaactcttgaggctaggaagggtgttggaaaggcattcattactgctttccgctctggtgctgtgatgggcttcctgcttgctgctagtggcctttttgttctttatattgcaatcaacttgtttggaatttattatggtgatgactgggagggcctttatgaggctatcactggttatggtcttggtggttcttctatggctctttttggtcgtgttggtggtgggatttacactaaagctgctgatgttggtgctgatcttgttgggaaagtcgaaaggaatatccctgaagatgatccgagaaacccagctgtcattgcggacaattttggtgacaatgttggagatattgctggtatggggtcagatctctttggctcttatgctgagtcttcatgcgctgcacttgtcgttgcctcaatctcttcatttgggatcaatcatgaattcacccctatgttatacccactcctcattagctctgtgggtatcatagcttgcttgataaccactctttttgcaactgatttctttgagatcaaggctgtagatgaaattgagccagctctcaagaagcagcttataatttccactgctgtgatgactgttggcattgcacttgtcagttggttagggcttccatatacattcacaatcttcaactttggtgtgcagaagacggtgtataactggcaattattcctatgcgtggcagttggtctgtgggcaggactagttattggatttgttacggagtattacacaagcaatgcatacagtcctgtacaggatgttgctgactcctgcagaactggagctgctacgaatgtcatctttggccttgctctgggatataaatccgtcattatccctatttttgctattgcttttagtattttcctcagcttcagtcttgctgccatgtacggtgttgctgtggctgctcttggaatgctcagcacaatcgctactggccttgccattgatgcctatggtcctatcagtgacaatgctggaggaattgctgaaatggctggcatgagccacagaatccgcgagagaactgatgctcttgatgctgctggaaatactactgctgccattgggaagggttttgcaataggttcagcagccttggtgtctcttgccctctttggtgcttttgtcagccgtgctgagatctcgactgttgatgttctgacacccaaagttttcattggactgattgttggtgccatgctcccatactggttctcagcgatgacaatgaagagtgttggaagtgcagcactcaagatggttgaggaagtccgcaggcagttcaacaccatccctgggctcatggaggcatcctcttcaaatggctttagaggaagaatggaagatggatgggtagtttatttttgccgggggagagcactagatatatgtcatagagaagtttcagtttacccatatggtgcacttcatccttttttgtttcgcttgtactgtgtcgcagtcttgttgaacttgtcagccgtggtatcacctagttgttgggtctagctcgagcctgcagggacccagctttcttgtacaaa

SEQ ID NO: 450 - DNA, 942 bp, Zea mays
atgtctttccgcagcattgtgcgtgatgtaagagatggctttgggagcttgtctcgaagagggtttgaggtgaagtttctgggccaccgccgaggcagatctcacggtgctgtccatgagctgcgtgatccagccccagtgatccagagcagttgctgggctaatttgccccctgaattgcttcgagatgtgattgagaggttggaggccagtgaagccacatggcctaacaggaagagtgtagtctcttgtgcagctgtttgtcggacctggagagaaatctgcaaagagatcgttaagaatccagagttctctggaaaaatcacttttcctgtgtccttaaagcagcctgggcctcgagatgtaaccatccagtgcttcatcaaaagggataaatctactcaaacctactacttgtatctgtgccttagcacagctgtgcttgttgaaagtggcaagttcctcctatgtgcgaaacggacctcccgcccaacctgtacagaatatacaatatttatgaattctgaaaatttatctaggtcaagcaaaatgtacattggaaagctgaggtcgaatctcctcggcacaaagtttgcaatatatgatacccagcccccatgcaatgcagcagaacccgggaaaacaagccgtcggttctactcccggaaggtgtcgccaaaggtctcctccagcacctacaacatagcgcaggtttcacatgagctgaatgtcttgggtactcggggccctaggcggatgaactgtgttatgcactccatccctacctcgtgccttgaggctggtggcagtgttcccagccagctggacagcatccttgctcgctccactgatgagtcatttggcagcatttccttctccaaatcatctgttgtggaccggtctatgcgtttcagcagctcaagatctccgacatctcaatag

SEQ ID NO: 451 - DNA, 956 bp, Arabidopsis thaliana
atggaggtaccggtgattaatagaataagagatttcgaagttggtataaactcgattaatgatccttcgtttctttctcgatctgttgctgtttccggaatcggaaagctacaccaagcttatggtttttggaaatggggagctttgattatcgcatttctagcttatttcaccaactttgttagtaaactcaacagtctagttgttaggttaagaaaaatagatgtctctgtttcctctccaactctttttgatgattacgatagcgattccgatgtttcttgttcctctaccgtctcctctgacgatgaaaaagacgaagaagatgaggctgatgatgaagatgaggatgttgactcgatctttaatcgaagacgagtcaacggaggtttccgcgttagaggatctgattattacgatgatgatgatgatcagggagacaatggtaattgcacatggatggggaggcgatatagtggtagttttggagatttgttctcatggcctgatcttggtgggattggttcgagtggagtcgtgaagctttgggatcatttagatatcgatggcgatgatcatgagaatgttgtggcaacgtttctcaagaactataactcaacctcgtcaccgtttttttgggcggcggagaaaaaaggtgttgacgccgttaaagtgaaggcgtgtgatccacgcgccggttttcggatgccggctttgctcgcggagtggaggcagccggggcggttgttagggaatataatcggagttgataccggtggtgtggagaaagtatacgtcagggatgatgttagcggagagatagccgtgggagatttgaggaagtttaacggtgtgttgacggacttgacggaatgtgaggctgagacttggtgggacgctgacgtccttatctcgggctagctcgagcctgcagggacccagctttcttgtacaaa

SEQ ID NO: 452 - DNA, 704 bp, Arabidopsis thaliana
atggcttcgattttggctcgcaggtcactgaatactctccgtgctcgacatctcgttttgtcagggcaagctttacagggatctcatctgtctagactgcagtcccgtggtatatcttatggcagcaacaaagatgatgaagaagcagagcaactttctaaggaaatctccaaggactggaatactgtctttgaacggagcataaacaccctgttcctcacagaaatggtccgcggtttgtcgctgaccctcaagtacttctttgatccaaaagttactatcaattatccatttgagaagggtcctctgagccctcgcttccgtggtgaacatgctcttcgaagatatcctaccggggaagaacgctgcattgcctgcaaactctgtgaagctgtatgtccagctcaagcaatcacaatagaggcagaagagagggaagatggaagccgcagaaccactaggtacgatatcgacatgacaaaatgcatctactgtggtttctgccaagaagcttgccccgttgatgcaatcgttgaaggacctaactttgaattcgcaaccgagacacacgaggaacttctctatgacaaagagaagcttcttgagaatggagatcgatgggagacagagattgctgagaatctgaggtcggagagtctctaccgctagctcgagcctgcagggacccagctttcttgtacaaa

SEQ ID NO: 453 - DNA, 258 bp, Arabidopsis thaliana
atggctaacaaagctcttattcatctcctcgtcatcttcttcttggctctatcacacatcttcttcttcccttcccatgcttcgagacttgggagtttgatggagaagccaaaaattgttcgacctcaacaagatacactaatggatgtgaagaaggaggtcgaagaaaggatggtgatggagttaaacgactatccaggttcgggtgcaaacaatcgccatttgccacgacaacgaggctgcgtcgttgattgctag

SEQ ID NO: 454 - DNA, 519 bp, Zea mays
atgggacaagcctggggtaatctccaagacaaacttcaagggcggcggtggaaggagcaccaggtgaggaagatcaccgacaaggtgttcgaccgcctcacggaggacgcccagaagcgcgagaaggaggccctcagattcgaggaggtctacatcgccgtcctctgcgtctacaatgacatcaacaagtacttgccagggccgcaccacgatcccccgtccaaggagaagctcaaggccatgatggatgagtacgacgtgaacctggacgggctcctggaccgcgaggagttcgcggagttcatccggaagctgaccgcggactcgctgtgcacgatcagcgtgaagctgctgatcacgctggtggcggcgccggcgctggcgatggcgaccaagcgggcgacggagggcgtccccggcgtgggcaaggtggtgcgcaagatgcccaacgcgctctacgcctccgccatcaccctgggcgtcctgctggcgcagaaatccgccgagggcgtcgagtag

SEQ ID NO: 455 - DNA, 1421 bp, Arabidopsis thaliana
aaaaaagcaggctcctgcaggaccatggcagcggcgagacgattacggacgctccaatctcagccggagaacaaggtctgtgtcgattgctcccagaagaatccacaatgggcatcgatttcatatggaatcttcatgtgcttggaatgctccggtaagcaccgtggtttaggtgttcacatctcattcgtcagatccgtcaccatggattcatggtccgagatccagatcaagaaaatggacgctggaggcaacgagcgtctcaacaattttctcgctcagtacgggatctcgaaagagactgatatcatctccaagtacaattccaacgccgcgtctgtgtatcgagatcggatccaagctttagctgagggaagacaatggagagatccgccgattgttaaggaatcggttggtggtggattgatgaataagaagcctccgttgtctcaaggcggtggtagagattctggtaatggtggatgggataattgggataacgatgattcgtttagatctacggatatgaggaggaatcaatcggcgggtgattttaggtcatcgggaggtcgtggtgctccggcgaagtcgaaatcgtctgaggatatatattcacggtctcagctggaggcgtcggcggcgaataaggagagtttctttgcgaaaaggatggctgagaatgagtctaagcctgagggacttcctccttcacaaggtggtaagtatgttgggtttggatctagtccaggtccagctccgagaagcaatcaacagagtggtggtggtgatgttttctctgttatgtctgagggttttggaagattgtctcttgttgctgcatcagctgcaaatgttgttcagactggaaccatggagtttacttccaaggtcaaagaaggtggcttagatcagacggtcagtgagactgttaatgttgttgcgagtaagacaacagagataggacagaggacatgggggatcatgaaaggagtgatggcaattgcctcacaaaaggttgaagagttcactaaagaagaagcatcaacttggaatcaacagaataaaactgagggcaacggttactaccagaactctgggattggaaacaaaacagcaaattcatcttttggaggatcacaatcatcatcaagtggtcacaacaacagttatcgtaactcgaattcttgggatgactggggagaagagaacaatagcaaaaaggaagcagcaccaaaggtgtcgacttctaatgatgatgacgacggcggttgggctggttgggatgataatgatgctaaagatgatgatttctattatcagcctgcaagcgataagaaatctgtaggtcacaatgggaaatcagacactgcttggaccggtggaggttttctctagctcgagacccagctttcttgtacaaa

SEQ ID NO: 456 - DNA, 920 bp, Arabidopsis thaliana
aaaaaagcaggctcctgcaggaccatgcagctcaaagtccctgaacatcaggttgcaggacacattgctaaagacgggaagcctggtcctctcgtagatgacaagggtcggttcttcaagccacttcagggcgattctcgtggtgaaatcgaggtaaagttctacgaatctttctcctcaaacacagaggttccagaacacatccatagatatttcccggtgtatcacggcactcaagcagttgaaggttctgatggagcagccatgatggtgttggaaaatcttcttgcagaatacacaaaaccatcagtaatggatgttaagatgggttcgagaacatggtatcctgatgcatctgaagaatacatccaaaaatgtttgaagaaagacacgggtaccacaaccgtgtcatcgggtttcaggatctctggtttcgaagtgtatgatcacaaagaatcgagtttctggaagcccgagaggaagcttcttcgcgggctcgatgtagatggagcgagattgactctgaggaagtttgtatcatctaactcactttcggacactggctcgaaacctgactctgcttttgcctcgagtgtttacggcggttcccacgggatcttaacgcagttgctggaactcaagacctggttcgagaaccaaacgctctaccatttcaactcttgttcgattttaatggtctatgagaatgaatccatcttaaagggaaatgatgatgatgctagaccacaagtcaagctggtggattttgctcatgttcttgatggtaatggtgtcattgaccataacttcttgggtggtctttgctctttcataaacttcattcgtgagattcttcagagcccagatgagtctgcagattcttagctcgagcctgcagggacccagctttcttgtacaaa

SEQ ID NO: 457 - DNA, 773 bp, Arabidopsis thaliana
aaaaaagcaggctcctgcaggaccatgaacgaagagatgagcggtgagtcgccggagaataacaaacacgtaaagaaaccgacgatgccggaaaagatcgattacgtgttcaaggtggtggtcattggagattctgctgtcgggaaaacgcagctcctctcacgttttacacacaacgagttctgttatgattcaaaatcaaccattggtgtcgagtttcagacacggaccatcactcttcggggcaaactcgtcaaagctcagatctgggacaccgccggtcaagagagatacagagcggtgactagcgcctactacagaggtgcgttaggtgcgatggtggtttacgacattaccaaacgcctctcattcgaccacgttgcacgttgggtcgaggaattacgtgctcacgccgatgattccgccgtgatcatgctcgtcggaaacaaagccgatctctccgttggtaaacgtgccgttcctacggaggatgcagtcgaattcgccgagactcaacggctttttttctcggaagtctcggctctaagcggcggaaacgtcgacgaagcttttttccgtttactcgaggagattttcagccgcgttgttgtttcgagaaaagctatggaatccgacggtggagccaccgtgaaacttgacggttcgagaattgatgtcatctctggttcggatcttgagactagtaatatcaaggaacaagcttcgtgctcgtgttagctcgagcctgcagggacccagctttcttgtacaaa

SEQ ID NO: 458 - DNA, 705 bp, Zea mays
aaaaaagcaggctcctgcaggaccatggcctccgcaccgacgccgccgcccctcctcccggtgaccaaccctgcgtccggatcgtccccggccgccgccggaggctccgatgcgccgatcgctacgccggctttccggctcttcctgagccggatctccgactcggcgcggcgctcgctgtcggatcgccggccgtggggagagctcctcgaccgttcggcgttctcgaagccagactctctctccgacgccacctcccgcctgcgtcgcaacctcgcttacttccgcgtcaactacgccgccgtggtcgccttcgcgctgggggcctcgctcctggcgcaccccttctcgctcctcatcctcctgggcctcctcgccgcctggtgcttcctctacctcttccgcccctccgaccagcctgttgtcctcttcggccgaaccttttccgaccgcgagacgctgctggggctcgtcggcgcgtccttcatcctgcttttcttcacctccgtcgcgtcgctcatcatctccgggctgctcgtcggcggggccctcgtcgcggcgcacggcgcgttccgggtgccggaggacctcttcctcgacgagcccaacgcgccccccggcagcagcgcggcccaagggctgctgtcattccttggcggacccggatctggggtttagcctcgagacccagctttcttgtacaaa

SEQ ID NO: 459 - DNA, 735 bp, Oryza sativa
tttcatgatttgtgacaaatgcagcctcgtgcggagcttttttgtaggtagaccgcgggatatcacaagtttgtacaaaaaagcaggctcctgcaggacctcaaagattcgatggccgtgctggtggcgaggcaggggcgggagctgcagcggtacacgagcgccgggggccgcatcgtggtgggttgcatcccgtaccgggtgcgcagcggcggcgagatggaggtgctggtgatcacgtcgcagaaggggcacggcatgatgttccccaagggcgggtgggagctcgacgagtccatggacgaggccgcccgccgcgaggcgctcgaggaggccggcgtccgcggcgacaccgagacgtccctcggctgctggtactacaagagccgccgctacgacaccacctacgagggcttcatgttccctctccgcgtcaccgacgagctcctccagtggcccgagatgtcctcccgcaagcgcacctgggccacggtgcagcaggcgatggatggatgccagcacggttggatgcgtgaggcgctcgagcggctcgtctcccggcacgccaccaacaagctgcagtctgcgctgtaaacccaaccaatagctcgagacccagctttcttgtacaaagtggtgatggggatcccccaccctgcaatgtgaccctagacttgtccatcttctggattggccaacttaattaatgtatgaaataaaaggatgcacacatag

SEQ ID NO: 460 - DNA, 694 bp, Oryza sativa
aaaaaagcaggctcctgcaggaccatgtgtgaccttgtggcccgaacgggtcggcatcagcagcggtacgaggatggccggcggctggtggccggatgcataccgttcaggtatagaactagtaatgatgaaacttctgatgatgaaccgaagaaaattgttgaagttctcatgataaactctcaaagtggtccaggtctcctgtttccaaagggaggatgggagaatgatgaaactgttgagcaggcagctgctcgagaggctgtagaagaagctggagttcgtggagatatagtgcaatttctgggtttctacgacttcaaaagcaagacgcatcaagatgcgtgctgccccgagggtatgtgcagagccgcggtgtttgcgctgcatgtgaaggaagagctggactcatggcctgagcagagcacccgcaggaggacctggttgacagttcctgaagccacgtcgcagtgccggtatcagtggatgcaagaggctttgcttactggcttctctgactggcatgacaactggagcaaaggtggcggtggcgacaccaactatgactctctctagttgcagaaggcatccacaggagttctggttttgtttatcttcttttaactctccctaggctccaactttgcagaatgcaatagctcgagcctgcagggacccagctttcttgtacaaa

SEQ ID NO: 461 - DNA, 404 bp, Arabidopsis thaliana
aaaaaagcaggctcctgcaggaccatgccgtcgacgcagtccttgaccgtcgcagcgaagacgctacgaaatcggatcttctctaggtctggatctacatccgccggtccgagtcggtgggcgacgccaggtcacgaggagcgacctaagggttactttatgaaccgtactcctccggcaccaggacagtcgcgaaaatgggaagattgggagcttccttgttacatcaccagcttccttacaattgttatcctcggcgttggactcaatgccaaacctgatctttcaatcgagacttgggctcatcagaaagctttagagcgtcttgagatggagaagctcgcgaccgctggagattcatctgattagctcgagcctgcagggacccagctttcttgtacaaa

SEQ ID NO: 462 - DNA, 320 bp, Arabidopsis thaliana
aaaaaagcaggctcctgcaggaccatggcaaagaccctcaattccatctgcttcaccactcttctgctcgttctcttgttcatctcggctgagatcccgacggctgaggctaattgtgatacgtatttaggcgaagtcacagtgtattacccatgtagggaaagagactgtgaagcccaatgctatgagcattacccacactcatgtaaaggagagtgtgagcatcatgaccacgtagtgcatcatgacaacgaagaagagcattgccactgctacggtcgttagctcgagcctgcagggacccagctttcttgtacaaa

SEQ ID NO: 463 - DNA, 296 bp, Arabidopsis thaliana
aaaaaagcaggctcctgcaggaccatgcttgatacgcttattggagggattgtcggagggattgccggagcgattattggaacggtggatgggttcgccagagggatcggaatatgccccgatagttaccagagctgcactcgtaccgactgcgaggagcacaaaaagaagctcccgaccaaccttagccgtaacggcggtgcagcagcagtgaaggctaaggagaacggccgccgtcgccgccagaaagacagggagtagctcgagcctgcagggacccagctttcttgtacaaa

SEQ ID NO: 464 - DNA, 1157 bp, Arabidopsis thaliana
acaagtttgtacaaaaaagcaggctcctgcaggaccgcagtaatggtacgagcttcatcgtcgaagaaaggaggatcaaaaggaggagacaaagacgacgcagagtcaaaacagaggaagagattaaaaaccctagctctcgataaccaattgctctctgattctccggcgaaatctcattcctctctcaaaccttcaaagcaagttctcaaacaccatggcaccgacatcatccgcaaatctcagcgcaagaatcgctttctcttctccttccctggtcttctcgctcctatctccgccgctaccatcggcgatctcgatcgattatctaccaaaaaccctgtcctctaccttaatttcccacagggtcgtatgaaactttttggaacgattttgtatccgaagaacagatacttgactcttcaattctctagaggaggcaaaaatgtcttatgtgatgattattttgataacatgattgtgttctctgagtcatggtggattgggacaaaagaggagaatccagaagaagctcgtcttgatttccctaaagaactagctcaggcagagaatactgagtttgatttccaaggcggtgctggaggagcagcttcggtgaagaagctggcgagtcctgaaattggtagccaaccaacagagacagactcacctgaagttgacaacgaggatgttttgtctgaggatggagaattcttggacgataagatccaagtaacaccaccagttcaattaacaccaccagtccaagtaactccggtccgacagtctcagagaaattctgggaagaaattcaactttgcagaaacttcctcagaggcctcctctggtgaaagtgaaggcaatacatctgatgaagatgagaaacctctgttggaacctgaatcttcaacaagaagtcgtgaggaatctcaagatggtaatggtattactgcatctgcaagcaagttgcctgaagaacttccggctaaaagggaaaaactaaagagcaaagacagtaagctcgttcaagctactttgtctaaccttttcaagaaagctgaggagaaaacagctggaacttccaaggctaaatcatcctcaaaagcttaaagaaatcttttccatagctcgagacccagcttcttgtacaaagtggt

SEQ ID NO: 465 - DNA, 1730 bp, Xanthomonas campestris pv. campestris
gcagtcgctgtcgttaccatgtgttccatcttcggtatcttcggcctgcaacccggcgacgacctgcaggccctgcgccggcaggccctggaatgttcgcagcggcaacgccatcgcgggccggactggagcggcgtgtacgtcgatgccggtgccatcctggtgcacgagcgcctggccatcgtcgacccggcgggcggttcgcagccgctgttgtcggaggacggcagcctggcgttggcagtcaacggcgagatctataaccatcgcgaactcaaggccgagctactgcagccgtacgcttttcagaccggctcggactgcgaagtgatcaacgcgctgtaccgcgaagatgcgccggcctcctatctcaaccgcctcaatggcatcttcgcctttgcgttgtgggacaaggccgcggggcgggtgatcatcgcgcgcgacccgattggcgtggtgccgttgtactggggacacgaccgcgaaggccgtctgcgcgtggcgtccgaactcaagtcgctggtggacgattgcgccgatgctgcgcagtttccgcctggtcattggtacgacagcgccaccggcgcattgagccgctactacgagcgctcgtggcgcgaatacagcgaagtggaaaatgtgcaggtgccgctgcaggaactgcgcgaggcgttcgagcgcgcggtgcatcgccagctgatgaccgacgtgccctacggtgtgctgctgtccggtggcctggattcgtcgttggtggcggcagtggccgcgcgctacgcgcggcatcgtatcgaagagaacgacaccaccgaagcctggtggccgcgcctgcattccttcgcaatcggcctgaccggctcgccggatctggccgctgccgaagtggccgccgccgcgctcggtaccgtgcaccacggcttcgaatacagctttgaagaaggcctggatgcattgccggaagtgatccgccacatcgaaacctacgacgtcaccacgattcgtgcgtccacgccgatgttcctgctggcgcggcgcatcaaggcgatgggcgtcaagatggtgctgtccggcgaaggcagcgacgagatcttcggtggctacctgtacttccacaaggcaccgaacgcccgcgaattccacgaagaactggtgcgcaagctcgatgcgctcaacaactacgattgcctgcgcgccaacaagtcgatgatggcctggggcgtggaaccgcgcgtgccgttcctggatcgcgaattcctggacgtggcgatgcgcatggacgcgcgcttcaagatgatcgacaagaccagcaccggtgccacccgcatcgagaagggcatcttgcgcgaggcatttgccggctatctgccggaatcgatcctgtggcggcagaaggagcaattcagcgatggcgttggttatggctggatcgacggcctcaaggcacatgccgccgcgcacgtgagcgaccgcgaactcgcagcggccgaccggcgcttcccggtgaacccgccgcagaccaaggaagcctatttctaccgcagtctgttcgagcagttcttccccagccaggccgctgcggagacggtgccgggtggtaaatccatcgcgtgttcgtcgccgacggccattgcctgggacgcgagctttgcggcgatggccgatccgtcgggccgtgcgattgccggcgtgcacgcgcaggcgttggcgtcctagaacccagcggtactcgc

SEQ ID NO: 466 - DNA, 1273 bp, Zea mays
acaagtttgtacaaaaaagcaggctcctgcaggaccatgtcttaccaaggttcttcccgtggttcgacaataggcattgtgcttgggacagttggaggtcttatggggcttctaatcatatgggctgtattcattatctgcaatggaaggaggaaaagccatctacgtgaaatatttgtggatgtatcaggtgaggatgatcgtagaattgcatttggccagttgaaaagatttgcatggcgagaattgcaacttgcaactgataatttcagtgagaaaaatgttcttggacaagggggttttgggaaagtatataaaggagcacttccagatggcactaagattgctgtaaaacggttaactgattacgaaagtccaggtggagaggctgctttcttgcgtgaggttgagctaattagtgttgcagttcaccggaatcttttaagattgattggtttctgtacaacacaaacagagcgcctacttgtttatcctttcatgcaaaatcttagtgtggcctaccgtctacgagaatttaaacctggggagccaatattagactggtccgcaaggaagcgagtggctataggcacagctcgtggactggagtatttgcacgagcactgcaatcctaagattatacatcgtgacgtcaaggctgccaatgtcttgcttgatgaaggttttgaaccggtggttggggatttcggcctggccaagctggtggacgtgcagaagacgtccgtgactacccaggtccgtggaaccatgggtcacatcgcccccgaatacctgtccactgggaagtcctccgagagaaccgatgtttttggctatggcataatgcttcttgagctagtcactggtcagcgtgccatcgacttttcacgtctggaggaagaagatgacgtgttgttacttgaccatgtcaagaagctgcagagggaagggcatctcgacgccatcgttgaccgcaacttgaacagctgttacaacgggcaggaggtggagatgatgatccagatcgcgctgctctgcacgcaggcgtcgcccgaggaccgcccgtccatgtccgaggtggtccggatgctggagggcgagggcctcgccgagaggtgggaggagtggcagcatgtggaggtgacgaggaggcaggactacgagcggatgcagcagcgcttcgactggggcgaggactccatctacaaccaggacgcgatcgaactgtccgccggcaggtagctcgagacccagctttcttgtacaaagtggt

SEQ ID NO: 467 - DNA, 1042 bp, Zea mays
acaagtttgtacaaaaaagcaggctcctgcaggaccatgtatgccctccgttgcacttgcactgcaccccctgtctgtccccacccttctgccctggcttatctctttccgcttccccctgttataatagcaaccaaaccaaaccaaaccagagctcaggaggagcttccacgcaaactcaggggaggcgcgcgcaagcaagcacacgagggagaaccaggcatggggaggtctccgtgctgcgagaaggcgcacacgaacaagggcgcctggaccaaggaggaggaccagcgcctgatcgcctacatcagggcgcacggcgaagggagctggcgctcgctgcccaaggccgcgggactcctccgctgcggcaagagctgcaggctccgctggatgaactacctccgcccggacctcaagcgcggcaacttcaccggcgacgacgacgagctcatcatcaagctccacgccctgctcggcaacaagtggtcgctcatcgcggggcagctgcccggccggacggacaacgagatcaagaactactggaacacgcacatcaagcgcaagctgctcagccgcggcatcgacccgcagacgcaccgcccgctcagcggcggcgcgggcagcgcgctcaccaccacgtccagcaccgccggcttcccgtcccccgcgccggcgtccaggtccaggcccacgcccacgcccccgcccaccgtcgtcgtcccgcccaatgcgatcttcgtgcgcccggcgccgtcggaggacggccacagcagcagcggcgcgagcacggacgcgccgcgctgccccgacctcaacctggacctggacctgtccgtgggcccgccgcccaagacgccggcggccacgcagcagcagcggcggcggacgaccatctgcctgtgctaccacctcggtgtccgcggcggcgaggcctgcagctgcgagaccgcgtcgtcgctggcgggcttccggtttctccagccgctggaggagggccagtacatatagctcgagacccagctttcttgtacaaagtggt

SEQ ID NO: 468 - DNA, 659 bp, Oryza sativa
aaaaaagcaggctcctgcaggaccatggaggttgaggcttcctacagctatggcttccttccttcaggcaggcaccagccttatgcaccacctcctccccaccctgcagaggaaggcgaattgtgggagtactttccatgccctttctgttacatcgaggttgaggtgcccttcatctgcaaccatcttcaggaagagcattgctttgacaccagaaatgctgtgtgcccgttgtgcgccgacaatatagggagagacatgggtgcccatttcagagttcaacactcacatcttctcaagagaaggaaaccttctaggcccagcagctcatggcctacaccctccaacaattcagacccctactttgaggggcctccacagtatatgatgaacaacaggacataccaagatcctgcacctgatccactgctctcccaatttatctgcagcatggctcaaactgacactaactcggataacacaaacactgaaattgcagtttcagcagtctcacatgatcagaggttgagtcagcgtgtgactctgactgatgatgcatccaagctggaactcaaggaaaggttgcaaagaatcgagtttgtcaaggagataatcatgtcgacaattctttagctcgagacccagctttcttgtacaaa

SEQ ID NO: 469 - DNA, 293 bp, Zea mays
aaaaaagcaggctcctgcaggaccatggcgctgtctcgacgcatggcggctcccgtcctcgtcctcctgctcctcctcgtcgccacagagctggggacgaccaaggtggcggaggcgaggcactgcctgtcgcagagccaccggttcaagggcctgtgcatgagcagcaacaactgcgccaacgtgtgccagaccgagaacttccccggcggcgagtgcaaggcggagggcgccacgcgcaagtgcttctgcaagaagatatgctagctcgagacccagctttcttgtacaaa

SEQ ID NO: 470 - DNA, 1103 bp, Glycine max
aaaaaagcaggctcctgcaggaccatggcggtggccgcgtccgacgccgacgacatcctgatccgtcaggtggtgccagatgttggcgaagccgaagaggaggacaacctgctgaacgccgagcaccacttcgcgagcttcaaggccaagttcgccaagacctacgccaccaaggaggagcacgatcatcgcttcggcgtcttcaagtccaacctccgcagagccaggctgcacgccaagctcgacccctccgccgtccacggcgtcaccaaattctccgatctaactccggccgagttccgccgccagttcctcggcctcaagccgctccgcttcccggcgcacgcccagaaggcgcccatcctccccaccaaggatctccccaaggatttcgattggcgagacaaaggagccgtcactaacgtcaaggaccaaggggcgtgtggttcgtgttggtctttcagtacgacgggtgcgttggaaggagctcattatctggccactggtgagctcgtgagccttagcgagcaacagcttgtggattgcgatcacgtgtgtgatccagaagaatatggagcgtgtgactcaggctgtaatggtgggttgatgaacaacgcatttgagtacatacttcagtctgggggagtacagaaagaaaaggactatccatacaccgggagagatggcacctgcaaatttgacaaaaccaaagttgcggctactgtatctaattacagtgtggtttcccttgatgaagaacaaattgctgcaaacctagtaaagaatggccctcttgcagttgctatcaatgcagtttttatgcagacatatgttggtggcgtctcatgcccatacatctgtgggaagcatttggatcatggggttcttctagttggttatggtgaaggtgcatatgctcccattcgttttaagaacaaaccttactggatcattaagaattcatggggcgagagctggggagagaatggatattacaagatctgcagaggtcgaaatgtgtgtggagtagattccatggtctcaactgtagctgctatatatccatccagccattagctcgagacccagctttcttgtacaaa

SEQ ID NO: 471 - DNA, 835 bp, Zea mays
acaagtttgtacaaaaaagcaggctcctgcaggaccatggcgaagctcatgaacaagctggtcgattcgttcgagcacgacgagatactggacgtcggctgcgtgcgcgccgtgctggccgagctcgtcctcaccttcctcttcgtcttcaccggcgtctccgccgccatggccgccggatccgacgggaagcccggcgacgctatgccgatggcgacgctggcggcggtggcaatcgcgcacgcgctggccgctggcgtcctggtgacggccgggttccacgtctccggcggccacctgaaccccgcggtgacggtggggctcatggtgcgcggccacatcaccaagctccgggcggtgctgtacgtcgccgcccagctgctggcctcctccgccgcctgcgtcctcctccgcttcctcagcggcggcatggtgaccccggtgcacgccctgggcaggggcatcagcccgatgcagggcctggtgatggaggtcatcctcaccttctccctgctcttcgtcacctacgccatgatcctggacccgcggagccaggtccgcgccatcggcccgctgctgacgggcctcatcgtcggcgccaacagcctcgccggcggcaacttcaccggcgcgtccatgaacccggcacgctccttcggcccggccctggccaccggggactggacaaaccactgggtctactggatcggcccgctgctcggcgggcccctggcaggcttcgtgtacgagtcgctgttcctggtgcagaagatgcacgagccgctgctcaatggggaaatctagctcgagacccagctttcttgtacaaagtggt

SEQ ID NO: 472 - DNA, 772 bp, Oryza sativa
acaagtttgtacaaaaaagcaggctcctgcaggaccatggcaatggcttctgctctgacgaactgttgggctatttctcgttcatctcagcgtggatccaagaataatagttctgatggttccttcatggtgccagctcggaaccacaatcggatcaacagaaagcacctcttgctccgagaaaaggatgcttcaactggttggcagatcaccaaagctgcaacagaaaattccaccaatgctgttcacaccccaatgaagactaaatggtgggaaaagaacatgaaatcctgcaacatgaaaaacattgaatcacaagacgattttgacaagcagctcctgttggccagcgataagctcaccgtggtgcacttcttttcccctagttgtggagcttgcaaggccctacaccctaaggtatgtcaattggctggcatgcatccggaactgcagtttcttatggtcaactccaatgaacaaaaggagatgtgccgcaggctcaatgttcatgtattgccaatgttccgcttttacagaggtgcagaaggccgtatctgtagcttcagctgtacaatttcaactatttataagatcaaagatgcattgaaaaggcatggggttcagctagagaatcttggaccagataagggcttggagaaatcagaacttcagaactctgatattgacgcttcatataacatggatggaggtgtgggtgctgtcgtgcccaacaatgaatagctcgagacccagctttcttgtacaaagtggt

SEQ ID NO: 473 - DNA, 1234 bp, Arabidopsis thaliana
acaagtttgtacaaaaaagcaggctcctgcaggaccatgagttggtggtgggctggcgccatcggagctgccaagaagaaactcgacgaagatgaaccatcacaaagcttcgagagcgtcgctctcatcatcggcgttactggaatcgtcggaaacagcttggcggagattctccctctttccgacacacccggtggtccatggaaagtctacggcgtcgctcgtcgtcctcgtcctacctggaacgccgatcatccgatcgattacatccagtgcgatgtctccgacgccgaagacacaagatccaagctttcccctttaaccgatgtcacacatgtcttctacgtcacctggaccaatcgtgaatcggaaagtgaaaactgtgaagcaaatggctcaatgctccgtaacgttctccaagcgattatcccatacgcgccaaatctccgacatgtttgtctccagacagggacaaagcactaccttggccctttcaccaacgttgacggacctcgtcacgatccaccgttcactgaggatatgccgagattgcagatccagaatttctattatacccaagaggatattctgtttgaagagatcaagaagatagaaaccgtgacgtggtctatccacagaccaaacatgatctttgggttctctccttatagtttgatgaacattgttgggactctctgtgtctatgcagcgatatgtaagcatgaagggtctccgttgttgtttcctgggagcaagaaagcttgggaagggttcatgacggcttctgacgcggatttgattgcagagcagcagatttgggcggcggttgatccgtatgcgaagaacgaggcgtttaactgcaacaatgctgatatcttcaagtggaagcatctgtggaagattctagctgagcagtttgggattgaggagtatggatttgaggaagggaagaatttggggttggtggagatgatgaaagggaaagagagagtgtgggaggagatggttaaggagaatcaattgcaagagaagaagcttgaggaagttggtgtgtggtggtttgctgatgttatacttggagttgaaggaatgattgatagtatgaacaagagtaaggaatatggcttccttggtttcaggaactccaacaactcttttatctcttggattgacaagtacaaggcgttcaagatcgtaccttagctcgagacccagctttcttgtacaaagtggt

SEQ ID NO: 474 - DNA, 1621 bp, Arabidopsis thaliana
acaagtttgtacaaaaaagcaggctcctgcaggaccatgggagttgtgtctatttcaagttcagcttcaagatctccactcgggttgggcaacgatcttttgacacatcggtcttcacttaaaaagccatccattgttgcttttaaagccgatgattccagcaattcagctttgatcattcctcctcgtgagcaagttttgattcctgctgaaaagcataatgagaagaagagagaagtaacgaggagaaagccttgtaaaaccccgaaaaaaccgctttccttggaacataattcggctccttcgtgttcgttaggagtagattacaatgaagctgctgcaagacttgaaagcatatacaagcttagtcctgcaacaaccacattagtcgaggatgatgttgaagatggcggctctaaagccaaagtttcacggaggagaaaaaggaaagaaagtggtgaggagaagaaagtggttgtgaggaataatgtgaagaaggaaaaacgtatgagtcttgataaacggattgctttgaagagaaacgttcaagagaaaccagtcgttgcttctgttgataagaaagtaacaaagaggcagcaagaagaggagaagatcgagaggcttgtgcgggactattcagcttctaatgatatagtgagcttggactggaaaaaaatgaagatacctcctgttctttcttctactgaacatgcttggttgttcaagttgatgcaacctatgaaggctcttcttgaagtgaaagatgtattgcaaaagagcttgggaagagagcctagggaagctgaaatagccggggagatcaatatgactgcgggtgaagtaaaaaagaaaatcgaaataggtagagctgcaagaaacaaacttattaagcacaatctccggcttgtcttgtttgttatgaacaaatactttcatgagtttaccaacggaccaaaattccaagacctttgtcaagcgggtatgagagggcttatcacagcaattgaccgctttgagccgaaaaggaagtttcgtctttcgacttatggtttgttttggattagacatgccatcatacggtcaatgacaacttcaaacttcactcgtgtcccatttggacttgaatcggttagagtggagatatataaagcaaagactgagctatggtttgagatgggaagacctccaacggaggacgaggtagttgagagactcaagataacacctgagagataccgtgaagtattgagggctgcaaaaccggttttgtcactaaattcaaaacattcggttactcaagaagaattcatcaacggaatcacagatgttgatggtgttggagctaataacagcagacagcctgctcttctcaggctcgctctcgacgatgtgctcgattcattgaagccgaaagagagtctggttattcgacagaggtacggtcttgatggaaaaggcgacaggactctaggagagatagctggaaatctcaacatctctagagaaatggttaggaaacatgaagtcaaggccttgatgaagcttaagcatcaggccagagttgattaccttcgtcaatacatcgtctagctcgagacccagctttcttgtacaaagtggt

SEQ ID NO: 475 - DNA, 1576 bp, Arabidopsis thaliana
acaagtttgtacaaaaaagcaggctcctgcaggaccatggctactgcagctgttataggactcaacactggcaaaagattgttgagttcatcgttttatcactcagatgttacagagaagtttctatctgtaaatgatcattgttcatcacagtatcatattgcttcaacgaaaagcgggataactgcgaaaaaggcgtcgaactatagtccgagttttccttcgtccaatcgtcacacacaatctgctaaagctttgaaagagaatgtagatgttgcttctactgagaagccatggctacctaatggaactgataaggaattggaagaagaatgttatgatgatgatgatctaattagtcattctgttgaggcaattttactgttacagaagtctatgttagagaaaagttggaatctttcatttgaaaaggcggtgtcgagtgagtatccgggcaaggggactatacggaagaagaagattccggttatcacctgttcagggatttcagctcgtcaaagaaggattggtgctaagaagaaaactaatatgactcatgttaaagcagtttctgatgtttctagtggaaagcaagttagaggttatgtgaaaggtgtaataagtgaagatgtgcttagtcatgcggaagttgtgcgcttgtctaagaaaatcaaatctggtcttcgtcttgatgatcataagtcaagattacaggatagattaggctgtgagccttctgatgaacagcttgcagtatctttgaagatatctcgggccgagctacaggcgtggttgatggaatgtcatctagctagagagaagttggctatgagtaatgtgcgtttggttatgtctattgctcagcgttatgataatttgggagcagaaatgtctgaccttgttcagggtggtcttatcggacttttgcggggaatagagaaatttgattcttccaaaggtttcagaatttcaacttatgtatattggtggattcgacagggtgtctcaagagcactagtggacaactcaagaaccttgaggttacctactcacctacatgaaagactcggtttaatccgaaatgcaaagcttagacttcaagagaaaggaatcacaccctccattgataggattgcagagtctctaaacatgtcgcagaagaaagttagaaatgcaacagaggctgtaagcaaagtattttctctagacagagatgcatttccttctttgaatggtctccctggagaaactcatcacagttacattgcggatactcgtttggagaacaatccgtggcacgggtatgatgatttggcactcaaggaggaagtaagcaagcttataagtgcaacactcggagaacgggaaaaagagatcattcgattatactatggtctagacaaagaatgtctcacatgggaagacattagtaaacggataggattatcgagagagagggtgagacaggtagggcttgtggcactggagaaactaaaacacgcagcgaggaagagaaaaatggaggcaatgatccttaagaattagctcgagacccagctttcttgtacaaagtggt

SEQ ID NO: 476 - DNA, 1882 bp, Oryza sativa
acaagtttgtacaaaaaagcaggctcctgcaggaccatgggttcaacacctacctactgctcttaccaaacaaatggtgttggcgctttaaagcaatcacctcatatgcaattccaacaatcgtacaactatggagttaggttcctaaagagggataccctttctgtgcggattaacaaacatatggccaaaagaatagcaacaagcactggaatttgcactaagcctaggaggtctcacatgcctatagtatgctctgctggaatgacaataatttttattgcaactgaatgtcacccatggtgcaaaactggaggcctcggtgatgttctagggggactgccccctgctcttgctgcaatgggacatcgtgtcatgacaatagttcctcgttatgatcaatacaaagatgcatgggatacaaatgtccttgtcgaggtcaatattggtgacaggacagaaacagtgcgcttcttccactgctataaaaggggagttgaccgtgtttttgttgatcatcctatgtttcttgagaaggtatggggcaagactggaccaaaattatacggtcctaccactggagatgactaccgggacaaccagttgcggttctgccttttatgcctcgctgctttggaggctccaagggttctcaatctcaacaattctgaatatttctcgggaccatatggtgaaaatgttgtcttcgttgcaaatgactggcacactggagtcctgccatgctatctcaagagcatctatcaggcaaaaggaatgtatgtgaatgctaaggttgctttctgcattcacaatattgcctaccagggtagatttgccagagaagactttgaacttcttaatctaccggacagtttcctgccttcatttgattttattgatgggcattttaaacctgtagtaggtagaaagattaactggatgaaggcagggatcactgaatgtgatctggttatgacggttagtccacattatgtcaaagaactcgcttctggcccagataaaggtgttgaattggatggcatccttcgcacaaagccccttgaaactggaattgtcaatggcatggatgtttatgaatggaatccagcaacagatcagtacatcagcgtgaaatacgatgcaacaacggtaactgaagcaagggcactcaataaggaaatgctacaagctgaagttgggttgcctgtggactcgagcattcctttaatagtttttgttggtcgtcttgaagagcagaaagggtcagacatactaattgcagccattccagagttcgtggaggggaatgtccagataattgttcttggtacagggaagaagaaaatggaggaggaactgatactgctcgaagttaaatatccaaacaacgctagagggatagcaaaatttaatgttcctttagcgcatatgatgtttgctggggctgattttataattgttcctagtaggtttgagccatgtggtctcatccaattgcaagggatgagatatggagtggttcccatctgctcatctactggaggacttgtcgacacggttaaggagggcgtgaccggattccacatgggtttgttcaatgtcgagtgcgaaactgttgatccagtggacgtcacagcggttgcttcaactgtcaaacgggctctgaagcagtacaacacaccggcattccaagaaatggttcagaactgcatggctcaagacctatcttggaagggacctgcaaagaagtgggaggaggttcttcttgggttgggcgttgaggggagccagccaggcatcgagggtgaggagctggcgccacttgccaaggaaaacgtggccactccctagctcgagacccagctttcttgtacaaagtggt

SEQ ID NO: 477 - DNA, 1495 bp, Oryza sativa
acaagtttgtacaaaaaagcaggctcctgcaggaccatggccatcgcctcccgcatccagaagcgcgtgcttgcctccttcgccgccgccgccgcagccaagctcccggaggcggccgtcgcggccgccggaggcgccgcagaggcggtggaggaggtcgcgtcttccgtgcaggagcaggtgcaggcgcagggagcgcaggtgttggagtttggggataccgagaggctgttcgccggggagaggtcgacgtcgctggtgcgcacgctcgccgtgctgcaggcgctgtcggtgggcccgctcgtggacgtggcgacggcggcgctgaggtcgccggcggtggccgggagcgcggcggggcgcgccgcggcgagggccaccgcgtaccagcacttctgcgccggggagaccgccgaggaggccgccgcggcggtgcgccgcctctggcgcggcggcatgggcgggatcctcgactacggcatcgaggacgccgaggacggccccgcctgcgaccgcaacgccgccggattcctcgccgccatcgacgtcgccgccgcgctgcctcctggctcggcgagcgtgtgcatcaagatcacggcgctgtgcccggtcgcgttgctggagaaggcgagtgatctgctgcggtggcagcagaagcacccggcgacgaagctgccatggaaagtgcacgggttcccggtgctgtgcgtctccagcccgctgtacctgacggcggcggagccgccggcgctggaggcggaggaggagagggagctcgagatggcgcacgggcggctgctggcgatcggcgagcggtgcgcggagtacgacatcccgctgctggtggacgccgagtacgccaccgtgcagccggcgatcgactacttcacgttcgccggcgcgctggcgttcaacggcggcgggaggcccatcgtgcacggcaccgtccaggcctacctccgcgacgcgcgcgaccggctggaggccatggcgcgagcggcgcagggcgagcgcgtgtgcctcgcgctcaagctggtccgcggcgcgtacctggcgcgcgaggcccgcctcgcggcctccctcggcgtgccgtcgccggtccaccgcagcatccaggacacccacgactgctacaacggctgcgccgcgttcctcctcgaccgcgtccgccgcggcgccgccgccgtgacgctcgccacgcacaacgtcgagtccgggcagctcgccgcggcgagggcgctggagctcggcatcggcggcggcggcgaccgcggcctgcagttcgcgcagctgatgggcatggcggatggcctctcgctcggcctccgcaacgccgggttccaggtgagcaagtacctgccgtacggtccagtggagcagatcatcccgtacctcatcagacgagcagaggagaacaggggattgctctcgtcttcctccttcgacagacagctgctccggtagctcgagacccagctttcttgtacaaagtggt

SEQ ID NO: 478 - DNA, 1477 bp, Schizosaccharomyces pombe
acaagtttgtacaaaaaagcaggctcctgcaggaccatggataagaatgattacttacactttgaacggaacccttcattatttccgaaatcaactttagacaaagtccaaaagacaaagaaatatattgaacattattacaaggtggcagttgatcatgctgtagagcgcaaccaaagacgtatcaatttggagcaacgattagcaaccgaaaggggttctgaggagagaaagaataggcagttaagagcatctggtgaaaaagagtctcaatttcttcgatttcgtcgtacacggctttctttagaagatttttctaccatcaaagttattgggaaaggtgcatttggcgaggttcggttggttcagaaactcgatacgggtaaaatctatgccatgaaatctttgcttaaaactgaaatgttcaaacgtgaccagctggctcatgtcaaagcagaacgcgacttattagttgaatctgactccccatgggtggtgtcattgtattatgcttttcaagattcactgtatctttacttgattatggagtttttaccaggcggtgatttgatgaccatgctaataaattatgatactttttcagaagacgttactcgcttctacatggctgagtgcgttttggctatagctgatgttcatcgaatgggttatattcatcgggatataaaaccggataacatactgattgaccgggatggccatataaaactttctgatttcggactttccactggtttttacaagcaagatcagagtgcctcttacatgaaacctcgcacaggaaatactgtcaaacgtggtcaaatggtagatgctatctggcttacaatgtcttccaaggacaaaatggctacttggaaaaagaaccgtagggtgatggcctatagcactgtgggtactcctgattatatcgctccagaaattttcttgcaacaagggtatggtcaagattgtgattggtggagtttaggcgctatcatgttcgagtgcttaattggatggcctcccttttgcagtgaaaactctcatgaaacttatcgaaaaatcatcaattggcgtgagactctgactttcccaaatgatatacatttaagcatagaagctcgtgatttgatggaccgacttatgacagattcagaacacagattaggtcgtggcggtgctattgaaataatgcaacatcctttctttactggaatcgattgggatcatatacgagaaactgcagctccatttattccgaatttgaaatctattaccgatacacattatttccctgttgatgagcttgaacaagttcctgaacaacctgtcacacaacaacctgcttctgttgaccctcagacgttggaacaaaccaatctggcattccttgggtacacttacaaaaaattcaattatttaacgatgaaaggagcattgtagctcgagacccagctttcttgtacaaagtggt

SEQ ID NO: 479 - DNA, 2188 bp, Neurospora crassa
acaagtttgtacaaaaaagcaggctcctgcaggaccatggcccacgacaaccgtgaaccccgcgaggtcaaaaaccacctcctctttgaggtggcgaccgaggtcgcccatcgagttggtggaatctactccgttctcaagtcgaaagctccagttacaaccgctgaatatggcgaccgttacactcttatcggtcctttgaaccaccaatcggcggccgtcgaggttgaagagctagagccatccaaccccgaactaaaggcgacgattcaggccatgagagaccgtggcatcggcattctttacggacgatggctcattgagggagctcccagagtgttgctcttcgatacaaagaccgcttacggttacatgaacgagtggaagacggacctctggaatgttgcttctatcccatctccggacaacgacgaagagacgaacgaggccattgtctttggttacctggtcgcatggttcctgggcgagtttgtatgccatgagaagagaaaggccgtcatcgcccacttccacgaatggcttgccggtgtcgcgctgccattgaccaagaagaggcagattgacgttaccaccatcttcacgacacatgccactcttctcggtcgctatttgtgcgccggctcagtagacttctacaacaaccttcagtggtttgacgttgacgccgaggctggaaagcgtggaatctatcatagatactgcatcgagcgagctgccgcccattcctgcgatgtcttcaccaccgtttcccacattacagcttacgagagtgagcatttgctcaagcgcaagcccgatggtgtcctccccaatggtctcaacgtcaccaagttctcggccatgcacgagttccagaacctccaccagcaaaacaaggagaagattcatgactttgtccgcggtcacttctacggccattacgattttgagccagaaaacacgctctacttctttactgcgggtcgctacgagttcaggaataagggtgtggacatgtttatcgagtcgcttgcccgtctcaaccaccgcctcaagaccgccggaagcaagacgacagttgttgctttcatcatcatgcctgcccagaccacttccttgaccgttgaagcattgaagggacaggctgtcatcaagtctctgagagataccgttgatgttattgagcgtggaattggccgtcgcatctttgagcgctctgtcaagtggcacgagggcgacccgttgcctgaggagaaggagctgattaccagtcaggaccgtgttctccttcgtcgtcgtctctttgccatgaagaggcacacactcccacccattgttacccacaacatgctcaacgaccacgaggacccaattctgaaccagatccgccgggtacagctcttcaaccatccctcagaccgagtcaagattgttttccatcccgagttcttgagctcggccaaccccgtgttgcctctcgattacgatgactttgtgcgcggcacccatctgggcgtcttcgcttcttactacgagccttggggctacactccggcagaatgcactgtgatgggtgtaccaagcatcaccaccaacctctctggattcggctgctacatggaggaactcatcgagaactcgagcgactacggtatctatatcgtggatcgtcgctccaagggagtcgatgactcggtcaaccagcttactcagtacatgtttgaatttacccagaagagccgcagacagcgcatcaaccagagaaacagaaccgagcgtttgagcgatctcttggactggaagcgaatgggtatggagtacgtcaaggcacgccaacttgcgttgcgccgcgcctatcctacatctttcaatggcgaggaggaggaagacttcattccaggagtcgagcaaaagatatctcgtcccttctcagtaccgggctcgcctagagaccggactggtatgatgacccctggcgattttgctagtcttcaggagagtcacgagggtctgagtaccgaggactacgttgcatggaagttacctgaggaagaggaccctgaagagtatcctttcccgcttaccctgaagcagcgtacggggccgggtagccccctcgacagtattcagggtctacaactcaacggcaccaggtagctcgagacccagctttcttgtacaaagtggt

SEQ ID NO: 480 - DNA, 855 bp, Glycine max
atggagagaagcactccggtgaggaagccacacacttcaactgcagatctgcttacgtggcctgaaacaccaatttctcattccccaactcatccttcctccgccgttcgttctcaccagccgtcggatgggatcaggaaggtggtatttgggggtcaggtcaccgatgaagaggtcgagagcttaaataaacgaaagccttgttcggattataagatgaaggagataactggtagtggaatatttgtagccaatggagaagatgatgccttagaagatggcagtgccaacccaaataagactggagtacgtatgtatcagcaagcgatttctggaatcagccatatctcatttggtgaggaggagaatgtttctccaaaaaagcccacttctttgccagaggtggccaagcagcgtgagctaagtggaactttggaaagtgaagactctatattgaaaaagcaactctctgatgcaaagtgcaaggagcttagcggtcatgacatatttgctccgccaccagaaatcaaacccaggccaataactcctcgcatactggagttgaaaggaagcatagacattggagaacgtcatgctgatggagatcaaggcgataccaactctgctgggaagacagcaaagaagatctatgacaagaaatttgcagaactttcagggaatgacatattcaaaggggatgcaccaccttcatctgctgacaaatcgttgagcggggccaaactacgagagatgagtggcagtaacatctttgctgatgggaaggtagaagctagagactacctaggtggtgtacggaagccacctggtggcgagagcagcattgccttggtatag

SEQ ID NO: 481 - DNA, 1144 bp, Oryza sativa
acaagtttgtacaaaaaagcaggctcctgcaggaccatgtctgcctttgtgggaaaatacgcagatgagctgatcaagacggccaagtacatcgcgacgccggggaagggcatcctcgccgccgacgagtcgacgggcaccatcggcaagcgcctggccagcatcaacgtggagaacgtggagcccaaccgccaggcgctccgggagctcctcttcacgacgcccggcgcgttccagtacctctccggcgtcatcctcttcgaggagacgctctaccagagcacggccgccggcacgccgttcgtcgacgtgctcaaggccggcggcgtcgtgccggggatcaaggtggacaagggcaccgtggacatcgccggcaccaacggcgagaccaccacccagggcctcgactccctgggcgcgcgctgcgccaagtactacgaggccggcgcccgcttcgccaagtggcgggccgtgctcaagatcggcgccgccggcgagccgtccgagctcgccgtcaagcagaacgccgagggcctcgcccggtacgcgctcatctgccaggagaacggcctcgtccccatcgtcgagcccgagatcctcaccgacggcgcccacgacatcaagacctgcgccgccgtcaccgagcgcgtcctcgccgccgtctacaagtctctcaacgaccacaaggtcctcctcgagggcaccctcctcaagcccaacatggtcacccctggctccgacagcccaaaggttggcgcggaggtgataggggagtacacggtggcggcgctgcggcgcacggtgccaccggcggtgcccgggatagtgttcctctccggcgggcagagcgaggaggaggcgtcgcagaacctgaacgccatgaacaagctggaggtgctcaagccatggacgctcaccttctccttcggccgtgccctgcagcagagcaccatcaagaagtggggcggcaagaaggagaacgtcgccgccgctcaggctgccttcctcgcccggtgcaaggccaactccgaggccacgctcggcaagtacggcggcgccgccggcgacgccgccacgtccgagagcttgtacgtcaagggctacacctactagctcgagacccagctttcttgtacaaagtggt

SEQ ID NO: 482 - DNA, 1078 bp, Zea mays
acaagtttgtacaaaaaagcaggctcctgcaggaccatgcccggcgggtcttcgggtccagatggtgaagtggatgcaggatttgcgaagctccagggagaggatttcgagtattacatgcaaacgtactccatcatgctgggacgcaacagcaagaaatcaacagtggatgtggatctctcgagcctcggtgggggtatgaacatctcccgccaccacgcccggatattctacgacttccagcgccgcaggttcgcgctcgatgtcattggcaagaacgggtgccttgtcgagggcgtcctgcaccttccagggaacccccctgtcaagcttgactcgcaggatctgctgcagattggggacaagaagttctacttcctactgccaacacggtccatcttcgcttcggctgctgctgctcggcatgctcctattattccacagcagcttcctcctccaccgtatgcacatgcacgggcaggccgccctcgtttgtccgagtttcatgaccgctccttcgaaggtgattatgggcgggaggttgatgagattgggaatggtatcagtgaaactgcgatgaggggaaagctggtaaagaggaacaagaagtcttctggcgacttggatatctatggtgggcatagaatcaatgtggaagcaatagggacgctaggtgaagacagtagatcagaaataagatcaaggggtgacagggatattgacaaccaacaagcccttcaagcagaagagaaggatgttgtatcatctgtggccacagtgttatctgatctctgtggccctggggaatggatgcccatggcaaaactccacaacgagcttcttgagcagttcggcaacgtgtggcaccccagcagggtccggaagtacctgacacaggacgactggtcgccgacggagacgaagggcaggccttggttcggccttctggcgcttctcaggaagtacccggagcactttgtcatcaacacgaggtccaagggcaggatgacctcggagttcgtctcgctggtctccttgctctcctagctcgagacccagctttcttgtacaaagtggt

SEQ ID NO: 483 - DNA, 499 bp, Arabidopsis thaliana
acaagtttgtacaaaaaagcaggctcctgcaggaccatgaacgctgagaataatcagactactactactcactcgaaagtgatctcacatgtattctgcactggtactgctaagctaggctctgttgggccacccattggtcttgttgatattggcgtcagcgaagttgcttacatcttccgagtctctcttcctggcattgagaaaaatcaagataagatcaaatgtgaaattcagagggaggggagagtttgcatccaaggagttatacctgagattgcgattccaagtgacacgggatgcttatacagaatgcaagtgcaacagctctgtccgcctggtccattctcaatcacgtttaatcttccgggacaagtggatcctcgcttgttttctcctaattttagatctgatgggatctttgaagtcgtcgtagtcaagctcggagtgcgcatcccaacttcatagctcgagacccagctttcttgtacaaagtggt

SEQ ID NO: 484 - DNA, 427 bp, Arabidopsis thaliana
acaagtttgtacaaaaaagcaggctcctgcaggaccatggctaatagctctttcaagttggaacacccactagagaggagacaaattgaatcttctcgcatcagggagaagtatccagacagaattccagtgatcgtagagagagctgaaagaagtgatgttcccaatatcgacaagaagaagtaccttgttccagctgatctaactgttgggcaatttgtgtatgttgtccgtaaaagaatcaagctgagtgccgaaaaggctatcttcgtctttgtgaagaacacattgcctccaactgctgcaatgatgtctgcaatctatgatgagaacaaagacgaagatgggtttctctacatgacttacagtggagagaacacctttggtttggtttagctcgagacccagctttcttgtacaaagtggt

SEQ ID NO: 485 - DNA, 2257 bp, Arabidopsis thaliana
acaagtttgtacaaaaaagcaggctcctgcaggaccatgcgcatcttctctacattcgtctttcatcgcagacaacaaatcttcaatcttcgtcaattccaaaccaccacaatccttcgcaacccaatctccatcgctccgatccagattccgatggacgccaccgagcagtctctccgtcaatctctttccgagaaatcctcatccgtcgaagctcagggtaacgccgtccgagctctcaaggcttcccgtgcagctaaaccagaaatcgatgctgccattgagcaactcaacaaattgaagctcgagaaatctaccgtcgagaaggagcttcagtctattatcagtagctccggtaatggttcgcttaaccgtgaggcttttcgaaaagctgttgtcaatactctcgagcggcgtttgttctatatcccttcgtttaagatctacagtggcgtcgctggactttttgattatggtcctcctggctgtgctattaaatccaatgttctcagcttttggcgtcaacatttcattcttgaggagaacatgctagaagttgattgtccatgtgtgacaccagaggttgttctcaaggcatctgggcatgtagataagttcactgatcttatggttaaggatgagaaaactggaacatgttaccgtgctgaccacttgctcaaggattattgtaccgagaagctggagaaagatcttaccatctctgctgagaaagctgctgaattgaaggatgttcttgctgttatggaagatttttctcctgaacagctaggtgccaagatcagggagtatgggatcactgctccagacacgaagaatccactctctgatccttacccgtttaatttgatgtttcaaacatccattggcccatctggtttgattcctggttacatgcgtcctgaaactgctcaaggtatttttgtcaactttaaggacttgtactattacaatgggaagaaacttccttttgccgcggctcaaattggtcaagcctttagaaatgagatatctcctcgacaagggcttcttagagttcgtgaattcacgctggcagagattgagcacttcgttgatcctgagaataagtcacatcctaagttctctgacgtagcaaaattggaattccttatgttcccaagggaagaacaaatgtctggccaatctgccaaaaaactttgccttggtgaagctgttgctaaaggtactgtgaacaatgaaactctaggatacttcattgggagagtgtatcttttccttactcgtcttggcattgacaaggaacggctgcgcttccgtcagcatctagcaaatgaaatggcccactatgcagcagattgttgggatgctgaaattgaaagttcatatgggtggattgaatgtgttgggattgcagataggtctgcttacgacttacgtgctcactctgacaaaagtggtactcctcttgtggctgaagagaaatttgcagaacctaaagaagtagagaaacttgtgataactcctgtgaagaaagaactgggtcttgcattcaagggaaatcaaaagaatgtggttgaatctttggaggcgatgaatgaggaagaagctatggagatgaaagcaaccctggaatccaaaggggaagtggagttttacgtgtgtaccctaaagaaaagcgtgaacatcaagaaaaacatggtgtctatatcaaaggagaagaagaaagagcaccagcgggttttcactccatcagtgattgaaccatcgtttgggattggtcggatcatatattgtctgtatgagcattgtttcagcacaaggccaagcaaagcaggggatgagcagttgaacttgttccgtttccctcctcttgtagctcccatcaagtgcacggttttcccgcttgttcagaaccaacaattcgaggaagtagccaaagttatttccaaggaactcgcctctgtcggtatctcccataagattgacatcactggtacatcgatagggaagagatatgcgagaaccgatgagcttggagtgccatttgcaataacagtggactcggatacatcagtgacaatcagagaaagagacagcaaagatcaagtccgagtcaccttgaaggaggcagcttccgttgtgagctcagtctcagaggggaaaatgacgtggcaagacgtctgggcaaccttccctcaccattcttctgctgctgcagacgagtagctcgagacccagctttcttgtacaaagtggt

SEQ ID NO: 486 - DNA, 625 bp, Arabidopsis thaliana
acaagtttgtacaaaaaagcaggctcctgcaggaccatgggtttaattcctcaaccacaagaatcgatccaagaatctcattactacacacataaactcttcctcactgcaaactacgtcctcctcggtgcatcgtcaagctgcatcttcctcactctctctctccgtctaatcccttcactctgcggtttcttcctcatcctccttcacgccaccacgatcgcagccgccgtctcaggctgtgcagccgcatcttatggtaagaaccggtggtacgcagctcacatgatcgcaactgtccttaccgccattttccaaggctcagtctctgttctcatctttaccaacacttcgaatttcctcgagagccttaactcttacgtccgtgagaaagaagcgtctatgatcttgaaactagctggtgggctctgtgttgtaatcttttgccttgagtggatcgttcttgttctcgcctttttcttgaagtactacgcttatgtcgatggtgataacaatggagttgctatgaaaaggactggtaaggttcagagtgaagagactctcaaaaattccccatgggcgttccaagtttagctcgagacccagctttcttgtacaaagtggt

SEQ ID NO: 487 - DNA, 484 bp, Arabidopsis thaliana
acaagtttgtacaaaaaagcaggctcctgcaggaccatggcgggtcttcagagatccaccatctctttccgtcgacagggctcttcgggtatagtctgggacgatcgtctcatcgccgagctaagccaacaagcggccaacgaccggaaaggcgagactctacaacaggacgaacaggccaagctgattacgtcggaagtacaggatcagacaaccaaacctatcgccggagaaggactcaaacctatcagaactgacggaggtatggagaggagtcgatccaacggaggaggagccatccgccaccatcgaaacacagggagagtgtctccggcggtggacccgccgtcgccgagactgtcggcgtttgggtgctgctctgccttcgggaagaaacagccggggaagaaggttaatcagaggaaaaggccagcgaagcgtagatccagatagctcgagacccagctttcttgtacaaagtggt

SEQ ID NO: 488 - DNA, 1267 bp, Oryza sativa
acaagtttgtacaaaaaagcaggctcctgcaggaccatggacaacgccctcgcgagcgccgcggcgatcgccgaccagcgccagaagatcgagcagtaccgccacatcctctcctccgtcctctcgttttccccgccggacatctcgcaggcgaagcgcttcctcgaccacatggtttccgacgaggtgccgctcgtggtgtcgcggcagctgctgcagacgttcgcccaggagcttgggaggttggagccagaggctcagaaggaggtcgcgcactacgcgctcacgcagatccagcctcgtgtggtctccttcgaggagcaggtggtagtgattagagagaagcttgcagaactgtatgagtctgaacaacaatggtcaaaagctgcacagatgcttagtgggattgacttggactcagggatcaggatgctggatgacacaaacaaattatccaaatgtgtccagattgcacgactttatttagaggatgatgattctgttaatgctgaagcttttattaacaaagcttcatttttggtaacaaacagtcaccaagaacttctgaacttacagtacaaggtatgctacgctagaattttggatctgaagagaagattcttggaagctgcacttcgatactatgacatctctcagattgaacaacgccaaattggtgacgaagagatcgatgaaaatgctttggagcaagctcttagtgctgctgtgacatgcacaatattggctggtgctggtccgcaacgatctcgtgttcttgctacattgtacaaggatgagagatgctcaaagttgaagatatacccaatactgcagaaggtctttcttgaaaggattttgaggaaaccagaaattgaagcatttgcagaggagctgagaccgcatcaaaaagctctgttaccagataagtctactgtgcttgaccgggcaatgattgagcataacctccttagtgccagtaaactttacactaatatcagctttgatgagcttggagcattattgggcattgaccctaggaaggctgaaaagatagcatcgcgaatgatttatgaagataggatgcgaggttcaattgatcaggttgaagctgtgatacattttgaggatgacactgaagagctgcagcagtgggaccaacagattgcgggactgtgccaagcgctgaacgacattctggacagcatgtcaagcaagggaatggctattcctgtgtagctcgagacccagctttcttgtacaaagtggt

SEQ ID NO: 489 - DNA, 743 bp, Zea mays
gcagtcgctgtcgttaccatgctggcggtgttcagcggcgaggtggtggaggtgccggcggagctggtggcggcggggagccggacgccgtcgcccaagacgaaggcgtccgagctcgtcgcgcgcttcctggggaccagctgccccgccgccgtgtccgtgcgcctcgccgacctcggccacctcgcctactcccacgccaaccaggccctcctccgcccaaggtcgttcgcggcgaaggacgaggtgttctgcctgttcgagggggtgctggacaacctggggcggctgagccagcagtacgggctgtccaagggcgccaacgaggtgctcctggtcatcgaggcctacaaggcgctgcgggaccgggcgccgtacccggccagcctcatgctcgcgcagctcgccggcgcctacgccttcgtgctcttcgacgcgtccaccaactcgctcctcgtcgcgtcgggcggcgacgtgcccctcttctggggcgtcaccgccgacggctgcgtcgccttctccgacgacatcgacgtgctcaaaggctcctgcggcaagtccctcgcgcctttcccgcaaggttgcttctactctaatgcccttggaggattgaagtgctacgagaatcccaagaacaaagtgactgccgttcctgcaaacgaggaggaaatctgcggcgcaaccttccaggtggaaggggctacggtgctcacagcgctgcattagaacccagcggtactcgc

SEQ ID NO: 490 - DNA, 1369 bp, Arabidopsis thaliana
acaagtttgtacaaaaaagcaggctcctgcaggaccatgaggaggaggaggtgcgatcttcaaccgaagagaacgagaatgtgcgatcttcaaccgaagagaacgagtatgtgcgatcttccaccgaagctggtaggggagaagatcctcacgaggattccgataacatctctgagagcggtgcgatccacttgcaaattatggaacgctttaaccaaagatcgggttctgggtaaagcagcggcgcagtttttggggtttatgacgatggattcaaaggtctgttcagttagattccatctccgtcgcagcaaggaggaagaagaagacacgatggatctatctataaagcaggtagatttgcttaatcaagtcgagatatctagggtgtatcactgcgacggcttgttgttatgcgtggctaaggacaactcgagggtcgtggtttggaacccttatttggggcaaacaagatggatcagacccagaacagaatccaacataggagacagctatgctcttggatacgacatcaaccgtaaccacaaaatcttgaggatggtgcagacaagaaacgtttccgtttacaggtacgaaatctacgacttgcgctctaattcatggagggttctcgaggtcactcccaacggggaaatggaccctaatcatcccctctacggcgtttctgtgaagggaaatacctacttttttgcgcatgaggatagcagcagtggtgaaattgatgaagatggcgacataatcgatcttgaagatttcttactctgttttgattttacaacagagacatttggtctgcgtctgcctcttccgtttcactctactatcgatgcgactgtgaccctctcttgtgttagagaccagcagctcgcggtgctatatcataatgagggtcttcacagtgatgatcggtttaccacagttgagttttgggttactactagtattgagcccaactctgtgtcctggagcaagtttttgacagtggatatgagaccattggcactcactggtgttcggtttgacaatgatatgggtgccaccttcttcattgacgaggatgagaaagtcgctgtggttttcgatctagacggatacctaagcaccgagagcgctcgttaccacaccgcttttatcagtggaaaggatggattctttaaacctgtgactctaggagtagctcccaatgtcggggaaccttgtcccagaaccgggcatattccgactacatatcgtcccccgcttgtctgctcgtctacttaccttccgagtttagtgcaagtcaaccaacagcgcaaaaggaaagaaagacatgtttagctcgagacccagctttcttgtacaaagtggt

SEQ ID NO: 491 - DNA, 1684 bp, Zea mays
acaagtttgtacaaaaaagcaggctcctgcaggaccatgggggcgtattccgttgcatcgcctctctgcacgtggctcgtcgctgcatgcatgtcagtcacgtgcaatggagaacgctccttgagatctccgtcgtcacttgcttttgctccttctaagaggagtcggtcgaataagttggtgaaaagaaggggatccaacggtcaggattcgtttggtcttgtttctgcgttttgtggatcgggaattcatttcgatagtctgattagttctctagagccatgtgaagagttctacagatcattaagttttgttagtgatccaaagaagagaagagctgacaaagtgatggcagtagctgtgcaacctgcaaagcaagtagaagagaagaaaatgactgctactaaacagagacgggttgtggtgacagggatgggcgttgtgactccattaggccatgagcccgatgttttctataataatcttcttgaaggagttagtggcattagcgagatagaaaattttgactgtaaagaatacccaacgagaattgcaggagagatcaaatcattttcaacggacggatgggtagcaccaaaattatcaaagaggatggacaaattcatgctttacatgcttactgcaggcaaaaaagctcttgcagatgctggtattagtgaagaaattctgtgtgagctggacaagacgaagtgtggtgttcttatcggttctgctatgggtggaatgaaggttttcaatgatgcaattgaagctttgcgtgtgtcatacaagaaaatgaatcccttctgcgtaccatttgccaccacaaatatgggctctgccatgctcgctatggatttggggtggatgggtccaaactattcaatctcaactgcttgtgctactagcaatttttgtattctaaatgctgctaatcatatcataagaggcgaagccgatctaatgctctgtggtggctctgatgcggcaatcatacctattggattgggaggttttgtcgcttgtagggcactttcggaaagaaacagtgacccgaccaaagcttcacgtccatgggatagcgaccgtgatggatttgttatgggagaaggtgctggtgtactacttttagaagagctggagcatgctaagcaaagaggagcaaagatttatgcagagttccttggaggcagtttcacatgcgatgcttaccatcttacagagccacaccctgagggaacgggtgtctcgctttgcattgaaaatgcgctcgtggaatcaggagtagcaagagaagatgttaactacataaatgctcatgctacttcaactcctgctggcgatgtaaaagaataccaagctcttattaattcttttggcaataatcctaagctgagggtaaattcaacaaaatccatgattggccatcttttgggagcttctggagcagtggaagctgtagctgccatccaggcaattagaactgggtgggtgcatccaaatatcaacttggaaaatcctgaccgaagtgtggataccaaatttcttgtgggttccaagaaagaaaggctggatgtgaaggttgcactatcaaattcatttggttttggaggccacaattcctcaattctctttggccgttacgagcagtagctcgagacccagctttcttgtacaaagtggt

SEQ ID NO: 492 - DNA, 1696 bp, Zea mays
acaagtttgtacaaaaaagcaggctcctgccggaccatgaacacggtggctttgttgtccttggcgccgcagctgctcattaagccctccctcacctgtttctccagaaagggcgttggccgctatggcggaatcaaggtgtacgccgtgctcagagacgacggagctgagtttgccaagaacaacaacctggaggccctgttccatgtggatgaccccgggccgagggtccccatcaagaagggcaggttcctggacgtgaacgaggctctcgaggtggtccgttttgacatccagtactgcgactggagggcgcggcatgatcttctcaccatcatggttctccacaacaaggtggtagaggtcctcaaccccctagcgagggagttcaagtcgatcgggaccttgaggaaagagcttgccgagctacagcaggagctggcaaaagctcacaatcaggttcatctctcggaaaccagagtctcatctgcgctcgacaagctagcgcatatggagaccctggtgaacgacaggctgttgccaccggacggagcctctagtacgtccacggcgcagcccacttccttggttccaagcacttcgtccaccgcccgtgtccgagccaagaaaccgccacgtcggggccttaacgtgtctggcccggtgaagccgtacaatcccagcctgaagaacttctggtacccagtcgccttctccagtgatctgaaagatgacaccatggtgccgatagcttgcttcgaggagcagtgggtgatattccgtggaaaagacggaaggcctgggtgtgttcagaacacatgtgctcacagggcttgcccgctgcatcttggttcagtgaacgagggtaggatccagtgcccttaccatggttgggagtactctactgatgggaaatgtgaaaaaatgccatcaacaaagatgctcaacgtgcgcatccagtcattgccatgctttgagcaggaaggaatggtctggatttggcctggggatgacccaccaaaggctacaatcccttctcttctgcctccttcaggatttacagtacacgcagagatagtgatggaactgccagttgaacatggactactcctggataacctcttggaccttgctcatgctccttttacacacacatccacctttgccaagggctggagtgttccaagtttggtgaagttcttaacacctgcgtctgggctccaagggtactgggatccttacccgatcgacatggagttccgaccgccatgtatggtcttgtcgaccattggcatctcaaagcctgggaagctagaagggaagagcacccagcaatgctccacgcacctccaccagctccacgtctgcttgccctcctctaggaacaaaactaggctgctgtaccggatgtcgctagacttcgctccgtggctcaagcatgtaccgctcatgcacctgctgtggtcacatttcgcagagaaggtcttgaacgaggacctacggcttgttcttggtcagcaagaacggatgatcaatggcgccaacgtctggaactggccggtatcatatgacaagctcggggtccggtaccggttgtggagagacaccgttgagaggggctctgaacggttgccattcagtaaccaagctgagagtggatcatagctcgagacccagctttcttgtacaaagtggt

SEQ ID NO: 493 - DNA, 1084 bp, Zea mays
acaagtttgtacaaaaaagcaggctcctgcaggaccatggcgttgcggaatggtgttggcggtggtggagcctgtcccgcggcggttgtgctggtggctgcggccgtcgcggcgctgctgggcgccggggtggctgcggcggcgaccaagttcgacgacgtggtgcagcccagctgggccaacgaccacgtggtgtacgacggcgacctcctcaagctccgcctcgactccaactccggcggagggttcgtgtcaaggaccaagttcctgtacggcaaggccagcgccgacctgaagctcgtgccgggggactccgccggcgtcgtcacggctttctatctgtcgtcggccggggacaagcacaacgagttcgacttcgagttcctgggcaacgtgaccggcgagccgtacctggtgcagaccaacctgtacatcgacggcgtgggcaaccgggagcagcgcatcgacctgtggttcgaccccacggccgacttccacacgtacgccgtgctgtggaaccccagccaggtggtgttcatggtggacgacacgcccatccgggtgtacgagaacgccacgctgcaccaaggccacggccacggccaccaccggcacggcggcgcggcggcggaggccaacggcaccaacaccaccaccaccacgctggctgctgccccggcgccgttccccgggccgcagccgatggccgtgtacagctccatctggaacgcggacgactgggcgacgcagggcgggcgcgtgaagacggactggtcgcacgcgccgttcgaggccacgttccgggaggtgcgcgtggacgggtgcgcctgggcgggcaacgccacggacggcgacgccgcggaggcgcgccggtgcagcgagtcctcgtggggcaaggagggccgctactggtggaaggagaaggagatgtcggagctgagcgtgcaccagagccaccagctcgtgtgggcgcgcgcgcaccacctcgtctacgactactgcgtcgacaccgaccgcttccccgtgcagccgcccgagtgcgccggccgctagctcgagacccagctttcttgtacaaagtggt

SEQ ID NO: 494 - DNA, 1111 bp, Zea mays
acaagtttgtacaaaaaagcaggctcctgcaggaccatggctttcgcgcccaaaacgtcctcctcctcctcgctctcctcggcgttgcaggcagctcagtcgccgccgctgctcctgaggcggatgtcgtcgaccgcaacaccgagacggaggtacgacgcggccgtcgtcgtcactaccaccaccactgctagagctgctgcggctgctgtcacggttcccgccgccccgccgcaggcgccggcgccggcgccggtgccgccaaagcaagcggcggcacccgccgagaggaggagccgtccggtgtcggacaccatggcggcgctcatggccaagggcaagacggcgttcatcccgtacataaccgccggcgaccccgacctagcgacgacggccgaggcgctgcggctgctggacggctgtggcgccgacgtcatcgagctgggcgtgccctgctcggacccctacatcgacgggcccatcatccaggcgtcggtggcgcgggctctggccagcggcaccaccatggacgccgtgctggagatgctgagggaggtgacgccggagctgtcgtgccccgtggtgctcctctcctactacaagcccatcatgtctcgcagcttggccgagatgaaagaggcgggggtccacggtcttatagtgcctgatctcccgtacgtggccgcgcactcgctgtggagtgaagccaagaacaacaacctggagctggtgctgctgacaacaccagccataccagaagacaggatgaaggagatcaccaaggcttcagaaggcttcgtctacctggtgagcgtgaacggagtgacaggtcctcgcgcaaacgtgaacccacgagtggagtcactcatccaggaggttaagaaggtgactaacaagcccgttgctgttggcttcggcatatccaagcccgagcacgtgaagcagattgcgcagtggggcgctgacggggtgatcatcggcagcgccatggtgaggcagctgggcgaagcggcttctcccaagcaaggcctgaggaggctggaggagtatgccaggggcatgaagaacgcgctgccatagctcgagacccagctttcttgtacaaagtggt

SEQ ID NO: 495 - DNA, 1072 bp, Zea mays
acaagtttgtacaaaaaagcaggctcctgcaggtccatggccttcctcaacatggagcagcagacctgggccttcaccttcggtatcctaggtaacataatctcgctgatggtgttcctttcgccgctgccgacgttctaccgcgtgtaccgcaagaagtcgacggaggggttccagtcgaccccgtacgtggtgacgctgttcagctgcatgctgtggatcttctacgcgctgctcaagtccggcgccgagctgctggtgaccatcaacggcgtcgggtgcgtgatcgaggcggcgtacctggccgcgtacctggtgtacgcgcccaaggccgccagggcgctcacggccaagatgctgctggggctcaacgtcggcgtctttggactcgccgcgctcgccaccatggtggtctccagcgccggcctccgcgtgcgcgtgctcggatggatctgcgtcagcgtcgcgctcagcgtattcgccgcgccgctcagcatcatgcggcaggtggtccggaccaagagcgtggagttcatgcccatctcgctctccttcttcctggtgctgagcgccgtgatctggttcgcgtacggcgcgctgaagagggacgtgttcgtggcgttccccaacgtgctgggcttcgtcttcggcgtcgcgcagatggcgctgtacatggcgtacaggaacaaggagcccgcggcggtcacggtggaggtgacggtggaggaggcgaagctgccggagcacgccaaggaggtggtggtggtggccgaggccagggcgagctgcggtgccgaggtgcaccccatcgacatcgacatcgaagctacgccgacgccggtggaggaggtgcacgagccgcaggtggtcgtggtcgtcgacgtggacgtggagcctgtcacctgcgccggcgccgccgaggcagctgcgggagcaggggcagatgcgtccggcgtggccgacggcggcgtccatggacccatggcgccgccggagcagctggcgatcaagcccgacatggccatttccgtggaggcgtagctcgagacccagctttcttgtacaaagtggt

SEQ ID NO: 496 - DNA, 826 bp, Zea mays
acaagtttgtacaaaaaagcaggctcctgcaggaccatggcgactgcggcggcggcggcggcggcggccatggaggagccggacgtcgtcaacggccgcgacgtggtgagctgggtggcgtccggggtggtgctgtggtcgaccgccttcttgctggtgcgggcgctgttccccaagcgctcctacgacttctgcaaccgcgccgtctccaccatgcacgccgtcgccgccgtgtgcctcgcctgcctctccgtcgacgactggtcgtgccccgtctgcccgctcgccgccgcatcctcccgtcgccagatgaaggcgctggcggttacgctggcgtacatggtgtacgacgcggcgtgctgccacctcaacggcgacacgcggctggacaacgccgtgcaccacctggtcagcatcgtcggcatcggcgcggggctcgcctaccagaggtgcgggacggagatggtggccagcatgctcgtgacggagatgtccagcccgctgctgcacctgcgggagatgctcaaggagctgggcgtgcgggacacggagctgaacctcctcgtcgacgtgctcttcgccgccaccttctccgccgcccggatgggcgtcgggccgtacctcacctacgtcaccgtgacggccgacaaccccatcctcatcaaggcgatggcgacggggctgcagctggtgagcgcctactggttcctgcggatcctccggatggtcaggtacaagctcgccggcaagaagaagccgacgccggccaagctcgccgccgccgccgccaactagctcgagacccagctttcttgtacaaagtggt

SEQ ID NO: 497 - DNA, 586 bp, Zea mays
acaagtttgtacaaaaaagcaggctcctgcaggaccatgtcgctgctggagaacacgttcagcgggttcctgcagggcgccggcgccgacaccgcggcgagggccgtgttcgcggaggggtccctgttctgcccgttcctgttcggcaacttcttcgacccggccgacccgttcccgctgtgggagttcgagtccgacgtgctgctcgccgcgctccgccgcggcaacgccaggaccaccgtcgactgggccgagaccgactgcgagtactacctcagagccgacgtgccaggtggaaggagatgcgacgtggaggtgagcggggacgcgatgaaggtgatcgacatcagcgggctgtggcgggcgccggcggcggacggccgggactggcgctgcggccggtggtgggagcacggcttcgtccggcgggtggagctgccggaggacgcggagtggaggaaagtggaggcgcacttcgacgacggcgagggggccctggagataaaggtccccaagaccgccgacgacgacgatgcccaccacgccacggcctagctcgagacccagctttcttgtacaaagtggt

SEQ ID NO: 498 - DNA, 680 bp, Zea mays
gcagtcgctgtcgttaccatggccatgatgagcggcatggacggcggcagcaacgtcgtgaaggtggccgccgtggtggacgcggagaaccctgccgtggggccgccgccgtgcgcggtggactccgacgacctgtcgcagcgcgccaactggctgcgcgcggcggtgcttggcgccaacgacgggctggtgtcgacggcgtcgctgatgctgggcgtgggcgccgtgaaggcggacgctcgcgccatggtgatctccggcttcgcgggcctcctggcgggcgcgtgcagcatggccatcggcgagttcgtgtccgtgtgctcccagcgcgacgtggagctggcgcggctggaccgcggcggcggcgacgacgagaaggcggcgctgcccagccccgtgcaggccgccgctgcgtccgcgctggctttctccgtgggcgcgctgctgcccctgctggccgccggtttcatcgccgactacaggctgcggattggagtggtggcggccgtggccaccgccacgctggccgcgttcggctgcgtcggcgccgtgctggggcgcgcacccgtggcgcggtcgtgcgcgcgcgtcgtcggcggaggctgggtcgccatggccgtcaccttcggcctcatgagactcttcaaggccagcggtatatagaacccagcggtactcgc

SEQ ID NO: 499 - DNA, 1712 bp, Zea mays
acaagtttgtacaaaaaagcaggctcctgcaggaccatgcccgaccagacgtcggctgcggccgcgggcggcgcggcgttcgaccgttgcctgctggcgctgtacctcatcagcccgctcactgttctggcgctccgcttcatctccgcgccgtacggcaagctatcccggccgggctggggccccgtcctaccggccccactcgcgtggttcctcatggagagccccaccctctggctcccaccgctcgtcctcctccgctggccgccgccgccgctctccggcccactcgccgcactccccgccgcgctctacgcgttccactacgtccaccgcacgctggtccacccgctccgcctcgcccgcctgcgccgcgccccggcccccgtgccgctcctcatcgccgcctgcgccttgggattcaatatcctcaacgcctacctacaggcccgctccttcgccctccacgccggccgccaggcgtcccccttccgctgcctcgctgggctggccctcttcgcgtggggaatgcggacgaacatcgcggcggacaaggagctgctgcggctcaaggaggccggaggcgggtacaagatcccgaggggcgggtggttcgacctcgtcaccagccccaattacttcggcgagacggtggagtggctgggcttcgccgtggtggcgtggacgcccgcggcctgggcgttcttcctctacacctgcgccaacctcgggccgagggccagggaccaccgccgctggtacgtgcagaagttccgcggcgagtacccggcgtcgcgcaaggcgttcatcccctacatctactagctcgagacccagctttcttgtacaaagtggtacaagtttgtacaaaaaagcaggctcctgcaggaccatgcccgaccagacgtcggctgcggccgcgggcggcgcggcgttcgaccgttgcctgctggcgctgtacctcatcagcccgctcactgttctggcgctccgcttcatctccgcgccgtacggcaagctatcccggccgggctggggccccgtcctaccggccccactcgcgtggttcctcatggagagccccaccctctggctcccaccgctcgtcctcctccgctggccgccgccgccgctctccggcccactcgccgcactccccgccgcgctctacgcgttccactacgtccaccgcacgctggtccacccgctccgcctcgcccgcctgcgccgcgccccggcccccgtgccgctcctcatcgccgcctgcgccttgggattcaatatcctcaacgcctacctacaggcccgctccttcgccctccacgccggccgccaggcgtcccccttccgctgcctcgctgggctggccctcttcgcgtggggaatgcggacgaacatcgcggcggacaaggagctgctgcggctcaaggaggccggaggcgggtacaagatcccgaggggcgggtggttcgacctcgtcaccagccccaattacttcggcgagacggtggagtggctgggcttcgccgtggtggcgtggacgcccgcggcctgggcgttcttcctctacacctgcgccaacctcgggccgagggccagggaccaccgccgctggtacgtgcagaagttccgcggcgagtacccggcgtcgcgcaaggcgttcatcccctacatctactagctcgagacccagctttcttgtacaaagtggt

SEQ ID NO: 500 - DNA, 1151 bp, Glycine max
gtacgacaggtgatcagggcccgcgatcgcttaattaatcagactaccaggcctggcgcgccaccatggaattggaaaccatctaccctccttgttttatgccaaattcaaattggtttgtgcaagagagccacagcacagagtggactagagaagataacaagaagtttgaaagtgcccttgctatatatgacaacgacaccccagatagatggttcaaggtggcagctatgatccctgggaagactgtgtttgatgtgatcaagcagtatagggaactggaagaagatgtgagtgaaatcgaagccgggcgtgttccaattcctggctatcttgcctcttctttcacctttgagctggttgacaaccacaactatgatggatgcagaagaaggcttgcacctgtcagaggctctgatcaagagagaaagaaaggagtcccatggactgaagatgaacacagacgttttctgatgggacttttaaagtatggtaaaggagactggagaaatatctctcgcaattttgtggtcactaagactccgacacaagttgctagccatgcacaaaagtactacataaggcaaaaggtttctggagggaaagataaaaggagaccaagcattcatgatataaccactgttaatcttacagaaacttctgcatcagataagaacaagcctcagttatttaatgcgtctcctgtgcttgcaccacagcagaagctgaatagcatatcaaaggtacagctgggctggactagtagccactacaatgatggatcattcatggttttcaacccaaatagtgatgccttgtttgtgtcatcttcacctgatgtcacttctatggccctgaaaatgcaagggcaagatctctatgactgtgctttacatgaggcttatgccaaggtaaaagttccaggtttcagcatggctcctagagacttcaataatgaagctgtttttggtattcatgcactgtaggcgatcgcaccggtaccacctggtgacgaattatcttgtgtatgttctgtagtgatgagttttggtttgagtaaagagtgaagccgaggctctaatttataggtgagaatggagatttgcatggcgatcacgtgtaaatattgcatgcatatgtgtgtgcgctgt

SEQ ID NO: 501 - DNA, 1756 bp, Arabidopsis thaliana
ggtaccggcgcgccaccatggctgcatctttctctgtcccctctatgataatggaagaagaagggagattcgaagcggaggttgcggaagtgcagacttggtggagctcagagaggttcaagctaacaaggcgcccttacactgcccgtgacgtggtggctctacgtggccatctcaagcaaggctatgcttcgaacgagatggctaagaagctgtggagaacgctcaaaagccatcaagccaacggtacggcctctcgcaccttcggagcgttggaccctgttcaggtgaccatgatggctaaacatttggacaccatctatgtctctggttggcagtgctcgtccactcacacatccactaatgagcctggtcctgatcttgctgattatccgtacgacaccgttcctaacaaggttgaacacctcttcttcgctcagcagtaccatgacagaaagcagagggaggcaagaatgagcatgagcagagaagagaggacaaaaactccgttcgtggactacctaaagcccatcatcgccgacggagacaccggctttggcggcaccaccgccaccgtcaaactctgcaagcttttcgttgaaagaggcgccgctggggtccacatcgaggaccagtcctccgtcaccaagaagtgtggccacatggccggaaaggtcctcgtggcagtcagcgaacacatcaaccgccttgtcgcggctcggctccagttcgacgtgatgggtacagagaccgtccttgttgctagaacagatgcggtcgcagctactctgatccagtcgaacattgacgcgagggaccaccagttcatcctcggtgccactaacccgagccttagaggcaagagtttgtcctcgcttctggctgagggaatgactgtaggcaagaatggtccggcgttgcaatccattgaagatcagtggcttggctcggccggtcttatgactttctcggaagctgtcgtgcaggccatcaagcgcatgaacctcaacgagaacgagaagaatcagagactgagcgagtggttaacccatgcaaggtatgagaactgcctgtcaaatgagcaaggccgagtgttagcagcaaaacttggtgtgacagatcttttctgggactgggacttgccgagaaccagagaaggattctaccggttccaaggctcggtcgcagcggccgtggtccgtggctgggcctttgcacagatcgcagacatcatctggatggaaacggcaagccctgatctcaatgaatgcacccaattcgccgaaggtatcaagtccaagacaccggaggtcatgctcgcctacaatctctcgccgtccttcaactgggacgcttccggtatgacggatcagcagatggttgagttcattccgcggattgctaggctcggatattgttggcagttcataacgcttgcgggtttccatgcggatgctcttgtggttgatacatttgcaaaggattacgctaggcgcgggatgttggcttatgtggagaggatacaaagagaagagaggacccatggggttgacactttggctcaccagaaatggtccggtgctaattactatgatcgttatcttaagaccgtccaaggtggaatctcctccactgcagccatgggaaaaggtgtcactgaagaacagttcaaggagagttggacaaggccgggagctgatggaatgggtgaagggactagccttgtggtcgccaagtcaagaatgtaggcgatcgc

SEQ ID NO: 502 - DNA, 1760 bp, Zea mays
acaagtttgtacaaaaaagcaggctcctgcaggaccatgtctctactttcaaagttgcgcttggtcaccgtggatgttactggtacactgattgcttacaaaggacaccttggggattactactgtatggcagcaaagtctgctgggatgccatgtcctgactataaccgcatgcatgagggcttcaagcttgcatacactgagatggcaagacagtacccttgctttggatttgcagctaagatgccgaacatcgaatggtggaggacatgtgttaagaattcattcgttaaggctggctatgattatgatgaagagacatttgagaaagtcttcaggcgcatttattctgcatttggctcctctgcgccatactcggcgtttcctgattcgcagcccttcctaaggtgggcacgcgaaaagggactcactgttggcatcgtcagcaatgcagaataccgctacaaagatgtaatcctgccagctttaggattgaatcagagctccgaatgggactttggggtgttctcaggtgtcgttggcgttgagaagccagacccaagaatttacaagatagcgctggagatggcaggaaacgtcgctccggaagaagcgctccacataggtgacagcatgcggaaggactacaccccagctaggagcatcgggatgcatgcgctgctcctggaccggttcaagactgccgacgctgagagctggaggcagtcaggcgccacggtgctcccggaccttgtcgccactcaagagtggctcaccaaggatcagaatgacgaacaggaggaaacagtggcagcacgagtgctgaagagaatgtccgaaaagctatagctcgagacccagctttcttgtacaaagtggtacaagtttgtacaaaaaagcaggctcctgcaggaccatgtctctactttcaaagttgcgcttggtcaccgtggatgttactggtacactgattgcttacaaaggacaccttggggattactactgtatggcagcaaagtctgctgggatgccatgtcctgactataaccgcatgcatgagggcttcaagcttgcatacactgagatggcaagacagtacccttgctttggatttgcagctaagatgccgaacatcgaatggtggaggacatgtgttaagaattcattcgttaaggctggctatgattatgatgaagagacatttgagaaagtcttcaggcgcatttattctgcatttggctcctctgcgccatactcggcgtttcctgattcgcagcccttcctaaggtgggcacgcgaaaagggactcactgttggcatcgtcagcaatgcagaataccgctacaaagatgtaatcctgccagctttaggattgaatcagagctccgaatgggactttggggtgttctcaggtgtcgttggcgttgagaagccagacccaagaatttacaagatagcgctggagatggcaggaaacgtcgctccggaagaagcgctccacataggtgacagcatgcggaaggactacaccccagctaggagcatcgggatgcatgcgctgctcctggaccggttcaagactgccgacgctgagagctggaggcagtcaggcgccacggtgctcccggaccttgtcgccactcaagagtggctcaccaaggatcagaatgacgaacaggaggaaacagtggcagcacgagtgctgaagagaatgtccgaaaagctatagctcgagacccagctttcttgtacaaagtggt

SEQ ID NO: 503 - DNA, 622 bp, Glycine max
acaagtttgtacaaaaaagcaggctcctgcaggaccatggacttctactttggaaactctcctccttatcccaataattatgctcataattctcttaatatggctctatcttcccctgagattgcactatccgattatctcatgctcgatgactatgttgatcatcaagattctcgatcatcacaaagcaccgagtcatctgaaaaagcaaccttcaatgatgccactcacggattcagtactggtgcaacctctaagaataataacataaactgcaaaaatgggattaatgaaaacaaaggtggagtgggtccaaggatcgcgtttagaaccaaatcagagcttgagatcatggatgatggatacaagtggaggaagtacggcaagaagtccgtgaagagcagtcccaatctaaggaactactacaaatgttcaagtggaggatgcagtgtgaagaaaagggtggaaagggatagagatgactacagctacgtgataacaacatatgaaggtgtgcacaatcatgagagcccatttaccacatactacagccccatctccttcgtacattctgatactactttcaaatagctcgagacccagctttcttgtacaaagtggt

SEQ ID NO: 504 - DNA, 1624 bp, Zea mays
acaagtttgtacaaaaaagcaggctcctgcaggaccatggagtacgagcgcattgagaagccgttccccgtccagggcggcgggttctcgcccaagcggctgcgcgcgatgctgctgggggtggacaagcgccgcaaggggcaggacggcgccgccgaggaggacgaggacggcggcggcggcggcgactacggcgccctgcccaaggcccacgccagatccggcgccggcgacggtggtggcgccacgtgcgaagaatacaaggacgtggacgtggtgagcaccacctcagagttctcgtcctcgctggagacagcgggtgggcaccggccccgggacgcccaccccgtcgccacgggttctaggaccagggtgccgcccgaggaggactcgtgcgactcggagagcgtggcatccaacttcgagttccacaaggagcggcgggcagcggcggcggcgtcggtcgtccctccattctcaaagcccgccccgtcaaagtgggacgacgcacagaagtggatcgccagcccgacggcgaactgccctggcaggggtggcgcggctcctgcgccgaagaagacagagaaacctggctccggcatcgggaggctgccgctgccggcgaccaaggtcgtggtagaggccaccgaggagatagataccaagaggatggatccgagccaggagaagcgtgagattgggtggcagaaagcggcgaggtgggcgccgcccgacccctgtccggaggtggagccctgcccaacaaagaccacactactcgctgtagaaactacagtggctgctgcttcagcagcagctgttaatttcaaccgccatgatgcatccaccacgcttcagagcgcagcaacatgcatacctcctccaacaacggtccggtcagtgtcgatgagggacatgggcacagagatgacgcccatcgcaagccaagagccgtcccggaccgggacgccggtgagggcgacgagcccaaactgctcccagccaacgactccacggaggacgctcggtggccccagcgcagtcggctccttcatcagccacggaggagaatgcagcagctcggagctgagcgagcaggagctgcagaccaaaaccaggagggagatcatgctccttggcacgcagctaggcaagaccagcatcgcggcatgggcgagcaagaaggaggaggagaaggacgcctcgctctcgctgaaaccggtgcccatggaccagtcgacgcagaacataaccgcgatccgtgcggctgcgtgggaggaggcggagaaggccaagtatttagcgagattcaagcgagaagagatcaagatccaggcttgggaggaccatcagaaagcccagatagaagctgagatgaggaaaatcgaggtcgaggtggagcggatgcgtgcccgcgcgcaagacaagctgatgaccaagctcgcgtcggcgaggcacagcgcagacgagaagcgtgccacggcggagctgaaacggaaccgcgcagccgcgaggaccgctgagcaggcagagcacatcaggaggaccggccgggtgccgccgtcgtttggctgctggaactggtgctcatagctcgagacccagctttcttgtacaaagtggt

SEQ ID NO: 505 - DNA, 1300 bp, Zea mays
acaagtttgtacaaaaaagcaggctcctgcaggaccatggctgaagcggccacttcttcgtcctcgtccggatccttcgccccgagccgcctccatgacgccggtgtcgtcagggaatcgctcccgtacagtgttctcgccgcacccccgccgccgcctctgcctccggtgcaggtgcaggttgcgggttccggcggcggcggcggagggaagattagccccgcggtgcttttcatcatcgtgattctcgcgttagtgttcttcatctccggcctgctccaccttctcgtgcgcgtcctgttgaagaagcagcaccgccgcggcggtcgaaggggcacggcgtcggcggcggcgccgaggactggagtggaggcaggcggggtggacgtggcgttgcagcgccagctgcagcagctgttccacctccacgactccgggctggaccaggccttcatcgacgcgctgccggtcttcgcgtaccgggatatcgtcgtgggcggcggcggcgacggggacaaggagccgttcgactgcgcggtgtgtctgtgcgagttcgatggcgaggaccggctccgtctgctgccgctgtgcgggcacgccttccacctcaattgcatcgacacgtggctgctctccaactcgacctgcccgctctgccgcggggttctcttcgtcccggggctcatgggcgatggcaaccccatgttcgatttcgaggagagactggaggaagggcggttgtccgaggactgtgacgttggatttggattgcctgggctgaaggcttcagggttggcacagacaccggtggttgagaagaaggtattccctgtgaggttgggaaagttcaagaatgtcggaacccagggtgcggtggaaggtggcaatgccaatgccagtgtgttgagtagggatgaaggggagagtagcagcagcagcttggatggaaggagatgcttctccatgggcacctatcagtatgttcttggcacttctgagctccgagtagctctccagcctggccggattagaaatggcactggtggtgcaatgatgggaagacctcctggtttaagttcgatcaatgctgatattatggaggggaagaagatctgtacacgcaacaaaggggagagtttctctgtgtcgaaaatttggcaatggtctcatattaagggcaagctacctgctggttcggatgaatgttcggatgccgggagccttccttggatgaagagaggaggtgctgcggatacatcaaacttatagctcgagacccagctttcttgtacaaagtggt

SEQ ID NO: 506 - DNA, 799 bp, Glycine max
acaagtttgtacaaaaaagcaggctcctgcaggaccatgaagcccaagacttgcgagctttgtcatcaactagcttctctctattgtccctccgattccgcatttctctgcttccactgcgacgccgccgtccacgccgccaacttcctcgtagctcgccacctccgccgcctcctctgctccaaatgcaaccgtttcgccgcaattcacatctccggtgctatatcccgccacctctcctccacctgcacctcttgctccctggagattccttccgccgactccgattctctcccttcctcttctacctgcgtctccagttccgagtcttgctctacgaatcagattaaggcggagaagaagaggaggaggaggaggaggagtttctcgagttcctccgtgaccgacgacgcatctccggcggcgaagaagcggcggagaaatggcggatcggtggcggaggtgtttgagaaatggagcagagagatagggttagggttaggggtgaacggaaatcgcgtggcgtcgaacgctctgagtgtgtgcctcggaaagtggaggtcgcttccgttcagggtggctgctgcgacgtcgttttggttggggctgagattttgtggggacagaggcctcgccacgtgtcagaatctggcgaggttggaggcaatatctggagtgccagcaaagctgattctgggcgcacatgccaacctcgcacgtgtcttcacgcaccgccgcgaattgcaggaaggatggggcgagtcctagctcgagacccagctttcttgtacaaagtggt

SEQ ID NO: 507 - DNA, 1078 bp, Zea mays
acaagtttgtacaaaaaagcaggctcctgcaggaccatggctgtgaagggcaaaaatacagatgtagtggaagagttattgatggctgatgtttccattctcaatgtgagggacaagaaaggaaatactgctttgcacatagctacacggaaatggaggccccagatggtacagcttcttcttagctatgaatcacttgaagttaatgctatcaacagtcaaaatgaaacagctatggatttggctgacaaagttccttatggtgagtctaaaacggaaataatagagtggctgacagaagctggtgcaaagaatgccagaaatgttgggaaaattgatgaggcatcagaactgaggagaactgtgagcgatatcaagcacaatgttcaggcacagcttagcgagaatgctaaaaccaacaaacgagtgactgggattcgcaaagagttgcagaaactgcatagagaagctatccaaaacaccatcaattcagtcaccttggtagcgaccctgattgcctccattgccttcgtcgccatattcaatctgccaggtcaatacttccaggatgtgaatagtgggggagacattggtgaggctgaaatagccaagcttaccggtttccgtgtcttctgccttctgaacgctactgctctcttcatctccctcgcggtggtcgtggtgcagatcaccttggttgcctgggaaactggtgcccagaagcaagttatcaagatcgtgaataagctcatgtggacggcatgccttagcacgggtgtggcttttatctcgctggcctatgttgtagttggcccgcagcatgcctggatggccttcacggcatcagccatcggagggccgatcatgattggaactttcctgttcctagcctatcttctgttgcgcccacggttcaagttcggcgaagacagacagcgccgcatcaagagggcaagcggcagcaaatccttctcctggtcaatccatgatgggttttcagatctggaagccttctctgatcacgagaagaggatctatgccctgtagctcgagacccagctttcttgtacaaagtggt

SEQ ID NO: 508 - DNA, 874 bp, Glycine max
acaagtttgtacaaaaaagcaggctcctgcaggaccatggcatcaccggcatccaacccccaaagcgccgagactaagaaaagccgtggccgccaaagggttgacattaagaaaatgagcaacgaggccaacctccaagtcacgttctctaagcgccgcagcgggcttttcaagaaagccagtgagctttgcactctctgcggcgctgaagtggctctggtggtgttctcgccggggcagaaggtgttctccttcggccaccccagcgtggatggcgtgattgagcgctatctcactggggtcgcaccgccggaggcggacaacatgaattacatcgatgtgcaccgcatggccaaagtggttgaccttaacgcccagctgactcatatcaaagatcagctcgaggcggagaggaagcgcgccaaggagctgggcggcattcagaaggaggccgaaacccatctgtggtgggcccggcccgtggccgacattaccgatattaacaacctgctgaagctgaaaaaagctttccagcagctgaaacaagatgtgtccggtcttgctggtatggctttgttccagtctgttgcaaatggaaacccggggcatcagttttttgctggggcttcttcctcagccgttcccaatgttgtgcttcagtcacaaccactgccagtggcccaggtgttccctcctgctgttccacagatgatgtttccaccacccatatttgagaactacatggtgaaccccaatgggtttgatgacatgggaatgggaggaggaggatttggaggagcaggaccttctagtgctggtggtggtggtggtggtttcttttagctcgagacccagctttcttgtacaaagtggt

SEQ ID NO: 509 - DNA, 2596 bp, Oryza sativa
acaagtttgtacaaaaaagcaggctcctgcaggaccatggaagagggagacccccagcccagcatctccttggcacgcactccgtcggaaggcgcggcggcggcagtcgacttggatctccttgagcagcttctctcagccgacaacgcctggcttgaagtggcagcaaacacttcacgctcacccaacttctttgctaccccctccaactgcttgacagatgcttcggtcgccaccaccacacctgcaaattcatggtggattcagccgagcggtgcaagcacctcagttcgggaacggtttgaccaagctctagcttacatcagggagacacagagcgacgccgatgtgcttgtgcagctctgggtgccagtcaagggcaacgatggtcagctggtgttgacgacgagcgggcagccattcactctcgatcagaggtccaatagcctcatacagttcagggaggtttcgacaaagtaccagttctctgcagatgttgcttcaggttcctcacctgggctaccagggagggtgttcatcggtaggcttcctgaatggtcaccagacgttcgatacttcaccagctatgagtaccctaggatcaaccatgcacaatatttggatgtccacgggacgatggggctgccggtgtttgagagggggaactactcatgcttaggtgtcatcgagttgatcatgaccaagcagaagctcaacttcacctccgagctcaataccatttgcagtgctctccaggcagttaacctgacaagcacagaagtttcaagcattccgcgcgcaaagcttaacagtgcttcctacaaagatgctttaccagagatactagaagtcctgagagcagcctgcatcacccacaagctaccattagctcagacctgggtcacatgtgctcaacaaggaaagcggggcagtcgccattctgacgagaactacaagtactgcatttccaccattgatgcagcatgctatgtgaatgaaccccggatgcagagcttccacgaggcctgctccgaacaccacctgctacgggggcagggggttgcagggaaagccttcaccacaaaccagccatgcttcctaccagatattggatcctccactaaactggagtacccattgtctcaccatgctaagattttcaatttaaaaggtgcagtggcaatccgattgcgttgcacgcgcacagggattgccgactttgtgctagagttctttctgccaactgactgtgaagtacttgaggagcagaaggcagtgctggactcattatcaggcaccatgagaagtgtttgccaaactttacgtgttgttactgacaaggagatggaggatgaggccatgagagaaatgaatgagctgaactcatttagtcctcggggcaagaacaaagttgaggagttatcctttggagacaacacaagaggggatagagaggaggcatcttggacaaccttagtagggacttcacagaaaggatcagatttagctgaattgcatacacatggaatgttatcacatggagggcatggttcatctcaagctggtgatcaaacaagtaaagaaggtagcaaagtgaaaaggcgtacaaagacggagaagaccgtgagcttgcaggtccttcggcagtactttgctgggagcctgaaggatgcagcaaagagccttggagtgtgcccaaccaccctgaaaagaatatgcaggcagcatggcataaaccgctggccatcacggaagataaagaaagtagaccattctctaaggaaactgcagcaaatcattgattcagttcatggagcagagacagctttccagcttaacaccctctacaaggacctcacaaacacctctgtatcatctgacaacaatttgtcaggaagtgtcacagttcctctggctaaccagaacaatctagactttgaaatgcaccaacaccacaggttaagcagcaatattccatcgacttcactctcacactcatcatgcagccaaagttccgattcaagcccttcctgcagtggaggagcaacaaaacattcaccccaggttggagctgatcaggtgaggtcaggatgtcttccacaacatagccctgtccagactctgcaaacagaagctgcttcaataaatgaacatttctcaggtcaggaagcaccaatagatctcttacaggatgttgctgaaaaggcaaatggtgaacagcacatgtctcaaagtccatcatcccccaagcagactgcaaatgtaggtatgagagtaaaggtcacttttggctcagaaaaggtgaggttcagattgaaacctgagtgtgactttcaagaactgaagcaggagatatcaaaacgtctgagtatagcagacatgaattccttgattgtaaagtatttggatgacgattcagaatgggtcttgatgacatgtgatgcagatttacacgagtgttttcatgtttataaactagcagatatccaaacaatcaagatttcagttcatctggctgctagtccaacaacaaggatcaccattggtcacactggtttctcatagctcgagacccagctttcttgtacaaagtggt

SEQ ID NO: 510 - DNA, 1147 bp, Glycine max
acaagtttgtacaaaaaagcaggctcctgcaggaccatgggttcgtcgactaatggtggtgtgccgccagggtttagatttcatccaacggatgaagagctgcttcattactacttgaagaagaaggtgtcctttcagaagtttgacatggatgtcattagagaggtcgacttgaacaagatggagccttgggacttgcaagaaagatgtagaattggatctactccacaaaacgagtggtatttcttcagtcacaaggatagaaagtaccctacaggttcaaggactaatagagcaacgaacgcagggttttggaaagcaacaggaagagacaagtgcattaggaatagcttcaagaagattggaatgagaaaaacccttgtgttttacaaaggaagagctcctcatggacaaaagactgattggatcatgcatgagtaccgcctagaagatggcaatgatcctcaaggaagtgccaatgaagatggctgggtggtgtgcagagtgttcaagaagaagaatttattcaagattgaaaatgaaggtgggtctacacataaaccagatcaccaaatcaacaattcttcaaacactaatgcacggtcctatagagaaaatcactacttactacatcaacagcaaaatcctaggaactcatcagggcttgagcttgataagcctgagctggctctccattacccgccgccacacttgcaaaaccctccatactcactcttccaatcccagcctcttcttcagacccaaaagcctatggtttatgattattcatatacatcagacacccctatcatggcaaagcaactcatgacaaaccctagagactgtgagagcggcagtgatggcctaagatatcaagtttcggagtcaggtatggaagttgggtcgtgtgaaccaaatcaagaaatgggaaccggaagaggtgaaggaataaacgaatggggtgttcttgataggctagtgacctctcatcttgctggaaatgaggactcatccaaaggggtcaggtttgaagaggcaaatccacagtctgtccaccagatcaatcaactttcattgaggggagagatggacttctgggcctatggaaaacaatagctcgagacccagctttcttgtacaaagtggt

SEQ ID NO: 511 - DNA, 976 bp, Glycine max
acaagtttgtacaaaaaagcaggctcctgcaggaccatgattaatatggcaaccatggaagacatgagcaacatgagtggtgaaattacacttccagggttccgattccacccaactgaagaagagcttctggatttctatctcaaaaacatggttgttggcaagaaacttcgttacgatgttattggtttcctcaacatctatcagcatgatccatgggatttgcctggtttggcaaaggttggggaaagagagtggtacttcttcgtgccaagggacaaaaaacatggaagcggtggaaggccaaaccgcaccactgaaaaagggttctggaaagccaccggttcagaccggaaaatagttaccttatctgatccaaagcgcataattgggttaaggaagacactggttttctatcagggaagagctcctaggggatgcaagaccgattgggtcatgaatgagtaccgtttacctgacaattgcaaactacccaaggaaatcgtgttatgcaagatatatcgaaaggcaacttcgttgaaagtgctggagcaaagggcagcactagaggaagagagagagaagaagcaaatggttgataattcccctgcttctcctccttcctccacggacaccatgtcctttagcagcccacaggaagagcaaaacgtgcccttgcccttgttgcagcatgttcttaagaaagagtctgaaacaactgaagacatggtagtgtcaaaacaagaaaaaacaacgaaccaattgaccttaaaagacaccaaaagcacttgtggcacatcacttcaaatgccctttgggaaagagaagctgccagaccttcagcttcctatgctctcggattggacccaagataccttttgggctcagttgaatagtccttggctccaaaactttactcccaccaatattctaaacttctactagctcgagacccagctttcttgtacaaagtggt

SEQ ID NO: 512 - DNA, 1408 bp, Glycine max
acaagtttgtacaaaaaagcaggctcctgcaggaccatgatgtctctttcagtttcacctagcttaggatctccctaccaaatgaaatgcgagcaaaggggtttggtattaatccatttgttgctcgctggtgctaattttgtagccaccggtgatttacaaaatgcaaacctcacacttgagcagatttcccagcatgcctctcttgatggggatactatgcagcgaattgcttcttatttttctgaagcactcgctgatcggatacttaaaacatggcctggcatccacagggccctcaattccagcagaataactatggtttctgatgaaattcttgttcaaaagctcttctttgagcttttacccttcctcaagttctcatatatcctcactaatcaggctattgttgaagccatggaaggggagaaaatggtgcatatagttgatctctatggggccggaccggcacagtggatttctctcctccaagttttgagtgcacgtcctgaaggtcctccccatttgagaatcaccggggtccatcacaagaaagaggttctggatcagatggctcataaactcactgaagaggcggaaaagttggatatcccattccaattcaaccctgtgctaagcaagttggaaaatcttgatttcaacaaacttcgcgttaaaactggggaggcactggcaataagttctattatgcagttgcactcccttttggccttggatgaagatgcctcgcggagaaaatcgcctcttttgtcaaaaaactcaaatgcaattcacctgcagaaaggcctcctcatgaaccataacacactgggagatttgcttgacggctatagcccgagtcctgattcggcctcatcctcaccagcagcgtcttcatctgctttgatgaattcggagagctttcttaatgccttgtgggggttatccccaaaagtcatggttgtaactgaacaagactttaaccacaactgtttgaccatgatggagagactggcagaagctctattttcttatgctgcatattttgattgcttggagtccacggtctcaagagcatccatggacagattaaaacttgagaagatgctttttggcgaggagataaagaacatcatagcttgtgaaggatgtgaaagaaaagaaaggcacgaaaagatggataggtggatccagagacttgacttatctggatttgcaaacgtgcctataagctattatgggatgctgcagggaaggaggttcttgcagacctatggttgtgaggggtacaagatgagggaggaatgtggtcgggtgatgatatgctggcaggagcgatccttgttttccataacagcttggagaccaaggaagtagctcgagacccagctttcttgtacaaagtggt

SEQ ID NO: 513 - DNA, 787 bp, Glycine max
acaagtttgtacaaaaaagcaggctcctgcaggaccatggtgcaatcaaagaagttcagaggtgtcaggcaacgccattggggttcatgggtatccgaaattcgccacccgcttctgaagagaagggtgtggctagggacatttgaaacagcagaagaagctgctagagcctatgatcaagctgcgattctgatgagtgggagaaatgccaagaccaatttcccaataactcaaactccagaaggtgatccaaagagcactaccagtgaggacactccctccaccacctcgaaggatctggaggaaatcttacatgcaaagcttcgaaaatgtgggaaggtaccttcaccttctatgacttgtttgaggcttgacccggagaactcccacatcggagtgtggcaaaaacgtgctgggaggcgttctgattcaaattgggtcatgacggttcaactgggaaagaagagtgttaatgttaataataatgacactcatcatcaagctgatagtagcagtagtagttctctttcttcttctctaccttcttctgaacatcaccacattgagtctccatcactggctgtgacaggtaatcttcatcatcaagaagttgtgagaggagagattgacgaagaggagagaattgcccttcagatgattgaggaactcctcaacgacagaaactgccctagcccatcatttaacaacaacattcaagaaagggatggtgctgatcatgaccacttttttctttagctcgagacccagctttcttgtacaaagtggt

SEQ ID NO: 514 - DNA, 1084 bp, Zea mays
acaagtttgtacaaaaaagcaggctcctgcaggaccatggggctggacgtcggcggcatcgggatgggcctggatctgggtctggacctcgggctgttcgccgcgcggagcgccggagggatggcggccgcggccaagggtgcgccggcggagatcgagtcctgcatcaggagcctcgaggaggagcgccggaagatcgaggtgttcaggcgcgagctcccgctctgcgtgcgtctcctcgccgatgtgatcgacgaattgaaggatgaggccgccaagagaggcggagacgcggaggccaaggccgacgacggcgataagcggaaatggatgagcaccgctcagctgtggctcgacagcgacgccaaatccgacgagtctgacaaagagcaactgagtgaaatcacttcgccggagcccaagttgctcggtggcgcacccatgcccataagggccgttgcggcggtgccacccctgccgcctccattcttcaggagagaagacagctctgccggcagtggtctgtcgctggtaccacccgcagctaagccgccgattcctcccatgtctgccagcgacaacgcgagcggcagattctgtgccactatgccaccgtctggctctggggccaacttgcactctcaggctcagcagcaagccaggaaggcgaggcggtgctggtcgccggagcttcaccggctgtttgttgccgccttgcatcaactcggcggccctcaagttgctactccgaagcagatcagggaggtgatgaaggtggacgggcttacaaacgatgaagtgaaaagccatctccagaagtaccggctgcacaacagaagatcccccggcgtcgtggctccggtgagccagtcggtcatgctggcgggcggcctctgggctcctcctcatcaggagcaaagcagctcgcagtccgggtctccccagggcccgcttcagttctctggatccggtgtagcggccaccgtcggcggcgatagcagcagcagcgacgaggacgacaagtccgaaggctacagccggaaatacgtgtagctcgagacccggctttcttgtacaaagtggt

SEQ ID NO: 515 - DNA, 745 bp, Glycine max
acaagtttgtacaaaaaagcaggctcctgcaggaccatgaacaaccctagttctccctctccctgcgcggccttcgcggacttctacgagcaatggttcgaggagcttcagtccctgatgcagcaactcaggggtgagggcagaaaagaggaggtgatggagaaggtgatgtggcaccaccagaactactacgtggccaagtcggcggccgcggagaaggacccactcaacgtgttcctatctccctgggccaccacgctggagcgctccctccactggatcacagggtggcgccccaccaccgcgtttcacctcatctacaccgagtcctcgctcatgtttgagtcccacatcatcgatattctccagggactccgcaccggcgacctcggcgatttgtcaccctctcagttccgccgcgtcagcgacatccaatgcgacactgtgaaggaggagaatgcaataacggaggagctatcagagtggcaggacagtgtgagcgagatgatgggcccaggtgcgaacatcaacgacaagatcggacggctggtatgcatcataaagaaagcagatgatctacggctgagaaccttgcggagtgtggtggggctactgtcgccgcagcaggctattgagttcttgattgcatcggcggagttgctagttgggatacgcggttggggattgaatcatgaccgtccacgtggcagatagctcgagacccagctttcttgtacaaagtggt

SEQ ID NO: 516 - DNA, 817 bp, Zea mays
acaagtttgtacaaaaaagcaggctcctgcaggaccatgagagtatgtgagaaagtcgaaagcaaagggagaacaacctacaatgaggtggcagacgaactggttgctgagttttcagatcccaatattaatattgactctccagatcctgataattcgtctgcgcaacaatatgatgagaaaaatatccgaagaagagtttatgatgcgctgaatgtcctaatggctatggaaattatatctaaagataaaaaggaaatacagtggagaggtctgcccaagacaagtatgaatgatattgaagaactgaagacagaggtcaatggactgaaaggtcggattgacaagaaaaatgcatatctgcaggatttacaagatcaatatgcatgtctgcaaaacttggttcggcgaaatgagcagctatatgggtcaggagatgcaccttccggtggagtggccttgccatttatactagttcagacacgtcctcatgcaactgtagaagtggagatatcagaagatatgcagcacgtgcattttgatttcaatagcactccatttgagttgcaggatgattcatttgtactgaaagcaatggcattatctggcgaagaaactgattgtacccaagctcctggtgcgaatggaggcgagtgctcaagtacacggaacaattattggcaccaccaccaacaaccgcagcctccagggccaagagtagttagggtaccaaactcgcctcctattccagggatactaaaagggcgtgtcaagcatgaacactagctcgagacccagctttcttgtacaaagtggt

SEQ ID NO: 517 - DNA, 1883 bp, Zea mays
gcagtcgctgtcgttaccatggcgctttcagcttcccgagttcagcaggcggaagaactgctgcaacgacctgctgagaggcagctgatgaggagccagcttgctgcagccgccaggagcatcaactggagctacgccctcttctggtccatttcagacactcaaccaggggtgctgacgtggacggacgggttctacaacggcgaggtgaagacgcggaagatctccaactccgtggagctgacatccgaccacctcgtcatgcagaggagcgaccagctccgggagctctacgaggccctgctgtcgggcgagggcgaccgccgcgctgcgcctgcgcggccggccggctcgctgtcgccggaggacctcggggacaccgagtggtattacgtggtctccatgacctacgccttccggccaggccaagggttgcccggcaggagtttcgcgagcgacgagcatgtctggctgtgcaacgcgcacctcgccggcagcaaagccttcccccgcgcgctcctggccaagagcgcgtccattcagtcaatcctctgcatcccggttatgggcggcgtgcttgagcttggtacaactgacacggtgccggaggccccggacttggtcagccgagcaaccgcggctttctgggagccgcagtgcccgacgtactcggaagagccgagctccagcccgtcaggacgagcaaacgagaccggcgaggccgcagcagacgacggcacgtttgcgttcgaggaactcgaccacaataatggcatggacatagaggcgatgaccgccgccgggggacacgggcaggaggaggagctaagactaagagaagccgaggccctgtcagacgacgcaagcctggagcacatcaccaaggagatcgaggagttctacagcctctgcgacgaaatggacctgcaggcgctaccactaccgctagaggacggctggaccgtggacgcgtccaatttcgaggtcccctgctcttccccgcagccagcgccgcctccggtggacagggctaccgctaacgtcgccgccgacgcctcaagggcacccgtctacggctctcgcgcgacgagtttcatggcttggacgaggtcctcgcagcagtcgtcgtgctccgacgacgcggcgcccgcagcagtagtgccggccatcgaggagccgcagagattgctgaagaaagtggtggccggcggcggtgcttgggagagctgtggcggcgcgacgggagcagcacaggaaatgagtggcactggcaccaagaaccacgtcatgtcggagcgaaagcgacgagagaagctcaacgagatgttcctcgtcctcaagtcactgcttccgtccattcacagggtgaacaaagcgtcgatcctcgccgaaacgatagcctacctcaaggagcttcagagaagggtgcaagagctggagtccagtagggaacctgcgtcgcgcccatccgaaacgacgacaaggctaataacaaggccctcccgtggcaataatgagagtgtgaggaaggaggtctgcgcgggctccaagaggaagagcccagagctcggcagagacgacgtggagcgccccccggtcctcatcatggacgccggcaccagcaacgtcaccgtcaccgtctcggacaaggacgtgctcctggaggtgcagtgccggtgggaggagctcctgatgacgcgagtgttcgacgccatcaagagcctccatttggacgtcctctcggttcaggcttcagcgccagatggcttcatggggcttaagatacgagctcagtttgctggctccggtgccgtcgtgccctggatgatcagcgaggctcttcgcaaagctatagggaagcggtagaacccagcggtactcgc

SEQ ID NO: 518 - DNA, 1015 bp, Zea mays
acaagtttgtacaaaaaagcaggctcctgcaggaccatgccaacagctcccagtgaatctaacaaggagccaaggcctgaagagtgtgtaaatgaactgggcattaaacaaccagtacagcatgttgcttccgaggagcaggaaggagttcaagatgatgccaaggcagatgcaaatgttatgaatgtttcttttggtaagggaaaatcagaagattcttttggcacaattaatggtaccaacagtggagataaaatagaatctcctagtggtttagcagaaagaacattgactcagcctaccactaagggttgcagtaagcagcgtggccgtagttctaatggtagaggaaacaggactaaaaaaatagaagaggggaatgcgtctggactaattgctgtggctcccgagtcagaagatgatgatgatgccccatttatagatggaaaccaagcagagggtggtgcactgtgggatatttttcgacgggaagatgtgagcaaactgcatgattatctaatgaagcatgctgatgagtttagacattgcaactttgagccagtgaagcaggttactcatcctatacatgatcagtgtttttatctaacaattgagcacaagagaaagcttaaggaagaatatggagtcgagccttggacatttgaacagaagctaggtgaggcagtatttatcccggcaggatgtccccaccaggttagaaatttgaagtcttgcataaaggttgcactagattttgtttctccggaaaatgtccgagagtgcatcaggttaacagaaggtttccgtctgctgccgaagtggcataaggtgaatgaagataaactcgaggttaagaagatagctcttcatgcattcaatcaagctattaaagatatcactgatgaatcatctaatagcaatgaaagaatgaagccaaatggttacacttggagcagggctcacaaaatattgatgtgctggtagctcgagacccagctttcttgtacaaagtggt

SEQ ID NO: 519 - DNA, 1031 bp, Zea mays
gcagtcgctgtcgttaccatggatctttccggcacgcagggcgagctgccgatggcaacaatgcacgccggcgggtcgccgtacctggggctgcaccacgggcacccacagcagcacaaccatggcgcgaacggccggcacatgtcgccgccggatgtggtggcggaggaggccaagaaccggcagctggcggtggtgcccgtgggcacaggaggcggaggcggggcaggggtgaggtaccgcgagtgcctgaagaaccacgcggctgccatcggcgggagcgcgacggacgggtgcggcgagttcatgcccgcgggcgaggaggggtcgctggacgcgctccggtgctcggcgtgcgggtgccaccgcaacttccaccgcaaggagccgccgggcggcgacgggcggcagctgtacgggcaccaccaccaccacccgctgagcccgctggccgcggtgcacccccaccatcaccgggggctgctggtggcggcgcttcccccggcgccgacgcgcatggtgatgccgctgagcgccgccatgcaccatcaccagcagccgccgcagcagcaccacagctcggcgtcagcggactccgacgacgcacacgtgccaggggtgcgcgggggggaggtgcagcagcagcagcaggcaccggcacggaagcggttccggaccaagttcaccgcggagcagaaggcccggatgctggggttcgcggaggacgccgggtggcggctgcagaagctggacgaggcggcggtgcagcgcttctgccaggaggtcggcgtgaagcggcgcgtgctcaaggtgtggatgcacaacaacaagcacaccctggcgcggcgcggccacgccgggctccccggcgacccggagctgctggggccgcacgacggccagctcggcatgccgctcccggagccggcggcggagcccgcagttgctgctgcggctgcggctggacttggagtgaccgaccaagccatgtctttcgggactggacgacattagaacccagcggtactcgc

SEQ ID NO: 520 - DNA, 1069 bp, Zea mays
acaagtttgtacaaaaaagcaggctcctgcaggaccatggcgctggaagccgtggtgttcccgaaggagcacctagcgggcactgccaaggcgcgctcggcgtcgtcactggcctgcggcttccgcaccgaggaggtcgaggacaacggcggtgtggttctgcaaggagaggccggcgcggccaccacgtgggagtactgggacgcggcgctctgcccgtgctccactgcacctgctggtgccgtggaggagtgctgggacgtgcggcaccggctctccgcgtccccaccgccgccggcgccctccgccgccgtcgcagcgccatcgtccgggcacggcaaggcagctgccgcggcgcggcggagacggcggcaacgcccgaaggcggtgaagaacacggaggaggtggagagccagcggcgcaaccacattgccgtggagcgcaaccggcggcggcagatgaacgagtacctctccgtgctccgctccgccttgccgccctcctacccgcagcggggtgaccaggcgtcgatcgtggccggtgccatcaacttcgtcaaggagctggagcacctgctgcagtcgctggaggcgcagaagcggcggcgccaggggtgcaccgagccaccggcgccggcgccgttcgccggcttgttcacgttccctcagtactccaccgccgcgacgggtgtcgtcgctggctctggtgacggtgctggctgcggcgcagcgggggcgcggcgtggcgtggccgacatcgaggtggccgtggcggagagccacgcgagcgtgaaggtggtcacgccgcggcggcccaggcagctgctgaggatggtggtggcgctgcagtgcctcggcctcaccgtgctccacctcaacgtgaccaccaccgccgaccagctggtcttgtactctctcagcctcaagatggaggacgagtgccggctgtcgtcggtcgacgacatcgccgccgcggtgaacgacatactcgccaagatctccgacgagcgcgccagccgtcacctagtagccgcgtagctcgagacccagctttcttgtacaaagtggt

SEQ ID NO: 521 - DNA, 544 bp, Glycine max
acaagtttgtacaaaaaagcaggctcctgcaggaccatgaacaacaacatgttaggaatgaagagacggagagatgataatgaagggtccttggatttggcaaaatgtcttatgctgttttcttgtccaatagaaagcaacaagacacaacagaaaagttttggttctgtggaatttgagtgcaagacgtgcaaccgcaagttctcttcttttcaagcactgggagggcacagggcaagccacaagaggcagaagctggagggggaagaactgaaagaacaggccaaaagtcttagcttgtggaacaaacccaaaatgcacgagtgctccatttgtggccttgaattctctctgggccaggctctgggtggccacatgagaaaacacagagcttccctcaacgaagggtttcctattattccttctatcgaccaagttattgcgaaaatcccggttttgaaaaggtcgaatagcaccagggttatgtgcttggacttggagttacacctgtagctcgagacccagctttcttgtacaaagtggt

SEQ ID NO: 522 - DNA, 931 bp, Zea mays
acaagtttgtacaaaaaagcaggctcctgcaggaccatggcgcagctgccgcccaagatccccaccgtggcgccggcgtggccggagttcgggggcgggcaccagcagcagcgcagcccctccgtgggcacgttcctcgccgccgcgcccatgcagccgtcgtgggtggacgagttcctcgacttctccgccgccaagcgcggcgcgcaccgccgctccgtcagcgactccgtggccttcctcgagcccgagcccggccccggcgacggcaatgccggggcgcatgacttcgaccgcctcgacgacgatcagctcctgtccatgttctccgacgacctccaaccgccgccgccgcagccgcagacgcaggccgcgcccgcgccggtggcgagctcgtcgtcgccgtccgaccacaacagcatcaacgacgagaagacggataggggcgacgccgaggaggcacagagcaagtgccacggcgccgccgcggccaccgcggtggatcctaagcgcgtcaagaggatcctggcgaaccggcagtccgcgcagcggtcgcgcgtgcgcaagctgcagtacatctcggagctggagcgcagcgtcacgtcgctccagacggaggtgtcggcgctgtccccgcgcgtggcgttcctcgaccaccagcgctcgctgctgacgctggggaacagccacctgaggcagcggatcgcggcgctcgcgcaggacaagatcttcaaagatgctcatcaggaggcactgaggaaggagatcgagaggctgaggcaaatctaccagcagcagagcctgaagagcggcagggagcccgacgcggccccgtcggtccgcgacgacaaggacatgatcggcagcgaggggaccgccgcgcccggcccgccctcgtagctcgagacccagctttcttgtacaaagtggt

SEQ ID NO: 523 - DNA, 709 bp, Glycine max
ggtaccggcgcgccaccatggaagctgtgtgtggaagtggaagcagtgtttgggtcacatcctcccttacacgctcacccaagatcacactccctctattccgcgccagttaccagcacctaacagcatttccttcacaatcccttcttttctcctatcacccttctcgctatgctaatgctagaaccctccgcgccagaacctcctccaaacccattttccttccccacttaattgcttctctggaacaagttgaccagacttacattatggtgaagcccgacggcgtccaacgtggcctcgtgggagaaattatttctaggtttgagaagaaggggtttaagttaactggcttgaagctcttccagtgctcaaaggaattggccgaggagcattacaaggacctaaaacaaaagtcatttttccctaagctgattgactatattacttcaggtcctgttgtgtgtatggcttgggagggtgttggagtagtggcatcggcacgcaagcttataggggctacagatcctcttcaagctgaaccaggcacaataagaggagaccttgctgttcaaacaggaaggaatgttgttcatggcagtgacagccctgagaatggcaagcgtgaaatagctctatggttcaaggaaggcgaagtatgcgattggaccccagtccaatcaccatggctgagagaataggcgatcgc

SEQ ID NO: 524 - DNA, 513 bp, Glycine max
gtaccggcgcgccaccatgtccgatgctccggcgagtccatgcggcggcggcggcggaggcagccacgagagcggcgagcacagtccccgctccaatttccgcgagcaggaccgcttcctccccatcgccaacatcagccgcatcatgaagaaagcgcttcctcccaacgggaaaatcgccaaggacgccaaggaaaccgtgcaggaatgcgtctccgagttcatcagcttcgtcaccagcgaagcgagcgataagtgtcagagagagaagaggaagaccatcaacggcgacgatttgctttgggctatgaccactttaggtttcgaggagtatattgatccgctcaaggtttacctcgccgcttacagagagattgagggtgattcaaagggttcggccaagggtggagatgcatctgctaagagagatgtttatcagagtcctaatggccaggttgctcatcaaggttctttctcacaaggtgttaattatacgaattcttaggcgatcgc

SEQ ID NO: 525 - DNA, 1103 bp, Zea mays
gcagtcgctgtcgttaccatggtgtccgccgtgctccggaccatcctcgtgacgggcggcgccgggtacatcggcagccacacggtgctgcagctgctgcagcagggcttccgcgtcgtcgtcgtcgacaacctcgacaacgcctccgaggccgccctcgcccgcgtcgccgagctcgccgggcacgacggcgccaacctcgtcttccacaaggttgaccttcgcgacaggcacgcgttggtggacatcttctcgtcgcacaggttcgaggctgtcattcactttgctgggctcaaggctgttggggagagcgtgcacaagcccctactttactacgacaacaacctggtcggcaccatcaccctcctggaggtgatggctgcgaacggctgcaagaagctggtgttctcgtcatctgcaactgtctatgggtggcccaaggaagtaccctgcaccgaagaattcccgctctgcgccaccaatccctatgggcggacaaagcttgtgattgaagacatctgccgcgacgtccaccgctccgaccccgactggaagatcatactgctcaggtacttcaaccccgttggcgctcatccaagcgggtacatcggcgaagacccctgcggtgtcccgaacaacctgatgccctacgtgcagcaagtcgctgttgggaggttacctcacctcacggtctacgggacggactacagcaccaaggatgggactggggtgcgtgattacatccacgttgtcgacctggctgacggccacatagcagccctgaggaagctctacgaagactccgacaaaataggctgtgaagtgtacaacttggggactggaaaggggacgtcggtgttggaaatggtggctgcattcgagaaggcttctgggaagaaaatccctctggtgttcgctgggcgaagacccggagacgcagagatcgtctacgccgcaactgccaaggcagagaaggagctcaaatggaaggccaagtacgggatcgaggagatgtgcagagatctgtggaactgggcgagcaagaacccgtacgggtacgctgggtcacgcgacaacagcaaatagaacccagcggtactcgc

SEQ ID NO: 526 - DNA, 1100 bp, Oryza sativa
gcagtcgctgtcgttaccatggtttcggccttgttgcggacgatcctggtgacgggcggcgccggctacatcggcagccacaccgtcctccagcttctccaactcggcttccgcgttgtcgtcctcgacaacctcgacaacgcctccgagctcgccatcctccgcgtcagggaactcgccggacacaacgccaacaacctcgacttccgcaaggttgacctccgcgacaagcaagcgttggaccaaatcttctcctctcaaaggtttgaggctgtcatccattttgccgggctgaaagctgttggcgagagcgtgcagaagcccctgctttactacgacaacaacctcatcggcaccatcactctcctgcaggtcatggccgcacatggctgcaccaagctggtgttctcatcatccgcaactgtctacgggtggcccaaggaggtgccctgcactgaagaatccccactttgtgcaatgaacccctacggcagaacaaagctggtaatcgaagacatgtgccgggatctgcatgcctcagacccaaactggaagatcatactgctccgatacttcaaccctgttggagctcacccaagcgggtacattggtgaggacccctgcggcatcccaaacaacctcatgcccttcgtccagcaggtcgctgttggcaggaggccggcccttaccgtctatggaaccgactacaacaccaaggatggaactggggttcgtgactatatccatgttgttgatctagcggatggtcatatcgccgcgttaaggaagctctatgaagattctgatagaataggatgtgaggtgtacaatctgggcactggaaaggggacatctgtgctggaaatggttgcagcattcgagaaagcttctggaaagaaaatcccgcttgtatttgctggacgaaggcctggagatgccgagatcgtttacgctcaaactgccaaagctgagaaggaactgaaatggaaggcaaaatacggggtagaggagatgtgcagggacctgtggaattgggcgagcaagaacccctacgggtatggatcgccggacagtagcaactagaacccagcggtactcgc

SEQ ID NO: 527 - DNA, 1073 bp, Glycine max
gcagtcgctgtcgttaccatgggagttccagagaaagaccctctttcccaattgagtttgcctcctggttttcggttttaccccaccgacgaggagctcctcgttcagtatctatgccgcaaggtcgctggccaccatttctctcttccaatcattgctgaaattgatttgtacaagttcgacccatgggttcttccaagtaaggcgattttcggtgagaaagagtggtactttttcagccctagagacaggaaataccctaacgggtcccgacccaacagagtagccgggtcgggttattggaaagccaccggaaccgacaagatcatcaccaccgaaggtagaaaagttggcataaaaaaagccctcgttttctacattggcaaagcccccaaaggcaccaaaaccaattggatcatgcacgagtatcgcctcctcgactcttcccgaaaaaacaccggcaccaagcttgatgactgggttctgtgtcgtatctacaagaagaactcgagtgcacagaaggcggtgcaaaacggcgtcgttccgagcaacgagcacactcaatacagcaacggttcctcttcctcttcttcgtcacaactcgacgacgttctggaatcgctgccagcgattgatgaacggtgtttcccgatgccacgtgtcaacacgctgcagcaacagcagcacgaggagaaggtcaatgttcagaacttgggtgaaggggggttactggattggaccaacccttcggttctgaattcggtcgttgatttcgtatcggggaataataatcataatcaattggtgcaggaccagacgcaaggcatggtgaactacaacgcgtgcaatgacctctatgtccctacgttatgccatgtgggcacgtcagttccgcaaaagatggaggaagaggtgcaaagcggcgtgagaaaccaacgggtccagaacaattcctggtttcttcagaatgatttcacacaggggtttcagaattcggttgacacgtctgggtttaagtacccggttcaaccggtggggttcgggttcaggaattagaacccagcggtactcgc

SEQ ID NO: 528 - DNA, 467 bp, Oryza sativa
gcagtcgctgtcgttaccatgccggttccccttgctccatacccaaccccgcctgtgccatttacacctcccaatggggctcaaagccagctcgtgtgctctgggtgccgtaatctgctcatgtatccagccggagcaacgtcggtttgctgcgcagtttgcagtaccgtgactgctgtgcctgctcctggaaccgagatggcgcagttagtttgcggaggatgccacactctcctgatgtatatacgcggtgcgacgagtgtgcaatgttcttgctgtcacactgtcaacctggctatggaagcaaatcaagttgcgcatgtaaactgcgggaactgccgtatgctgctcatgtaccagtatggcgcaaggtctgtcaaatgcgcagtctgcaattttgtgacatcagttggggcctcacctggtacagaccagaagcctagcagctagaacccagcggtactcgc

SEQ ID NO: 529 - DNA, 524 bp, Triticum aestivum
gcagtcgctgtcgttaccatgtctgccgcggagggagccgtcgtcttcagcgaggagaaggaggcgctggtgctcaagtcatgggccatcatgaagaaggattccgccaacctcgggctccgcttcttcctcaagatctttgagatcgcgccgtccgcgaggcagatgttcccgttcctgcgcgactccgacgtgccgctggaaaccaaccccaagctcaagacccacgccgtgtccgtcttcgtcatgacgtgtgaggcggcagcccagctgcggaaagccgggaagatcaccgtgagggagaccaccctgaagaggctgggcgggacgcacttgaaatacggcgtggcagatggccactttgaggtgacgcggttcgctctgctcgagacgatcaaggaggcgcttccggcggacatgtgggggcccgagatgaggaacgcgtggggcgaagcctacgaccaactggtcgcggccatcaaacaagagatgaagccctccgagtagaacccagcggtactcgc

SEQ ID NO: 530 - DNA, 518 bp, Arabidopsis thaliana
gcagtcgctgtcgttaccatggagagtgaaggaaagattgtgttcacagaagagcaagaggctcttgtagtgaagtcttggagtgtcatgaagaaaaactcagctgaattaggtctcaaactcttcatcaagatctttgagattgcaccaacaacgaagaagatgttctctttcttgagagactcaccaattcctgctgagcaaaatccaaagctcaagcctcacgcaatgtctgtttttgtcatgtgttgtgaatcagcagtacaactgaggaaaacagggaaagttacggtgagggagactactttgaagagacttggagccagccattctaaatacggtgtcgttgacgaacactttgaggtggccaagtatgcattgttggagacgataaaggaggcagtgccggagatgtggtcaccggagatgaaggtggcttggggtcaggcttatgatcaccttgttgctgccattaaagctgaaatgaatctttccaactagaacccagcggtactcgc

SEQ ID NO: 531 - DNA, 1154 bp, Zea mays
gcagtcgctgtcgttaccatggtgaaggtcatccaggggcgcccggccgagatggggttccggatgccggcggagtgggagccgcacgagcagtgctggatgggatggcctgagcgtccagataactggagggagaatgctggtccagctcaagaggtatttgctagaactgcaattgccatttcaaagtttgaacccgtcacgttatgtgcaagtgccaagcagtaccccaaagtccacgagctgatggaacatcaaaccaacatcagggtcgttgagatgagcatgaacgattcctggttccgcgacatgggccccacttttgtcacctgtaaaggggattcaggaattgcagaacaaacaatagcgggaattgattggcaattcaatgcctggggaggaatctatgacgactggagtcttgacagcgatgttgccaagaaaatagtcgagatcgagaggatccctaggtttccccaaaaaattatccttgagggtggaagcattcatgtagatggagaaggtacatgcattacaacggaagaatgcttgctgaatcctaataggaaccccaacatgaccaaactagagatagagaatgagctgaaggattttcttggagtctcgaaggtcatctggatacctcgtggactttatggcgacgaggatacaaacggccacgttgacaacatgtgctgcttcatcaaacccggtgtgatcctgctgtcgtggaccgacgacgagaaggattatcagtacgaacggtcggtcgaggcgctgtctgttctctcccagtccgtcgacgcgaaagggcggcagctccaagtggtgaagatccacgtccccgggcctctgtacatgacagaggaagaggcacagggcgttgtttcatcgggacattctgtgccggggccagcgggcacgagattggccgcctcgtacgtcaacttctacatcgccaatggtgggatcatagcgccttccttcggcgacaggtgggacgaggaggcgtatgcggttctccagaaggcattccccgatcacgaggtggtgatggtcgaaggcggacgggagatcgcgctgggaggtgggaacattcactgcatcacgcagcagcagcccgtgcgcccgtcctagaacccagcggtactcgc

SEQ ID NO: 532 - DNA, 2279 bp, Glycine max
gcagtcgctgtcgttaccatgagtgttgatggcgacagcaaagagctgaaagaactgaatcagcgcttacgagatgggaagaagattgctggtggggagcatggtttatgcgaggaagtgaaatgtaatggaattgctgaagaagttaaggttgaacagggggggactgtggagtcctcctctgtccagcagcatataccacagcctcaaggggcaataatttgttgggagaggtttttgcatattagatcccttaaggtcttgcttgtggagattgatgactctacccgtcatgttgtcactgcactgcttcgcaattgtagttatgaagttattgaagcagcaaacggattgcaagcttggaagatattggaggatttaaccaatcatattgatcttgttttaactgaggtggcaatgcctggcttatcaggcattggacttctatacaagattatgggccacaaaacccgcaaaaatattccagtagttatgatgtcatctcatgattctatgggtttagtctttaagtgtttgtcaaagggtgctgttgactttctagttaaacccatacggaagaatgagcttaaaaacctgtggcagcatgtttggagaagatgtcacagttctagtgggagtggcagtgaaagtggcacacaaacccagaagtctataaaatcaaagagtcttgagaagtctgataataattctggaagcaatgacgaagatgataatgaaagtataggcctgaataatgtggatggaagtgacaatggtagtggcactcagagctcatggaccaaacgtgctgtagaagttgatagtcataaaccagtttcccagtgggatcaaatagctgagtgccctgacagtacctgtgctcaagttgttcactccaatgctgaaatgggtgggaacaaggtggttcctctagctgcaaaggattgtgcagaacagaatgaacaacttgtcaaaactgcaggttctcaacatagcaatgcacctgatgtcggcccctctaaattcagtgagcaaattaatagaggacaactggaccttaattgtgaaaatcaatctagcaagctaaggtgcaaaggtttatcactgtctgatgccattactagtacttgtgattctcagatgcatagtggagaatttgaagccctaaataaaaaacccaagtcctcagatattgaaaataaaggtactaataatgatgaagaattgccatctcttgagctcagtttaaagaggcttagaggagttgaagatgctgatattacaattcaggatgaccggaatgttttaagacgttctgatcagtctgctttctcaaggtacaatgcagcctctaacactaagaaatctcccactggatgtgttggaagcaattctccttataataatagcttagaagttacaaagaaagattcatctcgtgatattcaatctcattcttgcggcaatcctcctaaccaaaactcaaatggtgctagcaataacattgatatgggttccactactaataatgcttatgctaaatctgcagttatgagtgagccagcaggggcatcaacaacaaaatgtttgtaccaaacatctgctttccagcctgtaaaaaacagccttgtttgtacctctcaacaagttgtcttaaataatactgaagatatgtcggcaacaattctggcaccacctaaactagacaggcataaagattctgcagctctggacttccatctccattgtgaaaaccataactgtattgctgacaacatgaagcatcagctgccacctgatcatgatgctgaatctataaagaaaatggctactgctgctccacattgtggatcatcaaacgtggaagaagtgctagttgaaggtaatgttggaaaccacagtatcaatagaagtgtttcaggcagcaacaatggaagcaatggacaaaatgggagcagcacagcagttaatgctggagggacaaacacggaaagcaacaatggactcactgggaatagtggcagtggtgatgctagtggaagtggaagtgccaacagagtagatcaaaacaagacttctcaaagggaagtggccttaactaaatttcgccaaaagagaaaagagagaagggagaggtgctttcataaaaaggttcgatatcagagcagaaagagattagctgaacaacgacctcgatttcgtggacaatttgtgcgacagacctctaacgaaaatgcaagtgaggcaacaacagatagctagaacccagcggtactcgc

SEQ ID NO: 533 - DNA, 1423 bp, Zea mays
gcagtcgctgtgcgataccatgcagagcctcctcctgcccaccgctgccgtggccccggtggcggctccgtgcggaaggcggaatctcccgggacgcctctccgtccgcgcctccgcgacggcggtagcggcaccgcggcgggagacggatcccaagaagcgggtggtgatcacggggatggggctggtctccgttttcgggaacgatgtagacgcttactacgaccgcctgctagtcggggagagcggcatcgggctcatcgaccgcttcgacgcttctaagttccccacccgctttgccggtcagatccggggcttctcctccgagggatacatcgacggaaagaacgaccgccgccttgatgattgcctccgatactgcatcgtcagtggcaagaaggctctcgaggcctccgggatcgcccacggctccaagcccatggaaaagattgacaagacccgggccggtgtgcttgtgggcactggtatgggtggcctcacggtgttttctgatggtgtccagaatctcattgagaagggatacagaaagataactcctttcttcatcccatatgctatcacaaacatgggttctgccctgcttggaatggacattggttttatgggtccaaactactccatctcaactgcctgtgctacctcgaactactgtttctatgctgcagcaaaccatatccgtagaggcgaagctgatataatgatagctggtggcactgaagctgcaattattccaattggtgttggtggctttgttgcatgtagagcactgtcacagaggaatgatgaccctaaaacagcatccaggccttgggacaaggatcgtgatggttttgtcatgggtgaaggagctggagtcctggtcatggagagcctagagcatgcaatgaaacgtgatgcaccaataattgcggagtatttaggaggtgctgtgaactgtgatgcttaccatatgactgatccgagatctgatggtcttggtgtttcatcttgcatcaagcaaagtcttaaagatgctggtgtggcacctgaggaggtcaactatattaatgctcatgcaacatcaacccttgctggtgatctggcagaggtgaatgccatcaagcaagtcttcaaggacccatctgggatcaaaataaatgcaaccaagtccatgataggacattgccttggcgcagcaggcggtttggaagccattgctactattaaagcgataactactggatgggtgcatccaagcataaaccaatttaacccagaggaagcagttgaatttgacactgtacctaatgtaaaaaagcagcatgaagtgaatgttggtatctcaaattcctttggatttggaggtcacaattctgtcgtagtatttgcaccatttaagccatagatcgccagcggtactcgc

SEQ ID NO: 534 - DNA, 1118 bp, Zea mays
gcagtcgctgtcgttaccatggaattcaagaactgcgggtcgtcgtcgcagccccggccggcggtggtagtgggcgaggaggcggcgttggcgagacagggatcagtctactcgttgacgttcgacgaattccagagcgcgctcggcggggccgccaccggcggtggcggtggcggcagcatccccaaggatttcggttccatgaacatggacgaactgctccggagcatctggaccgcggaggagacccaggccatggcctccgcttctggcgctggagcgggtgcggggatgccgccaacgtcgctgcagcggcaagggtcgtcgctcacactgccccgcacgctcagcaccaagacggtcgacgaggtgtggcgcaatctcgtgcgcgacgagccgctgcagggggcggacggcggcgggcaccagcagcaccaccgccagtcgacgctcggggagatgactctggaggagttcttggtcagagctggcgtggtcagggagaaccccgctccggctcctccagcaccaccacccatgatcccgccgcggccggtacctgtcgcccctaaaagctccgcctttttcgggaatttaccgggtgccgacgccgacaccgccgcagctgcggcagcgctggggtttgcaccggtcggcatgggggatctggcccaaataccgcccagggcagcgggcatgggaggcggcgccatggctgtgcaagcagcggtgaaccagcttgattctggcgggaaggggtacagcgacctgtcgtcgccgacggagccgctcccgttttcgtttgaggggatgattcgagggaggaggcatgggggcggagtagagaaagtggtggagaggcggcagaggaggatgatcaagaacagggagtccgccgccaggtcccgagcgcgcaaacaggcttatactatggagttagaagctgaagttcagaaactcaaggagcagaatcaggaactggagaggaaacaggcagagattatggaaatgcagaagaacgagctaccagaaatgttgaaggatccattcggacggaagaagcgtctgtgcttgcgaagaacattgactgggccttggtagaacccagcggtactcgc

SEQ ID NO: 535 - DNA, 1271 bp, Zea mays
gcagtcgctgtcgttaccatgttcgtgatcgaggacaagggcggcgccatcgcgctgatgctggcgtcgctcctgttcctgggcacctggccggccgtgctcaccctgctggagcgccggggccggctgccgcagcacacgtacctggactactccatcaccaacctcctcgcggccgtgctcatcgcgctcaccttcggccagctcggggacagcaggcgcggcatgcccaacttcttcacgcagctcggccaggacaactggccctccgtgctgttcgccatggcgggaggcgtcgtgctcagcgtcggcaacctctccacccagtacgcttgggcctatgtgggcctctccgtcactgaggtcatcagctccagcatggtggtggtcataggcaccacgctgaactacttcctggacaaccgcatcaacagggcagagattctgttccctggtgtggcgtgcttcctcgtagccgtcatccttggctccgctgtccattcctccaatgcagctgacaatgagcagaaactcggtgcctccacgaatgcctacaaactcgggacaagtgggactgtggaaccaagcaaacaagccgtagacagagatgctcccaaagacttggaggagagtggagcctctggaatccggcaacctgacaaagctgaggcaggcactgcagagtacctcattgagcttgaagaacggcgatcaatcaaggtattcggttcaaacaccttcatcggtctggggatcgtcttcttcgcgggcgtgtgcttctcgctcttctccccggcgttcaacctggccaccaacgaccagtggcacacgctcagggacggcgtgccgcacctggtggtgtacaccgccttcttctacttctccatctcctgcttcgtcgtcggcgtcggcctcaacgtcctgttcctgtaccgccccatggccggcgtgccccgctcctccttcggggcctacctcagggactgggacggccgccagtgggcgctcctcgccggcctgctctgcggcttcggcaacggcttccagttcatgggcggccaggccgcagggtacgccgccgctgacgctgtccaggccctgccgctcgtcagcaccttctggggcgtactgctcttcggggagtaccgcaagtcgtcgcggaagacctacgtcctgctcggcttcatgctcttcatgttcgtcgccgctgtcgccgtgctcatggcttcgtcaggtcacaggagcacagagtagaacccagcggtactcgc

SEQ ID NO: 536 - DNA, 929 bp, Zea mays
gcagtcgctgtcgttaccatggccttcacttcgtcactggcgccgttcttcccaccttctggaaccttccgagcccatcccgctaggaggctgcgggccgatgcacccgggagattcgtggcgtcctgcttgccccctcccgacgtcgtggtgacgcgcgagcagggaaagaacgccaggctcatctccgcgctggaaaagcataatgtacaccctctggaacttcctcttattaagcatgttgaaggccctgatacagataggctttcagatgtcctacgtaatgacaagttcgactggattattgtaacctctcctgaggcagctgcaatgttccttcagggatggaagactgctggaagtcctaaggtgcgagtagctgttgttggagaaggaactgcaagggtttttcatgaagtatcagaatctgatgatcaatctctagagcttgcattttcaccttccaaagctttgggtaaagtcttggcttcagagcttccaagaagcaacgagaactcatgtaaagtattgtaccctgcatctgcaaaggctggccatgaaattgaggatgtgctatcagaacgaggatttgacgtgacccgactgaatacatatacaactgttcctgtagaagatgtcgacccactgacattaaaccttgctatatcagctccagttgttgcggtagcttctccttctgcactgagggcatggctaaatcttatctcaaaatctgataactggaacaactccgtcgcctgcatcggtgagaccactgcgtctgcagcgaagaaactgggcctgaagagcatatattacccaacgacccctggacttgaggggtgggtcgagagcattctcgaggcgctcagagtccacaggacagcatcaaaagaggccccaaaacgttagaacccagcggtactcgc

SEQ ID NO: 537 - DNA, 647 bp, Zea mays
gcagtcgctgtcgttaccatggtaatggcgatgccgatgatggtgtaccttcacccgcacgtcgtggcagacagcaggatctactggcagccggtaaagctgcccgtcggcaacggcaaggtcaacaacatgctcgtgttcgacacaatgaccgagtccttccagcaactgctgtcgcccgtggagggcccctttcttgaactgtttcagatgaacagcggcgcccttggattgtaccactgccgcagcggcaaggttgatctttgggtgttacaggatcacgggagctggtcctggtcgatgaaccaccggatcaaattggacgtgatgtttttctccctgctgccggtgctggacccggaaggagatgtgctagtgctttctaaaagaggggaaacaggcatcctgtggcaacatctgcatcacatttctggtgtcaatggcagtttgctggccctgtatcaatggagcgcttatctgaagcttagcaggcataggctcaaagaaagtctagtccaccatgacttcttctcgatggaaggtaatgagggtggtgtggatgaaaaaccattgttcgatggcttgtcaactgtggcattgcttcgtgatgataattctgagccacattagaacccagcggtactcgc

SEQ ID NO: 538 - DNA, 362 bp, Zea mays
gcagtcgctgtcgttaccatgcttcctatctaccgtgaactcatcgccgcgggcataaggatatgggttttcagtggcgacgctgattccgttgtcccgctcaccgcgacaaggtactccattgacgccctctttctaccgactatcacgaactggtatccttggtacgacgacgaagaggtcggtgggtggtgccaggtgtacgaggggctgacactggtgacggtccgaggcgcagggcacgaggttcccctgcaccggccgcggcagggcctgaagctgttcgagcacttcctgcggggtgagcccatgcccaggcctgtagatagcgtccagtcgttttagaacccagcggtactcgc

SEQ ID NO: 539 - DNA, 959 bp, Zea mays
gcagtcgctgtcgttaccatggggggccagatcgaggtcgtcaagtgctccctcctcggctccgtcctctccaacctgctgctcgtgctcggcacgtccctcttctgcggcggcgtcgtcaacctcggctccgaccagccgtacgacaggacgcaagcggacgtcagcacgggcctcctcatcctcggcgtgctgtgccagtcgctgccgctcttgctgcgctacgcggtgggcgccggcgagcactccgtcgccgcgcccaccacggtgctcgacctctcccgcgcctgcagcgtcgtcatgctgctcgcctacgtcgcctacctcttcttccagctcaagacgcacgcgcagctgttcgagccgcaggaggtggacgacggctgcgaggcggaagaggacgagcaggccgtcatcggcttcgccagcggcctcttctggctcgccttcaacaccgtgctcatcgccatcctgtccgagtacgtggtcggcacgatcgagcctacctccaaatcctggggtttgtccgtcagcttcatcagcatcatacttctacccatcgtggggaacgccgcggagcacgccggagcaatcatttttgctctcaagaacaagctggacattaccctcggagtagcgttggggtcggcgacccagatctccatgtttgtggtgccgctgagtgtcattgtagcttggatcgcgggtattcaaatggatcttgacttcaagctcatagagaccggctctctcttcgtctcagtaatagtgacagcattcaccctccaggatggttcgtcacactacctcaaggggatccttctgctgctgtgctacattgtgatcggtgcatgcttctttgttacgaggcaacctgcaagtaacaacaatggcgctgggctgtcgctgccaactggtactttgagtgcacaagctgcatagaacccagcggtactcgc

SEQ ID NO: 540 - DNA, 731 bp, Zea mays
gcagtcgctgtcgttaccatggcgggcgccgaggtgggagaagacaagtaccgctccttcatccacggcgagggcgagagggacaccgtgtggaggtacggcgccccgcccaactacgacgtggtcaacaagctcttcgaggaagagaggactcaggtgtggcccgagggctcgctggaggagaaggtgcagcggctgctcaagagctgggagatggagctggtgcacaaggcgcggcccgaggaccagaagaccgtcaactcggagaaatactctgccagcaccaacgggatgagcgctctgacccgggccgaggtgatggccatcggcggctacaacaacttcctgcgcaccaagctgcccccggagcaccgcatctacgacccggacagcgagaccgtggagtccgccatggccaccttcaccacggccttcccgcggggcttcgccatcgaggtgctcgacgtctacagcggcccgcccaggatcgccttcaagttccgccactggggctacatggaggggcccttcaagggccacccgccgcacggccagcgggtcgagctcttcggcgtctgcatcttccatgttgacgaagacatgaaggtggacaagtcagagtacttctacgagcgcggcaacttcctcgccggcttcttgagtgcccctgcccctgatggctcaggcggttgccccgtgatgcgcgggaactagaacccagcggtactcgc

SEQ ID NO: 541 - DNA, 1145 bp, Zea mays
gcagtcgctgtcgttaccatggtaatgggggccgcgtccgtcggcacgctgctcgtcgcgctcgccgtcctcgctccggcggtgatggcgcagagctgcgacgacgagctgccggctcagctcgccggcaacttctcggggctcgcctgcgcccccgtctggaacaacttcgtgctccggtacgcgcaggacaaggacaacgtgctgcgggtggtgctgtcgaccatgtacagcacggggtgggtggggatggggttctccaagaacggcctcatggtggactccagcgccatggtggggtggatcggcaagacggggctcccgcacatcaagccgttctcgctggggggcaagaccccctcccaggtggtcgcggaccagggcttcctcgtctccagcgacaaccacaagcccaccgtgctcgtgcagcaggccaagatctacctcgccttccagctcagcttcaccgagccgctcaggcgccagaacgtgctcctcgccgtcggctccgccatccccgtcaacgaccgcctcgccgagcaccaggataagacctccatcgtattcgatttcaccacaggcagctcatcaggctcgtcatccttcccggaaggtctgaaaaggacccatggggcgctcaacctgttcgcctggggcgtgctactgcccatcggcgccatcgtcgcaaggtactgcaggagatgggaccctctgtggttctacctccacgccggcatccagttcgtggggttcatcctgggcctagccggcgtcgtggctggagtatccttgtacagcaagatccaggccgacgtccccgcgcacaggggccttggcatattcgtgctcgtgcttgccattttgcagatcctggcgattttcctgaggcccaacaaggactccaagtaccgcaagttctggaactggtaccaccactgggtcggcaggctcgccctcttctttgcagccatcaacattgtgctcgggatcaaggtcggcggagcaggcaactcttggaagatcggctacggtttcaacctggccgtccttctgatcaccatcgtcaccctggaagtcctgctctggacgaggtggaaaaacagcaccggttccacgggggcatattagaacccagcggtactcgc

SEQ ID NO: 542 - DNA, 974 bp, Zea mays
gcagtcgctgtcgttaccatggagaagagccgggtgctggtggtgggcggcaccgggtacatcgggcggcggctcgtgcgggcgagcctggcgcaagggcacccgacgctggtcctgctgcggccggagatcggcctggacatcgacaagcttcagatgttgctctccttcaaggcccagggcgcgcggctggtggaggcgtcgctggaggaccacgcgggtctcgtcgccgccgtggcgcaggccgacgtggtggtctcagccatgtccggggcgcacatccgcagccacaatctctccctgcagcataagctcgtcgaggctatcaaggaggctgggaacatcaagcgttttataccatcggaattcggcatggatccatccaagatggggcatgctcttgaaccaggaagggttacatttgatgaaaagatggacctaaggcgtgcaatagaagatgccaacattcctcacacctatgtttctgccaattgctttgctgcttacttctgcccaaacctatgtcagatgcgcacccttttgccgcccaaagagaaagttcatgtatatggagacggcaatgtcaaagctatattctgtgatgaagacgatgttgcaacgtatacaatcaagtctgttgatgatcctcgcgcattgaacaagacactatacataagaccaccagaaaacatcttgactcaaaacgatgttatctcgaagtgggaaaagctttccggaaacgttctggagaaaatccacattcctgcagatgaattcttggcttcaatgaaaggtactgacttggccaatcaagccggagtgggacactattaccacattttctatgaaggctgcttgacaaattttgaaatcggcgacgatggagcagacgctactctgttgtacccagaggttcagtatacccgcatggatgagtacatgaagagatatctgtagaacccagcggtactcgc

SEQ ID NO: 543 - DNA, 266 bp, Zea mays
gcagtcgctgtcgttaccatgagctaccaagcgggctacccaccgccgggccaacaggcctacggcgcgcctccgccggcgtacgtcgcgccaccgccggcgtacccgccaacggcccaggacggcggcgcggcgtactacggccagcagcagacaaccaccaccagcagcagccgcggcggcgacggtttctggaaaggatgctgcgccgccatctgctgctgctgcgtcctcgacatgtgcttctagaacccagcggtactcgc

SEQ ID NO: 544 - DNA, 656 bp, Zea mays
gcagtcgctgtcgttaccatgagccaggctattggttataaaaatgcacatatctttgtgtcactggtgagcatatggaactttcttggtcgtgttggaggtggctacttctctgagatcattgtcagggaacgtacatacccaaggcacatagcattggcagttgctcagatcgtgatggctgctgggcatttcctctttgctatggcttggcctggaactatgtacattgcgagcttgctggttggacttggatatggagctcactgggctattgtgccagctgctgtctccgagctttttggtgtaaaacactttggtgcgatgtacaattttctcatactagcgaaccccgcaggatccctcatcttctcagagctaattgtcagcaacctctatgaacatgaagctgagaaacaagctagccaacaccagatgtcagcattgctgtctccacgattgcttcgtgatactggctttcttgcagatgatgcactcaagtgtgaagggcctgcttgtttctttttcagctctctgattatgtcggtgttctgtgctgttgccgctgggttgagcctcctcgtcgttcaaaggaccagacaagtttatcctcgcctctacagttctgtccgcacttagaacccagcggtactcgc

SEQ ID NO: 545 - DNA, 548 bp, Zea mays
gcagtcgctgtcgttaccatgccttccaggtccatgagccggctgtccgtcgagtccgcctcgggcagcggcggcggcggctgccgggaggccgagccggtgctctgcgcgcctcggccgcgcagggcccagcagcagctggtccacgtccacccccgcggcgccgacctcatcctcggcccgccgcccttccttctcaacgaggtacccaccaccaccgcccttgtgcctggaaccgagaaagcaatcttgtctccaagctctcccccgctcacaacacaaacacgttcttttctcgcagagcagcgaggagggtcggtgcagctgggcggcgttcggcggcgggtcgccgccggcgcgcgcgggcaacccgctggtgcacgaccccagcttcctgctgagccagcgccaccccgcggcggacccgccgctggagctcggcttcttcgaccacctgatccgcaccagcagctacgttcaccggccgacgccgacgacgtcgtataccagcaccagcagcagcggcagtagaacccagcggtactcgc

SEQ ID NO: 546 - DNA, 1382 bp, Zea mays
gcagtcgctgtcgttaccatggtgatgaaagaagcagccgaagagcacgatggccgccgcgacgtgaccgtcacggtggagccggcgctgccggtgcagcaacaccgcctgccgctgtccaacctggacctcctcctgccgccgctcgacgtcagcctcttcttctgctacctccacccggcgcccaccgcgatcgctctcaaggaggcactggccaagacgctggtggcgtactacccgttggccggggaggtggtggccaacggcgatggggagccggagctgctctgcagcggccgcggcgtggacttcacggagacggccgcggccggagtcgagctgcgggaggtccggctgggcgccgtggacgaaggcgttgagaagctggtccctgtcaagaagaccggcgtgacgatggcggtcaagctgagcaagttcacgtgcggcggcgccgtcgtcggctgcaccttcgaccaccgcgtctgcgacgcctactccttcaacatgttcctcgtcgcgtgggccgcagccgcccgtggcagctctgcgccaccaccgccggacccgtgcttccgccgctccctagtcgccccacgcgacacaccacatcggcgcgcgccgtccaccgacgccctcatcaaccgcctcttctctcctcgaagcgccgcgccaccgcctccacccgccgccgcaggctccgtcaaccggatctaccgcatagccgccgaggacatcgccgcgctgaaggcctcggcggggccggggcgcacgaagatggaggcgttcacggcgctcctgtggcagctctgcgcaagggcggcctccccgcgccagagccagtgctgcatgggcgtggtcgtggacgggcgcacccggatgttcccggacggcgccatgaaggcctacttcggaaacgtgctcaccatcccgtacggcgtcatcggctccgaagacctgcgctgcatggccctcgctgacgtggccgacgacgtgcaccggtgggtggcggaggccgccaccggcgaccatttccgcgggctcgtggactgggtggaggcgctgcggcctaagccggccgcggcgagggcgtacctgggagggaccggcggcaacgaggcgatggcgtgcatcgtgtcgtccggtatgagcttcccggtgggcaaggccgacttcgggactggcctccccgcgttcgcgtcgtaccatttcccgtggcccgccggcgccgggtacgtgatgccgatgccgagcgcgcgcgggaacggcgattgggtggtgtacgtgcacgtggcgccggaggtggcgaaggtgatggaggagtccaccgtgttccaagccctggtgaacagctatgcgtttgaatagaacccagcggtactcgc

SEQ ID NO: 547 - DNA, 488 bp, Zea mays
gcagtcgctgtcgttaccatggcggggatgacagtcggcaataagctggcgctggctgcggtgctgctgtgcgcggcggcggccatggccacggcgcagcaggcctccggcgtgcgcgccacctacaacttctacaacccgcagcagaacaactgggacctcaacgccgtgagcgcgtactgcgcgacgtgggacgccagcaagccgctgtcgtggcgcatgaagtacggctggacggccttctgcgggcccgccggccccaccggccaggccgcgtgcgggcagtgtcttctggtgactaacactgcgacgggggcgtccatcacggtgaggatcgtggaccagtgcagcaacggcggcctggacctggactacgacacggcgttcaagcccatcgacaccaacggccagggcttccaggccggccacctcacagtcaactaccagttcgtcaactgcggcgacaactagaacccagcggtactcgc

SEQ ID NO: 548 - DNA, 845 bp, Zea mays
gcagtcgctgtcgttaccatgtacatggaccagaaagaagtggtcgatgccctctcccaccactcgaagatagagccctgcattactgaacttgtttggcgacaacttgagcatcaaaatcctctgtttttcaaggcgtattatatgaggctaatgcttaagactcaaataatggtcttcaacaagcttcttcaggatcagtttgaggttatcaataaagaattttcttcagggatcccttctatgtcgcttcctaatggctctaactccaacctattgaagcaaaattcatgctttttgccagagactgctcctggatctgcaatgccagatggtataatgcacaatggaagttcacgtggtataataaatggcacaccatctggtgatcaattgctcaatgctagtaaagacttgcatggccttcataatggaatagatgcttcgactagtctgcagtcagaccagaacgcagctgctgtgctgtatggtgtagacaatgagacaagtgcaacgataaagaccgagtcttgctattcgagcaatgctgattttgctttctgtgggaatactttcctggaatcgtgccagtcaataggcgatgcatctggtggtggatccttcagtagctcagagctgaacgggcaaccactaaacgattcaattctggatatggaatcatcgtcatttagcttcttgaaccaaatgccccaaagcttcatctttccggacttggcagacgatttcaaccaaagtgcagagataacaccatttctcaccccagaaacaaatttctccgattcgacagggggagaccatacaggttagaacccagcggtactcgc

SEQ ID NO: 549 - DNA, 1511 bp, Zea mays
gcagtcgctgtcgttaccatggaggtggtctcttgcagccactcctgctcggcattacatcaaacaccagcaagcacatggaggcttcggggcagtgctcttggccttggtcttgggcatgccaggccttcccggaccagaagatacacagttgcgtgtgtaggaaccacgagtggagcttcgaatccgggtggttccggcaaggtccatgcagcccagggattccatgtaagcgacgtggatgcagccctgcagggcattccttccatgaaagccggggaggccgagagggtgatgattcaaggccttccggaaggccctgacagctccccgatcagtactgggttctgggagtggaagccgaagctgactgtgtactacgagaggtccggcatgaagaacagcaaggcacctgcggtgctcttcctgccggggttcggagtcgggacgttccatttcgagaagcagctgagggatcttggtcgcgatcatcgggtgtggacgatggattttctcgggcaggggatgtcgctgcctggtgaagatcctgctcctagtagcatagcgagcgaagatgcgttttggggctttggacaagattcgcagccttgggcagaggagctggtgtattctgtggatttatggcaaaaccaagttcagcatttcattgaggaggttatccgtgaaccagtttatattgtggggaactctcttggaggttttgttgctctgtattttgctgcatccagtccacaccttgtaaaaggtgtcacactgcttaatgcaacaccgttttggggattctttcccaaccctgctacatctccccgattgtcaaagattttcccatgggctgggacatttccgcttccatcatttgtgaggaaaattactgaagcagtttggcaaaagataagtgacccaaaaagtattcaggacatactcaaacaagtatacgctgaccattcaacaaatgtggacaaagtattctctcgtattgtggagataacacaacacccagcagctgctgcatcgtttgcctccattatgtttgctccaaggggtcagatatccttccaagaggccatctctaggtgccaagaccaaggcattcctatatctctcatgtatggaagagaagatccttggattagacctatttggggccttaaagttaaacagcaagtgcccgaagcaccttattatgaaattagccccgctggtcattgtcctcatgatgaggtccctgaggttataaactacttgctccgtgggtggctgaagaacctcgagtctgagggctcagtcgacctgccgtttctagaagaacgcagctatgctgagcgtggtgtatccagggagctggagtttgtcagagaaggatcaaggaagtcagttagtgtgcggctctatggtaccaagatttccctatggagccagctaagctcattcttgaacacacgtgtccccaagtcacggatagtcttgagatagaacccagcggtactcgc

SEQ ID NO: 550 - DNA, 638 bp, Zea mays
gcagtcgctgtcgttaccatggaacaagcaaaggagcacacgctaaaaaaaatccagatctccttgctctttcgttcccccctccttcaccaacagcttgagcagctactgacaaatctaccatatgtacacagagacggccagacagagaacgggctacggcggcggcgcaacccaccggagctggccgcgcgcgcaccaaccctaggaggagcgtgcgaggcgcgacgcgatggcggagtggtacatggcgtcgtggaaggactccgtctgcgccatccgcgcccgcagctcccgggccttctcctccgtcatcacccccacgaactgcctccgcggcgcctcatcctgcgccggcgccggggcctccaggtagtcggccttccccgaccaccccagcagcggcgcccaccacttggctccctccgccgaccccgcgacagcgtggaccgccccggtgcccgcggcggcgcggggcccggccgtggacgccgccgggcgggcggggaacgagacgacgcatgctgcggacggtgccatcgccattggattggatctgtttggtcgcgcccctctttgcctgcacttgcagggttgcttttcgattgctttggtggttagaacccagcggtactcgc

SEQ ID NO: 551 - DNA, 1544 bp, Zea mays
gcagtcgctgtcgttaccatgtacaaagaacctaaagatcaagaaaccatcactggtccagtggcttggtcaccacaggctgtgcatgctgatgttgatttagacaatcacaatgaaccaattaatcctcctattgatggtactcaatcaatgtttggcgaagtcccaggaagagaaaagggaaaatcaaaatctgtatcttttgctctatcggatgtttctgggatagctagccctatagataccaattctgagatgggtaacatcggcgattcctgtagtgacaaattgactgatgaaaatttaagtaactcatctcgtcatatcgctgaaaagcattctattaccaaggaccaatattcaaatgagcaggaccatgagcgggagccactagatcatgctgttcaacagcaaccaaaatcggatgttggagaaagagcatcatctatgaaacgacgttgcaggaaaaaggtgcaaaaagttgggacacctaatcacactgttgatgattattttggtgaagactgtgtcgaaccttcattagctgaagaagataacgatactggtgatcattacactactggtaataagcataaggctaggaaaaagtcaaggggtggtgtagaagagtcacagcagcagaaagctcaaaaaaataaaagcaaggtgtcttcacggggccgcaaacggaccttgaaggatgaatcgacagagaagcctgagaagaagctaacccacagaatacgtcagaggataccaaaagaggttaaggctttactggaaacacctcgtgagcagataaaacccatgaagctttgtgcatcacatctcaggttgttacaagaagctagagagcgtgttgatccaaaagggattccatccgggccatcctctaatacaagaaactttcaactagatgatatggatgatttgggctacagagatgaggaagctaggttctttgacaacgatataacagaggagcatgtacaaaatgcaacaaaattgaactaccattcctacatgaacaaaccagcccggggaaaatggtcaaaatcagataccgacttgttttatgagggtcttcgacaatttggtatcgattttgcaatgatacaacaattattccctgataagactcgccatcaggtgcggcagaaatttaaatctgaggagagaaaaaatccattgctagtccatgatgctatagttcatcgctcaggagataatttgtatttcaaaaaggtaattaagcagctcaacattgaagatgttgtgctgccagatattaaaagtacacaaaaacaagatggtgcatcaagtgaaagaggccctggaaatgagaatgtactggatgatttaaacgaggaggaaaatagttcaaattggttgaacgaagagcatgacgtacagatggctgatgtggaagaagagcatggcgaacagatggatgatgtggaagaagagcgtgatcttggaaatgatggtggtgatgatgatcttggggatgtttttgattggtactagaacccagcggtactcgc

SEQ ID NO: 552 - DNA, 569 bp, Zea mays
gcagtcgctgtcgttaccatggactacgtcgtgttccacggcaccgtggacaccgcggccggccgcgcgcgccaggagttctacatccggcgcgccgacggcagccccatccggtccgaggccgagcgcgaggttctcacccaccgcctccaggcagccatcgagcggaggtcgctggagggcgtgaggctggagctgtgcgcgccggaccgggcgggcctgctgtcggaggtgacgcggacgttccgcgagaacgggctgctggtggcgcaggcggaggtgtcgacgaagggcgaccaggcgtgcaacgtgttctacgtgacggacgccgccggcaaggcgccggaccggggcgccatcgacgccgtcagggagagggttggcgcggaccgcctcgtggtgagcgaggagccccgcccgccgcagcagcagctgtacccggacgcctccgggccaggcagcggcggcggcggtggcctcgggctggtatacctcggcaacctcgtgaggaggaacctgtacaacctcggcctcatcaaatcgtgctcgtagaacccagcggtactcgc

SEQ ID NO: 553 - DNA, 581 bp, Zea mays
gcagtcgctgtcgttaccatggggaggggaaagattgagatcaagaggatcgagaacaccaccagccgccaggtgaccttctgcaagcgcaggaatgggctgctgaagaaggcctacgagctctccatcctctgcgacgctgagatcgctttgatcgtcttctctacccgaggccgcctatatgaatattccagtaacagcgtaaggtcgacgatcgagaggtacaagaaagcctctgccagcacttctggaacagctccagtgacagatgtcaactctcttcaatactttcagcaagaagcggcaaaactgcgccagcagatacaaaccttgcagaattcaaacaggcacctgatgggtgaatctactggcaatatgactgcaaaggagctaaagggccttgaaagcaggcttgaaagaggcattgggaggatccggtccaaaaagcatgagctgctgctcgcggagatcgaatatatgcagaagagggaagcagatctgcacaatgaaaacatgttcctgcgggccaaggttgcggaggctgagcgatagaacccagcggtactcgctgaggcgatcgc

SEQ ID NO: 554 - DNA, 254 bp, Zea mays
gcagtcgctgtcgttaccatggggaggggaaagattgagatcaagaggatcgagaacaccaccagccgccaggtgaccttctgcaagcgcaggaatgggctgctgaagaaggcctacgagctctccatcctctgcgacgctgagatcgctttgatcgtcttctctacccgaggccgcctatatgaatattccagtaacagcgtaaggtcgacgatcgagaggtacaagaaagcctagaacccagcggtactcgc

SEQ ID NO: 555 - DNA, 286 bp, Oryza sativa
acaagtttgtacaaaaaagcaggctcctgcaggaccatggggagggggaagatcgagataaagcggatcgagaacacgacgaaccggcaggtgaccttctgcaagcgccgcaatggcctcctgaagaaggcgtacgagctgtccgtcctctgcgacgccgaggttgccctcatcgtcttctccagccgcggccgcctctacgagtacgccaacaacagtgtgaaatccaccgttgagaggtacaagaaggcatagctcgagacccagctttcttgtacaaagtggt

SEQ ID NO: 556 - DNA, 2018 bp, Synechocystis sp. PCC 6803
atggggacttctgtgtccaatccaacggcgattttgcagactatgcagggttttctgcgtaaatggtggtctgagttcaacctacaaacccggttgatggccgcggccaccttggtggtgtccctgttaatgagtgggctaactttttgggcagtaaatacgatccaagaggatgcccaattggtggatacccgttttggccgggatgtgggtttgttgttggcggccaatgttgcccctatgattgcggataaaaatctgacggaggtggcccggttttccagtcgcttttacgaaaatacttctaatatccgctacatgatctatgcggacccctctggcaagatcttttttggtattccctactctgaagaaacggttcaaaactccctcaccctagagcggcgcatcgaattaccccagattgatccccataattttgaccagccttttgtacggcaacaccacactcccaatggcgatgtcaccgatgtgtttattcccctccaataccagggcaagttcctcggagttctggcgattggtatcaaccccaaccccgctgcggtcaactcttctaacctaaccagggatgtgaccattgcagtttttatttccatttgggtgatggtaattctcggagctgtattcaatgccctaactattacccagcccattaaagaactgctgctaggagtaaagaacatcgctgctgggaacttcaagcagagaatcaccttgccctttgggggagaattgggggaattaatcgttaacttcaacgagatggcggagcggctggagcgttatgaagcccaaaatattgaagagttgactgcggagaaggcgaagctagacacccttgtttccacgatcgccgatggggccatgttagtggacaccaatttgcaacttttgttggtcaatcccactgcccgtcgcctattcgcctgggaaaataagccaattattggcgaaaatctcctggaaaatttgccaccggaaatcacggcccaacttacccaacccctgagggaattggccgctgaccaaggaagtttgctgttttcccccggccatgggcctcaggaagaggagcaggataaaacctacgccccggaagaatttcgcattagcctgacccaaccgtttccccgcaccattcgtctgatgttgacccaggtgttggatcagaacagggaaaatttacggggcattgtcatgacggtgcaggatattactagggaagtggaattaaatgaagccaaaagtcagttcattagcaatgtttcccacgaattacgaactcccttgtttaatatcaaatccttcattgaaaccttgagtgagtttggggaagatttgagcgaagtggagcgtaaagaattcctagaaaccgctaaccacgaaaccgatcgcctgagtcgtttggttaacgatgtccttgatttatccaagctagagtcttccaaaatttaccagttagatgcagttgatttgtaccagctaattgaacaaagcttacgtagttaccaacttaatgctaaggacaaacaactacagttagaaaaaattttggacccggatctccccttcgctctgggtaactacgacctactcctgcaggtaatgaccaatttaattggtaattcgtttaaattcactaaagccggcggaaaaatcattgtccgagcctatcccctccaccgtagtaaccttagagcagaggatggtcctggcctagtacgggtggaaatttctgacactggcatcggcattgacccagaggatcaggcggccatttttgggcggttctatcgggtggaaaaccgggttcacactttggagggtactgggttggggctttccattgtcaaaaatatcattgccaaacatcaaagccaaatccatctagtcagtgaggtgggggtgggtactactttttggtttgatctggccgtgtatcaatccatgttgatggtggtgggctagctcgagacccagctttcttgtacaaa

SEQ ID NO: 557 - DNA, 1538 bp, Triticum aestivum
aaaaaagcaggctcctgcaggaccatggatccctacaagcaccggccgacgagcggggccaactccggctactggaccaccaactccggcgcgcccgtctggaacaacaacaacgccctcaccgtcgggcagcgaggacctatcctccttgaggattaccatctgattgaaaagcttgcgcagtttgaccgggagcgtatccctgaacgtgttgttcatgcacggggagccagtgcaaagggattctttgaggtgactcatgatgtttctcagctcacatgtgctgactttctccgggctcctggggttcagaccccggttattgtccggttctctactgtcgtgcatgagcgtggaagccctgagaccttgagggatccacgtggttttgcggtgaagttctacaccagagagggtaactttgaccttgttgggaacaacatgcctgtgtttttcatccgagatgggatgaagttccctgacatggtccatgctttcaagccaagtccaaagaccaacatgcaggagaactggagaatagttgacttcttttcgcaccacccggagagtctgcacatgttcaccttcctctttgatgatgttggcattccactcaactacaggcacatggacggttttggtgtcaacacctacaccttaatcagcagggatggaaaggcgcaccttgttaagttccattggaagcctacatgtggtgtgaagtgcctcttagatgatgaagccgttactgtaggaggcacctgccacacccatgccacaaaggacttgaccgattctattgcagctgggaattacccagaatggaagctcttcattcagaccattgatgctgatcatgaggataaatttgactttgaccctcttgatgtcaccaagacctggccagaggatatcatcccattgcaaccagttggacggatggtgctcaacaagaacattgataatttcttcgcagaaaatgaacagcttgctttctgcccagcaatcactgtccctggaatccactactctgatgataagctgctccagacaaggattttctcctatgctgatacccaaaggcaccgtcttggtccaaactacttgatgcttcctgtgaacgccccgaaatgtgctcaccacaacaaccatcatgatggcttaatgaatttcatgcacagggatgaggaggtgaactacttcccttcaaggtttgatcctactcgtcatgctgaacagtaccctatccctcctcgcgttctatctggctgccgggagaagtgcattatcgagaaggagaacaatttcaagcaggctggcgagagataccgatccttcgaccctgccaggcaagaccgtttcctacagcggtgggttgatgcgctcacggatgctcgcgtaacccatgaaatccagggcatctgggtctcatactggtcacagtgtgacacgtccctcgggcagaagctggcatcgcggctcaagattaagccgagcatgtagctcgagcctgcagggacccagctttcttgtacaaa

SEQ ID NO: 558 - DNA, 366 bp, Glycine max
atggcattctcttccactctacttcttctgctcgtggcgatgttcgtcttctctgccgtcgcacaatctccggcgtcgtctcctgagttcgctgctgctccaccgaaaaccgccactccctcgccttcttcgtccatgtctccacccgccgctgctccttcaccttcatcctccgtcgtgagctctccgccgtctcctcctacttcagttccggcgtcttctccgtcgccttccatctctccgtcgtcgatctcttcccctccgtccgatgcccccgcaccgtccgagaatgccgccgtctcgaatggattcgccgctgtcggatctgtcgtagtcggtctcgtcgccgccgcatcgatcatgtag

SEQ ID NO: 559 - DNA, 1630 bp, Oryza sativa
acaagtttgtacaaaaaagcaggctcctgcaggaccatgctgatggcgaccgtctcgccggcgcggagggagccgacgccgcaggcggtgcgggcgtccccgatgccatcggcggcggcggcgttggtgaggagaggcggtggtggtagcggggggacggtgctggggaagtacgagctggggcgcgtcctgggacagggctcgttcgcgaaggtgtaccaggcgaggcacctggagaccgacgagtgcgtggcaatcaaggtgctcgacaaggagaaggccgtgaagggcgggatggtccacctcgtcaagcgcgagatcaacgtgctccgccgggtgcgccacccgaacatcgtgcagctgttcgaggtaatggccagcaagaccaagatctacttcgtcatggagtatgtccgcggcggcgagctcttctcccgcgtctccaagggacgcctcagggaggacaccgcgcggcgctacttccagcagcttgtctccgccgtcgacttctgccacgcccgcggcgtgttccaccgtgacctcaagcccgagaacctcctcgtggatgagaacggggacttgaaggtctcggacttcggcctcgccgccggccccgaccagttcgaccccgacggtctgctccacacgttctgcggcacgccggcctacgtcgcccccgaggtgctcaggcgccgcggatacgacggcgccaaggcggacatatggtcatgcggtgtcatcctctttgcgctcatggccgggtacctccctttccatgaccacaacatcatggttctgtaccggaagatctacaatggggagttcaggtgtccaaggtggttctccaaggattttactagattgataacgcgccttcttgacgcaaaccccaaaactaggatcaccgtgccagagatcattgagagcgattggttcaagaaaggatacaagccagtcaagttttacattgaggatgacaagctctacaacctgtctgatgacgtgctgaacttggagcctgctgatcctgttcccccaccattgggtttggcacctcctgttcctccacctccacaaggggatgatcctgatggttcagggtctgagtcagattcatcagtcgtatcctgcccggccacattgtcaactggggagagccagagagtccgtgggtcactaccacgcccagcaagccttaatgcatttgatatcatatcattctcaaaaggattcaacttgtctgggctgtttgaggagagggggaacgagatcaggtttgtatctggtgagcccatgtctgacattgtaaaaaagctggaggagattgcaaaggtcaagagcttcacagtgcggaggaaggactggcgggtgagcatagagggtacacgcgaaggagttaaggggcctctaaccataggcgcggagatatttgagcttacaccctcccttgtagtagtggaagtaaaaagaaaggcaggtgataatgaagagtatgaggatttctgcaacatggagttgaagccaggaatgcagcaccttgtgcaccagatgctcccagctccaaatggaactcctgtgagtgagaaggttgaaaggtagctcgagacccagctttcttgtacaaagtggt

SEQ ID NO: 560 - DNA, 734 bp, Oryza sativa
aaaaaagcaggctcctgcaggaccatggggagagggaagattgccatcaagaggatcgacaacacgatgaaccggcaggtgaccttctcgaagcggcgcggcgggctgatgaagaaggcccgggagctggccatcctctgcgacgccgacgtcggcctcattgtcttctcctgcaccggccgcctctacgacttctccagctcaagcatgaaatcaataatagagcggtaccaggaggcaggagaggagcattgtcggttgctgaacccaatgtcagaggctaagttttggcagcgggaggttacaactttgaggcagcaagtgcaaaacttacaccacaacaacaggcaacttttgggagaggaaatctccaacttcacagttagagatctgcagcttctccagaaccaagttgagatgagcctacattccataagaaataaaaaggatcaacttttggcagaggagattctaaaactcaatgaaaaggggtctcttgttcaaaaggagaacagtgaacttcgcaagaagttcaacattgctcatcaacgcaacatagaattacacaagaagcttaactctggagaaagcacgtcaagtgagcaagttaccagaagctcaaaggatcccggagaatcgagtacaccccgtgattcacgtgtgtgtattgaccttgaattgagtcaaaaagaagttgaagatgaatagctcgagacccagctttcttgtacaaa

SEQ ID NO: 561 - DNA, 1646 bp, Glycine max
aaaaaagcaggctcctgcaggaccatggcaggaggaggagctccagctaaagcagatgagccacagccacatccaccaaaggatcagttaccaaatatttcttactgtattactagtcctcctccatggcctgaggccatacttcttggttttcaacattttcttgtgatgcttggcacaactgtgttgattcccactgctcttgttccccagatgggaggtggcaataatgagaaggcaagagttatcgaaaccctgctttttgtagctggtattaacacattgttgcaaacaatgtttggaactcgattgcctgcagtaattggagggtcttacacctttgttccaaccacaatctcaattatccttgctggccgattcagtgatgaaccagatcctatagagaaattcaagaggataatgaggtcaatccaaggtgctcttattgttgcttcgactcttcaaatagtactgggcttcagtggtctctggcgtaatgttgcaaggttcttaagtccactttcgtcagttcctttggtatctcttgttggttttgggctgtatgagttagggttccctggggtagctaaatgtgtagagatcggattgcctcagcttatattgctagtatttgtttcacagtatgtgccccatgtgctacattcgggaaaacatatcttcgaccgttttgctgtgttatttacaattgtaattgtgtggatatatgctcatctacttactgttggaggggcctataatgatgctccacataaaactcagatatcatgccgcactgaccgtgctggacttattgattctgctccttggataagaattccatatccatttcaatggggagcaccttcatttgatgcaggtgaagcctttgccatgatgatggcatcttttgttgctcttgtggagtccagtggagctttcattgctgtatataggtatgcaagtgcaacgccattgccaccatctattctcagtcggggtattggttggcagggagttggcattctgttatcaggattgtttggaacagtcaatggatcctctgtgtctgtagaaaatgcaggtcttttggctttgacacgtgttggaagtagaagagtggtgcaaatctctgccggatttatgattttcttttcaattcttggaaaatttggagcagtttttgcctctatcccacctcccattattgctgccctgtactgcttgttctttgcttatgttggtgctggtggtcttagttttcttcagttctgcaacctcaacagttttagaacaaagttcattttaggcttctcaatcttcgtgggcttgtccgtgccacagtacttcaacgagtacacagcaattaatggttatggtccagtccacacaggcgcaagatggttcaatgatataatcaacgtcccattccaatcaaagccatttgttgctggtgttgtggcatattttctagacaacactttgtttaagagagaagctgctattaggaaggacagaggtaaacattggtgggacaagtacaagtccttcaagggtgacacaagaagtgaggagttctattcccttcctttcaatctaaacaagtacttcccctctgtttagctcgagacccagctttcttgtacaaa

SEQ ID NO: 562 - DNA, 215 bp, Zea mays
aaaaaagcaggctcctgcaggaccatggggtcggagacgttcgtggagatcctgctggccatcctgctgccgccggtcggcgtcttcctccgctacggcatcggggttgagttctggatctgcctgctgctcaccatcctgggatacatcccgggcatcatctacgccgtctacgtcctcgtcgcgtagctcgagacccagctttcttgtacaaa

SEQ ID NO: 563 - DNA, 380 bp, Zea mays
aaaaaagcaggctcctgcaggaccatggagcttactctccccttcgtcatcctcctcgcactcctcgcaagcccctcgcttccccatgccaatggcgacggcggcaacacgacgacgtacatcgtgttcatggatccggcgcgaatgccgtctgtgcaccggacaccggcgcactggcatgcggcgcacctcgagtccctgtccatcgacccggcccgccacttgctgtactcctactccgccgccgcgcacggattcgcggcggcgctgctaccgggccatttgcccctgctccgcagcagccccgaggtgctccaggttgtgccggacgagatgttccagctccacacgtagctcgagacccagctttcttgtacaaa

SEQ ID NO: 564 - DNA, 1478 bp, Oryza sativa
aaaaaagcaggctcctgcaggaccatggctggtggttttcgagtactgcatcttgtcaggccctttctggctttcctgccagaagtacagagtgctgataggaaaataccattcagagaaaaagtgatctataccgttatctctctcttcattttcctggtgtgcagtcagctcccactctatggaattcattcaactactggagcagatcctttctactggatgcgtgttattcttgcatcaaaccgtggcactgttatggagctgggtattaccccaattgtgacatctggaatggtaatgcaacttctagtgggatcaaagattattgaagttgacaacagtgtgagagaggaccgtgcacttctgaatggcgcacaaaagctgctgggtatcttgattgctattggggaagctgtggcatatgtgctgtctggaatgtatggtagtgtgagccaacttggaactggcaatgccattctcatcatcctacaacttttctttgctggcatcattgttatctgccttgatgaacttctccagaaaggctatggtttgggttctggcatttctctgttcattgctaccaatatctgtgagaatatcatctggaaggcgtttagccccacaaccatcaacagtgggcgtggtgctgaatttgaaggagctgtcattgcattgttccatttgttgattactagaactgacaaagtccgtgccttgcgtgaagctttctaccgtcagaaccttccgaatgtgacaaatttacttgcaactgtattggtcttcctcatagtcatctacttccaaggcttccgtgttgtgcttccagtgagatcaaagaatgctagggggcagcaaggctcatatccaattaagttgttctacacttcaaacatgcccatcattctgcactctgcactgattaccaacctctacttcatatcacagcttctctacaggaggtacagtggaaattttctggttaaccttcttgggaaatggaaggaatctgagtactctggccattcggttcctgttggtggtctcgcttactatgtaactgctccatcaagtttggctgatgttcttgcaaatccgttccatgcgttgttctatgtggtcttcatgctgtcagcttgtgctctcttctcaaagacatggattgaagtatctggctcatctgcaaaggatgttgctaaacagctgaaggaacagcaaatggtgatgcctggccatcgtgagtcaaacttgcagaaggaattgaacagatacatccccactgccgctgcatttggtggagtgtgcattggtgcattgactgttctagctgatttcatgggtgctattggttcaggaactggtattctgcttgctgttactatcatctaccagtacttcgagacattcgagaaagagagggcaactgagcttggtttctttggtttttagctcgagacccagctttcttgtacaaa

SEQ ID NO: 565 - DNA, 503 bp, Oryza sativa
aaaaaagcaggctcctgcaggaccatgtcgctggtgaggcgcagcaacgtgttcgaccccttctccctcgacctctgggaccccttcgacagcgtgttccgctccgtcgtcccggccacctccgacaacgacaccgccgccttcgccaacgcccgcatcgactggaaggagacgccggagtcgcacgtcttcaaggccgacctccccggcgtcaagaaggaggaggtgaaggtggaggtggaggaaggcaacgtgctggtgatcagcggccagcgcagcaaggagaaggaggacaagaacgacaagtggcaccgcgtggagcgcagcagcgggcagttcatgcggcggttccggctgccggagaacgccaaggtggaccaggtgaaggccggcatggagaacggcgtgctcaccgtcaccgtgcccaaggccgaggtcaagaagcccgaggtgaaggccattgagatctctggctagctcgagacccagctttcttgtacaaa

SEQ ID NO: 566 - DNA, 296 bp, Oryza sativa
aaaaaagcaggctcctgcaggaccatggaggcttcacgcaaggtgttctcggccatgcttctcatggtgctgctgcttgcagccactggtgagatgggcgggccggtgatggtggcggaggctcggacgtgcgagtcgcagagccaccggttcaagggcccgtgcgcccgcaaggcgaactgcgccagcgtatgcaacacggagggcttccccgacggctactgccacggcgtccgccgccgctgcatgtgcaccaagccctgcccctagctcgagacccagctttcttgtacaaa

SEQ ID NO: 567 - DNA, 448 bp, Oryza sativa
aaaaaagcaggctcctgcaggaccatggccgctgagactgttgtcctcaaggtcggtatgtcatgccaaggttgtgctggagccgtaaggagagttctcacaaaaatggaaggcgtggagacctttgacatagacatggagcagcagaaggtgacggtgaagggcaatgtcaagccagaagacgttttccagacggtctcaaagacagggaagaagacctccttctgggaggctgcagaagccgcttcggattctgcagctgcagctgctcctgctcctgctccggcaacagcagaagctgaagctgaagctgaagctgctccacccaccaccaccgcggcagaagcacctgccatcgctgctgctgctgctcctcctgctcctgctgctccagaagcagctccggccaaggctgatgcttagctcgagaccagctttcttgtacaaa

SEQ ID NO: 568 - DNA, 1451 bp, Escherichia coli
aaaaaagcaggctcctgcaggaccatggaccagaagctgttaacggatttccgctcagaactactcgattcacgttttggcgcaaaggccatttctactatcgcggagtcaaaacgatttccgctgcacgaaatgcgcgatgatgtcgcatttcagattatcaatgatgaattatatcttgatggcaacgctcgtcagaacctggccactttctgccagacctgggacgacgaaaacgtccataaattgatggatttgtcgatcaataaaaactggatcgacaaagaagaatatccgcaatccgcagccatcgacctgcgttgcgtaaatatggttgccgatctgtggcatgcgcctgcgccgaaaaatggtcaggccgttggcaccaacaccattggttcttccgaggcctgtatgctcggcgggatggcgatgaaatggcgttggcgcaagcgtatggaagctgcaggcaaaccaacggataaaccaaacctggtgtgcggtccggtacaaatctgctggcataaattcgcccgctactgggatgtggagctgcgtgagatccctatgcgccccggtcagttgtttatggacccgaaacgcatgattgaagcctgtgacgaaaacaccatcggcgtggtgccgactttcggcgtgacctacaccggtaactatgagttcccacaaccgctgcacgatgcgctggataaattccaggccgacaccggtatcgacatcgacatgcacatcgacgctgccagcggtggcttcctggcaccgttcgtcgccccggatatcgtctgggacttccgcctgccgcgtgtgaaatcgatcagtgcttcaggccataaattcggtctggctccgctgggctgcggctgggttatctggcgtgacgaagaagcgctgccgcaggaactggtgttcaacgttgactacctgggtggtcaaattggtacttttgccatcaacttctcccgcccggcgggtcaggtaattgcacagtactatgaattcctgcgcctcggtcgtgaaggctataccaaagtacagaacgcctcttaccaggttgccgcttatctggcggatgaaatcgccaaactggggccgtatgagttcatctgtacgggtcgcccggacgaaggcatcccggcggtttgcttcaaactgaaagatggtgaagatccgggatacaccctgtacgacctctctgaacgtctgcgtctgcgcggctggcaggttccggccttcactctcggcggtgaagccaccgacatcgtggtgatgcgcattatgtgtcgtcgcggcttcgaaatggactttgctgaactgttgctggaagactacaaagcctccctgaaatatctcagcgatcacccgaaactgcagggtattgcccagcagaacagctttaaacacacctagctcgagacccagctttcttgtacaaa

SEQ ID NO: 569 - DNA, 1454 bp, Synechocystis sp. PCC 6803
aaaaaagcaggctcctgcaggaccatggtgcataaaaaaattgacctcaaccagctcagtgaagcggaaagcctactgacccccacctatgcggcccggggcctagccaattctgtcagtaaatatgaaatgccagaaacggaaatgctaccggcgatcgcctataacctcatccacgatgaactggggctagatggcaattcccgattaaacctggccacctttgtcaccacttggatggagccggaagctaggcaactgatggcggataccttcgacaaaaacatgatcgataaggatgaatatccccaaacggcggaaattgagttgcgttgcgtcaatattttgtcccgactctggaatgctccggccagtgcggaagccaccggctgttccaccattggttctagtgaagcggccatgttgggggggatggccatgaagtggaaatggcggcaacgacgacaagcggcagggaaaccaggcgatcgcccgaatttggttatgggcattaacgtccaggtttgttgggaaaagttttgtcgttactgggaagtggaaccccgctttgtccccatggaaggcgatcggtaccacatcagcccggaagaagcagttaagctaattgacgaaaataccatcggtgtaattggtattttaggtagcacctttgacggcagttatgaacccattgaagcgttgaacgatgccctggaaactttaaatcaaagaactggttggcaggtgcctctgcacatagatgccgccagcggtggttttattgctccctttttagatccagatttgcgttgggattttcgtttaccttgggtgaaatccatcaacacctctggccacaaatacggtttagtttatccgggggtaggttggatcatttggcgggataaggaagaattaccggaagaattaattttccattgcaactatttggggggagatttacccaactttgccctcaacttttcccgccccggcaatcaggtagtggcccagtattataactttctccgcttaggcaaagaaggttaccgcaaaatccaacagacttgtcgagatacggctctgtatctatctggcaaaattgcccaattaggcccttttgaattgctcaccgacggtggggatatcccggtttttgcctggagattaaaggacgaagtattggccaacacttgttataccctgtacgacatggccgacaaattgcgggaacggggctggttggtgcccgcctatcgcatgcccaaaaaccgtgaagatttggtggtgcaacgcattgtcgtgaaagagggttttagtcgggatatggcggaccttttgttagcggacatggaaagggcgatcgcctattttgccagccaaccggaccacaaaccgaagcaggaaggttcccactttagccattagctcgagacccagctttcttgtacaaa

SEQ ID NO: 570 - DNA, 1334 bp, Zea mays
gcagtcgctgtcgttaccatgggattcggaatggggaataataacaacggggcgagctcctcgtcgtcgaggctggacccggcggcgccgctgctgccgcgccacggcagtagcgggggccgcgagggtggtggcctgtcgtcgcagcccaagacgttcgccaacgtcttcatcgcggtggtcggcgccggcgtgctggggctgccgtacaccttctcgcgcaccgggtgggcggcgggctcgctgctgctcttctccgtcgccgcgctcaccttctactgcatgatgctgctcgttgcgtgccgccgccgcctcgccgacgagcaccctaagatcgcctcgttcggggacctgggggacgccgtgttcggcgcgcatgggcggttcgccgtggacgtgatgctggtgctcagccaattcagcttctgcgtcggctacctcatcttcatctccaacaccatggcgcacctctatccgattaccgccgcggcctcgtcctcctccgcgctcctctcccccaaggcgctcgtcatctgggcgatgctgcctttccagctggggctcaactccatcaagacgctgacgctgctcgcgccgctcagcatcttcgccgacgtcgtcgacctcggcgccatgggcgtggtcctcggccaggacgtcgccgcctggctcgccaagcccgtgcccgtggtcgccttcggcggcgcaggcgcgcttctctacgggctcggcgtctccgtgtacgcgttcgagggcatcggcatggtgctgccgctggaggcagaggcggcgaacaagagcaagttcggcgtcacgctcgggctgtccatggcgttcatcgccgtcatgtacgggctgttcggcgtcatgggctacgtcgcgttcggcgacgccacgcgggacatcatcaccaccaacctcggagccgggtggctgtcggccgccgtgcagctggggctctgcatcaacctcttcttcaccatgccggtgatgatgaaccccgtgtacgaggtcgccgagcgcctgctccacggcaagcggtactgctggtggcttaggtggctgctggtcgtcgtcgtcggactcgccgccatgtacgtgcccaacttcacggacttcctggcgctcgtcgggagcagtgtctgcgtcctcctcgggttcgtgctgccggcctcgttccacctcaaggtattcggcgccgagatggaatggcccggagtgctgtccgatgtcctgctggtcgtgatcggcctcgcgctcgccgtgttcgggacgtacacgtcgctgctgcaaatcttccaatcgtcaagcgcttagaacccagcggtactcgc

SEQ ID NO: 571 - DNA, 1489 bp, Zea mays
acaagtttgtacaaaaaagcaggctcctgcaggaccatggccggagcagcagcagccgccgtggcgtccggggtctcggcccggccggccgcgccgatgagggcttctgcgggacgccgcgctcggctgtcggtggtgcgggccgcgatatccctcgagaagggcgagaaggcgtacacggtgcagaagtccgaggagatcttcaacgccgccaaggagctgatgcctggaggtgttaactcgccagtccgtgccttcaaatctgttggtgggcagccagtagtgttcgactctgtaaagggttctcgtatgtgggatgttgatgggaatgagtacattgattacgttggttcctggggtcctgcaatcatcggccatgcagatgataaggttaatgctgcattgattgaaactctgaagaaaggaactagctttggtgctccatgtttgctggagaacgtattggctgagatggtcatctctgccgtgccaagtatcgaaatggtccgctttgtcaactcagggacagaagcctgcatgggagcgctccgcctcgtgcgcgcattcaccgggcgggagaagatcatcaagttcgaaggctgctaccatgggcatgccgattccttccttgtcaaagccggcagtggtgtggccacccttggcctccctgactcccctggcgtccccaagggggccacctacgagactctaacggcaccctacaatgatgtcgaggcagtgaagaaactgttcgaggacaacgcgggggagattgctgccgtcttcctcgagccagttgttggcaacgctggtttcatccccccacagcctggtttccttaacgctctccgcgacttgaccaaacaggatggtgcgctcctggtcttcgatgaagtgatgaccggcttccgtctgtcttacggtggagctcaggagtacttcgggatcacccctgacgtaacgaccttgggcaagatcatcgggggtggcctccccgttggtgcctacggtgggagaagggacatcatggagatggttgcccccgcagggccaatgtaccaggcaggaactctcagcgggaaccctctagccatgaccgctgggatccacacgctcaagcggctgacagagcccggcacctacgagtacttggacaagatcaccggcgaactcgtccgtgggatactggacgtcggtgcgaaagcagggcatgatatgtgcggaggacatatcagaggaatgtttggcttcttcttcaccggcgggcccgtccacaacttcggggacgccaagaagagcgacaccgagaagttcgggaggttctaccgtggcatgctggaggagggcgtgtacttcgctccatcgcagttcgaggcggggttcaccagcttggcgcacacctcccaggacatcgagaagaccgtcgaggccgctgagaaggttctgaagcggatatagctcgagacccagctttcttgtacaaagtggt

SEQ ID NO: 572 - DNA, 1768 bp, Glycine max
acaagtttgtacaaaaaagcaggctcctgcaggaccatgtcgtgtttgttgccgcacttcaactgccacctcgacactttcaggactcatccctatgctcttcctacccatccatcaaaaacaagactaaatttgtgtttccagccgcaatgtgtgttgtctgccacatctccttcaacgctgcttagtttggaaaagaagttggcattagatgctccttctgatccaaacacgtcttggccctatatcgctgctgttgcccctccctcaccacacttaaaggccaactttaaatcaaccttatctgcggaatcacttcttactaatgaagaggctgtaatagctgctgctgcatctgaagctcttgctcttgctaaagcagctgtgaaggttgcaaaggatgcagttttactagtaaaaaagaagcctccagcagaagcagagtataaatcccatgtttcttccaaatctgatgatttacttctcaaatggtttcatcaaatggaagcggaagatggtgtagcagaagagtccatgggtgctggagcagaaataatggaaggtgttgacataagccccagcgaagaggaatctgatctagagccttcccatgaggaacttgagtgtctgcaggaacggctttcagacaatatagctgtaagatctaggcgcctaacagaaagaaaagctaaaagagtcagagcagcagagaaggctaccacgaattttgcatctttaaaacctggctcctccagcaggagaaagcgtgtttctatgcaagaagtagattattcagatccacttcgttacttaagaacaacgactagcgcttctaggcttcttactccaactgaagaaattaagttgtcagcaggaatacaggaccttctaaagcttgaaaaaatccaggaggatcttgcagaaagatttggtgatcaacccacgtttgctcaatgggcagcagtggcaggggtagatcagaagacacttaggaaacgtttaaattatggtatattttgcaaagacaaaatgattaaaagcaatatacgacttgtcatatcgattgctaagaattatcagggatctgggatgaatctgcaagatcttgtccaggaaggatgcagaggccttgtaaaaggtgcagagaagtttgatggtaccaagggttttaaattctccacctatgctcattggtggattaaacaggctgttcggaaatcactttctgatcagtcaagaactattcgcttgccattccacatggtggaggcgacttacagagtgaaggaggccagaaaacaactgtatagtgaaaatggaagacagcctgatgatgaagaagttgctgaagcaactgggttgtcaatgaagaggcttaatgctgtacttatgaccccaaaagctcccagatctctggaacaaaagattgggatcaaccagaatcttaaaccctcagaagtaatttctgatcctgatgccgaaacagctgaagaacagctccttaagcagttcatgaagaaggacctagaagaggctctggacagtctcaatgcaagagagaggcaggtggtaagatggagatttggtatggatgatggaaggacgaagaccctgcaagagataggggagatgttgggtgtgagtagggagagaattaggcaaatcgagtcaagtgcttttaagaagcttaagaacaagaagagaaccaatcatttgcagcagtatttggtttcatagctcgagacccagctttcttgtacaaagtggt

SEQ ID NO: 573 - DNA, 1378 bp, Arabidopsis thaliana
acaagtttgtacaaaaaagcaggctcctgcaggaccatgaactctaagaatcgcataaacaatgtcggggaagatgttgatatcgaaatccctgacactgctcatcagattagcagcgattcatggtttcaggcagcgttcgttctgacaaccagtataaacagcgcatacgtgttgggatattcaggaacagtcatggttcctttaggatggattggtggtgtagttggtcttattcttgctactgcaatctcactctatgcaaacactctcgtagccaagcttcatgagtttggtggcaaaaggcacattcgctatagagacctcgcgggattcatttacggtagaaaggcttattgtcttacatgggtgttgcaatatgtcaattttttcatgattaattgtggattcatcatactagctggttccgccttaaaggctgtttatgtgctttttagggatgatcatgccatgaagttacctcattttatagctattgcgggtctgatttgtgcggtttttgctattggaattcctcatttgtcggctcttgggatatggcttgcggtttcgactatcctcagcctcatctatatcgttgtggcaatcgtgctatcggttaaagatggagttaaagcaccttcaagagattacgagatacaaggatcaccactaagcaaactttttaccatcactggagcagccgctacactagttttcgtattcaacacagggatgcttccagaaattcaggcaacagtaaagcaaccagtagtaaaaaacatgatgaaggctctatactttcaattcacggtgggtgttttaccaatgttcgcggttgtattcatcggctattgggcttacggatcctcaacctctccctatctactaaacaacgtcaatggtccactttgggttaaagcccttgctaacatctccgctatccttcaatctgttatctctttgcacatttttgcaagtccaacatatgagtacatggacaccaagtttgggatcaaaggaaacccattggcattaaagaacttgttgtttaggatcatggcaagaggcgggtacatagcagttagtacgcttctctcagcactcttgccgttccttggggacttcatgagcctcactggtgcagtgagcacattcccccttacattcattctagccaaccacatgtactataaggctaagaacaataagctcagtactttgcaaaagctatggcattggctcaacgttgtcttcttcagtttgatgtctgttgctgccgccattgcagctcttaggctcatcgccattgactccaaaaacttccacgtttttgcagatttgtagctcgagacccagctttcttgtacaaagtggt

SEQ ID NO: 574 - DNA, 1270 bp, Streptomyces coelicolor
acaagtttgtacaaaaaagcaggctcctgcaggaccatggtgctcggcatcgtgctggcgggcggagagggcaaacgcctgatgcccctgaccgcggaccgcgccaaacccgcggtcaccttcggcggcacctaccggctcgtcgacttcgtcctgtccaacctggtcaacggcgacatcctgcggatctgcgtcctcacccagtacaagtcgcactccctggaccggcacatcaccaccacctggcggatgtccagcctgctcggcaactacgtcactccggtccccgcccagcagcgcctcggcccccgctggttcctcggcagcgccgacgccatcctgcagtccctgaacctggtgcacgacgaacagcccgagtacgtggcggtgttcggcgccgaccacgtgtaccggatggacccgcgccagatgctcgcccagcacatcgagtccggcgcgggcgtcaccgtcgccgggatacgggtcccgcgcgccgagtcgccgtccttcggcgtgatcacgccgggctcggacgggcagaccgtcaccggcttcctggagaagcccgccgaccctcccggcctggccgacgaccccgggtgcgtcttcgcctcgatgggcaactacgtcttcaccaccaaggccctcgtcgaggccctgcaccgggacgccgaggacccggactccgtgcacgacatgggcggttcgatcctgccccagctcaccgaccggggcgaggccgcgctgtacgacttcagcgccaaccacgtccccggggagaccacccgcgaccaggggtactggcgggacgtgggcacgctggacgcctactacgacgcccacatggacctgatcgccgagcggcccgcgttcaacctctacaaccgggactggccggtctacacccactccacccagctctcgccggcccgcttcaacgccgggggcatcgccagcgagtcgatcatcagcgccggctgcctgatccgcggacaggtcacccggtccgtgctctccccgggggtggtggtcgaccccggcgcggtcgtgcagggctcggtgctgcacgacaacgtgcacatcggccggggtgcggtggtgcgcggggcggtgctggacaagaacgtgcaggtgccgccgggcgcgacgatcggcgtcaacccgcagcgggacggcgagttgtacaccgtctccaagggcggcgtgatcgcgctgggcaagggacagcgggtgccgtagctcgagacccagctttcttgtacaaagtggt

SEQ ID NO: 575 - DNA, 2518 bp, Oryza sativa
acaagtttgtacaaaaaagcaggctcctgcaggaccatgggggaagctgccggcgaccgcgtcctgagccgcctccacagcgtcagggagcgcatcggcgactccctctccgcccaccccaatgagctcgtcgccgtcttcaccaggctggttaacctcggaaagggaatgcttcaggcccaccagatcattgctgagtacaacaacgcaatctctgaggctgatcgtgagaagctgaaggacggtgcttttgaggatgtcctgaggagtgcacaggaggggattgttatctccccatgggttgcccttgccatccgcccgaggcccggtgtctgggagtatgtgagggtcaatgtgagcgagctcgctgttgagttgctgacagtccccgagtacttgcagttcaaggaacagcttgtggaagaaggcaccaacaacaactttgtgcttgagctggatttcgagccattcaatgcctccttccctcgtccttctctgtcgaagtccattggcaatggtgtgcagttcctcaacaggcatctgtcatcgaagctcttccatgacaaggagagcatgtacccactgctcaacttccttcgtgcacacaactacaagggcatgaccatgatgttgaatgacagaatccgcagtctcagtgctctccaaggtgctctgaggaaggctgaggagcatctttctggtctttcagcagacaccccttactcagaattccaccacaggttccaggaacttggtctggagaagggttggggtgactgtgccaagcgttcccaggagaccattcacctccttttggaccttcttgaggcccctgatccgtccaccctcgagaagttccttggaacaatcccaatggtgttcaatgttgtcattatgtccccacacggttacttcgcgcaagccaatgtcttgggttaccctgacactggagggcaggttgtctacattttggaccaagtccgtgctatggagaatgagatgcttctgaggatcaagcagcaaggtctcaatattacaccacgcatccttattgtcaccaggttgctccctgatgcaactggcaccacctgcggtcagcgtcttgagaaggtccttggcaccgagcacacccacatcctacgtgtgcctttcagaactgaaaatggaattgttcgcaagtggatctcacgttttgaagtctggccgtacctggaaacattcactgatgatgtcgcgcacgaaattgctggagagctccaggccaatcctgacttgatcatcggaaactacagtgacggaaaccttgttgcatgcttgcttgcacacaagatgggtgttacccattgtaccattgcccatgcgcttgagaaaaccaagtaccccaactctgacctctactggaagaagtttgaggatcactaccacttctcatgccagttcacaactgacttgattgcgatgaaccacgctgacttcatcatcaccagtaccttccaagagattgccggaaacaaggacactgttggtcagtatgagtctcacatggcattcaccatgcctggtctgtaccgtgttgtccacggtattgatgtttttgacccgaagtttaacattgtctcgcctggtgcggacatgtccatctacttcccttactctgagtctcgtaagaggctcacctccctccacccagagattgaggagttgctctacagcgaagttgacaacaacgagcacaagtttatgctgaaggacaggaacaagccaatcatcttctccatggctcgtcttgaccgtgtcaagaacttgactggtctggttgagctgtatggtcgcaaccctcgcctgcaagagctggttaaccttgtggttgtctgtggtgaccatggcaacccatctaaggacaaggaggagcaggctgagttcaagaagatgtttgaccttattgagcaatacaacttgaatggccacatccgctggatctccgcgcagatgaaccgtgtccgcaacggtgagctctaccgttacatctgcgacaccaagggtgcttttgtgcagcccgctttctacgaggcattcggtctcactgttgttgagtccatgacctgtggtctcccgacattcgcaaccgcctatggtggtccagctgagatcatcgtgaacggagtgtctggcttccacattgacccataccagggtgacaaggcctcggcgctgctcgttgagttctttgagaagtgccaggaagaccccagccactggaccaagatctcgcagggcggtcttcagcgtatcgaggagaaatacacctggaagctctactctgagaggctgatgaccctcaccggcgtctacggattctggaagtacgtctcgaacctggagaggcgtgaaacccgccgctaccttgagatgctgtatgccctcaagtaccgcaccatggctagcaccgtcccgttggccgtcgagggcgagccgtcgaacaagtagctcgagacccagctttcttgtacaaagtggt

SEQ ID NO: 576 - DNA, 940 bp, Saccharomyces cerevisiae
acaagtttgtacaaaaaagcaggctcctgcaggaccatggaaaagctattacagtggtctattgcgaattctcaaggggacaaagaagctatggctagggccggccaacctgatcctaaattgctacagcagttattcggtggtggtggtcctgacgatccaaccttaatgaaagaatccatggctgttattatgaatccggaggttgacttagaaacaaaactcgttgcatttgacaactttgaaatgttgattgagaacttagataatgctaataatatcgaaaatttaaaactgtgggagccattgttggatgttcttgttcagacgaaggatgaagaactacgtgctgctgctttatccattattggaacggctgtgcaaaacaacttggattcgcaaaataatttcatgaaatacgacaatggtctgcgaagccttatcgaaatagctagtgacaagacaaagccactcgacgtgagaacaaaagctttttacgcactatctaatctaataagaaaccacaaagatatctcagaaaagtttttcaaattaaatgggctcgactgcatagcacctgtattaagtgataacaccgccaaaccaaaactgaaaatgagagccattgccttattgaccgcatatttgtcatctgttaagattgatgaaaatataatcagtgtgctgagaaaggatggagtaattgaaagtacgattgagtgcttgtctgacgagagtaacttgaacatcatagatagagttctgtcttttctctctcacctgatatcttccggaataaaatttaatgaacaggaattgcacaaattgaacgaaggttacaaacatatcgagcctctaaaggacagacttaatgaagacgattatttagccgtaaagtatgtattatagctcgagacccagctttcttgtacaaagtggt

SEQ ID NO: 577 - DNA, 1639 bp, Saccharomyces cerevisiae
acaagtttgtacaaaaaagcaggctcctgcaggaccatggatccctttcacaatggcaataaaaggagctcaatatcgtttggctcatcgcagcggcagccatataacaagaacaattacttgagtggtactaatgggccttcctcggcggcacaagatcaaggtagaggcccatctccctttggaatgtctggcaacactaccaatggcggtaacagcaaaaggaatagtggctgtgacctaagtgccacgtactatgcaagtcgatcgccgatgtattcaccgttagatttctcgccaccagttttttcaccaaatcattctcagttacagcaggcgaggggctatgctgcaaatattccggttgtaagcaatctgatgaacccttccatggcctccgtgtgcgaatatcaatcacactatccactctttgggctcgattggagcgccgacgactacgtctgcttgggttcgtacaaagaggacagcagaaataagttgcaggttctgcactctaatgatctactgagctgggaaagcgtagtggacgcagatgtggtttatcctgtgagcaaaatccaatgggtcccctctcaattgtatccaaggaaactcgcgacgtgttctgactccttacggatttggagcgttagccctgaggaaagacagttccaagaacaaataaatctatctctgtgtaaatacaatagacagcaccccgccaatcccgcggccgcagatgacatgaaggtcataggcactttcccaccaataacatcatttgactggaacacggtcgatactaacttgataatctcaagttccatcgacaccacatgcattgtatgggatctgcaaagcagtcactacgttaagacccaattgatcgctcacgacagcgaagtttttgatgtaaggtttttgacaaaatcgacccaattatttgctagttgtggtggggacggtagtgtacgagtatttgatttaagatcgcttgcgcacagtacaattatttacgagcctccctcttcctcagtgtctggagccactgcgggtactataacaccgtcgtcgaaaggttcggacgccttattgaggctggagccatcaccgtatgacccaaatgtgttggccacttttgcagctgactcgaacaaaatcattattctagatatgaggaacccagaatcccctatactaaacttacaaggccacggttcttcggtaaacgggattaaatggcatcccacaaagcgcaatgttttgctctcgtgcggagatgactgccaggtgctctattgggacttgaacagctcctttatggaaattaacgctgcaggtagcaaatcccccagtattcatggaacttccttggaggaccctgacggcgacacagagatgacagacggtggcgcaggatccggtttaaacgaggatcccttaagtttaaacaacaacagcaagcaggtgtgcaagacactagagactcctaacatgatgtatgccaataaaacacaagagataaacaacattgcatggaggccccagaggggcgattggtttgggtgcgtgagcggcaagaagtttcaaaacgtccgcgtcctttagctcgagacccagctttcttgtacaaagtggt

SEQ ID NO: 578 - DNA, 733 bp, Saccharomyces cerevisiae
acaagtttgtacaaaaaagcaggctcctgcaggaccatgagcgctaccgaatcttcatctatattcacattgagtcacaactcaaacctacaagatatcttggccgccaatgccaaatgggcctcccagatgaacaacatacagccaactttgttcccagatcacaatgcgaagggccagtcccctcacactcttttcatcggctgctccgattcgcgttacaacgaaaactgtttaggtgtcttgcccggcgaagtgttcacttggaaaaatgttgctaacatatgtcactcagaggatttaactttgaaggccactttagagtttgccattatttgtctaaaagttaacaaagttattatttgtggccacactgattgtggtggtataaagacatgtttaactaaccaaagggaagccttaccaaaagttaactgttctcatctgtacaagtacttagacgatattgacaccatgtaccatgaagagtcacaaaatttgatccatttgaaaacgcaacgtgaaaaatctcattacctgtcgcactgtaacgtcaaaaggcagtttaataggattattgaaaaccctactgtgcaaactgctgtacaaaatggagaattacaggtatacggtctgctttacaacgtagaggacggtctactgcaaacagttagcacttacacaaaagttaccccaaaatagctcgagacccagctttcttgtacaaagtggt

SEQ ID NO: 579 - DNA, 1120 bp, Saccharomyces cerevisiae
acaagtttgtacaaaaaagcaggctcctgcaggaccatggtcgtgaataacccaaataactggcactgggtcgataagaactgcatcggatgggccaaggagtatttcaaacagaaactggttggagtggaggccggttcggtgaaggataaaaagtatgccaaaatcaagtctgtttcgtccattgaaggtgattgtgaagttaatcagcgtaaggggaaggttatatctttgtttgatttgaaaatcacggtgttaatagagggacacgtggactctaaggacggatcggcattgccattcgagggtagcattaacgttcctgaagttgccttcgatagcgaggcctcaagctatcaatttgacatatctatatttaaggagactagcgaattgagtgaagccaagccactaattagatccgagttattgcccaagttgagacaaattttccaacaatttggcaaggatttgctggccacccatggtaatgacattcaggtgcccgaatctcaggtgaaatctaactacacaagaggtaaccaaaaaagtagctttaccgaaatcaaggactccgcttcaaagccaaaaaagaatgcacttccctcttctacttcaacttcagcaccagtctccagcaccaacaaagtcccccaaaacggaagcggcaatagtacatctatttatttagaaccaacttttaatgtgccttcctccgagctctacgaaacgttccttgataagcaacgcatattggcctggaccagatcagcacaatttttcaacagcggaccgaagctggagaccaaagaaaaattcgagctctttggcggcaacgtgatcagcgagttggtttcatgcgaaaaggacaagaaacttgttttccactggaaactcaaggattggtctgcccctttcaactctactatcgaaatgactttccatgagtcgcaagaattccatgaaaccaaattacaggtgaagtggactggcatacccgttggcgaggaagatcgcgtgcgcgctaattttgaagaatactacgtgcgttctattaaattgacattcggctttggtgccgtattatagctcgagacccagctttcttgtacaaagtggt

SEQ ID NO: 580 - DNA, 1015 bp, Arabidopsis thaliana
acaagtttgtacaaaaaagcaggctcctgcaggaccgatttgggctcgtcatggctcctggaggcagtgctttgaaagaagtcatggaatctaattcaacgggaatggattacgaggttaaaacggcaaaagtggaagttaataataacaaacctacaaagccagggagtgcagggattggaaaatatgggatccattcgaacaatggtgtttacgagcttcttgaatgtcccgtctgtacaaatttaatgtaccctccaattcatcagtgtccgaatggccacacattatgttcaaactgcaaactgagagtgcagaacacatgccctacatgtcgctacgagcttggtaacataagatgcttagctcttgagaaagttgcagagtctttggaagttccatgccggtaccaaaatttggggtgtcatgacattttcccttactacagcaagcttaagcacgagcagcattgcaggtttaggccttacacttgcccttatgctggttctgagtgttcggttacaggtgatatccctacacttgtcgttcatctcaaagatgatcataaagtcgatatgcatgacggatgcaccttcaaccaccgttatgtaaagtcaaatccacatgaggtcgaaaatgctacatggatgcttacggtgttcaactgttttgggagacagttctgtttacacttcgaggcgttccagctgggaatggctccagtgtacatggcattccttcgttttatgggagatgagaacgaggcgaagaagttcagttacagcttggaagtaggagctcatggacggaaattaacatggcaagggatccctagaagcatccgtgacagtcacaggaaagtccgggacagtcaagacggactcatcatcccaaggaacctcgcactctacttctctggaggtgataggcaagaactcaagttgagagtgactggacgaatctggaaagaggagtaaacgatagctcgagacccagctttcttgtacaaagtggt

SEQ ID NO: 581 - DNA, 934 bp, Glycine max
cccttcctctatataaggaagttcatttcatttggagaggaccaggtggtaccatggagaccaacaaccagcaacaacaacaacaaggagctcaagcccaatcgggaccctaccccgtcgccggcgccggcggcagtgcaggtgcaggtgcaggcgctcctccccctttccagcaccttctccagcagcagcagcagcagctccagatgttctggtcttaccagcgtcaagaaatcgagcacgtgaacgactttaagaatcaccagctccctcttgcccgcatcaagaagatcatgaaggccgacgaggatgtccgcatgatctccgccgaggcccccatcctcttcgccaaggcctgcgagctcttcatcctcgagctcaccatccgctcctggctccacgccgaggagaacaagcgccgcaccctccagaagaacgacatcgccgccgccatcacccgcaccgacattttcgacttcctcgttgatattgtcccccgcgacgagatcaaggacgacgctgctcttgtgggggccaccgccagtggggtgccttactactacccgcccattggacagcctgccgggatgatgattggccgccccgccgtcgatcccgccaccggggtttatgtccagccgccctcccaggcatggcagtccgtctggcagtccgctgccgaggacgcttcctatggcaccggcggggccggtgcccagcggagccttgatggccagagctaggcgatcgcgggccctgatcacctgtcgtacagtatttctacatttgatgtgtgatttgtgaagaacatcaaacaaaacaagcactggctttaatatgatgataagtattatggtaattaattaattggcaaaaacaacaatgaagctaaaattttatttattgagccttgcggttaatttcttgtgatgat

SEQ ID NO: 582 - DNA, 430 bp, Oryza sativa
acaagtttgtacaaaaaagcaggctcctgcaggaccatggcgaggagctcgttcaagctggagcacccactcgaaaggaggcaggctgaggccaaccgcatcagggagaagtatcccgatagaattcctgtcattgttgagaaggctgagaggagtgacattcctgacattgacaaaaagaagtaccttgttcccgctgacctcacggttggacagtttgtgtatgttgttcggaagcggatcaagctcagtgctgagaaggcaatcttcatcttcgtcaagaacacgcttccaccaacagctgccctgatgtccgctatctatgaggagaacaaggatgaggacggcttcctctacatgacctacagcggggagaacaccttcggcctgtttgtctagctcgagacccagctttcttgtacaaagtggt

SEQ ID NO: 583 - DNA, 634 bp, Glycine max
acaagtttgtacaaaaaagcaggctcctgcaggaccatgggcatggccacaatcacaatgggaggaaaccacaattcctccatcactccacgccactacaacacccacaaggtgttccttttctgcaactacattctcttgggtgcagcttctagctgcatcttcctcaccctctctctgcgcctcattccctctctctgcggcttcttcttcatccttcttcaggtctttacgattgcgggcgcggtctccgggtgcgccgccgtggggactaacaggtggtactctgcacacatggtggccactgttctaacggctatctttcagggttctgtttcggtgttggtgtttacgaggaccggcgattttctgggtcaattgaagtcttatgttagggaggaggatggtgctgtgattctcaaattggctggtggactcaccattttgatcttttgcttggagtgggtggttttgacacttgcatttttcttgaagtattatgcttgtgttgaggggaatagtggggctgttgtgcctgtgaggagtgggaaggtgcagcaggatgaggacttgaaggattggccttggccttttcaagtttagctcgagacccagctttcttgtacaaagtggt

SEQ ID NO: 584 - DNA, 1351 bp, Glycine max
acaagtttgtacaaaaaagcaggctcctgcaggaccatgtctctctccgtaccaaagttggctcggcctcttcctctccatcatcacagttcttatggcagcctcaccatgtctttccacacattcactcccttccttggatccactcacaagcttcgcttcatttcccccattaagctcaatgctcctcgctttaattcctctgttgtatctgtctccgatcttttcaagaacaacaaacccaaatcaaccaccaatctgcttattacgaaagaggaaggtttgcagctctatgaagacatggtattaggcaggtcctttgaagacatgtgtgcccagatgtattatagaggcaaaatgtttggttttgttcacttgtacaatggccaagaagctgtgtcaactgggttcatcaactttctcaagaaagaagactgtgtagtgagcacataccgggaccatgttcatgcactgagtaagggggtccccgcacgtgctgtaatgagtgagctctttgggaaggccacaggatgctcccgaggtcaaggtggatctatgcatatgttctcaaaggagcataatttgattggtgggtttgctttcattgctgaaggaatccctgtggccactggggcagcattttccagcaagtatagaagggaggtgctgaaagaggcagattgtgatcatgtgacattggcgttttttggagatggaacatgtaacaatggacagttctatgaatgcctaaacatggcagctttatggaaattgccaattgtgtttgtggtggaaaacaatctgtgggctattgggatgtcacatctcagggcaacttcagatcctcagatatggaagaaaggtccggcatttggaatgcctggggttcatgttgatggtatggatgttttgaaggtccgagaggtggcaaaggaggctatcgaaagggccagacgaggagagggaccaactttagtagaatgcgagacttatagatttagaggacattcattggctgatcctgatgagcttcgtgaccctgctgagaaggcacattatgccggtagggatcccatctctgcactgaagaaatacatgattgagaacaaattagccagtgaacaagagttgaagaccatagataagaagatagaggaggttgttgaggatgctgttgagtttgcagatgagagccctcatccaccccgcagccagcttctagagaatgtctttgctgatccaaaaggttttggaattggacctgacggcaagtacagatgtgaggacccaaaattcacggaaggcacggcgcatgtctagctcgagacccagctttcttgtacaaagtggt

SEQ ID NO: 585 - DNA, 1905 bp, Zea mays
atggacggatgtgattgcatcgagccactatggcctaccgatgatctccttgtcaagtatcagtacatctcagacttcttcatagccctcgcgtacttctctattccgttggagctcatatatttcgtgaagaagtcgtccttcttcccgtacagatgggtcttgatccagtttggtgcgtttatagttctctgtggggcaacccatctgataaacctgtggacgttcaccacacatacaaagaccgttgcgatggtcatgaccatagcaaaggtttctacagcagttgtgtcctgtgcaactgctttgatgcttgttcatatcatccccgacttattgagcgtgaaaactagagagttgttcctgaagaataaagctgaagagcttgacagagagatgggactgataaggacgcaggaggagaccggtagacatgttaggatgcttacacatgaaatcagaagtactcttgacaggcatatgattttgaagactactcttgttgagctaggaaggaccttgggtctggaggaatgtgcattgtggatgccatctcgaagtggttcaagccttcagctttctcatactttgcaccaccagattactgttggatcatcggtgccaattaatcttcctgtcatcaatcaagtgttcagtagcaaccgggcaattataataccccacacatctcctttggcgcggattcgacctcttacagggcgatatgttccaccagaagtggctgcagtccgtgtacctcttctccacctttcaaacttccaaataaatgattggcctgagctttcggcaaaaagctttgcaatcatggttttgatgcttccatctgatagtgcaagaaaatggcatgtacatgaattggagctggttgaggttgttgctgatcaggtagcagttgcactatctcatgcggctattcttgaagagtccatgcgagcacgtgatttactaatggagcagaatgttgccctggatttagctcgaagagaggctgagatggctatccgtgctcgcaatgattttctagctgttatgaatcacgaaatgagaacacccatgaatgcaataatagccctttcctccttgcttttggaaactgagcttactcctgagcagcgtctaatggtggaaacagtactgaaaagcagcaatctgttagcaacactcatcaatgatgtgctagatctttccaaactcgaggatggaagccttgaactggagattaaagcattcaatcttcatgctgttttcaaagaagtgatgggtttcattaaaccaattgcatctatcaagaggctatctgtatcggttatgttggcaccagatttgccgttatgtgccattggtgatgaaaagagactcatgcaaactattctgaacatctctggcaacgctgtaaagtttaccaaggagggacacatcacacttgtagcttccattgtgaaggctgactctttgagagagttcagaaccccagaatttcatccaactgcaagtgatgaccatttctatttgaaagttcaggtaaaagatacaggctgtggaattggtccacaggatctacctcatgtatttacaaagtttgctcatcctcaaagcggaggaaaccgagggtttaatggtagtggtcttggccttgccatatgcaagaggtttgttagtctcatgggagggcacatctggattgacagcgaaggaaccggaagaggttgcaccgcaacattcgtcgtcaagctcggcgtgtgtgacaacacaaacacctaccagcagcagctgatccctctagtatggccaagcagcgcagactccgatttgcgtgctccgaaacctcttccggacgggagaggatctactcccttgaaatcccggtaccaaaggagcgtatag

SEQ ID NO: 586 - DNA, 1357 bp, Zea mays
acaagtttgtacaaaaaagcaggctcctgcaggaccatgaccggcacggtgtctaagctggcggcgccccgtccggcggcaccgccgctccggccggcgtccctccgcaccgccgccctcgccttcgccccctccgcgcgccgggtccgcgtctccgtcgccgggcgagccaggagccccatcattgcgatggcttcggccaaggaaggaaatggtgcaccgaccaagaggactgcgcttcatgatctctacgagctccagggcctgtccccgtggtacgacaacctatgccgccctgtcacagacttgctgcccattatcgccagcggcgtccgtggagtcaccagcaacccaacgattttccaaaaggccatttcatcgtccagcgcatatgatgatcagttcaagcagctcatttcggctggaaaggacgcggagagcgcttactgggaactcgttataaaggatatccaagatgcgtgcaaactttttgagcccatctacgatgagactgatggggctgatgggtatgtctccgtagaggtgtctcctaggttggcaaatgacactcaaggaactgttgaagcggcaaagtggttacacaaagtggtcaaccgccccaatgtctacataaagatcccagctactgcagaatgtgttccttccatccaggaagttatcgctaatggcattagcgtcaacgtcacgcttattttctcaattgcaagatatgaggctgtgattgatgcttacctcgatgggctagaggcttctggcttgagtgacttatcccgagttactagcgttgcatccttctttgtcagccgagtggacacccttattgacaaaatgcttgacaagattggaacacctgaggcccttgccttgagaggaaaggctgcagtagcacaggccaaactagcaaatcggctctaccagaagaaattctctggcccaaggtgggaggcgttggccaagaaaggtgccaagaaacaaaggttgttgtgggcatccaccggtgtcaagaacccagcttatcctgacactctttatgtggacagtctcatcggacctgacacggtcaacacgatgcccgaccaagctttgcaagcattcatagaccacggcaccgtttcaaggacagttgatgcgaacgtgtctgaggcggaaggtgtatacagtgccttggagaagcttggcatcgactgggaagaggttggaaagcagcttgagctggaaggcgtggactccttcaagaagagctttgacagcctactcgtgagcctgcaggagaagggcaacagcctcaagatggcgagtgtgtagctcgagacccagctttcttgtacaaagtggt

SEQ ID NO: 587 - DNA, 287 bp, Zea mays
gcagtcgctgtcgttaccatggagagtgccagcaagaaggtcgcagccggtgtgttggcgctgctgcttctccagctgatggtagctccgacgacagcccgcctcctgcagcaggcggatacctcccccgtgttaggcctggacatcatggcgagggagtttggccatccagatggagccatcccctgtggtgaatcctgtgtcttcataccatgcgctacgtcagtctttggttgccgatgcgaaaacaaagtctgcgtgcacgactagaacccagcggtactcgc

SEQ ID NO: 588 - DNA, 1624 bp, Glycine max
acaagtttgtacaaaaaagcaggctcctgcaggaccatgccagcagtgaactctaaggtttattacttccctcagggtcatgctgagcatgcatgtggaccagttaacttcaggacttgtcctaaggttccaccttttgttccatgtagagtgactgctgtcaaatacagggctgatcctgagaccgatgaagtctatgccaaactcaagctcattcctctgaatgccaatgatgttgattatgatcgtgatgttgttggtggggctgaaactcaggacaagcctgcttcatttgcaaaaaccttgacccaatctgatgccaacaatggtgggggattttctgttcctaggtattgtgcagagacaattttccctcgtttggactactcagttgaccctcccgttcaaaacatccttgccaaggatgttcatggagaaacatggaaattcagacacatttataggggcacgccaaggcgacatttgttgactactgggtggagtacttttgtgaatcacaagaagcttgttgctggggactcaattgtgtttttgagggcagaaaatggggatttgtgtgttgggattcgacgagcgaagaagggaatttgtggtggacttgagacttcctcagggtggaatcctgcaggaggaaattgtcatattccttatggtggattttcgcccttttttagggaggatgataatagaatctcgagaaatggcaatagcaatgggttaaaccctagtgtgagtatgatgggaaagggaaaagtcaggccagaagcagtttctgaagcttcaaatcttgcagccaataagaaacccttcgaggttgtttactaccctcgagcaagtactcccgagttttgtgtaaaggcctccctagttgaagcagcactacagattaggtggtgttctggaataaggttcaagatggcctttgaaacagaagactcctcacggataagttggtttatgggaactatatcttcggctcaggttgctgatccccttaactggcctaactcaccttggaggcttctccaggttacatgggatgaaccggatttacttcaaaacgtgagaagggtgagcccgtggctggttgaattggtgtcaaacatgcctgccattcatttttcccctttctcaccaccacggaagaaattgagattgcctcaacaaccagatttcccccttgatggccagattcctttgtcgacatttcccagcaaccttctaggtcctagtaacaccaaccaatttggttgtctacttgaaagtacacctgctggcatgcagggagccaggcatgctcattatggtctatccttatcggatctccacctcagtaaattgcagtcaggtctattttcgactggtttcccgtctcttgatcacgctgctacgccaatgagggtctcaaatagcataacattacaaaagcccaaccttagtgagaacgtctcttgcttactgactatggcaaattctacccagtcttcaaagaaattggatgttgggaagacaccttcgctcgtgctttttggccaaaaaattctcactgagcagcagatctctcccaagtagctcgagacccagctttcttgtacaaagtggt

SEQ ID NO: 589 - DNA, 1279 bp, Oryza sativa
acaagtttgtacaaaaaagcaggctcctgcaggaccatgtcgttcaggagcctgatccaggagatgagggacgagttcgggagcatctcgcggcacagcctgcggtcgcggtcccaccgcggcggcggcggcgcgccgcgggtggcggcggtggggccggcggaggcggcggcgatgcagcagagctgctgggcgcagctgccgcccgagctgctccgggaggtgctggtgaggatcgaggagtcggaggtgtggtggccgtcgcggagggacgtggtggcgtgcgccggcgtctgccggagctggagggggatcaccaaggagatcgtccgcgtcccggaggcgtccggcaagctcaccttccccatctcgctcaagcagcctggcccaagagacggcactcttaaatgtttcataagaagaaaccggactactcagacatattatctgtatattgggctcacagaagcacttgccgatgatgggaagttcctacttgctgcacgcaaatgcaggaagcccacatgcacagactacctgatttcccttgacatgagtgatatgtcaaaggggagcaacacctatattggcaagctaaggtcaaactttctcggaacaaagtttaccgtctatgatgcccatccaccatatgatggagctgttgtctcaaaaagtcggtctgcacgtgtggttggtctgaaccaagtctccccgagagttcctgccgggaattacccagtttcacatatttcctacgaattgaatgttttgggtgcaagaggtccaagaaggatgaactgcattatggattccatccccacatcagctgttcaagagggtgggaaagctccgacacagactgaatttcctctcagtggcctcgactctttcccatcaatttcattcttcagatcaaaatcagctcgaatagatagtgcaacttcacaattatccactcagaaggaagaaaagctggttctgaagaataaatctcctaggtggcatgagcaactgcaatgttggtgcctcaacttccgtggacgggttactgttgcctcagtgaaaaactttcagctggtggcgtctgatgaaaatgggccaactaaccaggagcaggacaaggtgattctccagtttggaaagattgggaaggacttgttcaccatggactaccgttatccgatatcagcatttcaatcatttgcaatctgtctgagcagttttgataccaaaatagcctgtgaatagctcgagacccagctttcttgtacaaagtggt

SEQ ID NO: 590 - DNA, 461 bp, Oryza sativa
gcagtcgctgtcgttaccatggaggacgacaagagtaaggaggggaaatcgtcgtcgtcgtaccgcggcgtgcggaagcggccgtggggcaagttcgcggcggagatccgcgacccggagcgcgggggagcccgcgtgtggctcggcacgttcgacaccgcggaggaggccgcgcgggcgtacgaccgcgccgcattcgccatgaagggcgccacggccatgctcaacttcccgggagatcatcatcacggcgccgcaagcaggatgaccagcaccggctcttcttcgtcctccttcaccacgcctcctccggcgaactcctccgcggcggcgggccgcggcggctccgatcggacgacggacaaggtggagctggagtgcctcgacgacaaggtcctggaggacctcctcgcggagaccaactatcgtgataagaactactagaacccagcggtactcgc

SEQ ID NO: 591 - DNA, 1561 bp, Glycine max
ggtaccggcgcgccaccatggaggcaccatctcccaccaaacccaacgacccaacaaaaccttccaacacttccaccacccttagtctggaggccggcccggcccaagcgagcccactccgaaaaatgtttgccgtggcgtccatcgccgccggcatacagttcgggtgggctctccagctctctcttctaaccccctacgttcagcttttaggagtcccccacgcggcggcctccttcatctggctctgcgggcccatctccgggctcgtggtacagcccattgtgggctactacagcgaccactgtacctcccgctttggtcgcaggcgcccctttattctcgggggcgccttagccgtcgccgtcgccgtgttcctcattggttacgcagccgatataggatacgcggcgggcgacgacatatcgaaaacgacccgaccccgagcggtcggggtcttcgtcataggattttggatcctagacgtggccaacaacatgcttcaaggaccctgtcgcgcctttctagcagacctagctgccggcgaccaacgaaaaacaagaattgctaacggttttttctcgtttttcatggccgtgggcaacgtgctaggttacgcagcagggtcctacaaaggtctccacaagatgtttcccttcacggagaccaaggcctgcgacgtgttctgcgcaaatctcaagagctgcttctttttctcaatcctcttgctgctgtttttagcaacggttgctctgctctacgtaaaggacaagcaagtggaagcacgggccttggatgacgccacgcaaccctcgtgcttctttcagcttttcggtgctctgaaagagctcaagagaccgatgtggatgctgatgctggtgacagctgtgaactgggtggggtggttcccttactttttgttcgacaccgattggatggggcgcgaggtgtacggtggtcaagtgggggaggacgcgtacgccaatggagtgcgcgttgggtcgctagggctgatggtaaacgccgtcgttttgggcttcatgtcgctggcggtggagccgttggggaagatggttgggggagtgaagaggctgtgggcgattgtgaactttattctggcaattgggttcggaatgacggtggtgatcaccaaggtggcggagcaccagcgcaagatgaatcccgccgccgtgggtcacccctccgaaggggtggtggttgggtccatggttttctttggggttctcggagttcctcttgcgattactttcagtgttccatttgctctagcatcaatatactgcagcgcttcaggagcaggccaaggtttatctttgggagtcctcaatcttgcaattgtggtgccacagatggtggtgtctacattaagtggtccttgggatgctttgtttggtggtggcaacttgccggctttcatggtgggtgccgcggcggccgcattgagcgccataatggcgattgtcttgctgccaactccaaagccagctgatgaggccaaggcttcaagcatgatggcagggggctttcactaggcgatcgc

SEQ ID NO: 592 - DNA, 1561 bp, Glycine max; identical to SEQ ID NO: 591

SEQ ID NO: 593 - DNA, 2027 bp, Synechocystis sp. PCC 6803
gcagtcgctgtcgttaccatggggacttctgtgtccaatccaacggcgattttgcagactatgcagggttttctgcgtaaatggtggtctgagttcaacctacaaacccggttgatggccgcggccaccttggtggtgtccctgttaatgagtgggctaactttttgggcagtaaatacgatccaagaggatgcccaattggtggatacccgttttggccgggatgtgggtttgttgttggcggccaatgttgcccctatgattgcggataaaaatctgacggaggtggcccggttttccagtcgcttttacgaaaatacttctaatatccgctacatgatctatgcggacccctctggcaagatcttttttggtattccctactctgaagaaacggttcaaaactccctcaccctagagcggcgcatcgaattaccccagattgatccccataattttgaccagccttttgtacggcaacaccacactcccaatggcgatgtcaccgatgtgtttattcccctccaataccagggcaagttcctcggagttctggcgattggtatcaaccccaaccccgctgcggtcaactcttctaacctaaccagggatgtgaccattgcagtttttatttccatttgggtgatggtaattctcggagctgtattcaatgccctaactattacccagcccattaaagaactgctgctaggagtaaagaacatcgctgctgggaacttcaagcagagaatcaccttgccctttgggggagaattgggggaattaatcgttaacttcaacgagatggcggagcggctggagcgttatgaagcccaaaatattgaagagttgactgcggagaaggcgaagctagacacccttgtttccacgatcgccgatggggccatgttagtggacaccaatttgcaacttttgttggtcaatcccactgcccgtcgcctattcgcctgggaaaataagccaattattggcgaaaatctcctggaaaatttgccaccggaaatcacggcccaacttacccaacccctgagggaattggccgctgaccaaggaagtttgctgttttcccccggccatgggcctcaggaagaggagcaggataaaacctacgccccggaagaatttcgcattagcctgacccaaccgtttccccgcaccattcgtctgatgttgacccaggtgttggatcagaacagggaaaatttacggggcattgtcatgacggtgcaggatattactagggaagtggaattaaatgaagccaaaagtcagttcattagcaatgtttcccacgaattacgaactcccttgtttaatatcaaatccttcattgaaaccttgagtgagtttggggaagatttgagcgaagtggagcgtaaagaattcctagaaaccgctaaccacgaaaccgatcgcctgagtcgtttggttaacgatgtccttgatttatccaagctagagtcttccaaaatttaccagttagatgcagttgatttgtaccagctaattgaacaaagcttacgtagttaccaacttaatgctaaggacaaacaactacagttagaaaaaattttggacccggatctccccttcgctctgggtaactacgacctactcctgcaggtaatgaccaatttaattggtaattcgtttaaattcactaaagccggcggaaaaatcattgtccgagcctatcccctccaccgtagtaaccttagagcagaggatggtcctggcctagtacgggtggaaatttctgacactggcatcggcattgacccagaggatcaggcggccatttttgagcggttctatcgggtggaaaaccgggttcacactttggagggtactgggttggggctttccattgtcaaaaatatcattgccaaacatcaaagccaaatccatttagtcagtgaggtgggggtgggtactactttttggtttgatctggccgtgtatcaatccatgttgatggtggtgggctagaacccagcggtactcgc

SEQ ID NO: 594 - DNA, 356 bp, Zea mays
gcagtcgctgtcgttaccatgatgaagaagaagatctcaatgcctgcccacctgatgtttgacggtcaggacgacaagctgtttgagcacttctccatggtcgcgcagaggcttggcgtttacactgccagggactacgccgacattcttgagttccttgttgacaggtggaaggtggcggacctgactggtctgtcgggtgaggggaacaaggcgcaggactacctctgcacccttgcttcaaggatccggaggctagacgagagggcccagagcagagccaagaaagcaggcacgctgcctttcagctgggtatatggtagggaagtccaactgtagaacccagcggtactcgc

SEQ ID NO: 595 - DNA, 200 bp, Zea mays
gcagtcgctgtcgttaccatggagaaggcgcagaacgaggtggccaaggcgcggcggaaggcggaggagaagcgcgcgtccgcggaggccaagcggggcaccaaggtggcgcgagtgctggagctcgccaacttcatgagggccgtggggagggcgccctccaccaagcgctccttcttctagaacccagcggtactcgc

SEQ ID NO: 596 - DNA, 311 bp, Zea mays
gcagtcgctgtcgttaccatgccggcgtgcgtgccgggcctcgcccccgccgtcgtcctcgccaactacaccaagtcgcagtacaaccggttcctcaacgacagccagttctccggcgccgggatcgcgagcgagggcgactgggtcgtggtcgtgctcagcaccagcacgggatccggcgactactcgccggctccgccgggctccaactgggcggtctcggcggctcggccgttcggcttcggccagctggtccttttgttggtggggtttgtagttttgctggtgaagtagaacccagcggtactcgc

SEQ ID NO: 597 - DNA, 428 bp, Zea mays
gcagtcgctgtcgttaccatgcagcgtgttatgcaaaataatgctgctgtattccgtacacaagaaacacttgaagaaggttgtgagctgattagcaaaacatgggaaagtttccatgatgtgaagctcagtgaccagagtctcatttggaactctgacctgatagagacccttgagctggaaaatcttttgataaatgcatgcataaccatgtattcggcagaggctcggaaggaaagcagaggagctcatgctcgtgaggatttcacgacaagagatgacgagaagtggatgaagcactcactggggtactgggaaaacgagaaggttcgattggcatacaggccagtgcacatgaacacattagacgatgaagtagagtccttcccgccgaaagcccgtgtctattagaacccagcggtactcgc

SEQ ID NO: 598 - DNA, 806 bp, Arabidopsis thaliana
gcagtcgctgtcgttaccatggagggaattactcatccaatacctcgtactgttgaagaggtctttagcgacttcagaggtcgacgagctggtcttattaaagctctcactaatgatatggtgaagttttaccaaacgtgtgatcctgagaaggagaatttgtgtctctatggacttccaaatgagacatgggaggttaatctacccgttgaggaagttcctcctgagcttcctgaaccagctttaggcatcaatttcgctagagacggaatgcaagaaaaggactgggtatctttggtcgcagttcacagtgattcatggctgctttctgttgcattttactttggtgcacgtttcggatttggcaagaatgagaggaagaggctgttccagatgattaatgagctgccaaccattttcgaagttgtgagcggcaatgcaaagcagtccaaggatctatctgttaacaacaataatagcaaaagcaaacctagtggcgtcaagtctcgccaatccgaatctctctcaaaggttgcaaagatgtcatctccaccgccaaaagaagaagaagaagaagaagatgagagtgaagatgagagtgaagacgatgaacaaggtgcggtttgtggtgcttgtggagacaactacggtacagatgagttctggatttgctgcgacgcgtgtgagaaatggttccatggaaaatgtgtgaagataacacctgcaaaagcagaacacatcaagcattacaaatgcccaacttgcagtaacaagagagctagaccttagaacccagcggtactcgc

SEQ ID NO: 599 - DNA, 1284 bp, synthetic construct
atggcttctatgatatcctcttccgctgtgacaacagtcagccgtgcctctagggggcaatccgccgcagtggctccattcggcggcctcaaatccatgactggattcccagtgaagaaggtcaacactgacattacttccattacaagcaatggtggaagagtaaagtgcatgcctggtcgacttcttcgttctcgcacttatcgtaactggcgttctgcagaagagctgatatctgaaataaaaagggaatcagaaattggaaggttacctaaaagtgttgcttatgctatggagggactttttcactactatcgcaatgcagtcctttcaagtggaatttctcatgctgatgaaatagtgttgtcaaacatgagtgttatgcttgattttgttttgttggatattgaggacccttttgtatttccaccgtttcacaaagctattcgagagcctgctgactattattcctttggtcaagattacattcggccattggtagattttggaaattcatatgttggtaacatcgccattttccaagaaatggaggagaagcttaagcagggtgacaacatcatcttaatgtccaaccatcaaagtgaagcagatcccgcagtgattgcattacttctggagaagacaaattcactaatcgcagaaaacttgatctacatagcaggtgatcgagttataacagatcctctttgcaagccctttagcatgggaaggaatcttctttgtgtttactctaagaagcacatgtatgatgatcccgagcttgttgatctaaagaaaagagcaaatacaaggagtttgaaagagttggtcttacttttaagaggtggttcaaaaataatctggattgcacccagtggtggaagacatcgtccacatgctgtcactggtgaatggtacccagcaccctttgatgcttcttcagtggacaacatgagaaggcttattcaacattcggatgttcctgggcatttgtttccccttgctttattatgtcatgacatcatgccccctccctcacaggtcgaaattgaaattggagaaaaaagagtgattgcctttaatggggcgggtttgtctgtggctcctgaaatcagcttcgaggaaattgctgctacccacaaaaatcctgaggaggttagggaggcatactcaaaggcactgtttgattctgtggccatgcaatacaatgtgctcaaaacggctatctccggcaaacaaggactaggagcttcaactgcggatgtctctttgtcacaaccttgg

SEQ ID NO: 600 - DNA, 480 bp, Arabidopsis thaliana
atggcttgttctgatagcaccaacactagcactgtccaagaaatcaatgccgcgtactaccaacaagaatctgctaagctgagacaacagatccaaacgattcaaaactccaacaggaatctgatgggagactctttgagttccttaagtgtcaaggaactaaaacaagttgagaatcgccttgagaaagctatctctaggatcaggtccaagaagcatgagttgcttttagttgaaatcgaaaacgcgcagaaaagggagattgagcttgacaatgagaacatctatctaagaactaaggtagcagaagtggagaggtatcaacaacaccatcatcaaatggttagtggttcagagattaatgcaattgaagctttagcctcacgcaattactttgctcatagcattatgactgctggttctggatctggtaatggaggttcttactctgatcccgacaagaaaattcttcatcacgga

SEQ ID NO: 601 - DNA, 1979 bp, Nostoc sp. PCC 7120
atgctggcgctgttaaaaacaattcgagaagcgatcgccaattggtggtcagagttcacactccagactaaactgttagccgcagccactttggtggtttccttggtgatgagtggtctcaccttttgggcggtaaacacaattcagcaagatgcccaagtgaatgacacccgttttgggcgggatttgggtctacttctggctgctaacgttgcacccctggttgctgaccataatctgactgaagttgcccaattttcccaacgcttctacagcagcacttctagtgtgcgctatatgctctacgctgatgaaactgggaaaatcttttttggcattcccttttgggaaccagaggtagaaaactccctctccattgagcgccggatacaactaccagaagagtaccctggtgacggcgaaaagccaatggtacggcaacacatgagtccagatggaattgtgactgatgtgttcattcccctaattgtcgataaaaaatacttgggtgtgttggctattggcatcaaccccaaccaaacagccgttatctccaccaatttcacccgtgatgttaccattgcggtttttattacgatttgggtcatggtgattttggcaggggtggttaatgctttgactatcactaagcccattaaagaattattggtgggggtaaaacaaatcgcggctggtaattttaagcagcgtattgatttgcccttgggaggcgaactaggagagttaattctcaattttaatgaaatggcagagcgcctagagcgctatgaagagcagaatattgaggaactaacagccgagaaagccaagctagaaaccttagtttccactattgccgacggtgctgtgttgattgacaacaatatgcaggtgattttagtcaaccccacagccagacacatttttggctgggaaggtgctgatgatgtggtgggtagtaatgtgttgcatcacctacccccggcggtacaaatggaaatcaccagaccactatacgaaatggcagccggtgaatgtgatagcgctgaatttcgcctcaccctcaaccaacccagcaaccgcacaattcgcattcttttgactacagtcctcaatctgcaacgggaaagcatcaaaggtattgccatcacggtgcaggatattacccgtgaggtggaactaaatgaagccaaaagccaacttatcagcaacgtttcccacgaactgcgaacgcctttatttaatatcaaatcttttattgaaaccctccatgactacggcgaagacttgagtttagaagaacgccaagagtttctgcaaacagttaatcatgaaaccgatcgcctaactcgtcttgttaatgatgttttagatttatctaagttggaatctggtcgtagctacagtttcgatggtgtagatttagcccaggccattgaacaaacactacgtacctatcaactcaatgctagagacaaaggtatcgaactcatccaagacgttgctcctggcctgccactagtcttagggaattacgatttactattacaagtcttagctaatttggtcggaaatgccctcaaattcactacctccggtggcaaaatagccattcgtacctatgtattaaacactaaatccaattcccccaatcagcctgcccaagtgcgtatcgaagtttctgacaccggcatcggtattgcccaggaagaccaacaggcgatttttgaccgattcttccgggtagaaaacagagtccacactttagaaggcacaggtttagggttgtcgattgtgagaaatattgtggaacgacaccgcagtagagtaaatctagttagtgaagtgggagtgggtactactttttggtttgacttaattttgtttgaggacgaagcaccaaaaaagatggttgaatctggtgaggagaaggcagcaatgccgactagttagctcgagacccagctttcttgtacaaa

SEQ ID NO: 602 - DNA, 1235 bp, Synechocystis sp. PCC 6803
atgacagctcccaccccctcctcccactcagttccaattcaggaatttactgcctccaggcaggccagtttctttgatggactgaagcaaccccgttttagcggccaactaatcctctccagtgcaacgggggagaaatggtctttttatctctacatgggtcggatcatgtatgccaccggggggattcactccgtccgccgttggcgccgacaaattgcttcctatctgccccccattgccgccaacctggcctcggtgcaaaccgatttggccagcattgatccccaagatttacaaatttgctgggaatatcaactgctctgccactgggtagctcagcagaaagttaccagggagcaggccgctcggctgattcgggccacggtggtggaagtactgtttgacattacccaatccatggaagtggcctgtgatctacgccaggataatttgctttccactaggctggtgctgattgacgcggatcagatgattgcggaatcccagcagttatggagcaaatggcagggggccaagattgcagaccgctcccccaatgcggcccctatcattcgtcaggcggaacagttacagcaacgcaccactccccaggtataccaaaccctcaaacagttgctggatggtaatcagtcccttcgggacttgtcggtgcggatgaagcgagatgtgctgagtgtgaccacttctttgttgccctatctacagttggggttggtggaattgattaaaattcccgatttgcccccgcccattgcgcccccagtgaggggcgtggtggctcagcctgatgtgcccagtggtcccctgatcgcctgtgtggatgacagtcctttgatctgccaaaccatggaaaaaattcttactacagccaattatcggtttgtaggaatcaatgatcccctacgggcgatcgccattcttctggcccggaagccggatttgattttcctcgatttggtcatgcccaacgccaatggctacgaaatttgtgggcaattgcgtaaattgtccatcttcaaaagtactcccattgtcatcctcaccggcaatgatggcattgttgaccgagtgcgggccaaaatggtcggctccacagattttttaagtaagcccgtcaacccggacatggttttgcagactattaaaaaacatctccatgaccaggcatcgctgccagcggaatagctcgagacccagctttcttgtacaaa

SEQ ID NO: 603 - DNA, 969 bp, Saccharomyces cerevisiae
atgaaaccgacacaggattcacaagaaaaggtttctattgaacagcagttagctgtagaatcgataaggaagtttttgaactcgaaaacatcttatgacgtgttgcctgtttcttaccgtttaattgtcttggacacctcgttgttagtgaagaaatcactgaatgttcttttgcaaaatagcattgtctctgcgccattatgggactccaagacttccaggttcgctggacttctaactactacagattttattaatgtcatccagtattacttctccaatccagataagttcgaattagtagacaaattacagttagatggattaaaagatatagagcgtgctctcggtgttgatcaactagatacagcttcaattcatccttctagacccttatttgaggcgtgtcttaagatgttagaatcaagaagtggtagaataccactgatcgatcaagatgaagagacacatagagaaattgtcgttagtgttcttacgcaatatagaattctgaagttcgttgctttaaattgcagggaaacacattttctaaagattccaattggggacttgaacattattacgcaagataacatgaaaagctgtcaaatgaccactccggtcatagacgtcattcagatgcttacccaaggtcgggtttcttccgtccctattattgacgaaaacggctacttaatcaacgtatatgaagcatacgatgtcctaggcttgataaaaggaggcatctacaacgacctgtcattgagcgtcggagaagcccttatgaggagaagtgatgattttgagggtgtttatacatgcactaagaatgataaattatctactattatggataacatcagaaaagcaagggtgcatagattctttgtagttgatgacgtcggacggttggttggtgtcttgacgttaagcgatattctcaaatatatccttctaggtagcaactag

SEQ ID NO: 604 - DNA, 1248 bp, Saccharomyces cerevisiae
atgggtactacgacaagtcatccagcccaaaaaaagcaaacaacaaaaaagtgtcgtgcacctatcatgagtgacgttagagaaaaacccagcaatgctcaaggctgcgaaccgcaagaaatggatgctgtgagcaagaaagttactgaactgagcttaaataaatgttcagattcccaagacgcggggcagccttcaagggagggatctattaccaaaaaaaaatcgacgttattgctgcgtgatgaggacgagcccactatgccaaagctatctgttatggaaactgctgtggacactgactctgggtcttcgtctactagcgatgatgaagagggagatattattgcccagacgacagagcccaagcaagatgccagtcctgatgatgatcgctcaggccattcttcgcccagagaggagggacaacagcaaatacgtgccaaagaagcttcgggaggtccaagtgaaatcaagagctcattaatggttcccgtggagataaggtggcagcaaggtggttcaaaagtttacgtgacaggctcattcaccaaatggaggaaaatgatcggtttgatacctgattctgacaataatggctcatttcatgtgaagctaaggctgcttccaggcacacatagattcagatttatagtggataatgagcttagagttagtgatttcctgcccacagcaactgatcagatgggaaacttcgtcaattacatagaagtcaggcaaccagaaaaaaacccaactaacgaaaagataaggtccaaggaagcagattccatgcgacctcccaccagcgatcgatcctcaattgctctacaaattggtaaggatccagacgattttggtgacggatatacaaggtttcatgaagatctgtcacccagacctccgttggaatatacaacagacattcccgccgtgtttactgacccgtctgtcatggaacgatactattataccttggatcgtcagcaaagcaatactgatacgtcatggctgacaccaccccaattacctcctcagttggagaatgttatcttgaataaatactatgccacgcaagaccagttcaacgagaacaactcaggcgctctgcccattccgaaccatgtggtgcttaaccacttggttactagtagcattaagcacaatacactttgtgtagcctccatcgttcgatataaacagaaatatgtcacccagattctttatacgcccatagagtcctcgtag

SEQ ID NO: 605 - DNA, 522 bp, Arabidopsis thaliana
atggctcagccgcaaacagacgttttcagcctccataactacctaaactcatcgatactgcagtctccgtatccttctaatttcccgatatctacgccatttccaaccaacggtcaaaacccgtacctcctctacggattccaaagccctacagacaatccacaatccatgagcctaagcagcaacaactcaacatcagatgaagcagaagagcagcagacgaacaacaatataatcaacgagcggaagcagagaaggatgatttcaaaccgagaatccgcaaggagatcgcgtatgaggaagcaaagacaccttgacgagctttggtcacaagtgatgtggttaaggatcgagaatcatcagttgcttgataagcttaacaatctctctgagtctcacgacaaggttcttcaagagaatgctcagcttaaagaagaaacatttgagcttaagcaagtgatcagcgatatgcaaattcaaagccctttctcttgctttagagacgatataatccccattgaa

SEQ ID NO: 606 - DNA, 972 bp, Arabidopsis thaliana
atggataatataatgcaatcgtcaatgccaccgggattccgatttcatccgacagaggaagagcttgtgggttattacctagataggaagatcaattcaatgaagagtgctttagatgtcattgtagagattgatctctacaaaatggagccatgggatatacaagcgaggtgtaaactagggtatgaagagcaaaacgagtggtacttctttagtcataaggacaggaagtaccctaccgggactaggaccaaccgagccactgcggctgggttctggaaagccacgggtagagacaaggcggtactatcaaaaaacagtgtcatcggaatgcggaagacacttgtctactacaagggtcgagctcctaatggaagaaagtccgattggatcatgcacgaataccgtctccaaaactccgagcttgccccggttcaggaggaaggctgggtggtgtgtcgagcatttaggaagccaattccaaaccagaggccattagggtacgagccatggcagaaccagctctaccacgtcgaaagtagtaacaactactcatcttcagtgacaatgaacacgagtcatcatatcggtgcatcttcatcaagtcataaccttaatcaaatgctcatgagcaataaccactacaatcctaataatacatcctcatcgatgcatcaatatggcaacattgagctcccgcagttggacagcccgagcttgtcgcctagtttagggacgaataaagatcagaacgagagtttcgagcaagaagaagagaagagctttaactgtgtggattggagaacactagataccttgcttgagacacaagtcatacatccgcataaccctaatattcttatgttcgaaacgcagtcgtataatccggcgccaagcttcccttccatgcatcaaagctataatgaggtcgaagctaatattcatcattctcttggatgcttccctgactcg

SEQ ID NO: 607 - DNA, 807 bp, Arabidopsis thaliana
atggctcattatcctaacaacagaaccgaattcgtcggagctccagccccaacccggtatcaaaaggagcagttgtcaccggagcaagagctttcagttattgtctctgctttgcaacacgtgatctcaggggaaaacgaaacggcgccgtgtcagggtttttccagtgacagcacagtgataagcgcgggaatgcctcggttggattcagacacttgtcaagtctgtaggatcgaaggatgtctcggctgtaactactttttcgcgccaaatcagagaattgaaaagaatcatcaacaagaagaagagattactagtagtagtaacagaagaagagagagctctcccgtggcgaagaaagcggaaggtggcgggaaaatcaggaagaggaagaacaagaagaatggttacagaggagttaggcaaagaccttggggaaaatttgcagctgagatcagagatcctaaaagagccacacgtgtttggcttggtactttcgaaaccgccgaagatgcggctcgagcttatgatcgagccgcgattggattccgtgggccaagggctaaactcaacttcccctttgtggattacacgtcttcagtttcatctcctgttgctgctgatgatataggagcaaaggcaagtgcaagcgccagtgtgagcgccacagattcagttgaagcagagcaatggaacggaggaggaggggattgcaatatggaggagtggatgaatatgatgatgatgatggattttgggaatggagattcttcagattcaggaaatacaattgctgatatgttccag

SEQ ID NO: 608 - DNA, 939 bp, Arabidopsis thaliana
atggctaagagatcacgtggaagctccgattctttatccggtttcttaccaattcgccattctacaacagacaaacaaataagcccaagaccaacaactaccggctttctctattccggcgccggagactactcccagatgtttgacgcattagaagacgacggaagtctagaggacctcggcggcgttggacacgcgtcttctacggcggcggagaaaaaacggcggttgggtgtagagcaagtgaaagcgttagagaagaatttcgagattgataacaagttagagccagagaggaaagtgaagctggctcaagagcttgggttgcagccacgccaagtcgcgatctggtttcaaaaccgccgtgctcggtggaagacaaagcagcttgaacgtgattacggcgttcttaagtcaaactttgatgcactcaaacgcaaccgcgactcgcttcaacgcgataacgattcactccttggacagattaaagagctgaaagcaaaacttaacgtggaaggggttaaaggtatagaagagaacggcgctttaaaagcagtggaagcaaatcaatcggtgatggctaataatgaagtcttagagctaagccaccgttctccatcgccaccaccgcatattcctacggacgctccgacatcggagctcgcattcgaaatgtttagcatttttccacgcacggaaaacttcagagacgatcctgccgatagcagcgactcaagcgcggttttgaacgaagagtatagtcccaatacggttgaagcagctggcgcagtggcggccacgactgtagaaatgtcgacggtgggttgttttagccaattcgtgaaaatggaagagcatgaagatctgtttagtggagaggaagcttgcaagttgtttgcggacaatgagcaatggtattgctccgatcagtggaattcg

SEQ ID NO: 609 - DNA, 810 bp, Arabidopsis thaliana
atggccctcgaagcgatgaacactccaacttcttctttcaccagaatcgaaacgaaagaagatttgatgaacgacgccgttttcattgagccgtggcttaaacgcaaacgctccaaacgtcagcgttctcacagcccttcttcgtcttcttcctcaccgcctcgatctcgacccaaatcccagaatcaagatcttacggaagaagagtatctcgctctttgtctcctcatgctcgctaaagatcaaccgtcgcaaacgcgatttcatcaacagtcgcaatcgttaacgccgccgccagaatcaaagaaccttccgtacaagtgtaacgtctgtgaaaaagcgtttccttcctatcaggctttaggcggtcacaaagcaagtcaccgaatcaaaccaccaaccgtaatctcaacaaccgccgatgattcaacagctccgaccatctccatcgtcgccggagaaaaacatccgattgctgcctccggaaagatccacgagtgttcaatctgtcataaagtgtttccgacgggtcaagctttaggcggtcacaaacgttgtcactacgaaggcaacctcggcggcggaggaggaggaggaagcaaatcaatcagtcacagtggaagcgtgtcgagcacggtatcggaagaaaggagccaccgtggattcatcgatctaaacctaccggcgttacctgaactcagccttcatcacaatccaatcgtcgacgaagagatcttgagtccgttgaccggtaaaaaaccgcttttgttgaccgatcacgaccaagtcatcaagaaagaagattatctt

SEQ ID NO: 610 - DNA, 786 bp, Arabidopsis thaliana
atgggttctattagaggaaacattgaagagcctatatctcagtcattaacgaggcagaactctctctatagcttaaagctccatgaggttcaaacccacttaggaagttctggaaaaccactaggaagcatgaaccttgatgagcttctcaagactgtcttgccaccagctgaggaagggcttgttcgtcagggaagcttgacgttacctcgagatctcagtaaaaagacagttgatgaggtctggagagatatccaacaggacaagaatggaaacggtactagtactactactactcataagcagcctacactcggtgaaataacacttgaggatttgttgttgagagctggtgtagtgactgagacagtagtccctcaagaaaatgttgttaacatagcttcaaatgggcaatgggttgagtatcatcatcagcctcaacaacaacaagggtttatgacatatccggtttgcgagatgcaagatatggtgatgatgggtggattatcggatacaccacaagcgcctgggaggaaaagagtagctggagagattgtggagaagactgttgagaggagacagaagaggatgatcaagaacagagaatctgcagcacgttcacgagctaggaaacaggcttatacacatgaattagagatcaaggtttcaaggttagaagaagaaaacgaaaaacttcggaggctaaaggaggtggagaagatcctaccaagtgaaccaccaccagatcctaagtggaagctccggcgaacaaactctgcttctctc

SEQ ID NO: 611 - DNA, 1583 bp, Saccharomyces cerevisiae
aaaaaagcaggctcctgcaggaccatgacaatgacacaccaacaggatttgaaaggtgtgttcaccgcaaaggatttggattttaagcccgctggcaagattactaaaaaagatttgaatacaggtgtcactaaggcagaatatgctgtaagaggagctattccaaccagagctgacgagctaaaagaggaattgaaaaaaaacccagaagttttgcctttcgatgatattatcaatgcgaacattggtaatccgcagcaactggatcagaagcctttgacctttaccaggcaagtactggccatcctggagtacccggaaattttacgagtaggccataatgaactggcttctttgaacttgttttccagggacgccttggaaagagctgagcgcctcttgaatgatattggcggttctataggggcatattcgcattctcaaggtgtgccaggaataaggcaaacagttgctgacttcattactagaagagacggcggtgagcccgctacaccggaagatatttatttaaccactggcgcttcgtccgcggcaacttctttgttatctttattgtgtaaagattctcaaacaggcctgctgattccaattccgcagtatccgctttatactgcatccgcatctcttttcaatgcacaagtgctgccatactacttagatgaggagtcaaattggtctacaaacagcgacgaaattgaaaaagtagtgcaagatgctttgaaaaaacagatcagaccatctgtgctgatagttattaatccaggtaacccaaccggtgcagttctttctgaagaaaccattgccaggatctgtttgatcgctgcgaaatacggcattacaatcatttctgatgaggtctatcaagaaaacattttcaacgatgttaaatttcattcgatgaagaaagtcctaagaaaattgcagcatctttatccaggaaaattcgataacgttcagctcgcctctttacactccatttctaaaggattcatggatgagtgcggccaaagaggcggttacatggaaattattgggttttctcaagaaataagagatgctcttttcaaactcatgtctatatccatatgttctgttgtcacaggacaagctgtggttgatttaatggtcaaaccaccccagcctggagacgagtcctatgaacaagatcatgacgaaaggctgaaaatttttcatgaaatgcgtacgagagcaaacttattgtacgagacgtttaaggaactagagggtatcgaatgccaaaaacctcagggtgcaatgtatcttttccctaggcttgttttacctaagaaagctctttgtgaaagcgaacgccttggcatcgaacctgatgagttctattgcacatctttgctagaatctacaggtatttgtactgtcccagggtctgggttcggacaaagacccgggacttatcatgtgcgaacaacgtttttggctccagggactaaatggattcaagactggaaagaatttcatcaagatttcttcagcaagtatcgtaattagctcgagcctgcagggacccagctttcttgtacaaa

SEQ ID NO: 612 - DNA, 1222 bp, Saccharomyces cerevisiae
atgttgagaactcaagccgccagattgatctgcaactcccgtgtcatcactgctaagagaacctttgctttggccacccgtgctgctgcttacagcagaccagctgcccgtttcgttaagccaatgatcactacccgtggtttgaagcaaatcaacttcggtggtactgttgaaaccgtctacgaaagagctgactggccaagagaaaagttgttggactacttcaagaacgacacttttgctttgatcggttacggttcccaaggttacggtcaaggtttgaacttgagagacaacggtttgaacgttatcattggtgtccgtaaagatggtgcttcttggaaggctgccatcgaagacggttgggttccaggcaagaacttgttcactgttgaagatgctatcaagagaggtagttacgttatgaacttgttgtccgatgccgctcaatcagaaacctggcctgctatcaagccattgttgaccaagggtaagactttgtacttctcccacggtttctccccagtcttcaaggacttgactcacgttgaaccaccaaaggacttagatgttatcttggttgctccaaagggttccggtagaactgtcagatctttgttcaaggaaggtcgtggtattaactcttcttacgccgtctggaacgatgtcaccggtaaggctcacgaaaaggcccaagctttggccgttgccattggttccggttacgtttaccaaaccactttcgaaagagaagtcaactctgacttgtacggtgaaagaggttgtttaatgggtggtatccacggtatgttcttggctcaatacgacgtcttgagagaaaacggtcactccccatctgaagctttcaacgaaaccgtcgaagaagctacccaatctctatacccattgatcggtaagtacggtatggattacatgtacgatgcttgttccaccaccgccagaagaggtgctttggactggtacccaatcttcaagaatgctttgaagcctgttttccaagacttgtacgaatctaccaagaacggtaccgaaaccaagagatctttggaattcaactctcaacctgactacagagaaaagctagaaaaggaattagacaccatcagaaacatggaaatctggaaggttggtaaggaagtcagaaagttgagaccagaaaaccaatagctgagcctgcagggacccagctttcttgtacaaa

SEQ ID NO: 613 - DNA, 390 bp, Zea mays
atgcatgggcggtggttgcagacggtgaacatcaaggtgaagatggactgcgaaggttgcgagcgtcgcgtgaagagcgcggtgaagtcgatgcgcggcgtgacgagcgtgacggtgaacgcgaagcagagcaagtgcacggtgaccgggtacgtggagcccgccaaggtgctggagcgcgtcaaggccaccggcaagaacgccgagatgtggccctacgtgccctacacgctcaccacctacccctacgtcggcggcgcctacgacaagaaggctcccgcgggcttcgtccgcagcgcgccgcaggccatggcagaccccagcgctccggaggtcaagtacatgtccatgttcagcgacgagaacgtcaacgcctgcaccatcatgtag

SEQ ID NO: 614 - DNA, 264 bp, Zea mays
atggccagccgctgggtccgacccgaggtgtacccgctgttcgcggcgatgggagttgccgttggcatctgcgggtttcagctcttccggaacatcaccggcaacccggaagtcagggtaaacaaggcagggagggcagccggcgtgcttgagaaccatgaggaggggaggcgttacgccatgcatggcctcagaagctttgtgcacgacaagacccccgagatcatgccagctatcaacaagttctttactgaccccaagtag

SEQ ID NO: 615 - DNA, 1405 bp, Arabidopsis thaliana
acaagtttgtacaaaaaagcaggctcctgcaggaccatgaaaggggcaagtggtgctgttaagaagaaaccccaggtgttgaacgaagctggtgaggcggatacggcggtggaaacagtcggagaaagccggaaaattagtggagacggtgggtttggcagtgacgacggcggagggggaggtggaggtggaagtggagagtcgattcttcgcgagattggtgatgataggcctacggaggatggagatgaagaagaagaagaggacgaggatgaagatgatggaggtgatgaggaagatgaagaaggagaaggagaaggtgggcaagaggaaaggccaaagcttgatgaagggttttatgaaattgaagctattcgtcgtaagagagttcgaaaaggcaaggttcagtatctaattaaatggcgcggatggcctgaaactgccaacacatgggagcctttagagaatctccagtctattgctgatgttatagatgcctttgagggaagtttgaagccaggaaagcctggtaggaaacggaagcgcaaatatgcaggtcctcattctcagatgaagaagaagcaacgtttaacatctacatcacatgatgctactgagaaatctgactcttctacgtctctcaacaactctagccttcctgacattcctgatccactagacctaagcggttcgagtctattaaatagagatgtggaagcgaagaatgcttatgtatccaaccaagttgaagccaacagtgggagtgttgggatggcccgacaagttcgtttgattgacaatgagaaagaatatgatccaacacttaacgagctacgaggaccagtcaacaatagtaacggtgcaggatgttctcaaggaggaggcattggttctgaaggtgataatgtaagacccaatggccttctcaaggtttatcctaaggagcttgataagaacagtcgtttcataggtgctaagcggaggaagtctggttctgtgaaaagattcaaacaagatggatccacaagtaacaaccacacagcacctacagatcagaatctgacaccagatttgactacattagactcttttggtaggattgcaaggatggggaatgaatatcctggtgtgatggaaaattgtaatttgtctcagaaaaccaagattgaggagttggacatcacgaagatacttaaaccaatgagttttacagcatctgtatcagacaatgtccaggaagtgttggtgacctttttagcgctgaggtctgatgggaaggaagcattggtggacaacagatttctcaaggctcacaatcctcatctcctgattgaattctatgagcaacatctcaagtacaatcgaacgccttagctcgagacccagctttcttgtacaaagtggt

SEQ ID NO: 616 - DNA, 782 bp, Synechocystis sp. PCC 6803
aaaaaagcaggctcctgcaggaccatgagtgtcaacttagcttcccagttgcgggaagggacgaaaaaatcccactccatggcggagaacgtcggctttgtcaaatgcttcctcaagggcgttgtcgagaaaaattcctaccgtaagctggttggcaatctctactttgtctacagtgccatggaagaggaaatggcaaaatttaaggaccatcccatcctcagccacatttacttccccgaactcaaccgcaaacaaagcctagagcaagacctgcaattctattacggctccaactggcggcaagaagtgaaaatttctgccgctggccaagcctatgtggaccgagtccggcaagtggccgctacggcccctgaattgttggtggcccattcctacacccgttacctgggggatctttccggcggtcaaattctcaagaaaattgcccaaaatgccatgaatctccacgatggtggcacagctttctatgaatttgccgacattgatgacgaaaaggcttttaaaaatacctaccgtcaagctatgaatgatctgcccattgaccaagccaccgccgaacggattgtggatgaagccaatgacgcctttgccatgaacatgaaaatgttcaacgaacttgaaggcaacctgatcaaggcgatcggcattatggtgttcaacagcctcacccgtcgccgcagtcaaggcagcaccgaagttggcctcgccacctccgaaggctagctcgagcctgcagggacccagctttcttgtacaaa

SEQ ID NO: 617 - DNA, 781 bp, Nostoc sp. PCC 7120
acaagtttgtacaaaaaagcaggctcctgcaggaccatgagtagcaatctagctgttaaactgcgcgctggcactcaaaaagctcacacagcagcagaaaacgtgggattcatgaaatgttttttgaaaggcgttgtcgatagagaaagcttcgccaaatttttaagcaacttgtatttcgtctacagtgaattagaagcagcgattcaaagccatgccaacaatccggcgatcgccccgatttacttcccagaactgaatcgcctagcctctttagaaaaagacatggtattttactatggtagtgaatggcgtagcctcatcgccccctcagctagcgctcaagcttatatcaagcatattcgagagctttctgccactgcacccgctttattaattggtcatacctacacccgctacatgggcgacctttctggcggtcagatgttgcaaaaaattgctcagtcaaccttaaagctctctggctacgagggtacatccttctataactttgagcaaatccctgacaaaaaagccttcaaagaccagtatcgtcaggcattggactctgtacccgttgacgatgccacagcagatagaattgttgcagaagccaatagcgctttccagttcaatatgcaaatggctacagacctagaaggtaatttaattaaagctctcggtcaagtagtatttaatagcttgactagcaccctcaacccaggtagcaccgaagcagcagcatcttagctcgagacccagctttcttgtacaaagtggt

SEQ ID NO: 618 - DNA, 913 bp, Oryza sativa
acaagtttgtacaaaaaagcaggctcctgcaggaccatgtacactggaatccaaacccgccgcatcccggttcatgtcctgccgctccccatgtcgccgcccctcgagctcgactacataggcctctcgcctccgccgccgccgccctcctcctcctccgccgccgccgcccgcgcggacgacgtcgacctgaagggcaccgagctccgcctcggcctccctggctccgagtcgccggaccgccgccctgcggctattgccgctgccgctgccactgccaccacccttgagctgctgcccgccaagggtgccaagcgcgtgttccccgacgaggccgcgctgacgccgcccactgccgccgccgggaagggcaaggcggcgagggagggggaggaggtgggggctgaggaggaggacaagaaggtcgccgcgccgccgcagccggctgcgaaggctcaggtggtgggatggccaccaatccgcagctaccgcaagaacacgatggcaaccaaccagataaagagcaacaaggaggatgttgatgctaagcagggtcagggtttcctgtacgtcaaggttagcatggatggtgcaccatatctgaggaaggtggacctcaaaacttacaagaactacaaggacatgtctttgggtctcgagaaaatgttcattggcttcagcaccggtaaggaaggtgctgagaaccagaaagatggtgaatatgtgttaacctacgaagacaaggatggtgactggatgctggttggtgatgttccatgggagatgttcaccgactcttgccggaggctcagaatcatgaaaggctcagatgcaattggacttgccccaagagcaggggaaaagtccaagaacaggaactagctcgagacccagctttcttgtacaaagtggt

SEQ ID NO: 619 - DNA, 1007 bp, Arabidopsis thaliana
atgaccatggctcttgcttcttctaaagctttttcctcaatcttcaatactttatcaccaatcaatcagtcgaaatttgtgttagcttgctctggttcaaatcatgtagacgtcattgatcggagaagaagaatcatgatctttggctcgagtttggctctcacgtcgtctctgcttggttccaatcaacagagacttccgatggaatccgcaatcgcattggagcaattcaaagaaaaagaagaagagcttgaggaagaagaagagagaaatgtcaatctcttccagaaaacttcgccgtctgttgtttacattgaagctattgagcttcccaaaacgtcttctggtgatatactcactgatgaggaaaatggaaagatcgaagggacaggttcaggcttcgtttgggataagcttggtcacattgttacaaattatcatgttattgctaagttagctactgatcagtttggattacaacgttgtaaggtgtctctagttgatgctaagggaacaagatttagcaaggaagggaaaattgtgggtcttgatccagataatgatctagctgtgttgaagattgaaactgagggacgtgaactaaatcctgttgttctcggtacctccaatgatctacgcgtaggtcaaagttgctttgcgattgggaatccatatggatatgaaaacaccttgacaataggggtagtaagtgggttgggaagagagataccttcacctaatgggaagagtatttcagaagctatacaaaccgatgctgatattaactcaggcaattctggagggccattgcttgattcttatggccataccataggtgtgaacactgccacattcacccgaaaagggagtggtatgtcttctggtgttaactttgccattcccattgacacagttgtccgaacagttccgtacctcattgtgtatggaacagcttatagagacagattctagctcgagcctgcagggacccagctttcttgtacaaa

SEQ ID NO: 620 - DNA, 410 bp, Arabidopsis thaliana
atgcaaatgctaagaaacttaagcacgaggacgaggagtcgtcgcggcggatatgagcgtgtaagcgatgattccaccttcagcctacttggagcaaagctaaggaggtcaacgagcgttccatactatgctccatcgataaggcttggtggagattttcctgtgattttggaaaagcttccacgccaaaaaccaactaaaacagtggtgacaagcaaattaagccatccaatcttcagtttatttgatggttatcgccgccataacaagaagaaagcgacggctaaaccggagttctctagataccatgaataccttaaagaaagtggaatgtgggatttgagatctaatagtccggtcatctactttaagtagctcgagcctgcagggacccagctttcttgtacaaa

SEQ ID NO: 621 - DNA, 489 bp, Arabidopsis thaliana
atgggacaagtctttaacaagctccgaggtaaagagtggagacataagcaggtacaagcgatatgtgatcgtgttttcgatcggttcaagatgcaaaccggaagagccaatcttacgtttgaagagttatacatcgctgttcttctcgtttacaatgacataaacaagagattgcctggtcctcatttcgatccaccttctaaggatctagtcaatagcattatgacggactgtgatatcaacttggatggagaacttgatagggaagagtttgtgaagtttattgagcagattacggctgagacgtttaacgtggttagtcagggtttgatcatagctttgattgttgctcccactgtggctattgcgacgaagaaggccacggaaggtgtccctggagttggcaaagttgtgcagaagctgcctacttcaatctatgcttctcttgtgactcttgcagttatgtgggtgaattctgattcaagttag

SEQ ID NO: 622 - DNA, 605 bp, Arabidopsis thaliana
acaagtttgtacaaaaaagcaggctcctgcaggaccccgagttaagaatggcgaatcaaggagcgaagaaacgaaaggaagagaacgccaaacacatggctaagctccgtcgtatcatcatcgcttccaatgctgtgtatttcgttgtgaggatgttgattttctactcaagctttacttggaaacattggatcggtttagtgataacttcgctggcttacgcgtttccttataagcagcttgatcaaatggctaaacctagtgttactgatgatggtgagcttattgatggtggatttgacatgaccactggtggaatctgcggatatttgcacgatgtcatctatatcacttgctttgttcagctagcttccatcatcactgggaagttttggtacacgtatcttgtgattcctgcgtttggagtgtataaagcttctggtcttattcgaggattcatgtcacaaggttcagagggaggtgtggaagatgaaaagtctcgtaaaaagagagagaagatggagaggaaagcttcgagagggcaagtcgtcaagacgagaacaagatgagttagctcgagacccagctttcttgtacaaagtggt

SEQ ID NO: 623 - DNA, 1727 bp, Saccharomyces cerevisiae
atgagattaagaaccgccattgccacactgtgcctcacggcttttacatctgcaacttcaaacaatagctacatcgccaccgaccaaacacaaaatgcctttaatgacactcacttttgtaaggtcgacaggaatgatcacgttagtcccagttgtaacgtaacattcaatgaattaaatgccataaatgaaaacattagagatgatctttcggcgttattaaaatctgatttcttcaaatactttcggctggatttatacaagcaatgttcattttgggacgccaacgatggtctgtgcttaaaccgcgcttgctctgttgatgtcgtagaggactgggatacactgcctgagtactggcagcctgagatcttgggtagtttcaataatgatacaatgaaggaagcggatgatagcgatgacgaatgtaagttcttagatcaactatgtcaaaccagtaaaaaacctgtagatatcgaagacaccatcaactactgtgatgtaaatgactttaacggtaaaaacgccgttctgattgatttaacagcaaatccggaacgatttacaggttatggtggtaagcaagctggtcaaatttggtctactatctaccaagacaactgttttacaattggcgaaactggtgaatcattggccaaagatgcattttatagacttgtatccggtttccatgcctctatcggtactcacttatcaaaggaatatttgaacacgaaaactggtaaatgggagcccaatctggatttgtttatggcaagaatcgggaactttcctgatagagtgacaaacatgtatttcaattatgctgttgtagctaaggctctctggaaaattcaaccatatttaccagaattttcattctgtgatctagtcaataaagaaatcaaaaacaaaatggataacgttatttcccagctggacacaaaaatttttaacgaagacttagtttttgccaacgacctaagtttgactttgaaggacgaattcagatctcgcttcaagaatgtcacgaagattatggattgtgtgcaatgtgatagatgtagattgtggggcaaaattcaaactaccggttacgcaactgccttgaaaattttgtttgaaatcaacgacgctgatgaattcaccaaacaacatattgttggtaagttaaccaaatatgagttgattgcactattacagactttcggtagattatctgaatctattgaatctgttaacatgttcgaaaaaatgtacgggaaaaggttaaacggttctgaaaacaggttaagctcattcttccaaaataacttcttcaacattttgaaggaggcaggcaaatcgattcgttacaccatagagaacatcaattccactaaagaaggaaagaaaaagactaacaattctcaatcacatgtatttgatgatttaaaaatgcccaaagcagaaatagttccaaggccctctaacggtacagtaaataaatggaagaaagcttggaatactgaagttaacaacgttttagaagcattcagatttatttatagaagctatttggatttacccaggaacatctgggaattatctttgatgaaggtatacaaattttggaataaattcatcggtgttgctgattacgttagtgaggagacacgagagcctatttcctataagctagatatacaatagctcgagcctgcagggacccagctttcttgtacaaa

SEQ ID NO: 624 - DNA, 608 bp, Arabidopsis thaliana
aaaaaagcaggctcctgcaggaccatgggtgttgagaaaatggtgtgtttagcttctcgtacgggtcgtcagtttcagagatacaacaaaggtcgtcgtcaagtcgttggatgtgttccttacagattcaagctatctaatgatggtaaaataagtgatgaagtagaagttcttgttatctcttcccaaaaaggccacgccttaatgttccccaagggtggttgggagcttgatgaatctgtagaagaagctgcatcaagagaatgtcttgaagaagctggagttcttggcaacgttgagcaccaacttggaaaatgggattttttaagcaaaagcagaggaacatactatgaaggactaatgttccctatgcttgttacagaacaacttgagctttggcctgaacaacatgttaggcaaagaatctggatgaatgtaaccgaagcaagagaagcttgtagagattggtggatgaaagaagcattagatgttttggttgagagactttcatcaccaatgaatcaaccaaaggaagagaagactatgtcaatctctattgaaacaatgtgttagctcgagcctgcagggacccagctttcttgtacaaa

SEQ ID NO: 625 - DNA, 293 bp, Arabidopsis thaliana
aaaaaagcaggctcctgcaggaccatggcaaaagctatggagctttgggtgggagagatgaagaagatgagtgagaagataaacactagaaatccattgatgcaaaggaagaattcaacatctgttgtgtccaaacaacaacaaggatcagaagaagaaagaggacttattaaccaaaagattagagagaaaaatgaagctgtaactatgtctgagctcactgtttgtcttctcatggaccgttttgttccttggtagctcgagcctgcagggacccagctttcttgtacaaa

SEQ ID NO: 626 - DNA, 2884 bp, Oryza sativa
acaagtttgtacaaaaaagcaggctcctgcaggaccatgacgaccaacaccaagcgcgcctacaagctccaggagtttgtggcgcattcatccaatgtcaactgcctcaagattgggaggaagacttcacgagttctcgtgacaggaggagatgaccataaggttaatctttgggctattgggaagcccaattcaattttgagtttatcagggcacaccagtgctgtggagtctgttaattttgattccacagaagttttcgtggccgcaggagcagccagtggaacaataaaactatgggatttagaggaggcaaaaattgtccgcacgcttactggacataggtcaaactgcatgtcagttgatttccatccttttggagaattctttgcctcggggtcactggacacaaatctgaagatatgggatataagaaggaagggctgtatccacacgtacaaaggccacacaagaggtgtaaatgcaattagattcacacctgatggccgctgggttgtgtctggtggtgaagataatgttgtgaagctctgggatctgacagctggaaagttattacatgatttcaagtgtcatgaaggccagattcagtgcatagatttccatccccatgagttccttctggcaacaggttcatccgataaaactgtcaagttttgggatttggagacctttgaattgattgggtctactggacctgagacaacaggtgttcgatccatgacattcaatcctgatggaagatctctgttgtgtgggttgcatgaaagtttaaaggttttctcttgggaaccaataagatgtcatgataccgttgatgtgggatggtctagactgtctgatctaaatgtccacgagggaaaacttcttggttgttcatttaatcaaagttgtgttggaatatgggttgtagatctaacgcgtcttgagccatatgcaacgggtacttcaacaaaattaaatggtcattcagagttgaaaagttcgtcaagtagcactatgccattacaaaatgacagtggttcaagggctaacattgggcggttatcagttctacaaaattctgagaataacataaagtcttctacaggaagattatcagtttctcaaaattcagactctgcattgaaagagacaaaatcaacaacttcaagcgggttggttccagtcacacctcagagagctggtaatggctccagtaccaaaacagttggaaattcaacctttgcatctagtggcaccaacctgaagagaggttcactgaagagtaacaactcttctagtcttcagaattttagcaaaattgatgtggtgcctgtgataataccaagaactagctcaggaccagagctggctactgattctaggagtgatgctgctgatgtgggccctgttctttctaagagtggtagaagaatagagattgcaaatgattctaggaaagaaagttctgatgtggcagcagctgttgttcccagaacaaactctagaacagaaatggcctctgattcagcacctgttgttggtcccagagctaacttaagaatggaagtaagcgctgactcggcacctattgttcccaagtcaggcagaaggttagagtcttctgttgaatctaggaaagaaagtactgatgtagcatctgctgctgctccgaagactagttcacggatggaagtggccccagattctgcacctcttctttctaaggcaggcagaagggtagagtctgctactgattcaaggaaagaaagtgctgatgtggcacctgttgttcccagaacaacttctagaatggaaatggctccggattctaggagagaaatttctgctggaagaatgtcaccgtttagggtccaatcaagatatagtgaactacgaaagttaaataatgccaaagctgatgcagataaagttgatgcagggagcaaaaacagtgaaacagatgattttacttgtcaaatataccttcctcggaggaatggtgttgttcagtctggaatttctgaagaaacccgggaagatgcaaaacctggtgtgattgacaggatgggatttccaagttctgctgaaccaaatacacaccgcagtgagaattatgtttctagaatgcgtaagccaagagataactgctatattgaagtttcaagagcaggaagaacaaggccaactgcttctaattgggaaagcagagatcagtcacctggtaatgaagaaccgacaacaagcaattcttcttcgatggctcctacaggccgattatattcatctagaggaagcagtcaagctgctgaaactccaacgatagcaagtgatgaggatgttctatctgttctaatggagcagcatgagctatttctaagctcaactcgatctcggttgacaaaattgcagattgttcatcaaatgtggcaaagaaatgatatacggggcattattgcagcaatggagaagatgtctgatcatgccgtatctgctgatgttgcaagtgttctgatggagaaaagtgaaacaatcacactagatttatgtactgttattctgcccgtccttactgaccttctggagagtaaaactgacaggcacttaggtgtttcactggaattgttggtgaagcttgtcaggacgtttggatcagtaatacattcaacagtatcagctggtccctcttctgttggtgtagatctgcaagcagagcaaaggcgggagcgttgcaacctatgctttattgaattggagaaggtcaaaaataagcttccatttctttccagaagaaaaggggcagtcgcaaacacggcacaggagctcagtcttgtcttccaggaagttatgtagctcgagaaccagctttcttgtacaaagtggt

SEQ ID NO: 627 - DNA, 1625 bp, Oryza sativa
aaaaaagcaggctcctgcaggaccatggctgaggtgaagccggaagagatcagctacccgcccatggagcagctgcaggggttcgagtactgcatcgactccaaccctccctggggggaggcgatcatactgggattccagcactacatcctggcgctgggcacggcggtgatgatcccggcggtgctggtgcccatgatgggcgggagcgacggggacagggtgagggtggtgcagacgctgctgttcgtcaccggcatcaacacgctgctgcagtcgctgttcgggacgcgcctgcccacggtgatcggcggatcctacgcgttcgtggtcccgataatggccatcatacaggactcatcgctcgccgccatacccgacgaccacgagaggttccttcagaccatgagggcgatacagggggcactcatcgtgtcctccagcattcagatcatcctcggctacagccagctgtggggcattttctccagattcttcagcccgttggggatggcgccagtggttgcattgctcgggtttggccttttcgaaagaggattccctgtggttgggagatgcgttgaggttggacttccaatgttaattctgtttgtcgtgctttctcagtatctgaagaatgtacagataagagatattccaatactggagaggttctccctgttcatctgcatcgcgttggtttgggcctatgctcaaatcctcactgcaggtggcgcgtataagcatagccctgaggtcactcagatcaactgccgcactgaccgtgccaatctcatctcttccgcgccatggattaagatcccttttccactacaatggggcgcaccaactttcagtgccggtcaatcctttggtatggtatctgctgttctggtatcgctagtagagtccacggcttcttacaaagctgcggctcggcttgcaagtgctactccacctccagcacatatcctcagtagaggcattgggtggcagggaattggtatccttcttgatgggctatttggaacgggtactggctccaccgtgtcagtggagaatgtcgggttgttaggatcaacgaggatcgggagccgacgagttatacagatctctgccggcttcatgatcttcttctccatgctaggaaaatttggagcattgtttgcttccatcccatttaccatctttgcggccgtgtactgcgtcttgtttggactagttgcggcagtggggctctccttcttgcagtttactaacatgaactccatgcgcaacctctttatcgtcggtgtctccatctttcttggtctatctgtgcccgaatactttttccggtacagcatggccgctcagcgtggccctgcgcacacaaaagctggatggttcaacgactacatcaacactatcttctcatcgcctccgacggtcggactgatcgtggccgtcttcctggacaacacgctggaggtgaaaaacgcggccaaggaccgggggatgccatggtgggtaccgttccggtcgttcaagggggacgccaggagcgaggagttctacagcctgcccttcaacctcaaccgcttcttccctccgtcttagctcgagacccagctttcttgtacaaa

SEQ ID NO: 628 - DNA, 1348 bp, Nostoc sp. PCC 7120
acaagtttgtacaaaaaagcaggctcctgcaggaccatgccgaccctacctttggaaggtgctagtccagcacatatttgtccatttgatcaagcttgtagctacttggaagcagccgcaaaagagttgaggctagatcaaggggcgctggaaattctcagtcacccacgtaaagttgtgacagtttctatacctgtgagattagataacggtgacatccgggtgctagcaggacatcgagtacagcattctgatatattaggcccctacaaaggtggaacgcgttaccatccagctgtgacactgcgggaagtatctgctctagcaatgctaatgacttggaaatgtgcgctattgggtattccttatggtggtgcgaagggaggtattgctatagatcccgaacactacagtgtaggtgaattagagagaattactcgtcgttatacaagtgaattgattaaagatatcggcccttccgtagatataccagcgccagatgtgggaacttccgcccgtgagatggcttggatgatggacacttattctatgaatgttggtcacgcagtcccaggggttgtcacaggtaagccaatttctatcggtggttcacggggacgggaaatggcaactggacgcggtgtaatgattattgtccgtgaagcactggcggatatgggcagaaccttagagggagtcaaagtagttattcaaggttttggcaatgtaggcggtgctgcggctgaattactgtaccaagctggagcgaaaattcttgctgtttctacaggtgcaggaggtttatttgcgtctgatggtctggatattccggcattaaaagcctacgctgcggaaaatcatcggagtattgtgggttttccccaagcagtaccaattagtaatgcagagttgctaactttaccttgcgatgttttgatacccgcagctttggaaaaccaaatcactgaggaaaatgtagaccagatacaggcgcaaattgtggcggaagctgctaatggcccggtgactttggaggctaaccgagttctagaagggcggggtgtgactgtactaccagacatcttggcgaatgctgggggtgtggtggtgagttatttagagtgggtgcaaggtctttcttacctattttgggatgaggagcgtgtcaatcgggaaatggaacacttgatggtgcaagcttatcatcaagttattaaacagtcacagatgcggcaagttcctttgcgattagccgcttataccttgggtgtgggtagggttgctcaggcgttgagcgatcgcggtctttatccttagctcgagacccagctttcttgtacaaagtggt

SEQ ID NO: 629 - DNA, 1340 bp, Nostoc punctiforme PCC 73102
aaaaaagcaggctcctgcaggaccatgatttcaaaatcactactaccgctagaacctgcttctccagcgcatatatgcccatttgaccaagcctgtagctacttagaagcggcagctaaagaattaaatttaaatcaaggtttgctggaaatcctcagccatccgcgtaaggttgtcacagtttccattccagtgaaactagatgatggcgaaatacaagttcttgctggacaccgtgtacagcactccgatgttttaggcccctacaaaggtggaattcgttaccatccagctgtgacattgcgcgaagtatcggctttggcaatgctgatgacctggaaatgtgccttgttaggtattccttatggtggtgggaagggtggcattcctatagatccaaaacgctacagtgttggcgaattagagcgaattagccgccgttatatcagtgagttacttaaagatattgggccttctgtagatattcctgcgccagacatgggtacttctgctcgtgaaatggcttggatgatggacacttactctgtaaatgttggtcatgctgtaccaggggttgtgactggcaaaccgctttccattggtggttctctggggcgagaaatggcaactggacgtggcacaatgattattgtgcgtgaggcgctagcagatcgaggtaaatccttagtaggagtgcgagtagctattcagggttttggtaatgtcggtggtgccgcagctgaattactccatcaagcaggcgcgaaaattatcgctgtttcaacaggtgctgggggaatattttccgaagctggtcttgatattcccgcgttgaaaatctacgctgctgaaaatcgcaagagtattgtaggtttcccgcaatctgtaccaataagtaatgcagatttattaactttaccctgcgatgtcttaataccagcggctttagaaaaccagataactggagaaaatgtgaatcaggtgcaagcgcaaattgtcgcagaagcagctaacgggccggttactcttgaagctaacttggcattagaggcgcggggtgtaacagtgctaccagacatcttggcgaatgctggtggtgtggtagtcagttatttggagtgggtgcagggtctttcttacgtattttgggatgaggagcgcgttaaccgcgaaatggagcatttgatggtacaagcctaccgtaaggtgattcagcaatctaataagcggcaaatttctttaagattagcagcttacactttaggcgtgggtagagttgcccaggccctgactgacagaggtctttatccttagctcgagacccagctttcttgtacaaa

SEQ ID NO: 630 - DNA, 1462 bp, Streptomyces coelicolor
acaagtttgtacaaaaaagcaggctcctgcaggaccatgcgaccggtgcccgccgtgccagaaagggcccctgtgacgacgcgaagcgagacgcagtccaccctcgaccacctcctcaccgagatcgagctgcgcaacccggcccagcccgagttccaccaggcggcccacgaggtcctggagaccctggcgccggtcgtcgcggcccgccccgagtacgccgagccgggcctcatcgagcggctggtcgagccggagcgccaggtgatgttccgggtgccgtggcaggacgaccagggccgcgtccgcgtcaaccggggcttccgggtcgagttcaacagcgcgctgggcccgtacaagggcggtctgcgcttccatccgtccgtcaacctgggcgtcatcaagttcctgggcttcgagcagatcttcaagaacgcgctgaccggcctcggcatcggcggcggcaagggcggcagcgacttcgacccgcacgggcgcagcgacgcggaggtcatgcggttctgccagtccttcatgacggagctgtaccggcacatcggcgagcacacggacgtcccggcgggggacatcggcgtcgggggccgcgagatcggctacctcttcggccagtaccggcggatcaccaaccgctgggagtccggcgtcctgaccggcaagggccagggctggggcggctcgctgatccgcccggaggcgaccggctacggcaacgtgctgttcgcggcggcgatgctgcgggagcgcggcgaggacctggagggccagaccgcggtcgtctccggctccggcaacgtggcgatctacaccatcgagaagctgaccgccctcggcgccaacgccgtcacctgctcggactcctccggctacgtcgtcgacgagaagggcatcgacctcgacctgctcaagcagatcaaggaggtcgagcgcggccgcgtcgacgcgtacgccgagcgccggggcgcctcggcccgcttcgtgcccggcggcagcgtctgggacgttccggccgaccttgccctcccctccgccacgcagaacgagctggacgagaacgccgccgccacgctcgtccgcaacggcgtcaaggcggtctccgagggcgcgaacatgccgaccacccccgaggccgtccacctgctccagaaggcgggcgtcgccttcggccccggcaaggcggccaacgcgggcggcgtcgcggtcagcgccctggagatggcgcagaaccacgcccgtacctcgtggacggcggcgcgggtcgaggaggagctggccgacatcatgaccagcatccacaccacctgccacgagaccgccgagcgctacgacgcccccggcgactacgtcaccggcgcgaacatcgccggcttcgagcgggtggccgacgcgatgctggcgcagggcgtcatctagctcgagacccagctttcttgtacaaagtggt

SEQ ID NO: 631 - DNA, 1990 bp, Oryza sativa
acaagtttgtacaaaaaagcaggctcctgcaggaccatggacgagctcaacctattgcggcagcaccagcaccagcaccagcaccacctggtggtgcgcggcctcggcgaggagatcgacctcgagatcggcccgggcgacgacccctccttccccggcgcggccctcgtcggcgtcacccccggcgcgcacgaccccgcggacgaccacaagagcctcctcatcccgtgctcgcagcccgtcgccgaggggcagccgcagccgacgccgccgcaggtggaggagcacgacgggctgctacggctgccggggcaaaccaagaagaagaagaaggtggtgaagaaatggagggaggagtgggcggacacctacaagtgggcctacgtcgccgtgcacgacaacaccagcaggatcttctgcaccgtgtgcaaggagtacgggcggaagcaccgccggaatccctacgggaacgaggggagcaggaacatgcagatgagcgcgctggaggagcacaacaacagcttgctgcacaaggaggcgctgcggttgcagacggcgtccaaggagaacgcgcagccccctgagatcgagaggccggtatatgtcaaagctctgtcgaaaactgcagcctctatacttgaatctatcctaaagaaggaccctcatgaagctgagtttatacagtctatccaagaggtggttcattccttggaaccagttttggtgaagaactcccaacatgtccaaattttggagcgtttgttggaacctgagagatgctttatcttcagagtgccatgggttgatgatagaggtgaagcacatgtaaatcgaggcttccgtgtgcagttcagtcaagcgttaggtccatgcagaggtggtcttcgtttccacccttccatgactttgagcgtagcaaaatttctagcttttgagcagactctaaaaaatgctttgtcacaatataaacttggaggagctgctggagggagtgattttgatcccaagggtaaaagtgaaagtgagataatgcgtttttgtcaaagtttcatggatgagctgtatagatatttggggcctgatcaggattttcctgctgaagatgttggtgtgggtccaagagaaatgggttatctttttgggcagtatagacgcctttctggtcattttcaggggaattttacagggcctaaaatcttctggtctggttctagtttccgaacagaagctactggatacggactggtattctttgcacgtgtagtgcttgctgatatgaacaaggaactcaaaggattaagatgtgtgataagtggttctggaaagatagcaatgcatgtattggaaaagcttctgtcatgtgaagctattcctgttacagtttcagattcgaagggttatttgttagacacggaagggtttgattacatgaaatattcagttctaaggaacatcaaggctcagcaaaggagcctcaaggaatacttgaaatcatatccaaatgccaaatatatagatgatgcaaagccctggagtgagaagtgtgacgttgcattcccttgtgcatcacaaaatgagattgaccaggcggaggctcttgcaataattaactctggctgccgtgttcttatagaatgttcaaatatgccttgcactgctcaagcagttgatatcctacgaacagcaaaagtagttgttgctcccgcaaaggcaactgccgctggtggggtagcagttggagaactcgaactgaaccctgagttcagtttgatgcagtggtcagtggaggattttgagaacaaaatacaggatgcggtgaaacaaacatatgacagatctatcaaagctgctcaagattatggaatcatgaaagagaacccagagtcgttggtgcatggtgcaaacatatgtgcgtttcttaatattgcacaagccatgactgatcaaggatgtgtctagctcgagacccagctttcttgtacaaagtggt

SEQ ID NO: 632 - DNA, 1898 bp, Bacillus halodurans
aaaaaagcaggctcctgcaggaccatgtgtggaattacaggctgggtagattggcgacgcaacttgcaaaatgagacggaaacgatcaaacagatggcggaaacgcaaacacatcgagggcccgatgatttgaacgtttggacagagaagcatgctgccttaggccactcgcggctcattgtcgttgatccggaaggcggttgtcagccgatgatgagggagaggaatggcaaacgctatacgatcgtgtataacggcgaattatacaatacagaagatttacggaaagagcttatagtaaaaggttaccaatttcaaggccattcggatacggaagtattactcgtgtcttatatcgaatggggttaccaatgtgtggagaagttcaatggcatttttgcgtttgcgatttggaatgataaagatcagagcttgtttatggcccgcgaccgattaggggtaaagccgctattttatactgttcgccatggatttttactttttgcaactgagataaaagcgctgcttgctcatcctgaaatcgagccggttcttaccgaagaagggctatcggaagtgctcgggcttgggccatcacgttcaccgggtaatggcgtttttgatgatattcaagagttgcgaccagctcatcttttgacatacgatcgcaatggggcaaaagtgagccgttattggagattaaaatcaatggctcattctgaagatgcgatggaaacggccgcccatcttcgcgacttattagaagatactgtcgaacgtcagctatttgcagatgttccagttggaatgtttctttcgggtggagtcgattcgagtgctttaacggcaattgcggcgctgatttacgagcgagaagggaagggcctgattcggacgtactcgattgattatgacgaaaatgataagtattttaaagcgaatgactttcaaccgaatgccgatggaccttgggttgaaaaagtttcaactacttttcgaacgaaccaccacaatgctgtcatctcgatcgaggagttggctaatcaattaaagcgagcggtagagcttcgtgacttacctggaatggccgatgtagactcttcattgtattggttttgtaagcaaatcaaaaaagatgttaccgttggcttatcgggtgaatgtgctgacgaaatttttggtgggtatccttggttccataagccagaggtcatgaattttaatgggtttccttggatgagatcagcggatgaacgtcaggagcttcttcatgaacgatggcgccaaaagttaaatttgcccaaatacgttcatgatcgttataaagaaacgattgccgaaacgcctcgcttcgaagaggacacaccggaagaagcgcgacgcagggaaatttcgtatttgaacatggtctggtttatgacaacgcttcttgatcggaaggatcgaatgagcatgggagcgagcttagaagtgcgagttccattttctgaccaccgaattgtagaatacgcttggaacattccgtgggaaattaaacaattcggagggagagagaagggcattttacgaaaagcgttggaaggcatcctcccagatgaagtgttataccggaaaaaaagtccttatccgaaaacgcaccatccaaaatacacgaaaatggtccagcaagagatggaacgaattctcggtcaaagcgatagccccctctttgatgtagtgaaccggaaaaagttaaaagagttaaccgaaactggtggcaaggcattaacgacaccttattttgggcagcttatgacaggcccgcagctccttgcccacttcatccaaatggagcattggcttaagcattacaatatcaaattaattggttagctcgagacccagctttcttgtacaaa

SEQ ID NO: 633 - DNA, 1958 bp, Corynebacterium glutamicum
gcagtcgctgtcgttaccatgtgcggccttcttggcatattgactgcaaatgggaacgctgaagcattcgttcctgcactcgagcgggccttgccatgcatgcgccaccgtggtcctgacgatgccggcacttggcatgacgccgatgcagcgtttggattcaaccgcctctccatcattgatattgcacactcccaccaaccactgcgttggggacctgcggatgaacccgaccgctacgcaatgactttcaacggtgagatctacaactacgttgagctgcgtaaagagctctcggatttgggatatgcctttaatacttctggcgatggcgagccaattgttgtcggtttccaccactggggcgagtccgtggtcgagcatctccgcggaatgttcggcattgccatttgggatacaaaggaaaagtcgcttttccttgcgcgtgatcagttcggcattaagccactgttctacgcaaccaccgagcatggcaccgtgttctcctcagagaagaagaccatcttggagatggccgaggagatgaatctagatctgggccttgataagcgcaccattgagcactacgtggacttgcagtacgtgcccgagccagatacccttcacgcgcagatttcccgcttggagtcaggctgcaccgcaacagttcgtccgggcggcaagctggaacagaagcgttacttcaagcctcagttcccagtacagaaggtcgtaaagggtaaggagcaggacctcttcgatcgcattgcccaggtgttggaggatagcgtcgaaaagcatatgcgtgccgacgtgaccgtaggctcgttcctttccggcggcattgactcaaccgcaattgcggcgcttgcaaagcgccacaaccctgacctgctcaccttcaccaccggtttcgagcgtgaaggctactcggaggtcgatgtggctgcggagtccgccgctgcgattggcgctgagcacatcgtgaagattgtctcgcctgaggaatacgccaacgcgattcctaagatcatgtggtacttggatgatcctgtagctgacccatcattggtcccgctgtacttcgtggcagcggaagcacgtaagcacgtcaaggttgtgctgtctggcgagggcgcagatgagctgttcggtggatacaccatttacaaggagccgctatcgcttgctccatttgagaagatcccttccccactacgtaaaggcctgggaaagctcagcaaggttctgccagacggcatgaagggcaagtcccttcttgagcgtggctccatgaccatggaagagcgctactacggcaacgctcgctccttcaatttcgagcagatgcaacgcgttattccatgggcaaagcgcgaatgggaccaccgcgaagtcactgcgccgatctacgcacagtcccgcaactttgatccagtagcccgcatgcaacacctggatctgttcacctggatgcgcggcgacatcctggtcaaggctgacaagatcaacatggcgaactcccttgagctgcgagttccattcttggataaggaagttttcaaggttgcagagaccattccttacgacctgaagattgccaacggtaccaccaagtacgcgctgcgcagggcactcgagcagattgttccgcctcacgttttgcaccgcaagaagctgggcttccctgttcccatgcgccactggcttgccggcgatgagctgttcggttgggcgcaggacaccatcaaggaatccggtactgaagatatcttcaacaagcaggctgtgctggatatgctgaacgagcaccgcgatggcgtgtcagatcattcccgtcgactgtggactgttctgtcatttatggtgtggcacggcatttttgtggaaaaccgcattgatccacagattgaggaccgctcctacccagtcgagctttagaacccagcggtactcgc

SEQ ID NO: 634 - DNA, 1031 bp, Oryza sativa
aaaaaagcaggctcctgcaggaccatgaggccgatcctgatgaaggggcacgagcgcccgctcacgttcctccggtacaaccgcgacggggacctcctcttctcctgcgccaaggaccacacccccaacgtctggttcgccgacaacggcgaccgcctcggcacctaccgcggccacaacggcgccgtctggtcctgcgacgtctcccgcgactccacccgcctcatcaccggcagcgccgaccagaccgccaagctctgggacgtgcagaccgggagggagctcttcaccttccgcttcgacgcccccgcccgctccgttgaatttgccattggcgacggcctcgccgtcatcaccaccgacaacttcatggagaacgtgcccaccgcccaggtcaagcgcatcgccgaggaccccgatgaccagtcggaggagtctcttctcgtgattactggcatcaaggggaggatcaacagggccgtgtgggggccgttgaacaggactatcatcaccgccggtgaggatgctaccatccgcatttgggacacagagactggacaatgtctgaaggagtcagacaaagagcaaggacatcagaaaacaattacttcactttcaaaatctgcagattggtcgcatttcctaacaggctccttggataagtctgctaagctatgggatacaagaactctgacgctgatcaagacatatgtcactgagcgacctgttaatgctgttgacatttctcctcttcttgaccatgtggttattggaggtggtcaagatgcgatgaatgtgactatgacagatcgtcgtgcaggaaaatttgaagcgaaattttttcacaagattttgcaagaggaaattggtggtgttaaaggccattttggaccaattaacgcgctggcatttaatcctgatgggcggagcttttcgagtggtggtgaagatggatatgtaaggctgcaccattttgattctgactacttcaacatcaagatttagctcgagacccagctttcttgtacaaa

SEQ ID NO: 635 - DNA, 1734 bp, Arabidopsis thaliana
acaagtttgtacaaaaaagcaggctcctgcaggaccggggtttgaataagttacaatggcctcaattcttaatcaaacccaggagttgcaagaatcttctaaggttcttgggcatttaagatgtgaaaacttctttctattccccggagaaaacactttgtcagatggtttgaggggtgtgttatattttctcggtcttgcctactgctttattgggttgtcagccatcactgcacggttcttcaagtctatggagaatgtcgtgaaacattcccgtaaagtggttacaattgatcccattactaaagctgaagtcatcacatacaagaaagtttggaactttactattgcagacatcagtttgttggcgtttggaactagcttccctcagatttctttggctaccatcgatgcaatacggaatatgggggagcggtatgctggaggtcttggtcctggaacacttgttggctcagctgcatttgatcttttccccatccacgctgtttgtgtcgttgtgccaaaagctggagaactgaaaaagatatccgacttaggtgtttggctagttgagctcgtatggtctttttgggcttacatctggctatacataatcctcgaggtgtggtcaccaaacgtaattacacttgtggaggcattattgacagtactgcaatacggattgcttctagttcatgcgtacgcccaagacaagcgatggccttacttgtctttaccaatgtcaagaggtgataggccagaggagtgggttccagaggagattgatacatccaaagatgacaatgacaatgatgttcatgatgtgtattcggatgctgctcaagatgctgttgaatcgggaagcagaaacattgttgatatcttctctattcattcagctaacaatgatacagggatcacttatcatactgtggcagatactccacccgattctgcgactaagaagggtaaggcgaagaattctactgtttttgacatttggaaacatcaattcgtggatgcaataacgttggaaacatcagaatcaaagaaagtggatagcatttatcttcgaatcgcgaaatctttctggcatttactcctcgccccttggaaactgctttttgcatttgtgcccccctgcaacattgctcacggttggatcgctttcatctgctctctcctcttcatcagtggagtagcctttgttgtcacaagatttactgaccttataagctgtgtcactggaataaacccatatgtgatagcattcacagcactcgcaagtggaacttcatggccagacttagtagcaagtaaaatcgctgcagagcgacaactaaccgcagattcagctattgcaaacatcacctgcagtaactcggtgaacatctatgtggggattggagttccgtggctgataaacacagtctacaactactttgcatacagagagcctttatacatagaaaacgctaaaggattaagcttttcgcttctgatattctttgcgacatcagtgggatgtatcgtggtgcttgtgttgagaaggttgattataggagctgagcttggaggtccaaggctatgggcttggcttacttctgcctatttcatgatgctttgggtcgtcttcgttgttctttcttctttgaaagtttcaggcgtcatatagaagaagcaacaaaaggaaaaacccctagctcgagacccagctttcttgtacaaagtggt

SEQ ID NO: 636 - DNA, 1570 bp, Zea mays
acaagtttgtacaaaaaagcaggctcctgcaggaccatgggaaggaagcctgacgcggtagccaaatcgtatcattccggtggcggcggcgctgccgcctcctcgccgagggcagcgaggaaggcgtcgccttctccggtgttcctgggaaccgcgctgttcgttctagggtttgtgtccctctttacgggacacgtggtcaccgacgctgactgggcgcggatccgcagtcgatggcgacccaaacagcatagaaactacgaacctatcgatatttgggaatccaagtattccagcatgtactacggatgcagcgagagaagcgcgagtttcagatctgctgtgccagagaacagttccactggttacttgttgattgctactagtgggggcctgaatcagcagcgcatagggataacagatgctgttgtagttgcctggattttgaatgccacacttgttgtacctgagttagaccaccactcgttctggaaagacgacagtgacttctctgacatttttgacgtggagtggttcatttcccacctatcgaaggatgtaactattgtcaaaaggatcccttatgaagtaatgttgtcaatggataaactaccatggactatgcgcgcacctaggaaatcggtgcctgagttttatattgatgaagttctgccaatactcatgcgaaggcgagctttgcaattaacaaagtttgattataggctcactagcgatcttgatgaagatttgcaaaagttacgttgccgagtaaattttcatgctttaaaatttacgagttctatacacgccatgggtcagaaacttgttcaaaagctgagactaatgaacacacgatatgtcgccattcatttgaggtttgaacctgacatgcttgcattttctggctgttactacggtggcggtgaaaaagaaagaaaggaattgggtgaaattaggaaacgatgggatacattacctgagttgagtgctgaagatgaacgcagcagaggaaaatgtccactgactcctcatgaagtcgggttaatgctccgagctcttggttttggcaacgatacacttctgtatgttgcttctggagaaatatatggtggagatagtactctccaacctcttaggggactcttcccaaatttctatactaaggagaagcttgctggggatgatttaaatcccttccttcctttttcttcacggttggctgcaattgacttcattgtttgtgatgagagtgatgtctttgttacgaataataatgggaacatggccaaagttttagctggacggaggcgatacatgggccacaagagaactattcgcccaaatgcaaagaaactcaatgtactatttcaaacacggaatcaattgagctgggataccttttcacggaaggtacagagagttcagaggggtcttatgggggagccggacgatatcagaccaaaacaggatgacttccatgaatttccatcatcttgcatctgctcaagaaaacctgggaacatatcggccacaacatagctcgagacccagctttcttgtacaaagtggt

SEQ ID NO: 637 - DNA, 1689 bp, Saccharomyces cerevisiae
ttgttcatcggtagtttttcttttcatgatttgtgacaaatgcagcctcgtgcggagcttttttgtaggtagaccgcgggatatcacaagtttgtacaaaaaagcaggctcctgcaggaccatgtcctccaaccgtgttctagacttgtttaagccatttgaatctttcctgccggaagtgattgctccagaaaggaaggttccatacaaccagaaacttatctggacaggcgtttctctactgatctttttgattctgggccagattccgctgtacgggatcgtgtccagtgagacttccgaccctctgtactggctacgtgccatgctggcctccaaccgtggtactttactggaattgggtgtttcgcccatcatcacttcatctatgattttccaatttttgcagggtactcagcttttacaaatcagacctgagagcaagcaggacagagagctgttccaaattgctcaaaaggtgtgcgctattattctgatcttgggccaagcccttgtggtcgtcatgacaggtaactacggtgccccttcggacctcggattgcccatctgtttgttgttaatctttcaattgatgtttgcatcgctgattgtgatgttattagacgaattgctatctaagggttacggcttgggttccggtatttctctgttcacggcaaccaatattgccgaacaaattttctggagagcgtttgctcctactacagtcaattccggtcgtggtaaggagttcgaaggtgctgtgattgcctttttccatcttttggctgtcagaaaggacaagaaaagagcccttgtcgaggccttttaccgtaccaatctacctaatatgttccaagtgttgatgaccgtggccatcttcctctttgttttatatttacaaggcttccgttacgaattgcccatcaggtcaaccaaagtgagaggtcaaattggtatctaccccatcaaactcttttatacttccaacaccccaatcatgttgcagagtgcattgacttctaacattttcttgatctctcaaatccttttccagaaatacccaaccaatccattgattcgtttgatcggtgtttggggtatcaggccgggcacccagggccctcaaatggccttgagcgggttggcctactacatccaaccattaatgtctttatccgaagctcttctggaccctatcaagaccatcgtctacatcacatttgttcttggttcatgcgcagtattttccaagacatggatcgaaatctccggcacttccccacgtgacattgccaaacaattcaaagatcaaggcatggtcattaacggtaagagagaaacctccatttacagagaattgaagaagatcattccaactgctgctgctttcggcggtgctaccatcggtgctctttctgttggctccgacctactaggtactttaggttctggggcatccattttgatggctactaccaccatctacggctactacgaagctgccgccaaggaaggtgggtttactaagaacctcgttccaggattttctgatttgatgtagctcgagacccagctttcttgtacaaagtggtgatggggatcccccaccctgcaatgtgaccctagacttgtccatcttctggattggccaacttaattaatgtatgaaataaaaggatgcacaca

SEQ ID NO: 638 - DNA, 2156 bp, Zea mays
aaaaaagcaggctcctgcaggaccatggcgggccgggaggagagatatgtgaggtttcatgactggaaatcagagcaatctgtttctgttatttcagatagggtagtatcagaaaaagggcataacatctttggcttgttaaaggacagaacagcaggagccttttcattcctggggaactcttcacattctgaagccctaaacaaattaggcctaggggagaagtcaaaaacaaaagttcttgatcctcaagggccatttttgcagagatggaacaagatatttgtgatatcatgtctttttgcagtttttgtggacccattgttcttgtatgtcccagtaattgatggtggcaacaactgcctgtacttggacaagaagttagagaccacagcaagtatcctgcgctttttcacagatatcttctatttactccatatactgtttcagttcagaacaggctttattgctccctcttctagagtgttcggtcggggtgccttggttaaggacacatttgcaatagcaaagcgatatctatcaacattgttcctggtggatttcttagcggttctgcccctccctcaggtgtttgtgttggtggtgctgcctaagctccaaggtcctgaagttatgaaggcaaaaattgtactgttggttattattatttgtcaatatgtgcctcgactgctccgaataataccactttaccttcaaatcacaagatctgctggcatacttacagagacagcatgggctggtgctgctttcaaccttataatttatatgcttgccagtcatggctttggagctctttggtacattctttccatccagcgagaagacacctgttggagacaagcatgtatcaatcagactggctgtgatcctacatctttgtactgcgggtatcattcacttgcaaataattctttcttacaaaatgcgtgcccaacaaatagcactgccaatccagaccctatatttggaatctttctaccagctctccaaaatgtttcacaatcgacgagtttctttgaaaaactattctattgcttttggtgggggctacaaaatctaagttcccttggccagaacatgaaaacaagcactaatacattggagaatctgtttgctgtttttgtctcgacatcgggtttggttctatttgcactacttattggtaatgtgcagacctatttacagtcagcttctgtgcgtatcgaagaaatgagagtgaaaaggcgtgatacagagcagtggatggcacataggctactccctgagaatctaaaggatcggattatgcgccacgaacaatataggtggcaagaaacaagaggggttgacgaagagggccttcttaaaaatcttccaaaggatcttagaagagagataaagagacatctttgtttgtcacttctcatgaaggttccaatgtttgaaaacatggatgaacagctgttggatgccatgtgtgatcgtctaaagcctatgctgtacacagaaggaagctgcatcattcgcgaaggtgatccagtgaatgaaatgctcttcatcatgagaggaacactagagagtaccacaacaaatggtgggcaaactggtttcttcaactctaatgttctaaaaggtggagacttctgtggtgaagagctcctcacgtgggcccttgaccccacttcagcttcaaatcttcctggctcaactaggacagtgaagacgttgtctgaagtcgaagcttttgctctgagggctgacgacttgaagtttgttgccacacaatttaggaggctccacagcaaacaacttcagcataccttccggttttactcacagcaatggaggacctgggctgcttgcttcatacaggcagcttggcacagatactgtaggaagaagctggaagaggctttatatgagaaggagaagaggttacaagcagcaattgtaagtgatggcactacttcgctcagtctcggtgcagcgctctatgcttcacgttttgctggcaacatgatgcggatcttacggagaaatgccaccagaaaggcccgtttgcaggaaagagtacctgcaagactgttgcaaaagccagcagaacccaacttcttcgctgaagatagctagctcgagacccagctttcttgtacaaa

SEQ ID NO: 639 - DNA, 293 bp, Agrobacterium tumefaciens
aaaaaagcaggctcctgcaggaccatgccggtcaaagcgagatttgaaaccaaattgtggttatacacgttgactgtccagttatcgcaaactggaaagccaatcatcgtggacgtcattcgtatcctcatcgccatcatcctcccgcccgttggcgtgtttcttcaggtcggcctcgggctgcagttctggctgaatattcttctgacgctgtgcggttatgttcccggcatcattcacgccatctgggttatcttgcgcagatagctcgagacccagctttcttgtacaaa

SEQ ID NO: 640 - DNA, 226 bp, Nostoc sp. PCC 7120
acaagtttgtacaaaaaagcaggctcctgcaggaccatggatttagttcggcttttatgtgctattttcttcccacctttgggagtatttttacaagttgggataggtaaggatttttggattaatatacttttgacgcttttaggttacattccgggaattgtacacgcggtgtgggtcatcgctaggaaatagctcgagacccagctttcttgtacaaagtggt

SEQ ID NO: 641 - DNA, 616 bp, Zea mays
acaagtttgtacaaaaaagcaggctcctgcaggaccatgatgacagaggtagagtggcgtttgaacaaatatgtgccaacagaggaggaatacatgacaaatgcatctttaacatttgcattgggtcccattgtattgccagcgttgtattttgttggaccgaagatcccggagtctattgttaaagatccagaatacgatgagttgttcaagctaatgagcacatgtggtcgactcttgaatgatgttcagagttttgagagggagtacaaggagggcaagttgaacattgtttctctcctcgttcttcatggtggctccatgtccatatcagatgccagaaggaaattacagaagcccatagacacatgtaggagagacctcctaagactagttcttcgtgaagaaagtgttgttcctaggccatgcaaggaattattctggaaaatgtgcaaggtctgctacttcttttactcgagaactgatgggtttaggtcaccagtggagagggccaaagaagtgaatgcagtgatcaacgagccattaaaactacaagaaaaccatacacacatgtctgttttgtagctcgagacccagctttcttgtacaaagtggt

SEQ ID NO: 642 - DNA, 1715 bp, Zea mays
ttgttcatcggtagtttttcttttcatgatttgtgacaaatgcagcctcgtgcggagcttttttgtaggtagaccgcgggatatcacaagtttgtacaaaaaagcaggctcctgcaggaccatggagaagatccgcgccgcgggtctgctcaagacgcaggggctcatcgccggacagtgggtcgacgcatacgatggcaagaccatcgaggtgcaaaatccagcaactggtgaggtccttgcaaacgtgtcctttatgggcagcagagaaacatctgatgctattgcttctgctcacagtacattctattcttggagtaaactcactgcaagtgagagaggcaaggcactaagaaaatggtacgatctaattatttcacacaaggaagagcttgcacttctcatgacactggagcaggggaaacctatgaaagaagcccttggtgaggtcaattatggtgcaagtttcatagaatattttgcagaggaagcaaagcgcatatatggtgatataattcctccaactttatctgatcgcagattgttggttctgaagcagcctgttggggtagttggagctattacaccatggaattttccattagcaatgataacccgaaaggttggaccagctttggcctgtggctgcactgttgttgtcaagccatcagagttaacacctctgacatcattagctgcagcagatcttgctcttcaagctggaataccagcaggtgcactaaatgttgtgatgggcaatgctcctgagataggtgatgcattactgcagagtacacaggtcagaaagattacgttcactggatcaacagctgttggcaaaaaactgatggctgaatctgcaaatactgtgaaaaaggtctctttggaacttggtgggaatgcaccttgcattgtttttgatgatgcagacattgatgttgctgttaaaggcagtcttgctgccaagttccgtaacagtggacagacatgtgtttgtgcaaacaggatattggtgcaagaaggtatctacgaaaagtttgcatctgcattcatcaaggctgttcagagtttgaaggttgggaatgggctagaagagagtacatctcagggtcctctgattaacgaagctgctgttcaaaaggtggagaagttcataaatgacgcgacttcaaagggagcaaatgtcatgctaggtggtagaagacacagcctggggatgtcattttatgagccaactgtagtagggaatgtcagcaatgatatgcttcttttcagagaagaagtttttggtccagttgcaccccttataccattcaaaactgaggaagaagcagtccatatggccaacgatacaaacgcaggcttagctgcatacatatttaccaagagcatacctcgttcatggcgtgtatccgaatctcttgaatacggcttagttggggtaaacgaggggattatttcaacagaggtggcaccatttggcggagtaaagcagtctggtcttgggagagaaggatcgaagtacggcgtcgacgaatacttggagctcaagtacatctgcatgggcaacttgggttagctcgagacccagctttcttgtacaaagtggtgatggggatcccccaccctgcaatgtgaccctagacttgtccatcttctggattggccaacttaattaatgtatgaaataaaaggatgcacacatagtgacatgc

SEQ ID NO: 643 - DNA, 1517 bp, Zea mays
cacaagtttgtacaaaaaagcaggctcctgcaggaccatgggtaaaagaaagcggtcgtcatgtcaacaagataaccataatgattctctagccagcaaaataatgagaactagaatcccagatcttcctgaggacatttggtctcatgtacattccctaatgccaatgcgtgatgctggccgtgctgcttgcctatctcgtgcctttttacgttcctggagacgtcatcctaatcttatctttaataaggatacgattggcatgaaaaaaaatctatatggagagaatttccaccacaaaattagccgcattctcaggaatcactctggcattagtttgaaagcattcaagcttgactacagtggcatgtgtgggttcgatggaactagttatcttgacagttggcttcaggctgctcttaatccagggattgaagaagtcaccctctggttgttccatacaaggagaatatatgaattcccatgctcacttttatctgatggggttcgaaattcacttcggtaccttaaacttcgttgttgtgctctccgtcccacagttgaacttgcccccatgagaagcctaacaagtttacatttgtcctttgtgagcattaaatgggatgggttaaagcgcctcctttccaactcccttgctctggaggaattagagctagtatgttgtgacaagatcgtttgcctcaagataccttctgccctgcagcgtctcaacagccttaatatttatggatgctcgcccctcaaagtgctagagagcaaagctccaaatctctctagtctttctcttttacattttggaggcaggctagtcttctcacgtgtgaaaacattgcaaatgaagaaactaatcactgaaagtactgtctatgatgctcgtaccaggctgccatccattatgcccaatcttgaaactcttgtcataaactcatttgattgggttgttgatgcaccaatgctgcctaccaaattcctctgtcttaagcacctgaccgttcgcttgtcatcaggaacaaccattacccaggcatttgactatttctctttggtttctttccttgatgcgtctccttccttggagacttttatattaaatgtgagtgggaaaggcatgatccatgaatcgatttctgcgcatccacaattgaggcacacacctgagcaccaccatggccacctcaggagtgtgaagatatgtggtttcagctctgagaaaagcttatttgaactaacacgttatattcttgagaatgcggtgtcactgaaatttcttacactggacaccttttatggggatcggtgtggtcagggtaagtgtacaagttgtttacccacgcctgatgtttttatggatgtttccaaagcgatctcaggtatcaagacatacatcgagaacaaagttccatccacagttaaactaactgttctggagccttgcagccggtgccatgttagaagagtaatttagctcgagacccagctttcttgtacaaagtggt

SEQ ID NO: 644 - DNA, 1834 bp, Arabidopsis thaliana
acaagtttgtacaaaaaagcaggctcctgcaggaccatgtcttatgatgagcacacatcatcatcattcacatacataagccaaatgggtgtgtggtggatagtgctggtggtggctgtcttgactcacacggcgtctgccgccgtgagagaatatcattgggaggtggagtacaagtattggtcgccggactgcaaagagggcgccgttatgaccgtcaacggcgagtttcctggtcccaccataaaagccttcgccggagacaccatcgtcgtcaatctcaccaacaaactcaccaccgaaggccttgtcatccattggcatggaatccgtcagttcggaagtccatgggcagatggagcagcaggagttactcaatgcgcaattaaccctggagagacttttacctacaatttcactgttgaaaagccgggaacacatttctaccatggacactatggcatgcagagatcagctgggctatacggatcgttgattgtggacgtggctaaaggaaagagcgagagattgagatacgatggtgagtttaatctcttactcagtgactggtggcatgaggctattccctcccaagaactcggtctttcttccaaacctatgcgctggatcggtgaagctcagagcatattgataaatgggaggggacaattcaattgttcattagcggcgcaatttagcaacaacacatcattaccaatgtgcacgtttaaagaaggtgatcagtgcgccccacagatactccacgtggagccgaacaagacttaccgaatcagactctccagcaccaccgctcttgcctccctcaacttggctgttcagggacacaagctagtggtggtcgaagccgacggcaactacataacgccgttcacgaccgacgatatcgacatatactccggcgaaagctactccgtccttctcaccaccgatcaagacccttcacaaaactattacatctccgtcggcgtccgtggccggaaaccaaacacaactcaggcactcactatattaaattacgtaactgcccctgcttcaaaactcccttcttctcctccaccggtgactccacggtgggacgatttcgaacgaagcaaaaatttctctaagaagatcttctcagcgatgggatcaccatcgccgccgaagaaatacagaaaacggttgattcttctcaacacacagaatctaatcgacggatacacgaaatgggcgatcaacaacgtctctctagtgactccggcaacgccgtatctcggttcggttaaatacaacttgaaactcggatttaaccggaaatcgccgccgaggagttaccgtatggattacgatattatgaatccaccgccgtttcctaacaccactacaggaaacggaatatacgttttcccgtttaatgtaacggtcgacgtgattatccaaaacgctaacgttttaaaaggtattgttagtgagattcatccatggcatcttcacggtcacgatttctgggttttgggttacggtgacgggaaatttaaaccgggaattgatgagaagacgtataatttgaagaatccgccgttacggaatacggcgattttgtatccgtatggatggacggcgataaggtttgtgacggataatccaggggtttggttttttcattgtcacattgaaccgcatttgcatatgggaatgggtgtggttttcgcggagggattaaaccgtattggtaaggtacctgatgaggcgttgggttgtggtttaaccaagcaatttctcatgaaccggaaccgcaattagctcgagacccagctttcttgtacaaagtggt

SEQ ID NO: 645 - DNA, 583 bp, Zea mays
acaagtttgtacaaaaaagcaggctcctgcaggacctcgcaagaagcaagcgacaatgtcgccggcgcgcagcagcagcagcaacgtcttcgatccgctgtcgctggacttctggccgtcgtccgccgacccgttcggcgtcgtccgaccgctggcggagcagtgccccgtcctcaccaacgtgcgcgtcgactggaaggagacccccgaggcgcacgtgttcagggccgaccttccgggcgtcaggaaggaggctgccaaggtcgaggtggaggacggcaacgtgctcgtcatcagcggcgagcgcgccagggaggaggaggagaaggaggaggccggcaaggacgaggcgtggcgctggcgcctcgtcgagcgcagcagcggcaggttccagaggcggttccgcctgccgcgcggcgccaggctggaccaggttcacgcgtccatggagaacggcgtgctcaccgtcaccgtgcccaaggaggaggccaagaagccgcaggtcagggctgtcgagatctctggttgatcgatccgttcactgcatgctagctcgagacccagctttcttgtacaaagtggt

SEQ ID NO: 646 - DNA, 963 bp, Zea mays
acaagtttgtacaaaaaagcaggctcctgcaggaccaccatcttcgagcgcgatttggcgatggcggcggcgcaggtggtcgcgaaggggagcgtggtgtcgccgtgcggcaatcgagcggtgccgggcctcttgggcaggcggagggatgccgtggcggcgcagatgacgccgtcggcggtgcggatcgggggctcctggaggaagaacgcgtttcctggcgtgaggctagccttggggacgaggagatccaggcccgcgtcccggagtttctccgcctcgccggtgcagatgaacatgaaccttgcgattgggaaatcaatgaggtggtgggagaaggggttgcagcccaacatgcgtgagatcgagtccgcccaagaccttgtagattccttaaccaacgccggcgagaggctcgtcgtcgtcgacttcttctcccctggctgcggcggctgccgtgctcttcacccgaagatttgccaatttgcggagcggaaccctgatgtgctgttcttgcaagtgaactacgaggagcacaagtctatgtgctacagccttcgtgtccatgtgctacccttcttcagattctacagaggagcacagggacgactctgcagcttcagctgtacaaacgcaactattaagaagttcaaggatgcacttgcgaagcacaagccagatagatgtacctttggcccaaccagggggctagacgaatcggagttattagccttggcagcaaacaaggaactccagttcacctacaccagggagccagaactgactcccatgggagatacccccggggaggtcattgctcccgagcccgcaaagcttcctgccgctacgaagcctttggtcaagctggggtcggaggaaaggtcattggtctctccaggaagatgagacggtccgatgcttccgttctgtagctcgagacccagctttcttgtacaaagtggt

SEQ ID NO: 647 - DNA, 1039 bp, Nostoc sp. PCC 7120
acaagtttgtacaaaaaagcaggctcctgcaggaccatgatggccgacgtaattacagattcagttcccgttactgttctgactggctatttaggcgcaggtaaaacaaccctactcaaccatatcctcacctacgagcatggcaaaaaagttgctgtcatcgttaatgaatttggggaagtaggcattgataaccaattagttattgatgcagatgaagaaatttttgagatgaacaacggctgcatctgttgtaccgttcgtggggacttaatccggatcattagcaatttgatgaagcgccgtgataagtttgaccatctagtaattgaaactactggattagctgaccctgcaccagtgattcagacattctttgtagatgaggatatgcaaagtcaactgtctttagatgcagttgtaacgctggtagatgccaagcatatttggcaacattgggatgcagacgaagcccaagaacagattgcctttgctgatgtgattttacttaataaaacggatttagttaccccatcagaattagatgaattggaaaagcggattaggtcgatgaatgcgatcgccaaaatctaccgtactcgtaattctgagttagcaatggacgctttgttgggtgtgaaagcctttgatttagatcgtgctttagagatagatcccaattttttaggtgaagatgcccacgaacatgatgatactgttttttctgtggctttagtacaagagggtgaactcgacggggaaaaattaaacgcttggatttccgaattgttgcgtacccaagggactgatatcttccgtatgaagggcatattaaatattgctggggaagataatagatttgtcttccaaggggtgcatatgatattcgatggtagacccgatcgcctctggaaacccaacgaaaaacgcaaaaacgaactagtattcatcggtcgcaatttagatgaagcccaactcaagcaagattttctcgcttgttttgcttagctcgagacccagctttcttgtacaaagtggt

SEQ ID NO: 648 - DNA, 463 bp, Zea mays
acaagtttgtacaaaaaagcaggctcctgcaggaccatgccggagacgggtcaggccgcggagagggatgagcagcagcagtcccgagggatagcactgatgcagggcatctgcgccgtggtgtaccgcaaggccgataacacgccctgccccatcaagcagggtctctacttgggatctgttggagcagcattcaataaggacgctctcaagagcttgaacatcacccatatcttgatcgttgcaaagtcactggatccagtatttccagctgaatttaattacaagaagatcgaagtacttgatatcccagacactgatctgttaaagcattctgatgaatgctttggtttcatagatgaagctataagctctggaggcaatgttttggtccattgctttgctgggcggtcaaggagaagcatcaaatagctcgagacccagctttcttgtacaaagtggt

SEQ ID NO: 649 - DNA, 583 bp, Glycine max
acaagtttgtacaaaaaagcaggctcctgcaggaccatggagggtggaagatcatctgcttcaaatgggaattgtgaggttcggtatagagggattagaagaaggccatggggcaagtttgcagcagagattcgtgaccctacgagaaaagggacaaggatatggcttggaacatttgacactgcggaacaagctgctcgagcttatgatgctgctgcttttcattttcgtggtcatagagcaattctcaacttcccaaatgagtaccaatctcataatccaaactcttctttgcctatgcctctaattgtgcctcctccttcttattcttcttctttcacttctaattattctggtgatgataataaccaccttgtgagacctggagaaataatgcaaggtggtgatcttgatgacacttttgagttggagtacttggataataagttgctcgaggaactccttcagatgcaagataacagacacttctacaagtgaaatataacacaagccaaccagctaggtagtactgctatgtatggcatgaaatagctcgagacccagctttcttgtacaaagtggt

SEQ ID NO: 650 - DNA, 223 bp, Zea mays
acaagtttgtacaaaaaagcaggctcctgcaggaccatgccgtcgcacgagaccttccggatcaagaagaagctggcgaagaagatgcgccagaaccgccccatcccctactggatccgcatgcgcactgacaataccatcaggtacaacgccaagcgcaggcactggcgccgcaccaagctcggcttctagctcgagacccagctttcttgtacaaagtggt

SEQ ID NO: 651 - DNA, 490 bp, Brassica napus
acaagtttgtacaaaaaagcaggctcctgcaggaccatgaagtcatcatcgacgttgctcacaagcttaaaccagagacagccatcttcatcaccgacgagaaaaccaccgaagcaaaagaggaaagcaacgacgacgacgaacgataacaaacccatcaaagtccgttacatatcgaatcccatgagagttgagacttgcccttctaagttcagagagcttgttcaagaactcaccggtcaagacgccgagctacctccggatcccaccacttacgccgccgcagatccccaacaagaggagataaatcctgagccgttggaagaagtggtcagtgagtattattcaccgttggatgaagaagtttttagtgctcctcaaatgtcggcaggtctgtctgcgtttttctcgtctgggttttacaatgtgaatgccttagggagcattggctctctctagctcgagacccagctttcttgtacaaagtggt

SEQ ID NO: 652 - DNA, 784 bp, Glycine max
acaagtttgtacaaaaaagcaggctcctgcaggaccatggggagaggaaagattcccattcgaagaatcgaaaattcgacgaaccgacaagtgactttctgtaagagaagaaatgggttgctgaagaaaactagagaactatccattctctgtgatgcagaagttggagtgatagtgttttccagcactggcaagctttatgaatattcaaacaccagcatggaaacaatcattgagcgctttaacaagcaaaacaataatcatcatcggctaatggatgctacttcagcaatcaagggagaagcagcaagcttgaggcaacaactgcagcatttgcaagaaaaccacaggcaactgatgggtgaagaactttctggtttgggtattaatcagctaaaacatctggaaaatcaactacaaatgagtttgaataacgttcgcaataaaaaggatcacattttcagtgatgagatcaaggaattacaacaaaagggaagcttgattcgtcgacaaaatgaagaacttcataagaagatagaccttatccacaatgaaaatgcagaactaaagaaggttattgaagcaaggcataaggaagaagaaagggcagcactcaaacctccatgtgctatcaaaaatagatatgatacacttgaccctaacagtctgcaacaaaggcagtcccaaccccaacccagtgaaccatcagccgaagtgatgattatggggtactccctcaaattgaagatgtagctcgagacccagctttcttgtacaaagtggt

SEQ ID NO: 653 - DNA, 1315 bp, Zea mays
acaagtttgtacaaaaaagcaggctcctgcaggaccatggccggctccgagcagcgcgtcgtcgccgtcatcatggtcggcggccccaccaaagggacgcggttccggccgctgtcgctgaacgtgcccaagccgctcttccctatcgccggccagcccatggtgcaccaccccatctccgcctgcagccggatcccccacctggcacagatatacctcatcgggttctatgaggagcgggagttcgcgctctatgtctcgtctatctcccacgagctcaggatccctgtcaggtacctacgagaggataagcctcacgggtcagctggagggctctacagctttagagattacatcatggaagacagtccgtcacacatagttctgctgaattgcgacgtctgttctagcttccctcttccagacatgctagaggcccataaaaagtatggaggaatgggtactttactagtcaacaaggtatcagcagagtcagcaaaccagttcggcgagttggtagctgatcctgaaacaaatgaactgctgcactatacggaaaagccggagacttttgtgagtgatctcataaattgcggagtatatatatttactcccgatatccttagcgccattgaggatgtcttaaaacagaaaaaagacagagcaaatttgcggcgtgtatctagcattgaagctcttcattcagcaactaaggcgcttccaccagactttgttaggttagatcaagacattttatcccctcgagcgggaaagaaggagctgtacacataccagacacttgatttctgggaacagatcaaaaccccagggatgtctttgagatgctctgggttatatctctctcagtttcgccatacctctcctcatcttttagcctcaggagatggcaaaagaactgccactattgttggcgatgtctatatctatccatctgccaaggtgcatcctacttcaaagattggcccaaatgtctctatatcagcaaatgcacgcgttggagctggtgccaggcttatcaattgcataattctggatgatgttgaaattatggaaaatgctgttgttatacattcaattgtagggtggaaatcatccattggaaaatggtcacgtgtacagggcgaaggtgatcacaatgccaaacttggcattactattcttggtgaagccgttgatgttgaagatgaagtagttgtagttaacagcatcgtgctcccaaataaaactctcaatgtcagtgtccaagaggagatcatcctatagctcgagacccagctttcttgtacaaagtggt

SEQ ID NO: 654 - DNA, 1627 bp, Oryza sativa
acaagtttgtacaaaaaagcaggctcctgcaggaccatgctgggagaggccgcctcaccgtggagcctggccggcgcgggcgcggccgtggcgctgctgtggctgtgcgcctggacgctgcagtgggcgtggtggacgccgcggcggctggagcgggccctgcgggcgcagggcctccggggcaccaggtaccgcctcttcatcggcgacgtggccgagaacggccggctcaacagagaggccgcgtcaaggccgctgccgctcggctcgcacgacgtcgtcccgcgcgtcatgcccttcttctgcaacgtcctgaaagagcacgggaaactgtcgttcgtttggactggcccaaagccattcgtgattatcagagaccctgacttagcgagggagattttgtccaacaagtctggcaatttcgccaagcaaacgaccgcgggtattgctaagttcgtagttggcggagttgtaacgtatgaaggtgagaaatgggcaaaacatcggagaattctcaaccctgccttccaccaggagaaaataaagcggatgctgccagtgtttttagcatgttgcaccaaaatgatcactagatgggtgaattcaatgtcttcagaaggaatatctgagttagacgtttgggatgaatttcaaaatcttactggagatgtcatctcaagaacggcatttgggagcagctaccaggaggggtggagaatttttcagttacaagaagagcaagctaaacgcgtacttaaagcttttcagagaatctttatcccaggctactggtacttaccaatcgaaaacaacagaaggatcagggaaattgatcaagaaatccgcacaattctgcgaggaataatagtaaaaagagacaaggcagttagaaatggtgaaggtagcaatgatgatttgttgggattattggtggaatcgaatatgaggcaatcaaatgaaaaagaagatgtgggaatgagtatagaagatatgattgaggaatgcaagttattttacgctgctggttcggagacaacatcaatgttgctcacttggactttaattctgctaagcatgcaccctgaatggcaagagcaggcaagagaggaagtgatgcaccattttggaagaaccacaccagatcatgatggcttgagtcgtctaaagattgtaacgatgattctccacgaggttcttaggttgtacccaccggtggtattcctccaaagaacaacacacaaggaaatagagcttggtggcatcaaataccctgaaggagtgaacttcacattgcctgttctatccattcaccacgatcctagcatctggggacaagatgcaatcaaattcaacccggaaaggttcgccaacggagtctccaaggcaacgaagtttcagaccgcgttcttttcgtttgcatggggtcctcggatctgccttggccagagctttgcaattctggaagccaagatggcgctcgccaccatcctccagagcttctccttcgagctctcgccgtcatacacccacgcaccacacaccgtgctaactctccaaccacagtacggttctccaattaaattgaagaagctctagctcgagacccagctttcttgtacaaagtggt

SEQ ID NO: 655 - DNA, 1562 bp, Oryza sativa
acaagtttgtacaaaaaagcaggctcctgcaggaccatgtcctccgccggccacgccgtcgaccagcagcgcaaatccaccacgatgaaggcgcacttcgtgctggtcccgatgatggcgcagggacacatgatccccatgaccggcatggcccgcctgctggccgagcatggcgcgcaggtcagctttgtcaccactccggtgaacgccgccaggatggcaggattcgtcaccgctgtggaggcggctggcctggcagtgcagctggtgaagctccccttcccggccaccgagtttgggttgccggacgggtgcgaaaacctggatatgatccagtccagggatctcagccgaaacttcatggaggcctgcggagcgctccgggagccgctcacggcgaggctccgtcagctatgcccacctccaagctgcatcatatctgacatggtgcagtggtggaccggtgaaattgcaagggagctcggtatcccaaggctaacatttgatggcttctgtaccttcgcctcccttgccaggtatatcattttccgcgacaaactgttggacaatgtcgcagatgaggagatcgtcactttctcagggttccctatgctgcttgagttgccaaaggctagatgccctggaagcttgtgtgttccaggtatggaacaaattcgtgataagatgtatgaggaggagctgcaaagcgatggcaatgtaatgaacagcttccaggagctggagactctgtacatcgagtcctttgaacagataacaggtaagaaggtctggacaatcggcccaatgtgcctctgtgacagagacagcaacatgatggctgctagaggaaacaaggcatcagtggatgaggcaaagtgcttgcaatggcttgattcaaagaagcctggttcagtgatctttgtcagctttggcagcctcgccagcaccgcacctcagcagcttgttgagctgggactggggcttgaagcttccaaggagcctttcatctgggtgatcaaagcaggaaataagtttccagaagttgaggaatggcttgcagatgggttcgaggaacgcgttaaagacagaggcatgataataaggggctgggcaccacaggtgatgatcctatggcaccaggccattggagggttcatgacacactgtgggtggaactcaacaatagagggcatttgcgcgggcgtgcccatgatcacatggccacatttcgcagagcagtttttgaatgagaaatttgtggtgaatctgctgaaaattgggctggagattggagtgaaaggagtggcacaatggggaagtgaacataaagaagttagggtgacaaggaatgctgtggagacagcagtgtccacattgatgaatgatggagaagctgcacaggagatgaggatgagagcaaaagacttgggtgtaaaggcaaggagggctttggaagagggaggttcttcctatgataacataagcctattgattcaagaaatgggaaacaagcaaaatgcatctggttagctcgagacccagctttcttgtacaaagtggtg

SEQ ID NO: 656 - DNA, 2113 bp, Synechocystis sp. PCC 6803
acaagtttgtacaaaaaagcaggctcctgcaggaccatgtctccagcccccatgcccgttaccaccgccgaacaagatcgcgatgtagtggtgatcgacgcagtggtggaggaagttcgccccccccgtttgcccaaaagtcatctggaggatttaggacctgttagtgatatgttcccggaaagttgggaatatcacccagatttgatcatggagttttatcgcaagcggccgttacaagtattaggtcgtttaatcaatattttgtttcccctattgcgatttattctgggtatttggtgggaaaaattgaggggtaaagaccccaccgtttccagggcgaaagctattcaattaagagaactattaaccaatcttggccctacttatatcaaagttggccaagctctttccaccaggcccgatttagtgccgccggtctttttggatgagttgacaacgttacaggaccaattaccttcctttcccaacgaggttgcctatcgttttattgaagaggagttgggggcccccgccgaggaaatttacgccgaattatctccggagcccattgccgccgcctccttggggcaggtgtataagggtaagttgaaaaccggcgaagctgtggcagttaaggtacaaaggccagatttggtgcgacgcatcacccttgatatttacatcatgcgctccctctccctctgggcccggcgatcggtgaaaagattgcgctctgatttggtggccattaccgacgaattggccagtcgagtattcgaggaaatgaactattaccaagaggccattaatggcgaaaaattcgcccaactctatggcagtttgccagaaatttatgtgcccagtatctattggcaatacactggccgacgggttttgaccatggagtgggtggaaggaattaagttaaccaatatcaaagcgatccaagcccagggtattgatgctacccatttggtggaagtgggggtacagtgctccctgcggcaattgttggaacatggctttttccacgccgatccccaccccggcaatttattggccatggcggacggccgtttggcctacttggacttcggcatgatgagtactattcagccttaccagcgctatggtttgatcgaggcagtggttcatttggtgaaccgggattttgattccctagctaaggattatgtcaaactggattttctcaaaccagatacggatttaaaaccgattattcccgcccttggtcaggtgtttggtaatgcgttgggggccagtgtggcggagttaaactttaagagcatcaccgatcaaatgtcggccatgatgtatgagtttcctttccgggtgccggcttattatgctctgattattcgttccatggtcaccctagaaggtattgccattggtattgatcctaacttcaaggtattgagcaaagcctatccctatatcgctaaaagattgttaacggatcaatcagaagagctacgcacttccctgaaagaattactatttaaagaggggagtttccgatggaatcgtttggaaaatttattgcgtaatgccaaaaattcccctggctttgattttgattatgtgcttaatgaagcaacagaatttttactttcagaccggggacaattcattcgcgatcgcctggtggcggaattagtcaacagtattgatcaactggggcgcaacacttggcaacaggtcagccacaatatccaggaaagaattagttttctgggtgacttaggtaatggcaacggtaaagcccatcaaaccaaaacgatcaaagttgtgcctcaacccgccatcgctcaacaggaggaaacttggcagcatttacaaaatctttggcaaattcttaaagagacccccggttttgaccccctcaagtttgtgccggtgttgagtcaaattattgttaatcccacttcccgtcggatgggtcaacaggtggcggaaggactactgcaaaaggcgatcgccagggtaatccggcaatgggccctggctttggaaagtcagcccaatccagccatcaaaatccgcaatgcagcctagctcgagacccagctttcttgtacaaagtggt

SEQ ID NO: 657 - DNA, 2080 bp, Nostoc sp. PCC 7120
acaagtttgtacaaaaaagcaggctcctgcaggaccatggctctattcatgactgtgaagacacttcccccaaattcccgaccgattgagggcgaactacagctaaaggatacacaagccttggttgtgcgctcatcaagacccgtaagctctgaaagaccccaggtggtggtaactgcaaatctcgaacctgagacaatagtttacgaccctgtagcggtagcagagcattatcgtcatcgacccctgcaagttttgcggcggatttttgctgtgttggggcctactttctcctttgcctttgggttgtggtgggatattaaacggggagtagtcgtcaaaaatgaccgtcgtcgagctattgagttaaaagaattattaacgcaactggggcctgcttatatcaaaattggtcaagccttatctactagaccagatttagtccctcccgtatatttagaagaactaacaaggttacaagaccagttaccaccctttcctaatgaaattgcttaccaatttattcaagaagaattaggacagccaccacaagaggtttacgctgaactttcagcccaaccaattgcggctgcttctttgggacaagtttataaaggtaagttaaaaacaggggaagaagtagcggttaaagtccagcgcccagatttacgagaacgaattacgattgacttatatattttacgtgggctagcggcttggatacagaagaaagtcaagagggtacggagtgacttagttgggattttggatgaattaggcgatcgcatttttgaagagatggattatatccacgaaggtgaaaatgctgaacgtttcttccaactatatggtcatatgcaagacgtatatgtaccgagaatatactgggaatatacgaaccgtcgtgtcttgacgatggagtggatcaacggcacaaaactgacccagacagaagagattagctcccaagggatagatgctcgttatttgattgaagttggtgtgcagtgttccttaaggcaacttttagaacatggcttctttcacgctgacccccatcctggtaacttgttagccacaccagacggtaaactcgcttatcttgactttgggatgatgagtgagattaaaccaccgcaacgttatggtttaattgaggcgatcgtccacgtagttaatcgtgactttgaagggttagcaaaagattacgttaagttagatttcctttccccagaaacagacctcaccccaattattcccgcatttggcaaagttttcgctaatgctcaaggcgctagtgtcgccgaatttaacattaagagcatcactgatgagctatcagaattgatgtatgagtatcctttccgcgtacctccctactacgctttaatcattcgctctctcgttaccctggaagggattgctatctatatagatcccaactttaaagttttgagcgaggcttatccctacgtcgctaaacgtttgttaaccgacccagcaccagaattaagaatttcactgcgagacttgctttttaaagatggtagatttcgttggaatcggttagaaaacttattacgtaatgcgcggaaaaaccaagactacgaccttaacttagtagtgaatcaaggtgtagattttctctcatctgaacgcggttcttttattagagataagttagtcgatgaatttctcaacggaatcaatgctttaagtaaaaatgtgctgcataactttacctacctcctaagagaaagagtaggtatcacagccatcaacgaaactccagccgcgacagttgagcaacaacaaaccttagaacacgtcaaaaatattttaaatattttgcaagaaacccgtggctttgacccagcacagtttgcacctcaagtggctcagttggctttcaatcctggtgtgcaacgtttgggacagcaagttgctaatcaattatttcagaaagctactgtgcgtctaattcgggaattattaacagcagaagaggtcaagagtagtgaaattgaataccccacgagaaaagtgtagctcgagacccagctttcttgtacaaagtggt

SEQ ID NO: 658 - DNA, 1463 bp, Brassica napus
cctccgccgccgccgcgccggtaaccaccccgcccctctcctctttctttctccgttttttttttccgtctcggtctcgatctttggccttggtagtttgggtgggcgagaggcggcttcgtgcgcgcccagatcggtgcgcgggaggggcgggatctcgcggctggggctctcgccggcgtggatccggcccggatctcgcggggaatggggctctcggatgtagatctgcgatccgccgttgttgggggagatgatggggggtttaaaatttccgccatgctaaacaagatcaggaagaggggaaaagggcactatggtttatatttttatatatttctgctgcttcgtcaggcttagatgtgctagatctttctttcttctttttgtgggtagaatttgaatccctcagcattgttcatcggtagtttttcttttcatgatttgtgacaaatgcagcctcgtgcggagcttttttgtaggtagaccgcgggatatcacaagtttgtacaaaaaagcaggctcctgcaggacccagaggatcatcatcaatggatgagtataacgaaaccgtcaagaatcagatccaagcgcttgttcgtgttatcaaagtcgctcgtgcctatacagaagacaatgtcccttcccttatccaagagggtctttatctcggatccgtggctgcagcttgcaacaagaacctcttgaaatcttacaacgttacccatatcttaaccgtggcttcctccttgagacctgctcaccctgatgatttcctctacaaggttgttcgagttgtggataaggaagacaccaatttggaagtgtatttcgatgagtgtttcgatttcattgatgaagccaagaagctaggcggtagcgttcttgtccattgcttcgttggcaagtcacgcagtgtcactgtagttgttgcttacctcatgaagaaacacggaatgactttagcccaagcattgcaacatgttcagagcattagacctgtggcaagtcccaacgccggtttcatcaagcaattacaagacctcgaaaagtctttacaaggaaagcaagaacggattgcacaatctcaagtgtgaagaaccctagctcgagacccagctttcttgtacaaagtggtgatggggatcccccaccctgcaatgtgaccctagacttgtccatcttctggattggccaacttaattaatgtatgaaataaaaggatgcacacatagtgacatgctaatcactataatgtgggcatcaaagttgtgtgttatgtgtaattactaattatctgaataagagaaagagatcatccatatttcttatcctaaatgaatgtcacgtgtctttataattctttgatgaaccagatgcattttattaaccaattccatatacatataaatattaatcatatataattaatatcaattgggttagcaaaacaaatctagtct

SEQ ID NO: 659 - DNA, 914 bp, Glycine max
acaagtttgtacaaaaaagcaggctcctgcaggacctcaattatgaggaaaagggagagggagaatccttgtggcgtgtgtggccactatcacaaatacgaagaaggggaagtgtgttcaatttgcggtcaccggattccggttggatcggagaaaacttcgatacaagtcagtgcttttccttccgttgtcctgccggaatttctttacctaggaagctacgacaatgcgtcccgctccgagcttctcaagactcaggggatttctcgtatcctcaatactgttccttcttgtcaaaatctctacaagaactcgtttacctatcactgccttccagatgacaaaactttgccatttgatgaagcaattcagtttctagagcaatgtgagaaggacaaggagcgtgttctggttcattgcatgtcaggaaagagtaggtctccagctattgtgattgcatacttgatgaagttcaaagggtggagacttgcacagagttatcagtgggtaaaagaacggagaccttctgttgaattaactcaaggtgtgtaccagcaactgcaggagtttgagcaaaagatctatggaccgattgatagtggcagctctgtgccgcctggtttcttgcctacagcaccttcaattagctttggtttcccaaagatcaatgatccagctcagcttccttccttcagcactgctggaactccttcaatctttgcgcgagcacccctagatattgctccaaccgagtttacattcggtgccggtcagactcagaagaatgtggctggaaacccctataatgcaaatccagcaaatccaaatggcactgatatccaaatggatggttcttgatccttcaccagccacatgtgtgtagctcgagacccagctttcttgtacaaagtggt

SEQ ID NO: 660 - DNA, 1243 bp, Zea mays
acaagtttgtacaaaaaagcaggctcctgcaggacccttcaaccttatgtataaatgttccaatgaatatgctagggaggatgctggtacttcggattcaccattgtgttcagtggaaccacaaggagattcaaatgatactgatgttccaaggcatctgcgtaagccttcccgaaccttatcccgtgagagtctagaccaatcatctccttgtcgggatagctttatcaccagacatttcaaaggaaatggtgattcctcccgtggtcttcggttgacaatgaagctgcgagattttaacaagtatgccaagatagacagtgaattaagcaaagagatagaacaatggaatgacatgctgaggactgaagtagtaaagttgtgtcaagacaacaattttcaaacaggtttttttgaaggcactgataatagcactgttgttgatgcttacgagttgaaggttcgacttgagcacattctcgagaggatatctttgatctctgatgctgcaagtactgagcgtccatcacagatcacagattacctgtatattggtggtgctcttgctgctcggtcaacacacacacttaaacaccttggcatcacccatatattgtgcttgtgtgcaaatgaaattggacagtcagaatcgcagaagcctgacctttttgagtataggaatttctcgataaacgatgatgacaatgcagacattggtgatctctttcaagatggttctgatttcatcagttatgtggatcacttgcgtggcaaagtacttgtgcattgctttgagggaaaaagtcgaagtgcgactgttgttcttgcctacctgatgctgaggaaaaactgtactctcctggaagcatggaacatgctgaagaaggtgcaccgacgcgcgcatcccaatgatgggtttgctaagatcttgctggatcttgacaagaaactgcacgggaaaatctccatggaatggcaacacaagaggcctgcaatgaaagtgtgtcctatctgtggcaagaatgctggtctcagcagcagttcactcaagctccacttgcagaaggcacacaagaagatatcctctgggagcgtagacagtgcaatgactctggagatacaaaaagcattagaggcaatcaaagctggctggggcggcagtgacagcccagtgcataaatcacaatcacacatagaaggattttgacgtagctcgagacccagctttcttgtacaaagtggt

SEQ ID NO: 661 - DNA, 1750 bp, Saccharomyces cerevisiae
acaagtttgtacaaaaaagcaggctcctgcaggaccatgcaagcccccaatatctaccccttctctcaaacacagccacaagcactgcccgggttcacatacggtcctccacaacttgtttttgaccattctgctccgagagtagatcctttgcattctactgtaactataaattctccattacccttgcagcattataatggaccgaatgcccatataaacagcgcaaacaacaactacgcatactactatcatcatcccaacaataatgataacaacaaccatagtaacaacactataaaaaataacaacattaattctgttcttcccgccgttaatattcaaatatccaacaactcacattatagaaatacacaccaaattccttctgctcctcagcggctggtcagcatcataccggatccccacatgccgcccaatatttctcactttcagctaaataatattcaccctcaaatgcatgctcctgttgctactgatattcatttccaacaagtaccagtttacaataaaaccaataatggcattggtactgataacattaataacgataaacccgtaaactcgaatcagaatgaagtgctggacaatattgatgaacgttcctgtcatgaaattaacagggtagtttcattttctaaacattttgaaaacaacgaacttaccactacagcaaatgatctaaacattcaatctactatggatgaattagctaaactgaaatctttatcaaattctacccatttcaggcagagtattgctactcagaatttccattctttacaaaatcatatcacaaccatcgaaaaccgtctggcttctttacttactgacagacaacaagagcagcaacagttgaagcagcaagagtctgaaaaggagagctcttcaccgttttccaataagataaagttaccttccttacaggaattaactgactccatctccacccaacatcttccaacattctatgacaataaaaggcatgcttcggataccgatttaaagagtagcaccttacatggtccattatatcaccgtcacgcttttctttcaacctcttcttcctcaccctcccccacggccggttccgcgcctcttcaaaagttacaggttccaagacaagacgatccaaacgataagaaaatgaatatttcatcatctcccttcaattcaataacctacattccaaacactacgttatctccaatggtgcaaacgcagttaaagaacttaaccacttctaacctcaacacgaaaaagaagaataacagaggcagaccaagagctattcagagacaacccacgctgaccacttccagccatttcatcaataattccaatcctggtgctgctgcagtttcaacgacaactcccgccgctaatagcgatgaaaagaatcctaatgcaaaaaaaatcatcgagttttgtttccattgcggggagaccgagactccagaatggagaaagggaccatatggcacaagaactttgtgtaatgcctgtgggttattttataggaaagtcaccaagaaatttggctcaaaaagcagtaatttgttgttaagatatagaagatctattgatttagccaacgatcgtagaattcctgattttatcactattccaaacaggtttattcatgatatggataatgatcaaacgttggactctgagtataatacgatattgcaatagctcgagacccagctttcttgtacaaagtggt

SEQ ID NO: 662 - DNA, 1186 bp, Zea mays
acaagtttgtacaaaaaagcaggctcctgcaggaccatgaaggcggcaaaggagaggtgcggatctattaatctctctctttactttgggtggttgggaaggtcagttcgcaccctgtgtaatacggctcgggagcctgctaaagatagcatttgttgtcaagctgcgcaggcgcagccgcctggattagacccaagaacccgccgatctgcggcgaccagggcgaccggcgacatggatggcggtggcggaggaggagaggagtgggagggaccccccggctacgtgctttcgctcccggcggcggcgctgcccctgcccgtcgccgtctcctgcctggacgccaccgtccggcgcaaggggcgcagccatatccgccaccgtggccatccgtcgggctggtgggccttcaggctccccgtccccgcgccggaggaggcgaagaggccggttcccccagcgtcagcgaccaataatccgtccgaggagggccgttcctgtcctcgtcaccagcgcctgcccgtgcgccaggccccggcccccggtccacacactcccgcgcctggtgaggaagaagcctctgaaacgggggagacccccgccgcctccgaggacggtacccgcggcggcgccgccgctagcgccagcggtgtacctcgtcaagaagaagaaaaaatcggcttcggcgaggaagccgtggcggcccccgaagtcggcgaagcagtgcttgcactgcgggtcgtcgtcgacgccgcagtggcgggaagggccgctgggccgcagcacgctgtgcaacgcgtgcggcgtgcggtacaggcagggtcggttgctgccggagtaccggccgctggcgagccccaccttcgagccgtcggagcacgccaacaagcacagccaggtgatgcagctccaccggcagcggaagagccagggccagcaccaccctctgcccgcggagcatccgcgagccatggacgtcctccagtttccccagcggtggcaggtgaaggaggagtacccgccgacgccgctccaccagcctctgccgcatccggtggtggacggcagccttgccagcggcgagctgcgcgttggggacatggtcgacgctgcggcagatgcaggacacggcggcggcggaggcaagggaagtagctcgagacccagctttcttgtacaaagtggt

SEQ ID NO: 663 - DNA, 2071 bp, Saccharomyces cerevisiae
acaagtttgtacaaaaaagcaggctcctgcaggaccatgagtttagtaccatatgaagaaggttcgctgattttagatgatcctaattctaaatcagtggtggttgttaatccaacctcaggaactttatcatttttccaacaggacaacagtaataatgactctgaactaaatgaagaccagactgcatctttatcagcactggactttccttcagggattcatcaatacaaaagccctattgcttcctatgtgtgcccgcaatgtggtacggaaattaaccctgatattataaacagaagacaacttcatcgtcgagcctctgctggagtagaatcagaaagcagtaggctcagtattccagagaacactgtgccacttggatttgaatttgccaattcaagcttttcaagaagatattttcagtcattggaaagaaatcatcggcactacgccctacaaaacgatagtaacaataagcagggacagttcagcaaaaacaaatactttattccagatgatttgtttatccccggatactttcgtaaatttttcaaaatattgtctttgctgggaaatggtgcaagaggttctgtttacaaagttgtacacacaattggtaatactgaattaggtgtttttgcactaaaaaaaatacctattggaaatgatatggaatggtttaataagtgcatacgggaagtgaaagcgttgagttcgctaactcacaaaagtgccaatttgattacgtataatcatgtgtggctcgaaatggattcttcggttggatttgtcagatccattgatgggagccaatcggattcacaagaagaagttccttgtattttcattttacaacagtattgcagtggcggcaatttagaagactgtattctaagaaaagtgttcaataggttctcagataccgaatcacctgaagagaggaaaaaaaaatttagaactcgcaagaaaaatcacggtaaatcaggagaagttggcctatctacggaacagctcgtatccattataagggatattgcaagaggtttacacgaactgcacagtattggcctaatacatagggacttgaaaccatccaactgtttattattgactccatttaaaagtgacaatgagaatgacaacgtatacgacagggaacacaattcagatgagtttttcccatcaattgttattggcgatttgggggaaagtcagttggaaggagagtccagattgggtactggttgcacaggaacattagagtttacagcaccagaccttattatccaggggagaccagtttcttcttctacgttgccttcaagatcgagtcacacatacaatgaatacacctttgcttccgatatgtattctctaggaatgatttgctattttattgtcttcggtgaattgccctttgaaccacagttggatatagttgatttgaaggtacgcatcaaaaattttaggttcgacactgaaggtatgattgaaaagcatcaagcgatgaaattgaaaccaatagaccgtagaatatttcacctaatggacgctcttttacaaccaaataatgatgctagacccacagcgaagacagtggaggagacgttagatgaaatgctaataaattccaaacccggcaaaaaattctggaaagaaaatgtggatagcactttgaacttcagtacaatctcggaagtgaatgagaataccaacagttttactgatgattatattgacggagacaacgttactttatcattaccagcaccagaggaaaatttgagcaccgtatcaacccaaaacctccaaaagtattctgctttaaatagaacaatccaggtttgttacaaactagtttctatgatattaacgataatcatatttaagtgtaccaaaacggggtcgtggctctcttatatgtcactgatattgttgggaatggtttttaaatcaccagctgatgaaagaggtaagcatgcaagagcgttggttttactggccttcatcgccgcatgcaaaaaatacatatactagctcgagacccagctttcttgtacaaagtggt

SEQ ID NO: 664 - DNA, 1741 bp, Saccharomyces cerevisiae
acaagtttgtacaaaaaagcaggctcctgcaggaccatgccacaaagaattgagcttacctccgaaccagtcagaaaaccgcggtctactgagagctcactactcagaaagatacaaagagcgtgtagatccacattgcctgaaccagatttgggcttgaacttagatgtagctgactatatcaactcaaagcaaggagcaacccctagagaggctgtgttagcaattgaaaaattggtcaataatggggacacgcaagcagctgtttttgcactttcactactagacgtgctggtaaaaaattgtggttactctatacatttgcaaatctccaggaaggaattcttaaatgatctagtgaaaagatttccagagcaaccaccattgagatattccaaggtgcaacaaatgattcttgaagccatcgaggaatggtaccaaaccatctgcaaacatgccagctacaaagatgatcttcaatatatcaacgacatgcataaattactgaaatacaagggttatactttcccaaaagttgggagtgaaaacttggcggtgttgagaccgaatgaccaactgaggacacctagtgagctacaggaagaacaggaaagagctcaagctgcaaaactagaagagctgctaagaagcggcaagcccgatgatttgaaagaagctaataaactgatgaaaattatggcgggatttaaggatgacactaaagtagcagtcaaacaagcaattaacaatgaactaaataaactcaaaagaaaagctgatttattcaacgaaatgttgacttcagccgatgagcctgatcttgaaaatgaagctattcaagaattgtatggcgacttaaaatcagcgcagccgaaattcaaaaagcttattgaggaagaacgcgatgacgatgcgcttgttagtaatctatcaaaatttaacgatctagtgatccaattgttaaaaaggtacaagtcaataaaaggtatgaaggaagaagaactaaatgtccccgatacgaatgaaccggcaaaagagcttaatttgatagattttgatgacgatacaacagcaaacactccatctgtgacatctccaagcaaatctttgcaaccttttgacgatcttttaggggattttaataaggtaagtttatcatccccaaagtctcctcaagaaaacgacactgttgttgatatacttggtgacgctcactcaaagtcatctggtatagatttattagattttgattcgcaacctggagaaagtaaaaccgctctgtccgcatattctaactcgattgttctacctaatggtttactaaatagttcaagtaactccaaggaaatcacagctcaatcgcaaagacatatacttaaccaatcggatcacttacgcattgattacgaattaactcgtgagtcgatgacaaaactacgattagttatcttctattcaaacataagcagtgatccaataactaattttgcacttttagtggcatcacctaaaggcacgacattgtctctgcaaccgcaatcgggcaatatgctccaaagtaactccagagatggtatcaaacagattgcttccgtagagggtatatctgttaatttaggtaagcccataaaattgaaatggaaggctaattactgcaccaagggtgattcgaaggaagaatcgggcacgaccagtttgcccacaatatagctcgagacccagctttcttgtacaaagtggt

SEQ ID NO: 665 - DNA, 2752 bp, Saccharomyces cerevisiae
acaagtttgtacaaaaaagcaggctcctgcaggaccatggaaatcaagccagttgaggttattgatggcgttccggtttttaagccgtctatgatggagtttgcaaatttccaatatttcattgatgaaattactaaattcggaatagaaaatggtattgtcaaagtcattcctcccaaagaatggctggagcttttagaaggctcacctcctgcggaaagtttaaagactatacaactagactccccgattcaacaacaagccaagcgatgggacaaacatgaaaacggtgtatttagcatcgaaaacgagtatgacaataagtcgtacaatttaacacagtggaagaacttggccgaaagtctagactctcgaataagtcaaggtgattttaatgataaaactttaaaggaaaattgccgcgtagatagtcagcaggattgttatgatttggcacagttacaaattttagaaagtgatttttggaaaaccatcgctttttcgaaacctttttatgcagtggacgaaaactcttcaattttcccctatgatttaactttatggaatttgaataatttgccagattctataaactcaagtaacagacggttacttactggtcagtctaaatgcatttttccatggcatttggacgaacagaataaatgctctataaactacttgcatttcggtgctcccaaacaatggtattccataccgtccgcaaacacagaccaatttttgaaaattttatcaaaggaaccatcaagtaataaggaaaattgtccagcttttattagacatcaaaacatcataacttctcccgatttcttgcgaaaaaataatataaaatttaatagagtggtgcagttccaacatgaattcatcattactttcccttattgcatgtactccggattcaattatggttacaattttggcgaatctattgagttcatattagatcagcaagctgtcgttagaaagcaacctttaaaatgcggctgtggaaacaagaaggaagagcgaaaatctggtccgttttcaaatttatcttatgattctaatgagtcggagcaacgaggctccattactgataatgataacgatttatttcaaaaagttcgaagttttgatgaattactaaaccattcctctcaagagttacaaaatttagaagacaataagaaccccttgttctccaatattaatatgaacagaccgcaaagtagttctcttcggtctactacccctaatggtgtaaaccagttcctgaacatgaatcaaactaccataagcagaatttcttccccgttgttatcaaggatgatggacttatcaaatattgtggaacccactttggatgatccgggttccaagttcaaaaggaaagttttaactccgcaattaccgcagatgaatattccgtctaattctagtaattttggcaccccttctctaactaatacaaactccttactatctaatataacggctacatcaaccaacccatcgacaactacaaatggcagccaaaaccacaataatgttaacgccaatggcattaacacctctgcagccgcatctatcaataataacattagcagtaccaataatagcgctaataatagtagtagtaataataacgtttccactgtgccttcttcaatgatgcattcgtccactttaaatgggacttcaggtctaggcggcgataacgatgacaatatgttagctttaagtttagcgacactggctaacagcgctactgcgtcaccaagattgacgttaccgccgctgtcgtcaccaatgaatccgaacggccacacctcatataatggcaatatgatgaacaacaacagtggtaatggtagcaacggtagcaacagctattctaacggtgtgactacggctgctgccacaactacatcagcgcctcacaatctatccatagtgtcccctaatccaacatacagtccgaatcccctatctctttatttgaccaactccaaaaatccattaaattcaggtcttgcacccttatcaccttcaacatctaacatcccatttctcaagaggaataatgtggttacattaaatatttcaagagaagcttcaaagagccctatatcttcttttgtaaatgactatagatctccgttgggtgtaagcaatccactcatgtattcttccacaatcaacgattattcaaacggtactggaattcgccaaaatagtaataatattaatcccttagatgcaggtccatctttttctcctctccacaaaaaacccaaaatactcaacggtaatgataatagcaatctggacagtaataattttgattacagtttcacgggtaacaagcaagaatctaatccatcaatcttgaacaataatactaataataatgataactatcgtacatcttcaatgaacaataacggcaacaattatcaagcgcattcttctaagttcggtgaaaatgaggtcattatgtcagatcatggtaagatttacatttgtcgggaatgtaatagacagttttcctctggtcaccatctaacaagacataaaaagtcagttcattccggtgagaaaccccattcttgcccaagatgcggtaaaagattcaagagaagagaccatgttctgcaacatttaaataaaaaaattccatgcactcaagaaatggaaaatactaaattagctgaatcatagctcgagacccagctttcttgtacaaagtggt

SEQ ID NO: 666 - DNA, 1189 bp, Saccharomyces cerevisiae
acaagtttgtacaaaaaagcaggctcctgcaggaccatgactattgatggagacgtacatgaaatttccccatttttccaggttaggcaaactaaatggggcggtagggcttgtttcagtaatggtaatattcctaaagggacaacagtcttgcaagtcagtaattttacaggaacatctatttcctatgagttcaggaaggaagtttgtcacaattgtttcgcatacgctaatgcgaaaactatgaagtacaaactaaactacgattacctgagagatttggtttgtaatgcacactaccaaattaaccctaagaagtttctgggcgctggactgtggttctgttcagaacattgcagaacttcttatcttcaaataccaaatatcattgaattaattgaatgttatgagatattactgcatcattttccaagcatgctgaaaagatataattatacctctgaacaggaggaaaaattaaactctatcttaatttcggaaaatgtcatacagtcttcatgggatgagattgaaagtaaatggataccgcgcatcaacaacatgaaatctgcgaagagaataaatcaattaccacccacttgcgaagatgaatattgctgcattaggtttgtgtgcgagagtttgtttaatcttaaatatatggatcctcagtgcataacataccgagctttcaatatgttacaatcgaatgagcttagcaaaatatctaaatttcctgtcttactgcactttcaaaaattagtatttcaaacactctatattctattaccttcacatttgcatagaatgctctccataccgctattgagacatatattaggtactgaatatgggaatgcttttggtttatggcaagagggcgaagcctcagacagcagagaatattttggatactgggtatttccagaagcctcctatttcaaccactcttgtaaccccaatataacgaaatatcgtaaaggtaattcaatgctattcactatgaatagagatataaaaaaggatgagcagatctgtatcgattattccggggtactggacttaccaacagtaaaacgccgggcctttttggccgacagttggttttttgattgtgcttgtgaaagatgtaaatcagaattgcaatctgtccattagctcgagacccagctttcttgtacaaagtggt

SEQ ID NO: 667 - DNA, 1283 bp, Zea mays
acaagtttgtacaaaaaagcaggctcctgcaggaccacctccgtctgaccgtctgcacccatggccgctgaaggcgaggcgtcaatgtactacacgacggacgacgcgctctcgctcgtcggcttcggccgtttccagaccctcgtgctagcttactccggcctgggctggatcgcggaggcgttcgagatcatgctgctctccttcgttgggcctgccgtggaggcggattgggggatatcaggagcggagcagggcctcatcagcagcgccgtcttcgccgggatgctcatcgggttcatcgccggaggcctcatcgcggacagatacggcaggaggaccggtttccttttcactgcagtggtcactgccgtatttggtttgcttagcgccttctcgcccaactacgcatccttactcacccttcgctttgttgttggtctgggattgggtgctggccatgtgctatctacttggttcatagagtttgtccctgctgccaaaagaggtacctggatggttgttttccatgcttgttggactgtgggaacaatattggaggctcttcttgcgtgggctatcatgccagtacttggatggaggtggctgcttgcattgtcctcagcgccatgctttgttcttctcattttcttccctctaacacctgaatcaccaaggtatctttgctcgagaggtaggactatggatgctacagttatcttggaaagaatagcaaggatgaacaaagggactctccctcctggcgtactaattttcagaccagaaaagcatgttgacaacaaccttgggacttctgagacagcactgctaattgcagaagataatactggcattgaagaggacacaagttccaagtccagtggcattgtcgcatttcaggcactctggtcatatgatttgataagatcaacctttcttctatggttcatctatcttgcaaattattttacttattatggggtaatattgctaacttctgaactaagcaatgggaagaggaggtgtgcatctgtaagaacacatttgatgcaaccaaacagtggtaatctttatagagatgtgctggtgaccagtttggcagctctaccctgcaccgtctcggaacaccggtgttgggatcacttcttctcttggtcggattggcagcatagtttcacctcttgttattgttggcttgttagagagctgccgtcgaaaagaagctgtgttcgtggttgacctggtgctctagctcgagacccagctttcttgtacaaagtggt

SEQ ID NO: 668 - DNA, 1576 bp, Saccharomyces cerevisiae
acaagtttgtacaaaaaagcaggctcctgcaggaccatgttgtgttcagtaattcagagacagacaagagaggtttccaacacaatgtctttagactcatactatcttgggtttgatctttcgacccaacaactgaaatgtctcgccattaaccaggacctaaaaattgtccattcagaaacagtggaatttgaaaaggatcttccgcattatcacacaaagaagggtgtctatatacacggcgacactatcgaatgtcccgtagccatgtggttagaggctctagatctggttctctcgaaatatcgcgaggctaaatttccattgaacaaagttatggccgtctcagggtcctgccagcagcacgggtctgtctactggtcctcccaagccgaatctctgttagagcaattgaataagaaaccggaaaaagatttattgcactacgtgagctctgtagcatttgcaaggcaaaccgcccccaattggcaagaccacagtactgcaaagcaatgtcaagagtttgaagagtgcataggtgggcctgaaaaaatggctcaattaacagggtccagagcccattttagatttactggtcctcaaattctgaaaattgcacaattagaaccagaagcttacgaaaaaacaaagaccatttctttagtgtctaattttttgacttctatcttagtgggccatcttgttgaattagaggaggcagatgcctgtggtatgaacctttatgatatacgtgaaagaaaattcagtgatgagctactacatctaattgatagttcttctaaggataaaactatcagacaaaaattaatgagagcacccatgaaaaatttgatagcgggtaccatctgtaaatattttattgagaagtacggtttcaatacaaactgcaaggtctctcccatgactggggataatttagccactatatgttctttacccctgcggaagaatgacgttctcgtttccctaggaacaagtactacagttcttctggtcaccgataagtatcacccctctccgaactatcatcttttcattcatccaactctgccaaaccattatatgggtatgatttgttattgtaatggttctttggcaagggagaggataagagacgagttaaacaaagaacgggaaaataattatgagaagactaacgattggactctttttaatcaagctgtgctagatgactcagaaagtagtgaaaatgaattaggtgtatattttcctctgggggagatcgttcctagcgtaaaagccataaacaaaagggttatcttcaatccaaaaacgggtatgattgaaagagaggtggccaagttcaaagacaagaggcacgatgccaaaaatattgtagaatcacaggctttaagttgcagggtaagaatatctcccctgctttcggattcaaacgcaagctcacaacagagactgaacgaagatacaatcgtgaagtttgattacgatgaatctccgctgcgggactacctaaataaaaggcagaaaggactttttttgtagctcgagacccagctttcttgtacaaagtggt

SEQ ID NO: 669 - DNA, 1117 bp, Saccharomyces cerevisiae
acaagtttgtacaaaaaagcaggctcctgcaggaccatgtccccattgaacgtcggtatagttggtacaggtatttttgccagagatagacatctcccatcctaccaggaatttcctgacaaattcaaagtcattgccgccttcaacagacataaggcaaaagctttggattttgcaaaggttgctgacatacctgaaaataaggtttacgacaatctagatgaaattttgaatgaccctcatgtcgactacattgacgctttgctacctgctcaatttaatgctgatattgtcgagaaggcagttaaagcaggtaagccagttattttggaaaaaccaattgcggccaacttagaccaagcaaaggagattgtcaagatagcagaatccaccccattgcccgttggtgtggctgaaaattggttatatttaccatgtattaaaatcgcaaaggagcagatcgagaaaattggtcctgtagtagcattcacccacaattctaccggtccatttgttactcaaaataaatatttgaccacaacctggagacaaaaaccagagcacattggcggatttctatctgatggtggtgtccaccaattagctctcgttatttccctactcggtgaatttggatctgtttctgcattaacgagacaggtgcgtgaacgttccggtgcagatgatattgtctttgctactgtccagttgaaaaataaagaggttatcggaagttttacttatgggtctgcctttggtgctaccgaaaagtcggttttcttgaaagtctatggtaagaatggtaccgttaccgttgacttatcagacaaaaaagaccccgttgtaaaagtcaaattagggggttcagctgaagataacggtgacgaacaaatttttaaagtcgataatgatgaaagtttcggcgtcaacgctgaatttttgaattttcacgaagctgtcagcaagaaggacaaatccttatacctaggcacacccagaactgcatttcaccatttggcttgtgtggacgcgtttttaaaatcttctgccaagaatggtgactacgttaaaattgagcagccatagctcgagacccagctttcttgtacaaagtggt

SEQ ID NO: 670 - DNA, 2113 bp, Saccharomyces cerevisiae
acaagtttgtacaaaaaagcaggctcctgcaggaccatggcacagttctccgacattgataaacttgcggtttccactttaagattactttccgttgaccaggtggaaagcgcacaatctggccacccaggtgcaccactaggattggcaccagttgcccatgtaattttcaagcaactgcgctgtaaccctaacaatgaacattggatcaatagagacaggtttgttctgtcgaacggtcactcatgcgctcttctgtactcaatgctccatctattaggatacgattactctatcgaggacttgagacaatttagacaagtaaactcaaggacaccgggtcatccagaattccactcagcgggagtggaaatcacttccggtccgctaggccagggtatctcaaatgctgttggtatggcaatagcgcaggccaactttgccgccacttataacgaggatggctttcccatttccgactcatatacgtttgctattgtaggggatggttgcttacaagagggtgtttcttcggagacctcttccttagcgggacatctgcaattgggtaacttgattacgttttatgacagtaatagcatttccattgacggtaaaacctcgtactcgttcgacgaagatgttttgaagcgatacgaggcatatggttgggaagtcatggaagtcgataaaggagacgacgatatggaatccatttctagcgctttggaaaaggcaaaactatcgaaggacaagccaaccataatcaaggtaactactacaattggatttgggtccctacaacagggtactgctggtgttcatgggtccgctttgaaggcagatgatgttaaacagttgaagaagaggtgggggtttgacccaaataaatcatttgtagtacctcaagaggtgtacgattattataagaagactgttgtggaacccggtcaaaaacttaatgaggaatgggataggatgtttgaagaatacaaaaccaaatttcccgagaagggtaaagaattgcaaagaagattgaatggtgagttaccggaaggttgggaaaagcatttaccgaagtttactccggacgacgatgctctggcaacaagaaagacatcccagcaggtgctgacgaacatggtccaagttttgcctgaattgatcggtggttctgccgatttgacaccttcgaatctgacaaggtgggaaggcgcggtagatttccaacctcccattacccaactaggtaactatgcaggaaggtacattagatacggtgtgagggaacacggaatgggtgccattatgaacggtatctctgcctttggtgcaaactacaagccttacggtggtacctttttgaacttcgtctcttatgctgcaggagccgttaggttagccgccttgtctggtaatccagtcatttgggttgcaacacatgactctatcgggcttggtgaggatggtccaacgcaccaacctattgaaactctggctcacttgagggctattccaaacatgcatgtatggagacctgctgatggtaacgaaacttctgctgcgtattattctgctatcaaatctggtcgaacaccatctgttgtggctttatcacgacagaatcttcctcaattggagcattcctcttttgaaaaagccttgaagggtggctatgtgatccatgacgtggagaatcctgatattatcctggtgtcaacaggatcagaagtctccatttctatagatgcagccaaaaaattgtacgatactaaaaaaatcaaagcaagagttgtttccctgccagacttttatacttttgacaggcaaagtgaagaatacagattctctgttctaccagacggtgttccgatcatgtcctttgaagtattggctacttcaagctggggtaagtatgctcatcaatcgttcggactcgacgaatttggtcgttcaggcaaggggcctgaaatttacaaattgttcgatttcacagcggacggtgttgcgtcaagggctgaaaagacaatcaattactacaaaggaaagcagttgctttctcctatgggaagagctttctagctcgagacccagctttcttgtacaaagtggt

SEQ ID NO: 671 - DNA, 1213 bp, Saccharomyces cerevisiae
acaagtttgtacaaaaaagcaggctcctgcaggaccatgcagattttcgtcaagactttgaccggtaaaaccataacattggaagttgaatcttccgataccatcgacaacgttaagtcgaaaattcaagacaaggaaggtatccctccagatcaacaaagattgatctttgccggtaagcagctagaagacggtagaacgctgtctgattacaacattcagaaggagtccaccttacatcttgtgctaaggctaagaggtggtatgcagatctttgttaagactttgaccggtaaaaccatcactttagaggttgaatcctccgacacgatcgataacgttaagtcgaaaatccaggacaaggaaggtatccctccggatcaacagaggttgatctttgccggtaagcagctagaagatggtagaaccttgtctgactacaacatccaaaaggaatctactcttcacttggtgttgagactgagaggtggtatgcaaatttttgtcaagacactgacaggtaagactataaccctagaggttgaatcttctgacactatcgacaacgttaagtcgaaaattcaagacaaggaaggtattcctccagatcaacaaagattgatttttgctggtaagcaactggaagacggtagaacgctgtctgattataacattcagaaagagtctacgttgcatttggtgttgagattgagaggtggtatgcaaattttcgtcaaaactctaacagggaagactataaccctagaggttgaatcttccgacactattgacaacgtcaaaagtaaaattcaagataaagaaggtatccctccggatcaacagagattgatttttgctggtaagcaactagaagatggtagaaccttgtctgactacaacatccaaaaggaatctactcttcacttggtgttgagactgagaggtggtatgcaaatttttgtcaagacactgacaggtaagactataaccctagaggttgaatcttctgacactattgacaacgttaagtcgaaaattcaagacaaggaaggtattcctccagaccagcaaagattgatttttgccggtaagcaactagaagatggtagaacgctgtcggactacaatattcaaaaggagtccactcttcaccttgtcttgaggttgaggggtggtaactagctcgagacccagctttcttgtacaaagtggt

SEQ ID NO: 672 - DNA, 1081 bp, Saccharomyces cerevisiae
acaagtttgtacaaaaaagcaggctcctgcaggaccatgttagcagaattgtctcatagagaattgataaagttggcgcagaaaagatgtataccacctttattgccaaagtttcataagggacagtctggtgggagagtttgcattattggaggatgcgaagattatacaggggcaccgtatttcagcgccaatgctacagccttgatgggctgtgatttgacacatgtcatctgcgaatacaacgctggtacggtcattaaatcgtacaccccaaacctaatggttcatccataccttcgtatgagtaacaccaaattagacgttgatatggacgaacaaaggaagaaaatcaattccttattggatagaatccacgttgtggtaattggacccggcttgggtagggaccccctaatgttaaaatccattaaggatatcataagatatatacttgaaaaacatgagggcaagatcccgttagtaattgatgctgatggactgttcttagtaactcaagatagcgaagtcaaagaaatgctgaaaagctaccccaaaggtagagtgatcttgacgcccaatgtggtagaattcaaaagactatgtgatgccataggcaagaagggagactctcactccgagatgggcagcttgatcgcccaggaattgaattgtattgtggtggagaaaggtcagtcagataagatattctcacccgatagtgaaaaagacatgttgacgaacagcgaagagggcagcaacaagagggtaggaggccaaggtgatactttgacaggagctatatcatgcatgcttgcatttagtcgtgcaatgtatgactttaagatttgtgagcaggaagaaaagggagaatcttctaacgataaacccttgaaaaactgggtagactacgctatgttgagttgctacgcaggctgcacaattacacgagaatgctcccgcctaggatttaaggctaagggacgtgcaatgcagacgacagatctaaatgaccgtgtcggtgaagtgttcgccaaacttttcggttagctcgagacccagctttcttgtacaaagtggt

SEQ ID NO: 673 - DNA, 661 bp, Saccharomyces cerevisiae
acaagtttgtacaaaaaagcaggctcctgcaggaccatgaagttattgcatttatatgaagcgagcttgaagagaaggcccaaaactacgaatgcgataatgacaggtgcgctatttggaattggtgatgtttctgctcaattgttgtttccaacatccaaagtaaacaagggttatgattataaaaggacagctagggctgtcatctatggttctttaattttctcctttataggtgacaagtggtacaagatcttgaacaacaagatttatatgcgtaacagacctcagtaccactggtctaatatggttttacgggtagctgtcgatcaattggcgtttgcgccgctaggtttgccattttatttcacctgtatgtccatcatggaaggtagatcatttgacgtagctaagttgaaaataaaagagcaatggtggcctacacttttgactaattgggcagtttggccacttttccaagcgattaacttttctgttgttcctttacaacataggttactagctgttaatgtcgttgcaatattttggaacacttacttatcttataaaaactcaaaggttatggagaaagacaaggtacctgttcattatccacccgtggtcgaatagctcgagacccagctttcttgtacaaagtggt

SEQ ID NO: 674 - DNA, 1168 bp, Saccharomyces cerevisiae
acaagtttgtacaaaaaagcaggctcctgcaggaccatgtctgaaaaatcagctagcaataacaaagctgaattcaaaaggcagtcatcgccattcagagaaatcatctctgcggatcacccaatttataaacctgctaagggaaggtactggctgtatgtggcgctaccatgcccatgggcacaaagaaccttgatcaccagggccctgaaagggctagcgcctataatcgggtgcagtgtagcgcattggcacctggatgacaaaggctggcgattccttgaagaaggagatgggaaaaccaatgaaaggcactggtttgacattgcaggcggaattagctcagtaaatttaaataccagtactcctgtggctaacatacccaataacgcgcatcggttgttggtcgacggaacagatgaaccgcattacgggtacaagagactaagcgacttctatttcaaaacaaagccagactataagggaagattcaccgtacctgttctttgggacttggaaacatgcactatagtaaacaatgaaagcagtgatatcatcggaattatgaattccgctgcgtttgatgagtttgtcggcgaagaataccgtcaagtccgtctggtacctcggtctctagaggcacagattacagagttcaactcttgggtgtacgataaaatcaacaacggtgtatacaaggccggttttgcagaatgtgcagaggtatacgagagggaggtaacaagcctttttcaatatcttgacaaattggaaaatcttctggacaagaagtacacagatttggaggcggagtatggtaagaacaacaaggacaagatactagatcgctactttgccatcggagacactctgaccgaggcggacgtgagactctacccaacgatagtaaggttcgacgtggtataccatcaacacttcaaatgcaatctggccaccatcagagatgattattcccgtatacacacgtggctcaagaatatatactggcgccacgaagccttccagcgcacaacggactttacccacataaaactcggatatactcgctcgcagccacgggtcaacccgattgggatcaccccactggggcccaagcctgatatccgacctccatagctcgagacccagctttcttgtacaaagtggt

SEQ ID NO: 675 - DNA, 808 bp, Saccharomyces cerevisiae
acaagtttgtacaaaaaagcaggctcctgcaggaccatgtctacgttgaaagttgtttcatcaaagcttgcagctgaaatcgacaaagaattgatgggtcctcaaatcggattcactctacaacagctaatggagttagctgggtttagtgtcgcgcaggctgtatgtcgccagtttccactgagaggcaagacagaaacggaaaagggcaaacatgtatttgttattgctgggccaggtaacaatggcggggatggtctcgtgtgcgcaagacatttgaagctttttggttacaaccctgttgttttctaccccaagagaagcgagcgcactgaattctacaaacagctggttcaccaattgaattttttcaaagttcctgtcctgtctcaagatgagggaaactggctggaatatttgaagccggaaaagaccttatgcattgtagatgcaatatttggttttagtttcaagcctcccatgagagagccattcaagggcattgtcgaagaactgtgcaaagtgcaaaacattatcccgattgtttcggtggacgtccccacaggttgggacgttgacaaaggtccgatctctcagccctcaattaatcctgctgttcttgtatctctgactgtccccaagccatgcagctctcacataagggagaatcaaacaactcattacgtggggggaagattcattcctcgagatttcgccaataaattcggctttgagccatttggatatgaatccacagaccaaatattgaaactctagctcgagacccagctttcttgtacaaagtggt

SEQ ID NO: 676 - DNA, 1120 bp, Saccharomyces cerevisiae
acaagtttgtacaaaaaagcaggctcctgcaggaccatgagtaagaaaccaattgttttgaaattaggaaaggatgcctttggtgaccaagcctggggggaattggaaaagattgcggatgtaattaccatccctgaatccaccactagagaacagtttttgcgggaggtaaaagacccacaaaataagctctcccaagtacaagtcattactagaacagcaaggagtgtgaaaaacaccggtagatttgatgaagagcttgctcttgctttgccctcctccgtagtggctgtatgtcatactggtgctggttatgaccaaattgatgttgagccattcaagaaaaggcacatccaggttgccaatgttcctgatttagttagcaatgctaccgctgatacgcatgtatttttgctattgggtgccctaagaaacttcggtattggtaacagaaggttgatcgagggaaactggccggaggcaggacccgcatgtggttctccctttggatacgaccctgaagggaaaacagttggtatactgggtctaggtaggattggtcgttgtattttagagagattgaagccgtttgggttcgagaatttcatatatcataacagacaccagcttccttccgaagaagagcatggttgtgaatatgtaggattcgaggagtttttgaagcgttctgatatagtatctgtaaacgtcccactgaaccacaatactcaccatctaatcaatgcagagactattgaaaaaatgaaagatggtgtagttattgttaacacagcgcgtggtgccgtgatagacgaacaagccatgactgatgctttgcgttctggaaagattagaagtgctggtttggacgttttcgaatatgagccaaaaatatccaaagagttattatcgatgtcccaagtcttaggactgcctcatatgggcacacatagtgtagaaacaagaaagaaaatggaagaactggtcgttgaaaatgcaaagaatgtgatattgaccgggaaagtcttgactattgttccggaattacaaaatgaagactggcccaatgaatctaagccattagtttagctcgagacccagctttcttgtacaaagtggt

SEQ ID NO: 677 - DNA, 1681 bp, Saccharomyces cerevisiae
acaagtttgtacaaaaaagcaggctcctgcaggaccatgcaattgatttccatcctctctttgttgtcatcattgatgtgttcattgaccgttttagggtcttccgcaagttcctatgttaagtttcctgttcaaaagttggctgatattataaatatatgcacacaggatgtttctaccgtcttcaaaagaaatgaggttcttaacaccacagtgataaatggaataggagtgtatgttgtcaagatggaaatcggaacgcctccacaaacgttgtacctacagttagatactggctcttcagatatgattgtgaataatgctgacattgcctattgcaaatcgatgtctgacggatctgactacgcttcaactgataattacgagctcacagcaacgttcaatgggcttccttcgactaccatctcatcagaagcttataacactctctgctcttattggggtacattcgatgcaagcaactcatctacttttgagaataatgcgacgtttttcaataacacatacggagatggtacgtattatgcagggacttatggtacggatgttgtctctttcgaaaatattactctaaatgatttcacttttggtgtatcaaatgatacaataggcaatccaagtggcattttaggcatatcgcttcccattgcagaatttacagatggtatcgaatacgcattggcattgaacagaacacctttcatatatgataactttccaatggaattaaaaaatcagggaaagattaataaaatagcgtattctttatttttgaatggacctgatgcacacttcgggagcatcttgtttggtgcagtggacaaaagtaagtacacaggacagctttacaccctgcctatgctgcaggcattcaatacccttggctcaaatcctgggatgattattactgcacaaagtgtggcaattttggatagtgaatctggcaataaaactgtttcggatattcaatttccagtgatgttggattctggcacaactttctcctatttacccaccgaaattgcagaagcaatcggcaaaagttttgacggagagtacagctctgacgaccaaggctacatctttgattgttcaaaagtgaacgatactttactgtccgtcgactttggaggatttaatatatcggcaaacatatccaatttcgtaacatcagctaaggatcgttgcgttttaaatgttaagcaatccgagtccacttatatgctgggagatgctttccttgtcgacgcatatgtagtctacgatttagaaaactacgaaatttctattgctcaggctagctttaataatcaagaagaagatattgaggttatctccgatactgtcccaggtgccacccctgctcccggatactttagtacatgggtatataagcccggtagtcccatcggaacaggagattttattaatgtcagctggacctcgtattcggaattttcacagtacaaatcattgcttgccaccgcagcccaaagcgatgatgctagttctttctcaagtagtggcggctctagcgaaagcaccactaaaaaacaaaatgcaggttacaaataccgttcttctttctccttttcattattgtccttcatatcttattttcttttatagctcgagacccagctttcttgtacaaagtggt

SEQ ID NO: 678 - DNA, 1555 bp, Glycine max
acaagtttgtacaaaaaagcaggctcctgcaggaccatggcttcttcaaagaccaccaacccaacaacaactactacacaattggaaccactcccaccacctcaacaacgccatcctcctcctcctcatcatcagttgcaacaacaccaccaccaccaccatcatcatcaacaaattcatgaccatcatcaaatttcttttggaatgatgcaatcctcttcttcattttcctctatccccggaaactacctcagaagcaaggattccggagcttatgacttgggtgaattggatcaagcctttttcctctaccttgatggacaagcagacccttctagtgttcaagaccaaagacaaaactcatcatcaggaatgaggcctccaactctcaacattttcccctctaagcctatgcatgtagagccatcatcatccaaggccaaggctaacatagagctagtttctccacaaacaagtggatcaaagaggccatcagagccgtcgatggagttggccaaccctcgaaacgaaactgcttctgcccctcagccacccaaacctgtcaagcgagagagcaaccgcaaaggtccaacgtcaagttctgaacatgaaggacctaaaacaccagatcctaagacactcagaagacttgctcagaatagagaggcagctaggaaaagcaggcttaggaaaaaggcatatgttcaacaactagagtcgagtaggattaggctgaatcagctggaacaagagctacaacgtgctagaactcagggcatgttcttgggtggaggcgcacttttgggtggagagcaaggccttcctgtcactatgaatactattagcacggaggctgcaatgtttgacgtagaatatgctagatggcaagaggagcaccaccgcatagtgtgtgagctaagagctgcagtgcaagagcaccttcctgaaaacgagcttagactgtttgtggacaattgtttggcgcattatgatcaagtgatgaacctcaagagcttagtggccaaaacagatgtgttccatcttgtttctggcacgtggaagaccccagctgaacgttgcttcatgtggatcggtggtttcaggccatctgaactcatcaagattattgtgcgtcaaattgagcctctcacggagcaacaaatattgggcatatgtggattgcaacaatctacacaagaagcagaagaggctctctcccaagggctcgaggctcttaatcaatctctctcagacactataacatcagattctcttagttatcctcccaatatggctaactatatgggacagatggctgtagccatgaacaagctctccactcttgaaggtttcgtgagacaggctgataatcagaggcaccaaaccattcaccgtctgcaccagatcctaacaacgcgtcaagcagcaaggtgttttctggccatagctgagtacttccatcgtcttcgagccctcagttctttgtggctggcacgccctcgccaagagaattctcagtactagctcgagacccagctttcttgtacaaagtggt

SEQ ID NO: 679 - DNA, 1492 bp, Arabidopsis thaliana
acaagtttgtacaaaaaagcaggctcctgcaggaccatggtttcctctcagcgtcctgtccccaacaaaatccagaaacagcaatatctatccatcagcccttcaaattctgtcttgaaagatgatgttgaacttgagttctctgatgtgtttggtccactccccgaagaggccaatgatattgcttacgacgagcctgctgttgtctacagtcgatcccactccttggttggcccgtgttcgctcgatagtcattctttgaagctgaccaagctcaccttactagagactgaggactcaattgacttggtggagtgtctcgaaggtgaatctttaaaagaaaatgatgatttctctggtaatgacgacagtgacaatgagaaagctttagagggagatctggtgaaagtctcaggtgtagtaggcatagatgattttgaggttatgaaggttgttgggaaaggtgcgtttgggaaagtctaccaggtgaggaaaaaggagacctctgagatatacgctatgaaagtcatgaggaaagatcacattatggagaagaaccatgctgaatacatgaaagctgagcgcgatattcttacaaaaattgatcacccattcattgttcaacttaaatactcttttcagaccaagtacaggctgtatcttgtgctcgactttataaacggaggtcatcttttcttccaactctatcaccaagggcttttcagagaggacttggctcgagtgtacactgcagaaatcgtctctgcagtttcccatctccatgagaaaggcataatgcacagagatctgaaacccgaaaacatactcatggatacagatggccacgtgatgctaacagattttggtttagcaaaggaatttgaagaaaacacaagatcaaactccatgtgcggaactacggagtatatggcacctgaaattgttcgaggaaaaggacatgataaagcagctgactggtggagcgtagggattcttctgtatgagatgctcacaggaaagccaccgtttctcgggagcaaaggaaagatacagcagaaaattgtgaaggacaagatcaagcttccgcagtttctgtctaatgaagctcatgcaatactgaaagggctgctgcaaaaagagccagaaaggcgacttggaagtggactgagcggagcagaggagataaaacagcacaaatggttcaagggaataaactggaagaagctggaggctagagaagtgatgccaagtttcaagccggaagtatcgggaaggcaatgcatagcaaattttgacaagtgttggactgacatgtctgttttggattctccggcgagcagtcccagttcggatcctaaggccaacccttttaccaatttcacttacgtcaggcctcctccttcattccttcaccagtccacaactactttgtcgagcgattacaaggatgatgataagtagctcgagacccagctttcttgtacaaagtggt

SEQ ID NO: 680 - DNA, 1510 bp, Arabidopsis thaliana
acaagtttgtacaaaaaagcaggctcctgcaggaccatggtttcttctcagtgttctgttgcaaacaaaaaccagactgggaagccgtttcagaaacatctatctttatccatcagccctccaaaatctgtcttgggtgataaccttgagcttgaattctctgatgtctttggaccaatgcctgaagctaactctgaagaggcctgtgatgttgcttacgacgagcctgctgttgtctacagtcgatcccactcattggttggcccgtctttggttgttagccattctttgaagatgaacaagctcactttacgagaaactgaggactcagttgacttggtggagtgtgttgaaggtgaatcgataaaagagaacgatgaattctctggtaatgatgacactgacagtgagaaatctccagaggaggtctcaggtgtagtaggcattgaggactttgaggtattgaaggttgtgggacaaggtgcatttggaaaagtgtaccaggtgaggaaaaaagacacgtctgagatatacgcgatgaaggtcatgagaaaagataaaattgttgagaagaatcatgctgaatacatgaaagccgagcgcgatattctaaccaaaatcgatcatcctttcattgtgcaacttaaatactcttttcagaccaagtacagattgtatcttgttcttgactttataaacggaggtcatcttttcttccagctctatcaccaagggcttttcagggaggacttggctcgtgtgtacactgcagaaatcgtctctgcagtttcccatctccatgagaaaggcataatgcatagagatcttaaacctgaaaacatactcatggacgtagatggccatgtgatgttaactgattttggtttagcaaaagaatttgaagaaaacacaagatcaaactccatgtgtgggactacggagtatatggcccctgagattgttcgtggaaaaggacatgataaggctgccgactggtggagtgtaggaatccttctgtatgagatgctcactggaaagccgccgtttctcgggagcaaaggaaagatacagcagaaaatcgttaaggacaagatcaagcttccacagtttctgtctaatgaagctcatgccttgctgaaagggctgctgcaaaaagagccagaaaggagactgggaagtggaccgagcggagcagaggagataaaaaaacacaaatggttcaaggcgataaactggaagaagctggaggctagagaagtacaaccaagtttcaagccggcggtttcgggaagacaatgcatagctaattttgacaagtgttggactgacatgtctgttttggattctccagcaagtagtcccaactctgatgctaaggcgaacccttttacaaacttcacatacgtcaggcctcctcattcattccttcatcggaccacatccaacttgtcgagcgattacaaggatgatgataagtagctcgagacccagctttcttgtacaaagtggt

SEQ ID NO: 681 - DNA, 1543 bp, Glycine max
acaagtttgtacaaaaaagcaggctcctgcaggaccatggtgtcctctcagttttctgcttttactttggctggctacaaaccgtctcagactcagttactctttcctgcaaagcttgttgatactgtgaacacagagcatattgagctggatttctctgatgtctttggtcctgttacgttagatttgaataacattgattccactaccagtgagcctatggaagaagtgaacgagctggtttatgatgacccaccagtgatttacactcgctcacattctctggttggcccttcaacttgtgttagtcaatcacttaagcttggcaaactcaccatacatgagactgaggattcattggaactagtggagcatgtcaatggagaggccattaaagacatcaaagaatcttcctttgttgaggaatcattgaaagatgaagatgggaatctcatgaagatccacagagttagcattgacgatttcgagattttgaaggttgttgggcagggtgcatttgcaaaagtttatcaggtgaggaaaaagggtacttctgaaatatatgctatgaaggttatgcggaaggacaagattatggagaagaaccatgctgaatacatgaaagctgagagggatatttggacaaagatagaacacccatttgttgttcaactcagatactcttttcagacaaaatacagactgtatcttgtgctggattttgtaaatgggggccatctctttttccagctttatcaccaaggccttttcagagaggatctagcacgcatatatacagctgagattgtttctgcagtttcccatctccatgcaaatggaataatgcatagggatctaaagcctgaaaatatcctactggatgctgatggccatgttatgttgactgattttggcttagctaaacaatttgaagagagtacaagatcaaattcgatgtgtggtacattagagtacatggcacctgaaattattcttggcaaaggccatgataaggctgctgattggtggagtgtaggtgttctactgtttgagatgcttactggaaagccgcctttctgtggtggaaaccgtgacaaaattcagcagaagatagttaaagacaagattaagctgccagcatttttgtcaagtgaagcacattcactgttgaaagggctgctacagaaggaacaagctaggcgcttaggttgtggacctcggggtgttgaggaaattaaaagccacaagtggtttaaaccaatcaattggagaaagttggaagcaagagaaatccaaccaagctttaggccagaagtagctggtgtgcactgtgttgccaactttgagaagcgctggactgatatgcctgttgtggactcaccagctgccagcccaaatggtggaaacccctttaaggatttctcttatgtgaggcctgcagcctcttttcttcaaaggaataaccctgcttacgcgaattcctcgagcgattacaaggatgatgataagtagctcgagacccagctttcttgtacaaagtggt

SEQ ID NO: 682 - DNA, 1546 bp, Zea mays
acaagtttgtacaaaaaagcaggctcctgcaggaccatggtttcctccgagataacctctgttacagcagcgcgtgcacagggccccaagctttttagagggaagatacttctgccaggggggcccccagatgttgtgccttctgaaaatgttgagttcgacttttctgatgtttttgggcctagtgcagtccagactcacacagaagtgagtattctcactcctgacagtccagcacctgtggctgagtccaacgatgaggtttacaatgaccctgatgtcattgtcaaacgatctcattctcttgttggtccatcatctcttgttagccagtctttgccatttagcaagcttacattacacaagacagagagttcattggaactttcagagtgcccttccaaaggaaaacaaatcaaccaagggtcccttagcgatgatgagtttgatgatgtaaaaaaggagaatgagggcgttggactagatgacttcgaagttctgaagctcgttggccaaggggcatttggcaaagtatatcaggtgagaaagaaaggtacatctgaaatatatgcaatgaaagttatgaggaaggacaagattgtggagaagaatcatgctgagtacatgaaagctgagagagatatacttacaaaggttgaccatccttttgtcgtgcagctgaggtactcctttcagacgaagtaccgactttaccttgtcctggactttataaatgggggccatctcttcttccagctttaccaccagggtttatttagggaggagcttgcacgcatctacactgctgaaattgtatctgcagtcgcccacctccatgccaacggtattatgcatagagatttgaagcctgagaacatcttactggatgctgatggtcatgctatgctgactgactttggtgtggcaaaagaatttgatgaaaacactagatcaaactcaatgtgtggtactgttgaatacatggccccagaaattgttcagggccgaggtcatgataaggctgcagactggtggagtgtgggagtccttctttttgaaatgcttacaggaaagccaccgtttgttggtggaaacagagacaagattcagcagaagatagtaaaggagaagataaagctgccaacatatttatctagtgaagttcactcaatgttgaaaggattattgcacaaagaagctggcagacggctgggaagcggaccaggcggcagtgacgaaatcaagaaccacaagtggttcaagtctgtaaactggaagaggctggaggcccggcagatcgagccaagcttccggccgaatgttgctggcaagacctgcattgcgaactttgacgagtgctggacgaacatgcccgtgcttgattctccggtggccagccctgttgcggccaacagcaactttgtggggttcagttatgtgaggcccgcaccgttcctccagaagccgagtccccttgggaattcctcgagcgattacaaggatgatgataagtagctcgagacccagctttcttgtacaaagtggt

SEQ ID NO: 683 - DNA, 951 bp, Clostridium acetobutylicum
atgaataatgttttatgtataggagaacttttaatcgattttatatgttctgatatagatacaactctttctaaaggagaaaactttaagaagaaggcaggaggggcacctgcaaatgtaacggcagcaatttcaaagcttggaggaagtgcgtcttttttaggtaaggttgggaatgatccctttggacattttttgaaagagactttagatgaagttaaggtagatacatcaatgcttattatggataacaactcaagtactactcttgcatttgtgtcgcttcaggcaaatggtgaaagagattttgtctttaataggggagcagatggtcttttaagatatgatgaaataaatttagataaagtttactcaaataaaataattcactttggttccgcaactgctttattaggtggagaaatgacagacacttacttaaagataatggaggaagcgaagaaaaggggaataattatatcctttgatccaaactacagagataatctttgggaaaacagaacagaagagtttatagctatttcacgtaagtgcattgaacttgctgattttgtgaaattaagtgacgaggaattaaaaattatatctggagagaaaaatataaaaaatggagtaaagcttttagcttcaaataacaaggttattgctgtaactttaggaaaagagggtactatgatttcaaatggagaagaagttgaaatcatagagagtataaaaataaaatctatagattctaccggagcaggagatgcatttgtgggagcatttctttataaattgtcagaggcattagaggcaagagatattttaagtgactttaataaaatcaaggaaaatgttcgctttgcaaataaggttggtgcaattgtgtgtacaaagcttggtgctataagttctcttcctagtttaagtgaagttgaaggtgattag

SEQ ID NO: 684 - DNA, 1167 bp, Clostridium acetobutylicum
atcccactatccttcgcaagacccttcctctatataaggaagttcatttcatttggagaggaccaggtggtaccggcgcgccaccatgaataatgttttatgtataggagaacttttaatcgattttatatgttctgatatagatacaactctttctaaaggagaaaactttaagaagaaggcaggaggggcacctgcaaatgtaacggcagcaatttcaaagcttggaggaagtgcgtcttttttaggtaaggttgggaatgatccctttggacattttttgaaagagactttagatgaagttaaggtagatacatcaatgcttattatggataacaactcaagtactactcttgcatttgtgtcgcttcaggcaaatggtgaaagagattttgtctttaataggggagcagatggtcttttaagatatgatgaaataaatttagataaagtttactcaaataaaataattcactttggttccgcaactgctttattaggtggagaaatgacagacacttacttaaagataatggaggaagcgaagaaaaggggaataattatatcctttgatccaaactacagagataatctttgggaaaacagaacagaagagtttatagctatttcacgtaagtgcattgaacttgctgattttgtgaaattaagtgacgaggaattaaaaattatatctggagagaaaaatataaaaaatggagtaaagcttttagcttcaaataacaaggttattgctgtaactttaggaaaagagggtactatgatttcaaatggagaagaagttgaaatcatagagagtataaaaataaaatctatagattctaccggagcaggagatgcatttgtgggagcatttctttataaattgtcagaggcattagaggcaagagatattttaagtgactttaataaaatcaaggaaaatgttcgctttgcaaataaggttggtgcaattgtgtgtacaaagcttggtgctataagttctcttcctagtttaagtgaagttgaaggtgattaggcgatcgcaccgctcgcgggccctgatcacctgtcgtacagtatttctacatttgatgtgtgatttgtgaagaacatcaaacaaaacaagcactggctttaatatgatgataagtattatggtaattaatt

SEQ ID NO: 685 - DNA, 1552 bp, Arabidopsis thaliana
acaagtttgtacaaaaaagcaggctcctgcaggaccatggaaaccaaaaccctaattttctcaattctcgtcgttgttctttctctcatttacttaattggaaaactcaagcgaaagccaaatctacctccgagtccggcatggtcgttaccggtgattggtcacctccgtcttctcaaaccaccgattcatcgcacattcctctccctctctcaatccctaaacaatgctccgatcttctccctccgactcggtaaccgactcgttttcgtgaactcgtcacactcgatcgccgaggaatgtttcaccaaaaacgacgtcgtactggcgaacagaccaaacttcatcctcgctaaacacgttgcgtacgattacacaaccatgatcgcagcttcctacggtgaccactggcgtaacctccgccgcatcggctccgtcgagatattctccaaccaccgtctcaatagctttctgtctattcgtaaagacgagatccgacgacttgtgtttcgtctttcacgtaacttttcacaagagtttgtgaaggtggatatgaaatcaatgttatctgacttaacattcaacaacattataagaatggtggccggaaaacgttactacggagacggtgttgaggatgatccggaggctaaacgtgtccggcagcttatagcggatgtggtggcttgtgctggtgctggaaacgctgttgattacttaccggttttgcggttggtttcagattacgaaacacgggttaagaagttagcgggtaggctcgacgagttcttgcaaggattggttgatgagaaacgagacgctaaggagaaaggaaacactatgattgatcacttgcttactctgcaagaatcacaaccggattacttcactgatcgtatcatcaaaggaaacatgcttgctttgatactagcagggaccgacacatcagcggttacgttagaatgggcattgtcgaacgtgttgaaccattcggaggtattgaacaaggcgagagatgaaatcgatagaaagatcggtttagacaggcttatggatgaatcagatatctcaaacctgccttatctccaaaacattgtgtctgaaacgttgcgcctttatcctgcggctcccatgcttcttcctcacgttgcctcggaagattgtaaagttgcaggatatgatatgccgcgtggcacgatactattgaccaatgtgtgggctatacacagagatcctcagctatgggatgatccaatgagcttcaagccagagaggtttgagaaggaaggagaagctcagaagcttatgccgtttgggttaggaagaagggcgtgtcctggttctggactggctcaccggcttataaacctgactcttggatcattgattcagtgtttggaatgggagaagattggagaagaagtggatatgagtgaaggcaaaggtgttacaatgcctaaagccaagcctttagaagccatgtgcagagcacgtccctctgttgttaaaatcttcaactagctcgagacccagctttcttgtacaaagtggt

SEQ ID NO: 686 - DNA, 1423 bp, Arabidopsis thaliana
acaagtttgtacaaaaaagcaggctcctgcaggaccatggacgaaaagccggcgggcagaagagtaatgttggttgcagttccagctcaaggacatatctctccaataatgcaacttgcaaaaacacttcacttgaagggtttctcaatcacaatcgctcagacaaagttcaattactttagcccttcagatgacttcactgattttcagtttgtcaccattccagaaagcttaccagagtctgattttgaggatctcgggccaatagagtttctgcataagctcaacaaagagtgtcaggtgagcttcaaagactgtttgggtcagttgttgctgcaacaaggtaatgagatagcctgtgttgtctacgacgagttcatgtactttgctgaagctgcagccaaagagtttaagcttccaaacgtcattttcagcaccacaagtgccacggcttttgtttgccgctctgcattcgacaaactttatgcaaacagtatcctgactcccttgaaagaacccaaaggacaacaaaacgagctagtgccagagtttcatcccctgagatgcaaagactttccggtttcacattgggcatcattagaaagcatgatggagctgtataggaatacagttgacaaacggacagcttcctcggtgataatcaacacagcgagctgtctagagagctcatctctgtctcgtctgcagcaacagctacaaattccagtttatcctataggccctcttcacctggtggcatcagcttctacgagtcttcttgaagagaacaagagctgtattgaatggttgaacaaacaaaagaaaaactctgtgatattcgtaagcttgggaagcttagctttgatggaaatcaatgaggtgatagaaactgctttgggattggatagtagcaagcaacagttcttgtgggtcattcggccagggtcagtacgtggttcggaatggatagagaacttgcctaaggagtttagtaagataatttcgggtcgaggttacattgtgaaatgggctccacagaaggaagtactttctcatcctgtagtaggaggattttggagccattgcggatggaactcgacactagagagcatcggggaaggagttccaatgatttgcaagccgttttccagtgatcaaatggtgaatgcgagatacttggagtgtgtatggaaaattgggattcaagttgagggtgatctagacagaggagcggtcgagagagctgtgaggaggttaatggtggaggaagaaggggaggggatgaggaagagagctatcagtttgaaagagcaacttagagcctctgttataagtggaggttcttcacacaactcgctagaggagtttgtacactacatgaggactctatagctcgagacccagctttcttgtacaaagtggt

SEQ ID NO: 687 - DNA, 1057 bp, Arabidopsis thaliana
acaagtttgtacaaaaaagcaggctcctgcaggaccatggctacgaacattgggatgatggattctgcatatttcgtcgggagatcggagattctggcttggattaactctactctccaactcaatctctccaaagtcgaagaggcttgttcaggcgctgttcattgtcagctgatggattcggtgcatcctgggactgttccgatgcacaaggttaactttgatgcgaagagtgaatatgagatgattcagaactataaggttcttcaggatgtgtttaataaactcaagatcactaagcacatcgaagtgagcaaactcgttaagggaaggccattggataacttggagtttatgcagtggatgaaaaagtactgtgattctgttaatggaggccagcataattaccatgcacttgagagaagggaagccagcaaaggaggtaaagaagcaacgaagagagctgcagctacacaacaatcaggcaagagttcgtcttcttcagctccacctcgaccttcatcttcaaatggaacccgtaagcatgagccacaatccaacaacaccggtactcaccattcttcaactgggaatcaccaccactcttcaaaaccatcagctaaacaatctaaaccagtgcctgcttatgatgaaaagatcacagaactgaaactttacattgacagcttagagaaagagagagatttctatttctctaaactcagagatgtagagattctctgtcaaaacccagacacagagcacttacctcttgttggttccataaaaagaatcctatacgcagcagatggagaagacgttggagcagcagagacacagactttgagtcccattgctgaaggatcagaagagagaaggaacagtgtaacagagtcgcagaagaggaagctcatagtgaatctcgacgtagatgttgcagcgattacaacactctctccaagacaacgcctttctgatgcttctgatgtcaaatgcagtggttcatctcctctcttgacctgctagctcgagacccagctttcttgtacaaagtggt

SEQ ID NO: 688 - DNA, 1134 bp, Zea mays
acaagtttgtacaaaaaagcaggctcctgcaggaccggccatggacatggacagggacagcgtggagtgcctctccctcccagacgctgccatggacgtggacaacgtcgacggccacccgcaccacggccatctcggtctcccgctccaccccgcccacctcccatcctctggtgccgggcgcgcgttccccaaggtgaatgccgggggcggcgtagcgggcccggctgtagcgggagcggcgggcgcagcaggagcaggcggagggccgccggcgaccagcgtgcacgagctgctcgagtgccccgtctgcactaactccatgttcccgcccatccatcagtgtcaaaatggacatactttgtgttcgacatgcaaggccagggtgcacaaccggtgccctacatgcagacaagagcttggtgatatcaggtgcttagcattggaaaaagtagcagagtcacttgagcttccatgtaagtactgctctttaggttgcccagagatcttcccgtactacagcaagataaagcatgaagcacagtgcagcttcaggccatataactgcccctatgctggctctgaatgtgctgtggctggtgatattccattccttgttgcacatttgagggatgatcacaaagttgatatgcacagtggctgcacgttcaaccatagatacgtcaaatccaacccgcgagaggttgaaaatgccacctggatgctaacagtattccattgttttgggcagtacttctgcctgcacttcgaggcattccagctcggaatggctccagtctatatggctttcctccgattcatgggtgatgagaatgaagcaaggaactatacatatagcctagaggttggtggtaatgggaggaaaatggtatgggaaggtactcctagaagcatccgtgacagccaccgcaaggtccgtgacagccatgatggcctcatcatccagaggaatatggcgctgttcttctctggtggtgacaggaaggagctgaagctgagggtgactgggcggatctggaaagagcagacgaaccccgatggagcctgcattcctaacctttgcagctgagcaagggagatagctcgagacccagctttcttgtacaaagtggt

SEQ ID NO: 689 - DNA, 1039 bp, Glycine max
acaagtttgtacaaaaaagcaggctcctgcaggaccatggacttgatgagcgttgagtgtgtgtcatcctcggacggcatggatgaggatgagatccacgccaaccatcatcactctgagttttcttccacaaagcctcgcaatggaggcactagtaacatcaattctgtgggccccaacggaattgctccggcaaccagcgtccatgagttgctggaatgtcctgtttgtactaattcaatgtaccctccaattcatcagtgtcacaatggccacacactgtgttccacatgtaaaactagggtgcacaaccgatgtcccacttgtagacaagagcttggagatattaggtgtctggcactggagaaggtggctgaatcacttgagttaccttgcaagtactactcccttggatgtccagaaatctttccatactacagcaagcttaagcatgagacagtatgcaattttagaccatatagttgtccttatgctggatcggagtgttctgttgttggggatattcctttccttgttgctcatttgagggacgatcataaagtggacatgcacacaggatgcacattcaaccatcgttatgtgaaatcaaatccacgagaagtagagaatgccacttggatgctcacagtatttcattgttttggccaatatttctgccttcattttgaagctttccagcttggcatggcccctgtatacatggcattccttcgttttatgggtgatgaaaatgaggctcggaattatagctatagcctagaggttggggccaatggtaggaaactcatttgggagggtacaccacgaagtgttcgtgatagtcaccgtaaggttagggatagccatgatgggctcattattcaaagaaatatggccctatttttctctggtggggatagaaaggagctgaagctcagagtcacaggaagaatatggaaagaacagaattcagatgctggggtgtgcatgccaaatctctgtagttagctcgagacccagctttcttgtacaaagtggt

SEQ ID NO: 690 - DNA, 973 bp, Oryza sativa
acaagtttgtacaaaaaagcaggctcctgcaggaccatggcctcagttacttatattgatgactccggttctgaggtaattgatcctccaaagactgaggtgctggatgttaccgaacttgctggtgatcctgttccgcattcaccaaaaccaaatgtggtagtttctagcagtgtgcgtgaactgcttgaatgtccagtctgcctgagcgcaatgtatcctcccattcatcagtgctctaatggtcatacattgtgctctggatgcaaaccaagggttcacaatcgctgtccaacttgtaggcatgaactgggtaatattagatgtcttgctctcgagaaggtggctgcgtcgcttgaacttccatgcaagtaccagaacttcgggtgtgtaggcatttatccttactactgcaagctgaagcatgagtcacagtgccaatataggccttatagctgtccatatgctggatctgaatgcacagttgctggtgacattccatacttggtgaatcacttgaaagatgaccacaaggttgacatgcataatggctgcaccttcaaccatcgctatgtcaagtcgaatcctcatgaagttgagaatgccacctggatgcttacggttttcagctgctttggccagtacttctgcctacatttcgaagcatttcagctggggatggcacctgtgtacatcgccttcctgaggttcatgggtgatgacttggaagcaaagaactacagctacagcctggaggtaggaggcactggccgcaaaatgatctggcaaggggttccccggagcatcagagacagccatcggaaggtccgggatagctatgatgggcttatcatccaacggaacatggccttgttcttctctggtggagaaaggaaggagctcaaattgcgggtcactgggagaatttggaaggaacagtagctcgagacccagctttcttgtacaaagtggt

SEQ ID NO: 691 - DNA, 1011 bp, Glycine max
acaagtttgtacaaaaaagcaggctcctgcaggaccgggttagcaatggctcctggaagcagtgttttcaaagaagttcttgaatctcacctgatgtcttcagattatgaaatgggaaaagctaaatctgaggccaagagtaacagtacatctacaaaatctagcattgggttgagtggaaagagtggaattagttcaaacaatggcgtgtatgaattacttggatgccccgtttgcaagaatttgatgtatcccccaattcaccagtgcccaaatggccatacattatgttcccattgtaaagttgaagtccataatatctgcccgtcctgccatcatgatcttgggaatataagatgtttggctttggagaaagtggcagaatcattggagcttccttgcagatatcagagtcttggttgccatgatatattcccgtactatactaagctgaagcatgagcaaaattgtggatttcgtccatacaattgcccctatgctggatctgagtgctctgtgatgggtgatattcctactcttgttgcccatctcaaggatgatcacaaggttgacatgcatgatggatgcaccttcaatcatcgatatgtcaaagcaaatccacatgaagttgaaaatgccacatggatgctaactgttttcaatagttttggaagacatttctgcttgcactttgaggcgttccagcttggctcggctccagtgtatatggcttttttgcgattcatgggtgatgacaatgaagcaaagaaattcagctacagcttggaggttggtgcaaatgggcgcaaacttatatggcaaggaattccaaggagcattcgggacagtcatagaaaagttcgagatagtcaagatggacttataattcagaggaacctagccctttatttttctggtggagaaagacaagagttgaagttgagaatcactggtcgtatatggagagaagaatgagatagctcgagacccagctttcttgtacaaagtggt

SEQ ID NO: 692 - DNA, 1221 bp, Glycine max
atggagtcgcgagtgctgtcacgcgccggaaccttgttctccctccctcacctccgcaagctgccgcgggaggtcggcgccggcccctccctcgtcgccgtgaaggccgtgggctccgtggcggacggcgggaacctgatttgggggaggcaactgcgcccagagctctgctcgccggcgctgaagaaggaggccgtcctcctccggccatgcctcgccgccgcctcctcgccggccgagggcagtgattccgccggagaagcaaaggttgctccggcggggtttttcgagaagtatccggctctggtgaccggattcttcttcttcacgtggtacttcttgaacgtgattttcaacatccttaacaagaagatctacaattacttcccctatccatacttcgtatcggttatccatttattcgtgggtgtggcgtactgtttggtgagctgggccgtgggacttcctaaacgtgctcctatagactccaacctactgaagttgctcattccggtggctgtgtgccatgcattaggccacgtgaccagcaatgtctcatttgctgcagttgctgtttctttcactcataccattaaagctcttgagccattcttcaatgctgctgcttcacagttcatacttggccaatcaatccccatcactttgtggctgtcactggctcctgttgttattggtgtgtccatggcatctttgaccgagctctcattcaactgggtcggcttcataagtgctatgatttcaaacatttccttcacgtaccgaagcatctattcaaagaaagccatgactgatatggacagtaccaatatctatgcctacatttccatcattgctctaattgtgtgtataccacctgccgtaattttggaagggcccacactgttgaagcacggcttcaatgatgctattgctaaagtaggtttggtcaagttcgtctcagatctcttctgggttggtatgttttaccatctctacaaccaggtggctaccaacacactggagagagtggctcctctcactcatgcagttgggaacgtactgaaacgtgtatttgtcattggattctctattttagtcttcggtaacaagattagcacccaaactggtattggaacagccattgcaattgctggtgtggcactctactcgttcatcaaagccaggatggaggaagagaagcgacaagcaaaagcagcatag

SEQ ID NO: 693 - DNA, 1873 bp, Saccharomyces cerevisiae
acaagtttgtacaaaaaagcaggctcctgcaggaccatgaccgaagactttatttcttctgtcaagcgttcaaatgaggagctgaaggagcgaaaatctaactttggatttgtagaatacaaatccaagcaattaacatcatcctcatcacacaattcaaactcatcgcatcacgatgatgacaaccaacacggcaagaggaatattttccagcgatgtgttgattctttcaagtctcctctggacggctcgttcgacacaagtaatttgaagaggactctgaaaccaaggcacttaatcatgattgccattgggggcagtataggtactggtttgtttgtcggtagtggtaaggcaatcgccgaaggtggtcctcttggtgtcgtcattggttgggctattgcaggctctcaaatcatcgggacgattcatgggctaggtgaaatcacggtgcggttccccgttgtcggggcctttgccaattacggcacaaggtttttggatccaagtataagttttgttgtttcgaccatatacgtgctacagtggttttttgtattacccttagaaatcattgcggcggcaatgaccgtacagtactggaactcgtctattgaccccgtaatttgggtagccatcttttatgctgttattgtttccataaatttgtttggtgtacgaggttttggggaagcggaatttgcattttccaccataaaagcaataacagtttgcggattcattatattgtgcgttgtcctcatttgcggtggaggtcccgaccacgagttcattggcgccaaatactggcacgaccctggttgtttggccaatgggttcccgggcgttctatctgttcttgttgttgcttcgtattctctcggtggtatagaaatgacgtgcctggcatcaggtgaaacggaccccaaaggcttaccaagtgctatcaagcaagtgttttggaggatcttatttttctttttgatatcactgaccctggtaggattcctggttccatatacaaaccaaaacttactgggtggttcatctgtggacaactcaccttttgtcattgccataaaattgcatcacattaaagccttgccctccatcgtcaatgcggtcatccttatcagtgttttgagtgtaggtaactcctgcatcttcgcttcaagtagaacgttgtgttcgatggcccaccaaggccttattccatggtggtttggttatatcgaccgtgctggtaggccactggttggcattatggcaaattcactatttggattactagcatttctggtcaaatctggctcgatgtctgaagttttcaattggttaatggccattgccggcctggccacgtgcattgtctggttgagcatcaacctgtcacatatcagatttagactggcgatgaaggctcaagggaagtctctggatgaattagaatttgttagtgctgtcgggatttggggatcagcgtattccgctttaatcaactgtctaatcttgatagctcaattctattgttcactatggcccattggtggctggaccagcggcaaagaaagggctaaaatattttttcaaaattatctgtgtgccttaatcatgttatttatattcatcgtccacaaaatttattacaagtgtcaaacaggcaaatggtggggggttaaggcgttaaaggacatagatttggaaaccgatcgtaaagatatcgacatcgaaatagtcaagcaagaaattgccgaaaagaaaatgtacctagattcccgtccatggtacgtgagacagttccatttctggtgctcgagcgattacaaggatgatgataagtagctcgagacccagctttcttgtacaaagtggt

SEQ ID NO: 694 - DNA, 253 bp, Saccharomyces cerevisiae
acaagtttgtacaaaaaagcaggctcctgcaggaccatgttcagcgaattaattaacttccaaaatgaaggtcatgagtgccaatgccaatgtggtagctgcaaaaataatgaacaatgccaaaaatcatgtagctgcccaacggggtgtaacagcgacgacaaatgcccctgcggtaacaagtctgaagaaaccaagaagtcatgctgctctgggaaatagctcgagacccagctttcttgtacaaagtggt

SEQ ID NO: 695 - DNA, 1297 bp, Corynebacterium glutamicum
acaagtttgtacaaaaaagcaggctcctgcaggaccatggcgccggtgacagggcttcctgtcaccccctacagccaggaagcaagcatcggtgcgagcttcccggcagtggatccggacaccaaagacagcgccgcatacggacatgaatccggaatgcgtgagcgcatctccaacgctaagcgagtggtggtgaaaattggttcgtcctcattgactaacgatgaggacggacacaccgtcgatcccaaccgcatcaacactattgtcaatgccttgcaagcacgcatggaagctggctcggacctcatcgttgtgtcctctggcgcagtggccgcgggaatggccccgcttggattgagcacccggcccacggaattggcagtcaagcaggctgcagcagcagtggggcaagttcacctcatgcaccagtggggacgttcttttgcccggtatggtcgccccatcggccaggtgcttcttaccgcagctgatgcaggaaagcgtgatcgtgcgaggaatgcgcagcgtaccatcgacaagctgcgcattttgggcgcggttcctatcgtcaatgaaaatgacaccgtggcaaccaccggtgtgaattttggtgacaacgaccgacttgctgcaattgtggcgcacctggtgtcggctgatgctttggtgctgctcagtgacgtggatggactttttgataaaaaccctactgatcccaccgcgaagtttatttccgaggttcgtgacggcaatgatttgaaaggtgtcattgccggcgacggcggaaaagtgggcaccggtggcatggcatcaaaggtgtctgctgcacgtttggcttcccgaagtggcgtgcctgtgctgttgacctctgcggcaaacattggcccagcactggaagacgcccaggtgggcactgtattccaccccaaggacaaccgcctctccgcgtggaagttctgggctttgtatgccgcagatactgcaggaaagatccgactcgatgacggcgcggtggaagcagtgacctccggtggtaaatctttgctggctgtgggcattactgaaatcattggtgatttccagcagggtgagatcgtggagatcttgggacctgccggccaaatcatcgggcgaggcgaggtgtcctacgattctgataccttgcaatcaatggttggtatgcaaacgcaggaccttccagatggcatgcagcgcccggtagtgcatgcagattatctgtccaactacgccagccgcgcgtagctcgagacccagctttcttgtacaaagtggt

SEQ ID NO: 696 - DNA, 1144 bp, Arabidopsis thaliana
acaagtttgtacaaaaaagcaggctcctgcaggaccatgtctgcttttgtcagcaaatacgaagatgagctgatcaagacggccaagtacattgcaacgccgggaaggggcattttggcggcagatgagagcacagaaaccattgggaaacgattcgccggaatcaatgttgagaacactgagtccaaccgccaagcttaccgtgagctcctcttcacttcccctggcagttacccttgcctctctggtgttatactcttcgaggaaaccctctaccagaaaacctctgatggcaaacccttcgtcgatctcctcatggagaacggtgttatccccggaatcaaagtggacaagggtttggttgatctagcagggaccaacggcgagaccactactcaaggtctagactcgcttggtgcacggtgtcagcagtattacgaggcaggagcccggtttgctaaatggcgtgcattcttcaagattggggccaccgagccaagcgttctctccatccaagaggacgccagggtgctagcccgctatgccatcatctgccaggagaatggacttgtcccgatcgtcgagccagaggtgctgacaggtgggagccacgacatcaagaaatgtgcggcggtgactgagacggttcttgctgccgtgttcaaggccttgaactaccaccatgtcctcctcgaaggcactctgcttaaacctaacatggtcactcccggctccgacagcccaaaggttgcaccggaactaattgcggaatacacggtgactgctctgcgccgcacagtcccaccagctattccgggaatcgtgttcctctcaggcatacagcgcgaagagcaagcgacactaaatctaaacgcaatgaacaagcttgatgtgttgaagccatggacgctcactttctcttttggcggagccctccagcaaagtgctatcaaggcttgggccggtaagcccgagaacgtagccaaagctcaggccaagttcctgaccaggtgcaaggctaacaaggacgctaccctcgggaaatacaccggctgggcttctggtgactcggccgctttcgagaacttggttgtgataggatacaggtactagctcgagacccagctttcttgtacaaagtggt

SEQ ID NO: 697 - DNA, 600 bp, Arabidopsis thaliana
acaagtttgtacaaaaaagcaggctcctgcaggaccatgtttgacaagagtgaatgggctaaggttgtctcaattgtgaatcaggaaccggttctcttttctctctccgtggccgagaatattgcatatggtctccccaatgagcatgtgtccaaggacgacatcattaaggcagccaaagctgccaacgctcatgattttataatctcacttcctcagggatacgatacactggttggtgaaagaggaggcttgcttagcggaggacaacgacagagagttgccatagcccgatctctgctgaagaatgcccccatcttgattctcgatgaggccacaagtgcgctggatgcagtgagcgagcggttagtccagagtgcgttgaaccgtctgatgaaagacaggacaacattagtcatcgctcacagactgagcacagttcagagcgcgaatcagatcgctgtgtgctctgatgggaagatcatagagcttggaacacattccgaattggtagcgcaaaagggatcatatgcttcacttgttggcactcagagactagcctttgagtagctcgagaccagctttcttgtacaaagtggt

SEQ ID NO: 698 - DNA, 802 bp, Arabidopsis thaliana
acaagtttgtacaaaaaagcaggctcctgcaggaccatggagcaaccaatgtcgccgggaacgaagtcggtggatctccgagaatgcatggaatcacttctccgttttagtctgagatctcatttaaacgaatctgttccaagtttcgatcttgacctgaccagagatttttgtcttcatctccttggggaagctacagattcaacagaaaaatctgcggtgtacaagcttctagcaacggctttgtctgaatgtctagcttccgagggtgataaaaattctaacttggaaaaatacagcaaactgattcatggcttgggatatgacttaataaatatgttgaaggaggtgaactttgagcttcatgtccaagagccttacttcacccaattgaaagatggtttgaaaactgttgaaggaagatgcgcagtgggagactacatgagaattagttcaggagattttcttttgttcaataaatgcttgctgcttgaagttcaggacgttcaccgttatacttcattctcagaaatgctgaaagtggagggtcttgccaaagttcttcctggagttgaaagtatagaagaaggtgttcaagtttaccgaaacttttattctgaagagaaggaaagaatgaacggtgttgtagctattcgtgttgcaaaaccagctaatcagccttctgcagctttggcaggagtattgtctgaactgaagtccagtgggatcaaaagcctgttggatgaatacacagctggggttacctcgtagctcgagacccagctttcttgtacaaagtggt

SEQ ID NO: 699 - DNA, 430 bp, Glycine max
acaagtttgtacaaaaaagcaggctcctgcaggaccatggctaagagctcattcaagatggaacacccacttgagaggaggcaggctgaagcatctcggataagggagaagtatcccgaaagaattccagtaattgttgaaagggcagagaagagtgatgttcctgaaattgataagaaaaagtatctggtccctgctgatttgactgttggccagtttgtgtatgtggtgcggaagagaatcaagctgagtcccgagaaggccatcttcatttttgttaagaatattttgccaccaactgcggcaatgatgtctgcaatttatgaggaaaacaaggatgaagatggatttctatacatgacttacagtggagagaacacatttgggcttgtgttctagctcgagacccagctttcttgtacaaagtggt

SEQ ID NO: 700 - DNA, 643 bp, Arabidopsis thaliana
acaagtttgtacaaaaaagcaggctcctgcaggaccatggggaagaagagaaaatcaacagccacaagcctcgatgaggtagatcggactgtttacgcttcttttcgcaccgccgctaactctttatctcagctttatactcagtctatgaatcatcagaagttatcttttcaagccggtgaacgccatggtttggaaaaactgtaccaatggatatggagacaacaagaaggagggtcaagagtgacacctatggatattgtcaattatattcagaacgagctcgaatgctgcatagacgagcctccaatatccccaagagcgccaccaccgcaaccaacaatgcatgtcacgaatcccgggctcatgaccacttcaggcacctctttcccaacagctgttccagtggttaggtccgagcagtgtgagaaccaggccaagaactcggttttctcaaacgcactttcaagcccaatacggcgtagtcttcagaactaccaaattccgcagggaggctacacatccggcggaaccaccagaagcagtgaagtgaacaggggatctaactctccaggttctattgattcttcaatggacatgcatgcagaatagctcgagacccagctttcttgtacaaagtggt

SEQ ID NO: 701 - DNA, 445 bp, Brassica napus
acaagtttgtacaaaaaagcaggctcctgcaggaccatggcgggtcttcagagatccaacatctccttccgccgacagggctcctctggcatagtctgggacgaccgtctcatcgccgagcttaacaaacaggccaacgagcacaaagccgaaactgacgaacaggaaggtcaggaggaccagacagccagacccacctccggaggcggaatcgagccgataagaaccgaagggcgcatcgagaggagtcgttccaacggcggaggagcaaaccgccaccatagaaacacgggaagagtgtctccggcggtggatcctccgtcgccgagactgtcggcgtttggatgttgctctgctttcgggaagaaaccggttaaacagcggaaaaggccaccgaaacgcagatccaggtagctcgagacccagctttcttgtacaaagtggt

SEQ ID NO: 702 - DNA, 1106 bp, Arabidopsis thaliana
acaagtttgtacaaaaaagcaggctcctgcaggaccatgaactcagtgtgtatctccagctgcatcaacgatgcacacgaccctcgcgtgccggttcgtcctgtacgtgcctcctacgtgaatctctataagtggccggagtccgacgccgagttcgtcaggtccgtacgtcgtggaggcggcctaccggcggcccgtgtagttgatagcatatcttgtcgacagatgtatctccgtagctacactttctctcgggaagacgacgagagcaaatcggagaaggtgtcgtctgggacgcagacgtcgtgtctagggagagttaagggaacagcgtcgtctcgacgtaagagtaaggaggaaaatggcatcatcatcgttgagagtacaaagccgcgtcgtcgtggtgagaagaggagagttagtaggaagaacaaacaagaacaagcttgttctgttattttaaggatttttcgaaggttattatcttgtgctgctaccgttgatgttgttgatccaaactagctcgagacccagctttcttgtacaaagtggtacaagtttgtacaaaaaagcaggctcctgcaggaccatgaactcagtgtgtatctccagctgcatcaacgatgcacacgaccctcgcgtgccggttcgtcctgtacgtgcctcctacgtgaatctctataagtggccggagtccgacgccgagttcgtcaggtccgtacgtcgtggaggcggcctaccggcggcccgtgtagttgatagcatatcttgtcgacagatgtatctccgtagctacactttctctcgggaagacgacgagagcaaatcggagaaggtgtcgtctgggacgcagacgtcgtgtctagggagagttaagggaacagcgtcgtctcgacgtaagagtaaggaggaaaatggcatcatcatcgttgagagtacaaagccgcgtcgtcgtggtgagaagaggagagttagtaggaagaacaaacaagaacaagcttgttctgttattttaaggatttttcgaaggttattatcttgtgctgctaccgttgatgttgttgatccaaactagctcgagacccagctttcttgtacaaagtggt

SEQ ID NO: 703 - DNA, 460 bp, Arabidopsis thaliana
acaagtttgtacaaaaaagcaggctcctgcaggaccatggggaggctgtttgtggtgaatcttgaagggaagatctatagctgcaaacactgtaagactcatcttgctacttatgaagacatcatctccaagtcttttcactgcaagcatgggaaagcttatctcttcaataaggttgccaatgtttccattggagagactgaagaaagactgatgatgactggtaaacatactgtggctgatattttctgtgtctcgtgtggatcaatcgttggctggaaatacgagactgctcatgagaagaaccagaagtacaaagaaggaaaatcagtgcttgaaagatttaagatatcgggtcctgatgggagcaactattgggtgagtagccatggaaggcatataggtggaagtgatgcagatgatgcttagctcgagacccagctttcttgtacaaagtggt

SEQ ID NO: 704 - DNA, 823 bp, Arabidopsis thaliana
acaagtttgtacaaaaaagcaggctcctgcaggaccatggctacagccgttggaagcgggagcgatgtagaggttggatttgcgaagctccaaggtgaggatttcgagtactatatgcagtcttactccattattctcggccggaattctaagaaatcgaccgtcgacgtcgacctctcatctctcggcggtgggatgaacatttctcgcaaccacgctcggatcttctatgacttcactagacgacgcttctctctcgaggtacttggcaaaaatggctgcttcgttgaaggtgtcctccatctccctgggaaccccaacgtcaagctcgattcacaggaccttttgcagattggtgacaaggagttctacttcctgcttccggtttggagtatcctaggcggtccattgggacccaggcaccacgtcttagggaaggctactgttgttccgtaccataattatcattcgggtccaggttccgggtcgggtaagaatggcgtccggagtagagagttgtatgagtacgatgatgaagacgacgatgaagaggaggatatcagaggcagtggaaagaaaacatggagagatggacatgaaggagtatatgcctctggagagaagaagagagagggaagatcaaaggcagatcgtgaagctgatgatcaacaatttttgcagctaatgcatggtagtggttggtctgtgacagatattaaaggagtatggaaacgtatggcatcacagtcgagtaagaagatacctatcacaagaagactgggctatccctagctcgagacccagctttcttgtacaaagtggt

SEQ ID NO: 705 - DNA, 1528 bp, Arabidopsis thaliana
acaagtttgtacaaaaaagcaggctcctgcaggaccatgttgacaatggacaaggaatttgattcaaagcttactcttcaagggaattcatcttcaaatggtgaaactatttccagaagcaaaagcttcgcctttaaggctcctcaggagaatttcacttaccatgatttcgagctcggcaagatctatggcgttggctcttattctaaggttgttagggcgaagaagaaggataatggaactgtgtatgccttgaagatcatggacaaaaagtttatcaccaaggagaataaaacagcttatgtcaaattggagaggattgttcttgatcaactcgaacatcccgggattgtgaaactcttctttacgtttcaggatacacaatcactatacatggcgcttgagtcttgtgaaggtggggaacttttcgaccaaatcaccagaaaaggtcgtctatctgaggatgaagctcggttctacagtgcagaagttgttgatgctcttgagtatatacataatatgggactgatacatcgagatattaagccggagaatctgttgttaactttagatgggcacataaagattgctgattttggtagcgtaaagccaatgcaagacagccaaatcacagtgcttcctaatgcggcttctgatgataaggcgtgcacttttgtcgggacggctgcatatgttcctcctgaagttctaaactcctctccagcaacgttcggaaatgatctctgggcactcggctgcactctgtaccaaatgctttcaggaacttccccattcaaggatgcaagtgaatggctgattttccaaagaattatagctagagatataaagtttccaaatcatttctcagaagcagcaagagacctcatcgaccgattgctagatacagatcctagtagaagaccaggagctggatcagaaggttatgattctctcaagagacatcctttcttcaagggagttgactggaagaacctaaggtcacaaactcctccaaaactagctccagatcctgcgtctcaatcagcatctcctgagagggacggttctccatggaatccaacacatgttggagatacctcagtcttgcagaacgatggacacaatggactctctgaatcctcaggttccataactcggcttgcctccatagactctttcgattcaagatggcaacagtttctagaaccgggagaatcggttctaatgatatcagcagtgaagaagctacagaaaatcacaagtaagaaggtgcagctaatactcaccaacaaaccaagactgatatacgttgacccatcaaagcttgtagtaaaagggaatattatctggtctgataactccaacgacctcaacgttcaagtctcaagtccttcccatttcaagatttgcacaccgaagaaagttttatcgtttgaagatgcgaagcaaagagctttgcagtggaaaaaggcaatcgaaactcttcaaaaccgttagctcgagacccagctttcttgtacaaagtggt

SEQ ID NO: 706 - DNA, 1987 bp, Zea mays
acaagtttgtacaaaaaagcaggctcctgcaggaccatggataagaactacggtgaactctacaacatcctcggatggggtgaggagtacttcgcggtgaacacggaggggcacctcagcgtgaagcctttcggccgctggacggagcccgggcaggagatcgacgtgcactcggtcatcgtggaagctctagcgacccaacccaacgacagcaccagcaaatctcagttccccatgatccttcgcttccccgacgtgctcaagaaccgtatcgagacgctccataacgcattcaacagcgccatggagtccaccgggtacacgtccaggtaccaaggcgtgttcccgatcaaggtgaaccagaacaagcacgtcgtgcaggacatggttaggttcggccagcaatggaactatgggctcgaggctggctccaagccagaactgctcatcgccatgagctgcctccccgtcaccgaagccgagcccaagccgtacttgatctgcaacggctacaaggacgcggactacatcgcgctcgcgctctcggcgcgggccatgggcctgaaccccatcatcgtgctcgagatggaggaggagcttgccatcgtcctcgaccagtacaggaagctgcagcagaagctgccagacgacgatgccgtgcgcaagaagttcgagccgatcatcggcatccgcgccaagcttctcaccaagctaccaggccacttcggttcgacggccggcaagcacggcaagttcgggatgctcgccgaccagatctacgaggtggccgagacgctcggcaaggagggcaagttgcactggctccagctgctgcacttccacatcggctccatgatcccgacgacggggaaagtgtacgacgcggtgagcgaggccgctggcatctactgcaacctggtgaacgagcacggcgccaagtggttggccacgctggactgcggcggcgggctcggggtcgactacgacgggacccgttcaggcgactccgacatgtcggtggcgtacgggatacaggagtacgcctccgccgtcgtgcaggcggtgcggctcaagtgcgactacaacggcgtcgcgcacccggtcgtgtgcaccgagagcgggcgcgccatggcgtcgcaccactccatgatcatcctcgagacgctctcggcgatcccggagccgcaggacgaggacacctccgagcagctgttgaacaggatccaggacctatcttacaagcagccgagagctccggttggcggcgccacggcggccgtttactctcacgccgcagacctcaagaagcacggcatcgagatgtacaagcttggcaagaagctcggcaagagggtcgtcgccgatgccaacaccgtctataactaccacatgaacctctccgtcttctcgctgttgcctgacttctggggcatagggcagctcttcccgatgatgccggtgagccgcctcaacgaggagccgactctcaagggcacgctggtggacatcacctgcgacagtgacgggaagatcgagaacttcatcagccgcgaaaacacattgccgctgcacctgttcgagccgagcctcggtggctactacgtggccgtactcgtctccggggcgtaccaggaggccattgctggcaagcacaacctgttcagtggcccaaccctcgttcgtgtcaatagtagcactacaaaagatggcggcttcgagattgaacgcgttgacctgggcccagctgcggatgagatcatcggcagcatgaggtacagcgtcgaggaagacattatcaccgtcatcgagaagaaagccaaggggacagaagaagaagaacgtgtgtgggcgtgggagatggtggagccactcatgaccaaagcgctcaccaccatgccctacctcaacgaatacaaggtccctgaacctgaacctgaacctgaacccatcccttagctcgagacccagctttcttgtacaaagtggt

SEQ ID NO: 707 - DNA, 1774 bp, Arabidopsis thaliana
acaagtttgtacaaaaaagcaggctcctgcaggaccatggactctcactcttcccacctcaacgccgccaatcgttcccgcagttctcagactccttctccttctcattccgcctccgcctccgtcacttcttctctccacaaacgcaaactcgccgccaccacggcagcgaatgcagccgcttctgaagatcacgcccctccttcttcctctttccctccttcctccttctctgccgatactcgcgacggcgctttaacctccaacgatgaactcgagagcatctccgctcgcggcgccgatacagattcagatcctgatgaatcagaggatatagtcgtggatgatgacgaggacgaatttgctcctgaacaggaccaggactcttctatccgcacattcaccgccgctcgactcgattccagctctggagtcaacggttcgagtcgcaacactaaacttaagacggaaagctccacggtgaagcttgagagctctgatggtggaaaagatggtggatcatctgtggttgggactggtgtgagtggcactgttggaggaagctcaatctcagggctcgtgccaaaggatgagtctgttaaggtattggctgagaatttccagactagcggagcttacattgccagagaagaggctttgaaaagagaggagcaagcaggacgactcaaatttgtttgttactcaaatgattccattgatgagcatatgatgtgcttgattgggttgaagaacatttttgcaagacagttacctaatatgcccaaggagtacattgttcgtcttctgatggataggaaacataagtctgttatggtactaagagggaatctagttgtaggtggtatcacgtatcgtccatatcacagtcagaagtttggggaaatagcattttgtgcaatcacagcagatgaacaagtaaaaggttacggtaccagattgatgaaccacttgaaacaacatgcacgtgatgttgatggattgacgcattttcttacttatgctgacaacaatgctgttggttacttcgtcaagcagggttttactaaagagatttacttggagaaagatgtatggcatgggttcattaaagactatgatggtggtctccttatggaatgcaaaattgatccaaagctgccatatacggatttgtcaagcatgatacgccagcaaagaaaggcaattgatgaaaggataagagagttatcaaactgtcagaatgtgtatccaaaaattgagtttctaaagaatgaagctggaattcctagaaagattatcaaagttgaggaaatacgtggcttaagggaagctggttggaccccagatcagtgggggcacactcgtttcaaattattcaatggttctgctgatatggtgacaaatcaaaaacagttgaatgcactcatgcgtgcgcttttaaagacaatgcaagaccatgctgatgcttggcctttcaaagaaccagtggattctcgcgatgtccctgattactatgacatcattaaggatcccattgatctgaaggtaattgcaaagagggtagagtcggaacagtattacgtgacattggatatgtttgttgcggatgcgagacggatgtttaacaattgtagaacttacaactcccccgataccatttattacaaatgtgcaaccaggttggaaacacacttccatagcaaagtacaagcaggtctccaatctggtgctaaatctcaatagctcgagacccagctttcttgtacaaagtggt

SEQ ID NO: 708 - DNA, 1455 bp, Zea mays
atggtgagcggcggcagcaccaaggagcagcagcacgagatgaacatctccttcgggatgatgaaccagcaccatcagcctccgtcctcctcctcttcctcgtccatgcatgcggccgccgcgagcttcatgagcggcaaggaggcgtcaggggcgtatgaccatctgggcgagctggaccaggcgctgttcatgtacctggatcacggcagcagccatggcggcggcgccacgcagcaagagcgaaggcagacactcaacatcttcccttcccagcccatgcatgtggagccgtcgccgaagggggagattagtttagtcctgtccccggcgccggtgggatccaagcagcctaggtcaccggaccatcaccagcaggcggccatggaggagttggcggggagcaggaggcagcaggagcacctccacctgcagcaccaccaaccctttgctgccgctgctgagccagcagcacccgggatgatcaaagatgtcaagccactggccaagaaggatcacaggagaggcacatcgaccgctgaacgcgacccaaaaacgctgagaaggctggcccagaacagggagccaccaaggaaaagcaggctaaggaagaaggcttacatccagcaactcgagtccagcaggatcaggctagctcagctcgaacaagaactgcacactgcaagagctcagggagttttcttccccaacagtggcatcctcgctgaccaaggtgtcgccggcaaaggcgtccccatcggcggcatcgacggcctcagctcagaggcggcgatgttcgacgtggagtacgggcggtggcaggaggagcactaccggctgatgtacgagcttcgggcggcgctgcagcagcacctgccggagggggagctgcagatgtacgtggagagctgcctggcgcaccacgacgagatggtgggcatcaaggagggcgccatcaagggcgacgtcttccacctcatctccggcgtctggcggagccccgccgagcgctgcttcctctggctcggcggcttccgcccctccgaagtcatcaagatgctgctgagccacgtagagcccctgaccgaacagcagatcgtgggcgtgtacgggctgcagcagtcggcgctggagacggaggaagcgctgagccagggcctggaggcgctctaccagtcgctgtctgacaccgtggtctccgacgcgctcagctgcccctcgaacgtctccaactacatgggtcagatggccgtcgccatgaacaagctctccacgctcgagggcttcgtcagacaagctgagaaccttcggcagcagacgctgcaccggctgcaccaggtcctgacgacgcggcagatggcgcggtcgctgctggccgtgtcggactacttccaccgcctccgcacgctgagctcgctctgggtcacacgccccagggcaccgcaggagcaatag

SEQ ID NO: 709 - DNA, 1786 bp, Zea mays
acaagtttgtacaaaaaagcaggctcctgcaggaccatggcgtcgtcgtcctcgtcccggctgctgctcctcctcctcccgtgcctcgcgctcacgctgctcggcgcggcagacgccgaagtgcaccaccacgagttcgttatccaagagacgccggtgaagaggctgtgcaagacgcacaacatcatcacggtgaacgggcagtacccggggccgacgctggaggtcagggagggtgacacgctcatcatcaacgtcgtcaaccgggcgcagtacaacgccaccatccactggcacggcatccgccagataaggactgggtgggcggacgggccggagttcgtgacgcagtgccccatcaggcccggcggcagctacaagtaccggttcaccatccaggggcaggagggcacgctgtggtggcacgcgcacagctcctggctcagggccaccgtctacggcgcgctcatcatccgccccagggagaacaagacctacccattcgccaagccctcgcgagaagtccccgtcatcctcggtgagtggtgggatgcgaacccgatcgacgtcatccgggaggcgcagaggaccggcggcggtcccaacgtctccgacgcgttcaccatcaacggccagcccggcgacctgtacaaatgctccaacaaagagactacggccatcccggtgaaggccggcgagacggcgctgctgcggttcatcaacgccgcgctcaaccacgagctgttcgtcaccatcgcgcagcacaagatgacggtcgtcgccaccgacgcgtcctacaccaagcccttcaccacctcggtgctcatgctcgcgccgggccagaccaccgacgtcctcgtcaccatggaccagccgcccacccgctactacgtcgccgcgcgcgcctacgtctccggccagaacgtggccttcgacaacaccaccaccacggccgtcctcgagtacgactgcggctgcgcctccgacttcggccccaagatacagccggcgttcccggcggcgctaccggccttcaacgacacgtccgccgccaccgccttcgccgccgggatcaggagccccgaccgggtcaaggtccacgagaacgtcgacgagtacctcttcttcaccgtcggcctcggcctcttcaactgcaagccgggccagctctgcgccgggcccaacaacaacacccgcttcgcggccagcatgaacaacgtctccttcgtcttcccgcagaccgactccctcctccacgcgcactactacaagatccccggcgtcttcaccaccgacttcccggcatacccgcccgtgcagttcgactacacggggcagaacgtcagccaggccctgtggcagccggtccccgccaccaagctgtacccgctcaggttcggctccgtggtgcagctcgtcctgcaggacaccagcatcgtcacgcccgagaaccaccccatccacatccacggctacgatttcttcatcctcgccgagggcttcggcaacttcgaccccaagaaggacgtcgagaagttcaactacgtcgacccgccccagaggaacaccgtggcggtgcctgtcaacggttgggcggtcatccagttcgtcgccgacaaccctggtgtgtggctcatgcattgccatctggacgtgcacatcacctggggcctggcaatggctttcctagtggaggacggctatggcgaactgcagtcgctggagccgcccccagttgatcttcccatgtgctagctcgagacccagctttcttgtacaaagtggt

SEQ ID NO: 710 - DNA, 368 bp, Zea mays
gcagtcgctgtcgttaccatgggctccaccgccggcgacgccatcctcatgaagtggatcctccacgactggagcgacgcgcactgcgccacgctgctcaagaactgctacgacgcgctgccggaaaatggcaaggtcatcgtcgtcgagtgcgtgctgccggtcaacacggaggccacccccaaggcgcagggcgtcttccacgtcgacatgatcatgctcgcgcacaaccccggcggcaaggagcggtacgagcgcgagttccgcgagctcgcaaagggcgccggcttctccgggttcaaggccacctgcatctacgccaacgcctgggccatcgagttcatcaagtagaacccagcggtactcgc

SEQ ID NO: 711 - DNA, 875 bp, Zea mays
gcagtcgctgtcgttaccatggatggatggatggatgagccatgcgtgtgtgtgcgtgttttttacaagctgaggatcccgtacagcgctgcctggtcatggttgagaggttgcggcagcaggaggcggcgaatgtttgcttctttgtcggctgatcaagttgtgccaagcggtagcgacgagggacaggccactgaacctaagccatctggttccctctttaggttgagcaacctgcaaataatcatgtcattagaaatgcttaatgttcggatgccatgaaggatatgaatatcatgtacctcggtagaatcgtgtgccttggtcgccgtgatttcgcacctgttgctcagctgacgcgccgtcgctgcagaggaggagagaagtactgtcagcgtcaatggagctcacgagacgacaaggaacgaaggcaggggaagagctaagctagtcgcggtgtgcgaattaagttgaagtacctctgaccctgacggagtcatcggcgtcggcggcgtcggcgtcggccacgatcctgtcgacggccgccgtcttcttctggcagtagtacctgaagctgggcgagccgggcatcggcggcagcgcggcggtcccctcctccgccggctccttgggctccggcgccaccttgcgccctcgcctcctgcccccggacgacgactccgccgcctcctgcggcggcggcggcggcggcggcagacccgaggtggacgcctcgctgtaccgccgcatccgcgcccgcgcccacccccgccgccggggcccggccccgttggcggccgacgccgcgcaccccattgcgggtgcggccagcgtgggggaggggcggggcgccggtagaacccagcggtactcgc

SEQ ID NO: 712 - DNA, 247 bp, Zea mays
acaagtttgtacaaaaaagcaggctcctgcaggaccatggcagaactaagggcagctgtaaccgatttaaatttgtattcaggttcaagattatgggaaatggtgagtcagtggcacttttttggagagcaaggtgcaagagtacaagtctgcgaggatatcaatgggcaaaggcacatttgtatttttttgactccaaagcgatttcagttgtagctcgagacccagctttcttgtacaaagtggt

SEQ ID NO: 713 - DNA, 1774 bp, Glycine max
aaagatggacccccacccacgaggagcatcgtggaaaaagaagacgttccaaccacgtcttcaaagcaagtggattgatgtgatatctccactgacgtaagggatgacgcacaatcccactatccttcgcaagacccttcctctatataaggaagttcatttcatttggagaggaccaggtggtaccggcgcgccaccatggaatcacaactgggtttgattgaaaaatcctttaatgttaaatactcagatggggttagagaagctcttgatgaattgcctgatagttttacaattactgatccctctatttctggtcaccctattgtttatgcatcaaggggtttcttgaaagtatttggttattccaagaatgaggttttagggaagaatggaagggtatttcaagggcctaagactaatagaagatcagttatggcgattcgagaggcgattcgtgaggagaggggtatacaggttagtttgttgaattataggaaggatgggacacccttttggatgttgtttaatatgtgtcctgtttatagtgagaaggatgggagggtggttcattttttgggaattcaagtgcctattttgaggaggagaaattcattaggtggtggaattgggagaaatggaggagtatgttatgatggaggtaattgcagggagtatgtctataagtgttgtaggaaggaggtttgctcgaattcgattatggaaatggatagagcattatcggttgatacagtttcagggatggaccatacagaagtagatgctgaaggaccttgtgaagcaagtgatcaagaaaagacaaaagccagtgttgctgtcaacaacataatgtccgtgttggcaaactacagtgagttgaatggcagactggtcagtgacaggagatgctgtcaatcgggaacgagtctgctcagtgcatccttaaatatatcttttggtagaataaaacaaagctttgtattaactgacgcacacttaccagacatgccaattgtctatgcaagtgatgccttcctaaaattaacaggcttcttgagacatgaagtattgggtcgtaattgtcggtttttaagtggggaagatacagacagaggcacacaatttcagataaaacaatgcatccaaaatgaacaaccgtgtactgtacatatcttaaattacagaaaagatggaatctcattttggaattttcttcacatttcaccgatccggagtgcttcaggaaaggttgcgtacttcgttggcattcagatagaagatactaacgaggctcgggagaaacaagggctaaatccggagatgaggcatcgcagtgttgtcgctgctgtaaaggttgctgtgagagggtggtcaatgggtgcaagcacctcctaggcgatcgcgggccctgatcacctgtcgtacagtatttctacatttgatgtgtgatttgtgaagaacatcaaacaaaacaagcactggctttaatatgatgataagtattatggtaattaattaattggcaaaaacaacaatgaagctaaaattttatttattgagccttgcggttaatttcttgtgatgatctttttttttattttctaattatatatagtttcctttgctttgaaatgctaaaggtttgagagagttatgctctttttttcttcctctttcttttttaactttatcatacaaattttgaataaaaatgtgagtacattgagctcatttaaataagcttgatggggatcagattgtcgtttcccgcctt

SEQ ID NO: 714 - DNA, 776 bp, Zea mays
acaagtttgtacaaaaaagcaggctcctgcaggaccatggaggagcacgcgctgctgcacatgcagtaccagccgccgccgcccccgacgtcctactactcgagccagtacttctctctgccggcgatgaactccggcgacgtccttcccccggcgatccggaggtactgcaaggcggagcagcaggtggtgtcggggcagacggcggcgtcggaggtcagcccgtcccgcgagaccgggctgagcgccgaccccaacgcggagatctcgtcggcggtgaccccgtcgtcgtcgcaccagttcctgcccgagttcgacgacccggtcctgaacctcgcggacctctggaagtactagctcgagacccagctttcttgtacaaagtggtacaagtttgtacaaaaaagcaggctcctgcaggaccatggaggagcacgcgctgctgcacatgcagtaccagccgccgccgcccccgacgtcctactactcgagccagtacttctctctgccggcgatgaactccggcgacgtccttcccccggcgatccggaggtactgcaaggcggagcagcaggtggtgtcggggcagacggcggcgtcggaggtcagcccgtcccgcgagaccgggctgagcgccgaccccaacgcggagatctcgtcggcggtgaccccgtcgtcgtcgcaccagttcctgcccgagttcgacgacccggtcctgaacctcgcggacctctggaagtactagctcgagacccagctttcttgtacaaagtggt

SEQ ID NO: 715 - DNA, 1471 bp, synthetic construct
ggtaccggcgcgccaccatggctattactaacaagactatgcttattacttacgctgattctcttggaaagaaccttaaggagcttaacgagaacattgagaactacttcgctgatgctgttggaggagttcatcttcttcctttcttcccttctactggagatagaggattcgctcctattgattaccatgaggttgattctgctttcggagattgggatgatgttaagagacttggagagaagtactaccttatgttcgatttcatgattaaccatatttctagacaatctaagtactacaaggattaccaagagaagcatgaggcttctgcttacaaggatcttttccttaactgggataagttctggcctaagaacagacctactcaagaggatgttgatcttatttacaagagaaaggatagagctcctaagcaagagattcaattcgctgatggatctgttgagcatctttggaacactttcggagaggagcaaattgatcttgatgttactaaggaggttactatggatttcattagatctactattgagaaccttgctgctaacggatgcgatcttattagacttgatgctttcgcttacgctgttaagaagcttgatactaacgatttcttcgttgagcctgagatttggactcttcttgataaggttagagatattgctgctgtttctggagctgagattcttcctgagattcatgagcattacactattcaattcaagattgctgatcatgattactacgtttacgatttcgctcttcctatggttactctttactctctttactctggaaaggttgatagacttgctaagtgggttaagatgtctcctatgaagcaattcactactcttgatactcatgatggaattggagttgttgatgttaaggatattcttactgatgaggagattacttacacttctaacgagctttacaaggttggagctaacgttaacagaaagtactctactgctgagtacaacaaccttgatatttaccaaattaactctacttactactctgctcttggagatgatgatcaaaagtacttccttgctagacttattcaagctttcgctcctggaattcctcaagtttactacgttggattccttgctggaaagaacgatcttgagcttcttgagtctactaaggagggaagaattattaacagacattactactcttctgaggagattgctaaggaggttaagagacctgttgttaaggctcttcttaaccttttcacttacagaattcaatctgctgctttcgatcttgatggaagaattgaggttgagactcctaacgaggagaacattgttattgagagacaaaacaaggatggatctcatattgctactgctgagattaaccttcaagatatgacttacagagttactgagaacgatcaaactatttctttcgagtaggcgatcgc

SEQ ID NO: 716 - DNA, 1597 bp, synthetic construct
ggtaccggcgcgccaccatggcttcctctatgctctcctctgccgctgtggttacatccccggctcaggccaccatggtcgctccattcaccggcttgaagtcatccgctgcattcccggtcacccgcaagaccaacaaggacatcacttccatcgcaagcaacgggggaagagttagctgcatgaagagatcttggcaaactctgacttttgcccattaccaaccccaacagtggggccacagcagtttcttgcatcggctgtttggcagcctgcgagcttggcgggcctccagccagctgttggtttggtctgaggcactgggtggcttcttgcttgctgtcgtctacggttcggctccgtttgtgcccagttccgccctagggttggggctagccgcgatcgcggcctattgggccctgctctcgctgacagatatcgatctgcggcaagcaacccccattcactggctggtgctgctctactggggcgtcgatgccctagcaacgggactctcacccgtacgcgctgcagctttagttgggctagccaaactgacgctctacctgttggtttttgccctagcggctcgggttctccgcaatccccgtctgcgatcgctgctgttctcggtcgtcgtgatcacatcgctttttgtcagtgtctacggcctcaaccaatggatctacggcgttgaagagctggcgacttgggtggatcgcaactcggttgccgacttcacctcacgggtttacagctatctgggcaaccccaacctgctggctgcttatctggtgccgacgactgccttttctgcagcagcgatcggggtgtggcgcggctggctccccaagctgctggcgatcgctgcgacaggtgcgagcagcttatgtctgatcctcacctacagtcgcggtggctggctgggttttgtcgccatgatttttgtctgggcgttattagggctctactggtttcaaccccgtctacccgcaccctggcgacgctggctattcccagtcgtattgggtggactagtcgcggtgctcttggtggcggtgcttggacttgagccgttgcgcgtgcgcgtgttgagcatctttgtggggcgtgaagacagcagcaacaacttccggatcaatgtctggctagcggtgctgcagatgattcaagatcggccttggctgggcatcggccccggcaataccgcctttaacctggtttatcccctctatcaacaggcgcgctttacggcgttgagcgcctactccgtcccgctggaagtcgcggttgagggcggactactgggcttgacggccttcgcttggctgctgctggtcacggcggtgacggcggtgcggcaggtgagccgactgcggcgcgatcgcaatccccaagccttttggttgatggctagcttggccggtttggcaggaatgctgggtcacggtctgtttgataccgtgctctatcgaccggaagccagtacgctctggtggctctgtattggagcgatcgcgagtttctggcagccccaaccttccaagcaactccctccagaagccgagcattcagacgaaaaaatgtaggcgatcgc

SEQ ID NO: 717 - DNA, 1736 bp, Streptomyces coelicolor
gcagtcgctgtcgttaccatgatcgtcaacgagcccgtgccggacaccttcgaggacacccccgccaaggaccgggacccggactggttcaaacgagccgtcttctacgaggtcctcgtccgctccttccaggacagcaacggcgacggcatcggtgatctcaagggcctgaccgccaagctggactacctgcaatggctcggcgtggactgcctgtggctcccgcccttcttcaagtcaccgctgcgcgacggcggttacgacgtctccgactacaccgccgtgctgccggagttcggcgacctggccgacttcgtggagttcgtggacgcggcgcaccagcgcggcatgcgcgtgatcatcgacttcgtcatgaaccacaccagcgaccagcacccgtggttccaggagtcccgcaggaacccggacggcccctacggcgactactacgtctgggccgacgacgacaagcagttccaggacgcgcggatcatcttcgtcgacaccgaggcgtccaactggacctacgacccggtgcgcaagcagtactactggcaccggttcttctcccaccagccggacctcaactacgagaacccggtcgtgcaggaggagatgatctccgcgctgaagttctggctggacctgggcatcgacgggttccggctggacgcggtgccgtacctctaccaggaggagggcaccaactgcgagaacctcccgcgcacgcacgacttcctgaagcgggtgcgcaaggagatcgacgcgcagtacccggacacggtggtgctggccgaggccaaccagtggccggaggacgtggtcgactacttcggcgactacgcggcgggcggcgacgagtgccacatggccttccacttccccgtcatgccccgcatcttcatggcggtcagaagggagtcccgctacccggtctccgaaatcctcgccaagaccccggccatcccgtccggctgccagtggggcatcttcctgcgcaaccacgacgagctgaccctggagatggtcaccgacgaggaacgcgactacatgtacgcggagtacgccaaggacccgcgcatgcgcgccaacatcggcatccggcgcaggctcgccccgctcctcgacaacgaccgcaaccagatcgagctgttcaccgccctgctgctgtccctgcccggctcgccgatcctctactacggcgacgagatcggcatgggcgacaacatctggctcggcgaccgcgacgccgtgcgcacccccatgcagtggacgcccgaccgcaacgcgggcttctcgtcgtccgacccgggccgcctgttcctgcccacgatcatggacccggtccacggttaccaggtgacgaacgtcgaggcgtccatggcctcgccctcctccctgctgcactggacccggcgcatgatcgagatccgcaagcagaacgtggccttcggcctgggcacctacaccgagctgccgtcgtccaaccctgccgtcctggccttcctgcgcgaacacgaggacgacctggtgctgtgcgtccacaacttctcccggttcgcgcagccgacggagctggacctcagcgccttcgacggacgccatccggtcgagctgttcggcggggtccgcttcccggcggtcggtgacctgccgtacctgctgaccctgggcggtcacggcttctactggttccgcctgcgcaaggacgccgcctagaacccagcggtactcgc

SEQ ID NO: 718 - DNA, 1532 bp, Zea mays
acaagtttgtacaaaaaagcaggctcctgcaggaccatgggggcgcgggagtactacgactaccgccgggccatgtacggcgacatcacgcacaaggccatcctcgtcgacgccgccggcacgctgctcgccccaaccgagcccatggcgcaggtgtacagaacgataggccagaagtatggggttgattactccgaggatgagattctgatgcggtatcgctgggcgtatgcgcagccttggggtagatcacgtctgaggtatgtcaatgatggaaggcccttctggcaatacatagtgagttcatctactggctgctcaaatctagagtactttgaggagctgtatcagtattacacaactgaaaaggcttggcatctctgcgatccagacgctggacgtgtttttgaggcattgaggaaggctggtgtcaaaacagctgtcgtgtccaattttgacactcgtcttcgaccacttttacaggcactgaaatgtgaccgctggtttgatgcagttgctgtgtctgctgaggtcgcagcagaaaagccaaaccctacaatattcttgaaggcctgcgagctgttacgagtgaaaccagaagaagtcgtgcatattggtgacgaccgtaggaatgacctatggggagctagggatgcaggctgtgatgcctggctttggggcagtgatgtttactccttcaaggaggttgcggagaggatcggggttgaggtatagctcgagacccagctttcttgtacaaagtggtacaagtttgtacaaaaaagcaggctcctgcaggaccatgggggcgcgggagtactacgactaccgccgggccatgtacggcgacatcacgcacaaggccatcctcgtcgacgccgccggcacgctgctcgccccaaccgagcccatggcgcaggtgtacagaacgataggccagaagtatggggttgattactccgaggatgagattctgatgcggtatcgctgggcgtatgcgcagccttggggtagatcacgtctgaggtatgtcaatgatggaaggcccttctggcaatacatagtgagttcatctactggctgctcaaatctagagtactttgaggagctgtatcagtattacacaactgaaaaggcttggcatctctgcgatccagacgctggacgtgtttttgaggcattgaggaaggctggtgtcaaaacagctgtcgtgtccaattttgacactcgtcttcgaccacttttacaggcactgaaatgtgaccgctggtttgatgcagttgctgtgtctgctgaggtcgcagcagaaaagccaaaccctacaatattcttgaaggcctgcgagctgttacgagtgaaaccagaagaagtcgtgcatattggtgacgaccgtaggaatgacctatggggagctagggatgcaggctgtgatgcctggctttggggcagtgatgtttactccttcaaggaggttgcggagaggatcggggttgaggtatagctcgagacccagctttcttgtacaaagtggt

SEQ ID NO: 719 - DNA, 1436 bp, Nostoc sp. PCC 7120
acaagtttgtacaaaaaagcaggctcctgcaggaccatggaaaggcctaaagttatttttgtggatgctgtggggacactctttggcgttaagggtagtgtcggaaaagtttatagtcaaatagcccaagagtttggtgtagaagttgcaccggatattgtggataaagcatttgttgaaagttttaaagcatccccgccgcccatattccctgatgctgacactgaagacataccacaacgtgaatttgagtggtggcgtaaaattgccctgaatacttttgaaagtgctggtgttctgccccaatttaccgatttttctagcttttttggtgaactatatattcactttggcactgctgaaccttgggtgatatatcctgatgttgtgcaatccttgagcaactggcaacatatagggattgaattgggcgttttgtctaatttcgattcgcggttgtactcagttttgcaaagtttaggtttgagtcactacttttcttcggtgacgatttccactcaagcaggtgcagcaaaacctgaccccaaaatttttgcgatcgctttagaaaaacacaatagttctcctgaagaggcatggcacattggcgatagtattgaagaagattatcaaggagcaaaagcagccgggttaaggggtgtttggattaatcgagagaaaggttagctcgagacccagctttcttgtacaaagtggtacaagtttgtacaaaaaagcaggctcctgcaggaccatggaaaggcctaaagttatttttgtggatgctgtggggacactctttggcgttaagggtagtgtcggaaaagtttatagtcaaatagcccaagagtttggtgtagaagttgcaccggatattgtggataaagcatttgttgaaagttttaaagcatccccgccgcccatattccctgatgctgacactgaagacataccacaacgtgaatttgagtggtggcgtaaaattgccctgaatacttttgaaagtgctggtgttctgccccaatttaccgatttttctagcttttttggtgaactatatattcactttggcactgctgaaccttgggtgatatatcctgatgttgtgcaatccttgagcaactggcaacatatagggattgaattgggcgttttgtctaatttcgattcgcggttgtactcagttttgcaaagtttaggtttgagtcactacttttcttcggtgacgatttccactcaagcaggtgcagcaaaacctgaccccaaaatttttgcgatcgctttagaaaaacacaatagttctcctgaagaggcatggcacattggcgatagtattgaagaagattatcaaggagcaaaagcagccgggttaaggggtgtttggattaatcgagagaaaggttagctcgagacccagctttcttgtacaaagtggt

SEQ ID NO: 720 - DNA, 1952 bp, Saccharomyces cerevisiae
acaagtttgtacaaaaaagcaggctcctgcaggaccatgacctatccgaaaagaatacctataaatgcgtggtctgaagttcatagggtggcaaggccactaattattactttcgacgcatataatacactatacgccacaaaacttcccgtcatggaacaatactgcattgttgggcgtaaatatggtatcaaggcgaatccttcgactttaacaaacaattttccacacgtttttaaaaaactgaaggaagactatccccaatacggaaaatattctggtatcaagcccgaacaatggtggtccatcttgattaggaacgtcttcgcaccaaacgaaattcccgatgagatgataaatgaaatattaatgcggtttgagggcttcgattcgtattttgtttatccagatttgatcaaatttttaaaggatttgaagtcaagacatcctgatgttatcttaggaatagtaagcaatactgatccaattttttacaaattattaaagaatatcggattatttgagacattttccggtcacatttatttatcatatgagcttaatctcgccaaacctgatagagcaatatttcaatatgcgcttgacgatattatatctaaacaacctcatttactcgaaaagtacaccagggaggaaattctacagcattgctttcacatcggagatgaattaaagaacgatctcgaaggggcagaagctgccggttggactggtatactgttagatagaaatgataaatacgggtttctttcaaactcgattagtaaaccaatgcgggacgaatacaagctgtcaattgataaaatagataataattcaataaacacttgggaagccaatactaagcaaactgacacgttacagttgagtgaaagaaagtacgttgtttcgaatcttgaggttttagaggaactctttccctagctcgagacccagctttcttgtacaaagtggtacaagtttgtacaaaaaagcaggctcctgcaggaccatgacctatccgaaaagaatacctataaatgcgtggtctgaagttcatagggtggcaaggccactaattattactttcgacgcatataatacactatacgccacaaaacttcccgtcatggaacaatactgcattgttgggcgtaaatatggtatcaaggcgaatccttcgactttaacaaacaattttccacacgtttttaaaaaactgaaggaagactatccccaatacggaaaatattctggtatcaagcccgaacaatggtggtccatcttgattaggaacgtcttcgcaccaaacgaaattcccgatgagatgataaatgaaatattaatgcggtttgagggcttcgattcgtattttgtttatccagatttgatcaaatttttaaaggatttgaagtcaagacatcctgatgttatcttaggaatagtaagcaatactgatccaattttttacaaattattaaagaatatcggattatttgagacattttccggtcacatttatttatcatatgagcttaatctcgccaaacctgatagagcaatatttcaatatgcgcttgacgatattatatctaaacaacctcatttactcgaaaagtacaccagggaggaaattctacagcattgctttcacatcggagatgaattaaagaacgatctcgaaggggcagaagctgccggttggactggtatactgttagatagaaatgataaatacgggtttctttcaaactcgattagtaaaccaatgcgggacgaatacaagctgtcaattgataaaatagataataattcaataaacacttgggaagccaatactaagcaaactgacacgttacagttgagtgaaagaaagtacgttgtttcgaatcttgaggttttagaggaactctttccctagctcgagacccagctttcttgtacaaagtggt

SEQ ID NO: 721 - DNA, 760 bp, Glycine max
acaagtttgtacaaaaaagcaggctcctgcaggaccatggacctttccatcaacgaaagaagccttgttagagaaagacaagaggaagaagaagaagaagaagatgaaagagacaacggtgatgaacccaaagagggtgcagttgaggctggaacacgcaggccaagagggagaccccctggttccaaaaacaagcccaaaccccccatcttcgtcaccagggacagcccaaactccctcagaagccatgtcatggaggttgccggcggggccgacgtggcggaaagcgtggcccagtttgcacggaggcgccagcgtggggtgtgtgtcctcagtgggagcggttccgtggccaacgttactctccggcaaccttcggcaccgggagcggttgtggcacttcatggaaggtttgaaattctgtccctaaccggagcgtttctgcctggtcctgccccgccaggagctacaggacttactgtgtatctcgctggagggcagggccaggtagtgggagggagcgtcgtgggctcccttgtggcagctggaccagtcatggtgattgctgccacttttgctaatgctacctatgagaggttgccccttgaggaggaggaagacgacggtggtggtagcgtgcaaggagggagtaccctaggaggatctcctcatggaattggtagtagcggcggcggtggcggtagtggtggtggccacttaccagtttagctcgagacccagctttcttgtacaaagtggt

SEQ ID NO: 722 - DNA, 2426 bp, Glycine max
acaagtttgtacaaaaaagcaggctcctgcaggaccatgttcatagttaggaaaaacggcaaaacttcactgcacaatgctgctaggtatggtgtccatcgtattgtaaaaacacttattgctcgggatccaggaatagtatgcatcaaagataaaaaaggtcaaactgcactgcatatggcggttaaaggacagtgtacttcagttgtggaggagatattactagctgatccttctattttgaatgagcgagataagaagggtaatacagctcttcacatggctacaaggaaatgccgttcacagatagtgggccttttgctaagctattctgctgtggatgttaatgccatcaacaagcagcaggaaacagccttggatttggcagataaactgccatatggagattcagctttggaaataaaggaagcccttgcagaatatggtgctaagcatgccaggtatgttggcaaagaagatgacgcaatggaacttaaaagaactgttagtgatataaagcatgaggtgcagtcacaacttatacaaaatgaaacgacacgacgacgggtttctggtattgccaaggagttgaagaaacttcatagagaagcagttcaaaacaccattaattctgtcacattggttgctgtactttttgcctcaatagcattcttagccatcttcaatttgccgggtcaatatataacggacgaaggaaaagagattgggaaagctaaaatagccgatcatgttagtttccaagtcttctgccttctgaattctacatctcttttcatttctcttgccgttgttgtagttcaaattactttggtagcctgggacacaagggctcaaaagcagattgtgtcggtggttaacaagttgatgtgggctgcatgtgcttgcacttgtggtgcttttctagcaatagcttttgaggttgttggaaagaaaacatggatggctatcaccatcacccttttgggggtacctgttctagttggcactctagcaagcatgtgctactttgtttttcgacaacatttcggcattttccgcagtgattcccagagacgcatcaagagagcaagtggaagcaaatctttctcatggtcttactctgcaaatatatcagatttggatgaatacaattctgacattgagaagatctatgccctgtagctcgagacccagctttcttgtacaaagtggtacaagtttgtacaaaaaagcaggctcctgcaggaccatgttcatagttaggaaaaacggcaaaacttcactgcacaatgctgctaggtatggtgtccatcgtattgtaaaaacacttattgctcgggatccaggaatagtatgcatcaaagataaaaaaggtcaaactgcactgcatatggcggttaaaggacagtgtacttcagttgtggaggagatattactagctgatccttctattttgaatgagcgagataagaagggtaatacagctcttcacatggctacaaggaaatgccgttcacagatagtgggccttttgctaagctattctgctgtggatgttaatgccatcaacaagcagcaggaaacagccttggatttggcagataaactgccatatggagattcagctttggaaataaaggaagcccttgcagaatatggtgctaagcatgccaggtatgttggcaaagaagatgacgcaatggaacttaaaagaactgttagtgatataaagcatgaggtgcagtcacaacttatacaaaatgaaacgacacgacgacgggtttctggtattgccaaggagttgaagaaacttcatagagaagcagttcaaaacaccattaattctgtcacattggttgctgtactttttgcctcaatagcattcttagccatcttcaatttgccgggtcaatatataacggacgaaggaaaagagattgggaaagctaaaatagccgatcatgttagtttccaagtcttctgccttctgaattctacatctcttttcatttctcttgccgttgttgtagttcaaattactttggtagcctgggacacaagggctcaaaagcagattgtgtcggtggttaacaagttgatgtgggctgcatgtgcttgcacttgtggtgcttttctagcaatagcttttgaggttgttggaaagaaaacatggatggctatcaccatcacccttttgggggtacctgttctagttggcactctagcaagcatgtgctactttgtttttcgacaacatttcggcattttccgcagtgattcccagagacgcatcaagagagcaagtggaagcaaatctttctcatggtcttactctgcaaatatatcagatttggatgaatacaattctgacattgagaagatctatgccctgtagctcgagacccagctttcttgtacaaagtggt

SEQ ID NO: 723 - DNA, 1078 bp, Zea mays
acaagtttgtacaaaaaagcaggctcctgcaggaccatggcggccttctcctccagcaacggcgtgccgccgggcttccggttccacccgaccgacgaggagctgctgctatactacctcaagaagaaggtcggattcgagaagttcgaactcgaggtcatcagggaggtcgacctcaacaagatcgagccatgggagctgcaagagacgtgccggatcgggtcggcgccgcagaacgagtggtacttcttcagccacaaggaccgcaagtacccgacggggtcgaggacgaaccgcgccacgacggccggcttatggaaggccacgggccgggacaagtgcatccggaccagctaccgcaagatcggcatgcgaaagacgctcgtcttctaccgcggccgcccccctcacggccagaagaccgactggatcatgcacgagtaccgcctcgaggacgccgacgacgacgacgcccagggcggcaccagcgaggacggatgggtggtgtgccgcgtgttcaagaagaagtgcttcttcaagattggcggaggcgaagggagcaccaccagcagccagggcgcggatgccggcggccacctggccaccatgtcgccgccgctcggcggacaccacgacctggcgtacatgcacccgcacccgtactaccaccacgccgcctcctactactcccagatgcaggccccggggccgcatgccaccgcatactcgcaccacgtgcaggtccaggacctcctcaccaaccaccgacccacggacgacgacggcgccggcaccggctacgacttctccggcctgcccgtcgagaatcaacccggcggcggccttgacgtcggcagcagcgatggcgtcgccacagacgacggtggccagctggctggcgaaaggagggatcagaccaccggtacagccgcagatcatcagtggcaggcgatggatggtttcagcaacggcgggagcgccgaggtgcagcaaatgaccggcgcccaacgaggcggggagatggatttgtggggttacggaaggtagctcgagacccagctttcttgtacaaagtggt

SEQ ID NO: 724 - DNA, 2156 bp, Glycine max
acaagtttgtacaaaaaagcaggctcctgcaggaccatggcaatgagagggcaacaagataaggaaatagagataccaaccacaaccactttaggttacaaccttcccaaccgagattcttcttcttcctcttccaagctctcttctccaactgttggtgaaagaagtagcagtgatcatgatcaacagcatcatcaaccaactcatcaaactcgcacattaatcttcaacgaaacacctcaccataatctctatccaccaccaccacctcctcctcctgctcttgcacctcatcgacccacgtcagatccagatctaagcaccccaattgctcccacatcgaatccctcaagaacagcgccgcctcaaacgacaacaacaacaacctcgacgccgtcgatcaggtaccgagaatgtcttcggaaccacgcggcgagcatggggagccacgtggtggatggctgcggcgagttcatggcaagtggggaagaaggcacgccagaatcactaagatgcgcagcatgcgagtgccaccgcaacttccacagaaaagaagttgaaggagaattacgaccgcaaccacaaccacaaccgcaaacacatgttccaaattaccacagctactacaccaacaagcacaacggtcaccttcactaccctacaccctcttcatcttccctccatcatagattggttacaccaacaagcttggtctccccagtgatgatggcctttgggggcccagctgagtcatcaagtgaagatctcaacatgtttcagtccaacactggaggagcacagttaatatcagtgcagcagcatgcaccactactctcttccagcaagaagaggttcaggactaagttctctcagcaccagaaggataggatgatggagtttgctgacaagattgattggaagatccacaaacacaatgagcaggaggtacagcagttttgttctcaagtgggtgtcaagagacaggtttttaaggtttggatgcacaataacaagcaaacaactagtagtaagaagcagcaaatgtagctcgagacccagctttcttgtacaaagtggtacaagtttgtacaaaaaagcaggctcctgcaggaccatggcaatgagagggcaacaagataaggaaatagagataccaaccacaaccactttaggttacaaccttcccaaccgagattcttcttcttcctcttccaagctctcttctccaactgttggtgaaagaagtagcagtgatcatgatcaacagcatcatcaaccaactcatcaaactcgcacattaatcttcaacgaaacacctcaccataatctctatccaccaccaccacctcctcctcctgctcttgcacctcatcgacccacgtcagatccagatctaagcaccccaattgctcccacatcgaatccctcaagaacagcgccgcctcaaacgacaacaacaacaacctcgacgccgtcgatcaggtaccgagaatgtcttcggaaccacgcggcgagcatggggagccacgtggtggatggctgcggcgagttcatggcaagtggggaagaaggcacgccagaatcactaagatgcgcagcatgcgagtgccaccgcaacttccacagaaaagaagttgaaggagaattacgaccgcaaccacaaccacaaccgcaaacacatgttccaaattaccacagctactacaccaacaagcacaacggtcaccttcactaccctacaccctcttcatcttccctccatcatagattggttacaccaacaagcttggtctccccagtgatgatggcctttgggggcccagctgagtcatcaagtgaagatctcaacatgtttcagtccaacactggaggagcacagttaatatcagtgcagcagcatgcaccactactctcttccagcaagaagaggttcaggactaagttctctcagcaccagaaggataggatgatggagtttgctgacaagattgattggaagatccacaaacacaatgagcaggaggtacagcagttttgttctcaagtgggtgtcaagagacaggtttttaaggtttggatgcacaataacaagcaaacaactagtagtaagaagcagcaaatgtagctcgagacccagctttcttgtacaaagtggt

SEQ ID NO: 725 - DNA, 778 bp, Brassica napus
acaagtttgtacaaaaaagcaggctcctgcaggaccatggcgtctctgacctccgataacgaacaaccgccgacgaattcaaactcaagttctacagatcatgttagaaagaagaagagcttatttgcttcctccccctcctcgtctcgtggaaacgcagcttccgtaccaaccagagacggtgacagccacccgcgatggagatcggagaagcaacagcgtatctactccgccaagctgatccaggcgctgagacaggtccgcctcagctcttcctcctccgcgacgacatcatctccaacggctcagaagcgagggaaagcagtccgcgaagccgcggaccgcgccctcgccgtttccgcccgcgggaggacgctctggagcagagcgattcttgctaaccggatcaaactgaagttccggaagcagaaacggccgaggcagacggttataccggccgtgaccacggtggtcacgacgggagctactagcagcagagggaggaaacggagagtgtcggtggtgggactgaataagaagagtttaccgacggttaaccggaaagttcgttctctcggccggttagttccgggttgcaaaaaagaatcagtaccggttattctagaagaagcaaccgattacatacaagcactggagatgcaagttagagccatgaactctctagtggagcttctctccggctactcaacccccggctcagactcagctcctccgcctattagatagctcgagacccagctttcttgtacaaagtggt

SEQ ID NO: 726 - DNA, 1078 bp, Glycine max
acaagtttgtacaaaaaagcaggctcctgcaggaccatggaggaatcatggactagttggctttgtgacatggaaccagatgattacagtttcataggtcaatcagacataaaagtggatgatgtgaatggatgtttagtatctcctcatgatgtagccactgcattattagagaagaaccagcaaagcttattttccagagagagtcactcttcagcggctgagagtggcttagagaggcctttcaagttgccaaagagagaacaactctcacaaaagatagcttctagttctactcccagctcctatattctctcctttgacaacatgaatccaccaacaataaaggttgaatctgcctcaaagccaggcaccaaggttgtgaatcttgagaaagctttgccttcaaagaatgaaccaacaagaccacaggaaaacaagaaaatgggctcatttgccagatcttctcatcacacacaagatcacatcattgctgagagaatgaggagagagaaaattagccagcagttcattgccctctctgcccttattccagacctcaaaaagatggacaaggtgtctctgttgggggaggctataaggtatgtgaagcagctgaaggagcaagtgaagctgctggaggagcagagcaaaaggaaaaacgaggaatctgtgatgtttgcgaagaaatctcaggtttttcttgcggacgaggatgtctcagacacttcgtcaaactcctgcgagttcggaaactccgatgatccctcgtcaaaagcgaattttttgtcactaccagaagttgaagcgagggtgtcaaagaagaacgtgctgattcgaatcctctgcgagaaggaaaagacagtgctggtgaacattttcagagagatagagaaacttcatctctcgatcatctatagtagcgccttgtctttcggttcctctgttctcgacacaaccatagtagccgagatggaggatgaattcaacatgggggtgaaggaactggctagaaatctcagagtaggattaatgcaatttatgtagctcgagacccagctttcttgtacaaagtggt

SEQ ID NO: 727 - DNA, 1024 bp, Glycine max
acaagtttgtacaaaaaagcaggctcctgcaggaccatgggaggagacgaagaggaggaggaggtgctcggttcgggccaatccgcctccaccaacaacagcttgccacctcccgtcgataaaactattctcaaattgaaccatctcgacgtacatgctgatgatgctggatcacacgcttctcttgctggcaagaagaaaaagagaggcggtcaacgggctgttggacctgataagagtggaagaggtctccgccaatttagtatgaaagtgtgtgagaaggtagaaagcaggggaagaaccacatacaatgaggtggcggatgagcttgttgctgaattttctgaaccaagcaatagtgaattgccccctgatcagcaacaatatgatgaaaaaaacatccgccgaagggtctatgatgctctgaacgttctcatggcaatggatattatttccaaggacaaaaaggaaattcaatggaggggccttcctcgtactactgtgaatgatattgaagaactaaagacagagcggcttgggctcaggaatagaattgaaaagaaaacagcctatctgcaggagcttgaggagcaattcataggtcttcagaaccttattcaacgaaacgagcagttatatagctcaggaaatcctcccagtggaggtgtatctttaccttttattttggtacagacacgccctcatgcaactgtggaagtggaaatatcagaagatatgcagcttgttcattttgatttcaatagcactccttttgagctgcatgacgacaattatgttctcaaggcaatgaaatttggtgagagaccacaagatgataatatgacacacaatcttactgacggaggtgaagtttctagcatgtcaggcttgtgtcagccacagactcctacaaatcttaatgtgtcaaatagacctccaacatcacctcctctccctggcatactaaaggcaagagttaagcaagagcattagctcgagacccagctttcttgtacaaagtggt

SEQ ID NO: 728 - DNA, 520 bp, Glycine max
acaagtttgtacaaaaaagcaggctcctgcaggaccatggcgaaaaaggcaaaagggtctcactctgcttcttctgcctctgcatcttcttcgtccgacaaactagtgctgaggattaaatcaaatgaggggaccaagagatcagtgcggcaaactaattcaagaaagaaacttaaagcaaagcaaaagaagaacaaacaaaagtttgatgctatgaaacccaggaaacctcctacagctttcttctacttcttggaggattttcgtaaagaatttcaagagcagaatccagatgtaaagtcaatgcgtgatattggcaaggcatgtggagagaagtggaaaacaatgacttatgaggagaaggttcaatactatgatatagcaacaaaaaaacgtgaagaatttgataacgcaatggctgaatttaataagaaaatggaaaatggcgagtttgacgaaactgatgatgaatcagagtttgatgagtagctcgagacccagctttcttgtacaaagtggt

SEQ ID NO: 729 - DNA, 1549 bp, Zea mays
acaagtttgtacaaaaaagcaggctcctgcaggaccatggtgctgtcacacggcgtcggtggctccgatgtgtccgtccactcgacgttcgcgtcccgctacgtccgcacctcccttcctaggtaccggatgccggagcagtcgatccccaaggaggcggcgtaccagatcatcaacgacgagctgatgctggacgggaacccgcggctgaacctggcgtccttcgtcaccacgtggatggagcccgagtgcgacaagctcatccaggcctccgtcaacaagaactacgtcgacatggacgagtaccccgtcaccaccgagctgcagaaccggtgcgtgaacatgatcgcgcatctcttcaatgctcctctcggggacgctgaaacggctgttggagtgggcaccgtcggctcgtccgaggccatcatgctggctgggctggcgttcaagaggcgttggcagaacaagatgaaggcggccggcaagccctgcgacaagccaaacatcgtcaccggcgccaacgttcaagtttgctgggagaagttcgcgcgctacttcgaggtcgagctgaaggaagtgaagctgagcgacggctactacgtcatggacccgcagaaggcagtggacatggtggacgagaacaccatctgtgtggcggccatcctcggctccacgctgaacggcgagttcgaggacgtgaagctgctcaacgacctgctcaccaagaagaacgcggagacaggctgggacacgccgatccacgtggacgcggcgagcggcgggttcatcgcgccgttcctgtacccggaactggagtgggacttccgactgccgctcgtgaagagcatcaacgtcagtggacacaagtatggtctggtctacgccggcatcgggtggtgcatctggaggaccaaggaggacctgccggaggagctcatcttccacatcaactacctcggcgccgaccagcccaccttcaccctcaacttctccaaaggttccagccaggttattgcacagtactaccagctgatacgccttggctttgaaggttacaagaacatcatggagaactgccaggagaacgcgacggttctgaagcaaggtctggagaagacggggaagttcaacatagtgtccaaggacaacggcgtgccgctggtggccttctccctcaaggacagcagccggcacagcgagttcgagatctccgacttcctgcgccgcttcgggtggatcgtgccggcctacacgatgccccccgacgcgcagcacgtgaccgtgctccgcgtggtcatccgcgaggacttcagccgcaccctcgccgagcgcctggtgctcgacatcgagaaggtgctgcacgagctgaacgcgctgcccgcccgcgtccccagcggcgacctcgcggcgctcgccgcggccgagtccagcgagagggagatggagaagcagcgccaggtgatctcgctctggaagagggccgtcctcgccaagaagaagaccaacggcgtctgctagctcgagacccagctttcttgtacaaagtggt

SEQ ID NO: 730 - DNA, 547 bp, Brassica napus
acaagtttgtacaaaaaagcaggctcctgcaggaccatggttgcaatctctgagattaatccgacggtggaggctaccgcggcgaactgtctgatgcttttatcaagagtcggacaaaaaggtggggatcaaaaacgcgttttcacatgtaaaacgtgtttgaaagagtttcattcgtttcaagcgttgggaggtcaccgtgcgagtcacaagaaacctaacaacaatgagagtctctctggattggtgaagaaagccaaagctccttcgtcgcacccttgtccgatatgcggagtggagtttccgatgggacaagctctaggaggtcacatgaggagacacaggaacgagattggcggcggagcagcgttggttacacgggcgttattgccggagccgacgatgacgacgttgaagaagtcgagcagtgggaagagggtggcgtgtttggatctgagtttggggatggttgagaatttgaatctcaagttggagcttggaagaactgtttgttagctcgagacccagctttcttgtacaaagtggt

SEQ ID NO: 731 - DNA, 1136 bp, Oryza sativa
acaagtttgtacaaaaaagcaggctcctgcaggaccatggtctccggcgcggcgcattcggcctccaccagtggcggcggcggggggagcgagggctcccccaccggccgcgccgcgccgggcatgcagggcggcggcagcgccgccacgcccgccgcctcggcctccgcgtccacgccggccagcgagaccaccgtcgcccgccgcctcgacggcctcgacatccagggcgacgacgcgccctcgtcgcagcccgccacgagcaagaagaaaaaaagggggcctggaacacgtgcaacgggccctgacaagggtggccgtggattgcgccaatttagtatgaaagtttgtgagaaagttgaaagcaaagggagaacaacctacaacgaggtggcagatgagcttgtagctgagtttgcagaccccaacaataattttgcatcacctgatcctgacaaccctaacacaccacaatttgatgagaaaaatatacgacgaagggtttatgatgcattgaatgtcctgatggctatggatattatatctaaggataaaaaggaaattcagtggaagggcttgcctcggacaagtatgagcgatgttgaagaattgaagacagagatcatcggactgaaaggtaggatcgacaagaaaaatgcatatttgcaggagttagaagatcaatttgtaggtcttcaaaacttggcacagcgaaacgagcagctttatggttcaggaaatgctccttcaggaggagtggcattgccatttatattggtgcagacacgtcctcatgctacagtagaagtggagatatcagaagatatgcagctggtgcattttgatttcaatagcactccatttgaactgcatgacgattcctttgtactgaaagcattggggttctctggcaaagaaccagatgatacgcaagcctgggttggaaatggaggtgagtgctcaaccacacctatctatcatcaatcaccccaagttgcgaggccaaacggagttagactaccaacatcgccccctattcccggtatacttaaagggcgtgtcaagcatgaacattaggggttactatgatttgttgatggtgtagctcgagacccagctttcttgtacaaagtggt

SEQ ID NO: 732 - DNA, 1063 bp, Glycine max
acaagtttgtacaaaaaagcaggctcctgcaggaccatggagataataacacccacagcaacagccacaaacgcaaccgcaaaatcgccagaacccgacatagagacgatgacccggatccatcaaaacccgaacccgaatccaaagccggtgtctttctccaacggcgtcttgaagcgccaccatgtaaaccaccgcgccgcggtggtttacaaggaatgcctgaagaaccacgtggcgagcttgggtggccacgctttggacggctgcggcgagttcatgccgtcgccggcggccaccgccgacgaccccagctccatcaaatgcgccgcctgcggctgccaccggaacttccaccgccgcgaaccggaggagtcacccatttctccggcgacacatcacgtcctcgagtacaggccacaccaccgccaccaccctccgccgcctcaccggagtcccaactccgcctccccgccgccgatctcatcctacccctcggcgccccacatgctcctcgccctctccggcggggccggcctctccgtcgcgccggaaaacaccgccgcgccggcgccgccgcaccactcgcgtaaacgcttccggacgaagttcacccaagaacaaaaggagaagatgcacgagttcgcggacaaagttggttggaagatgcagaggcgcgacgaggaaatggttatggagttctgcaacgagattggtgtcgacagaggagttctcaaagtgtggatgcacaacaacaagaacactttcgcgaaaaaagacaaccttaacggcaacagtatcggtaacgttgccattgtcagtgccaacggagttgctcccattggcgccgttggcagcgctaccgttagaagcagcgttcatgtccacgaacatgaacacggaggaattaacggtaacggtagcggcgacaacaaccacaaccccctcggttcccgggatgtgaacgagtacgagaatgatagtgggactaacggcggcggcggtactaatgggtcttcttcttcttcttagctcgagacccagctttcttgtacaaagtggt

SEQ ID NO: 733 - DNA, 1060 bp, Glycine max
acaagtttgtacaaaaaagcaggctcctgcaggaccatggctcaattgccaccaaaaattccaaacatgacacccaattggccagacttttcttctcttcaccaaaagatgccttccctccaaaccacgtcatcaaaccaaaacccttcatgggtggatgagattcttgagttctcagtggcgaggcgcggggcctcccggcggtcggtgagcgactccgtcactttcctggaggcaccattgctggaccaccatcattgcaaaggtggcagtgttgttggtggtggcggcggcaacaacgagttcgagaggttcgatgatgaacaattcatgtccatgtttagtgatgaagcttcagggaacaataacaataataataccatgatggcacacacgttgtcctcctccaacccttctacaccctctgatcacaacagcatcaatgatgagaaggaaatggaaaataaggaagaggaagagaagaagcaattgaagaatgaatcggaggatgaggataaaagccaatgcaaacaagaaatcacacaacttcccaacaatgatgacagtaataatactagtaatgcaaatgcaacatgttccagtgaaaaaatcacagaccccaagagggtcaaaagaatcttggcaaataggcaatctgcgcaaagatcaagagtgaggaagctgcaatacatatctgagcttgagcgaagtgtgacttcattacaggccgaagtttcagtgttgtctccacgggttgcatttttggatcatcaacgtttgcttctgaatgtcgacaacagtgctttgaagcaaagaatcgccgcgctggcccaagacaagattttcaaagatgcacatcaagaagcactgaagagggagatagagagactgaggcaagtttatcaccaacaaaacataaagaagatggacaataatgctgcagcgtcaccaccatcccagtccccatctccatcaccaaaaccacgatgtgaaactcacactgaaaaggaacagcttatcaatgtttagctcgagacccagctttcttgtacaaagtggt

SEQ ID NO: 734 - DNA, 1613 bp, Triticum aestivum
gcagtcgctgtcgttaccatgtcggccatcaagccgccgccgcctgaccggccgccgcaggccgcgcggctgccgtccccttcctcctcctcctcggcggcggcggcggccaagcaaggcggcacaggctcccgcgggctgctcatggggcgctacgagctgggccgcgtcctgggcaaaggcaccttcgccaaggtgtaccacgcgcggcacgtgcagaccggggagagcgtggccatcaaggtgctcgaccgggagaaggccgtgcggagcggcctcgtctcgcacatcaagcgcgagatcgccgtgctccgccgcgtgcgccaccccaacatcgtgcacctcttcgaggtcatggccaccaagaccaagatctacttcgtcatggagctcgtccgcggcggcgagctcttctcccgcgtctccaagggccgcctcaaggaggacattgctcgccgctacttccagcacctcatctccgccgtcggattctgccacacccgcggggtcttccaccgggacctcaagccggagaacctcctcgtcgacgaggcgggcaacctcaaggtttccgacttcggcctctccgccgtcgccgagccgttccagccagagggtctcctccacaccttctgcggcacgccggcctatgtcgcccccgaagttctcgcccgccgtggatacgaaggcgccaaggccgacatatggtcctgcggcgtcatcctctttgttctcatggccggatacctccctttccatgaccagaacctcatggccatgtaccgtaaggtttacaagggagagttccgatgtccaaggtggttctccaaggaccttactagcctgatcatgcgttttcttgacacaaacccaagcaccaggatcaccttgccggaggtcatggagagccggtggttcaagaaaggtttccggccagtcaagttctatattgaagacgaccagctgtacaacgtgatagatgccgagaatgatatgctcgacctgggcctcccagaccctcttcctcaaccattgccgcctccacctccatctccatctccacaacaagttgatggagacgactcagggtcagagtcggacgcatcagtcgtgtcctgccctgccacatcgtcatttgaagagcgccacaggctccgcgggccactcccacgccccgcaagccttaatgcgttcgacatcatatcattctcaaggggattcaacttgtcggggctgtttgaggaaaaaggggacgaggtgagattcatctcgggtgaacctatgccagacattataacgaaattggaggagatcgcaaatgtgaagagcttcgcggtgcggaagaaggattggcgggtgagcctagagggcacaagggaaggggttaaggggccactaacaatctgcgcggagatatttgaactcacgccctcccttgtagtagtggaggtaaaaaagaaggcgggggataaggaagagtatgatgatttctgtaacaaggaactgaagccaggaatgcagcatcttgtgcaccagatggtcccagttccaaatacacctaccatttctgagttggccgaaaggccttcaaggtagaacccagcggtactcgc

SEQ ID NO: 735 - DNA, 932 bp, Zea mays
gcagtcgctgtcgttacccctgcccatggtcgacgtcgacctcaacaaggtcgagccatgggacctccccgtggcggcgtcggtggggccgcgggagtggtacttcttcagcctcaaggaccgcaagtacgcgacggggcagcggacgaaccgggccacggtgtccgggtactggaaggcgacggggaaggaccgacccgtggtggcggcgcggcgaggcgcgctggtggggatgcgcaagacgctcgtgttctaccaggggagggcgcccaagggcaggaagacggagtgggtgatgcacgagtacaggatggagccagctgctcctcttcttgatcaccaaccctcctcatccaactccaaggatgaagattgggtgctgtgcagagtcatctgcaagaagaaactggcagcaggaggccgcgcaggagggggaagctcaaggagcctggtcgccagcaacggcggccgcgagaccgcgccagccaccccgccgccgccgccgctgccacctcgcatggacacggacgccaccctagcacagctccaggccgccatgcacgccaccgccggcgcgctcgagcaggtgccctgcttctccagcttcaataacaacactactgccagctctagagctgctgccgcagcagcagcagcagcgcagccatgctacctgcccagcatggccacaggcggcagccacggcacgacgagctactacctggaccacgcgatgctgccgcctgagctaggtggctgcttcgatcctctccacggcgacaagagctgctcaaggcggtgctgggccagctcggcggcgacgcggtggcgccgggcctgcacctgcagcacgagatggccgccggcgctgtcgtcgcttcgtccgcttggatgaatcacttctaggggacatagaacccagcggtactcgc

SEQ ID NO: 736 - DNA, 769 bp, Arabidopsis thaliana
ggtaccggcgcgcctcagcagtcgctgtcgttaccatgtcattcgccgaggaatttgaagctaatcttgtttcgctggcccatgttttgcagaagaaatatgctctcctgcgcgatttggataaaagtttgcaagaaaaccaacgacaaaatgaacaacgctgtgaaaaagaaatagaggatataagaaggggcagagctggaaatatcacacctaatacctctcttacaaagttctcagaggaagcacttgatgaacagaaacacagtgtccggattgctgacgagaaagtcacactggctatgcaggcatatgatctggtggatatgcatgttcagcaacttgaccagtatatgaaaaaatccgacgaagtgatccgcaaagagaaagaagctgccgctgcgacattagaactggagaacaacgggaaagccgggaatgctggtgaaggtggaagaggagggcgaaaaaagacaaggctagcaacagcagcgtcaacagcagcagcatcaactgggatgacttcaagtaatatggatctggatctgcctgtggatccaaacgaaccaacttactgcatctgcaaccaagttagctttggcgagatggttgcgtgtgacaacaatgcgtgcaagattgagtggttccatttcggttgcgtcggtctgaaagaacaacccaaggggaaatggtactgcccggagtgtgctacagtaaagaagagcaggaaaggtcgatagaacccagcggtactcgctgaggcgatcgc

SEQ ID NO: 737 - DNA, 1951 bp, Arabidopsis thaliana
ggtaccggcgcgcctcagcagtcgctgtcgttaccatggaccctggtattgctaatcataccctccccgaggaatttgaagaggttgtcgttcccgagatgctggaaaaggaagtaggagccaaggtcgatgtcaagccaacgctaaccacatcttctccagcaccttcttacattgaattgatagatccaggtgtgcataacatcgagatttacgcagaaatgtacaaccgcccgatctaccgtgtcgcattattcttctcacttttcctcattgcctatgcttacggattagatggtaatatccgttacactttccaggcgtacgcgacttcgtcgtactcccagcactcgctgctatcgaccgtcaactgtattaagacggttattgcggctgtaggccagatcttctttgccagattatcagatatcttcggcagattttccattatgattgtcagtatcattttttatagcatggggaccatcattgagtcgcaagcggtgaatattacaagatttgcagttggtggttgtttttaccaattgggtcttaccggtattattctaattttggaagttattgcttctgacttttccaacttgaactggaggttgttagccttattcattccagctttaccatttatcatcaacacctggattagcgggaacgtaacaagtgccatagatgctaattggaaatggggtattggtatgtgggcttttatactgccgctagcttgtattccgcttggaatttgtatgttgcacatgaggtatttagcaagaaagcatgctaaagatagattgaagcccgagttcgaagcgctaaacaaattgaagtggaagtccttttgtatagacatcgcattttggaaattggatatcattggaatgttattaattactgtatttttcgggtgtgtattggttccattcaccttagcgggtggtttgaaagaggaatggaaaactgcgcatattattgtccctgaagtcattggttgggttgtagtgttaccactgtacatgctatgggaaataaagtactcgagacatccattgacaccttgggacttgattcaagatagaggtatctttttcgctctactcatcgcattctttatcaattttaactggtatatgcaaggtgattacatgtatactgtactagtcgttgcagttcatgaatccataaagtccgctacaagaattacctccttgtattcatttgtttctgttatcgttggtacaatcctcgggttcatactgattaaagttagaaggactaagccttttattatatttggcatttcttgttggatcgtctcatttggtttgctggtccattaccgtggtgactccggtgctcattccggtatcattggctctttgtgtctattaggtttcggtgcaggttcatttacctatgtgactcaagcttccatccaagcatccgctaaaactcatgcaagaatggcggtagtaacctcattataccttgccacttataatattggttctgcatttggtagttctgttagcggagctgtctggactaatatcctacccaaagaaatttcaaaaagaatttccgatccaaccttagctgcacaagcgtacggttctccatttacattcattacaacttatacctggggaacaccagaaagaatagctttagtcatgtcttaccgctatgttcaaaagattttatgtatcataggtttggtattctgctttcctttgttaggttgcgcattcatgttgagaaatcataaactaacagattctattgctcttgaaggcaatgatcatttggaaagtaaaaacacctttgaaattgaggaaaaggaagaaagttttttgaaaaataaattctttacgcactttacaagcagtaaagataggaaagattagaacccagcggtactcgctgaggcgatcgc

SEQ ID NO: 738 - DNA, 1577 bp, Zea mays
gcagtcgctgtcgttaccatggcgaacatcgacatggcgaagatcctggcggacctggaccgcggcgccggcgacgcgcggctgcccaagaccaagctcgtctgcacgcttggcccggcctcccgctccgtgcccatgctcgagaagctgctccgcgccggcatgaacgtcgcgcgcttcaacttctcccacggcacccaccagtaccaccaggagacgctcgacagcctccgccaggccatgcacaacaccggcatcctctgcgccgtcatgctcgacaccaagggtcctgagattcgtacagggtttttgaaggatggtaaaccaattaagctaaccaagggtcaagagatcactgttaccactgattatgatatcaagggtgacgaaaaaatgatcgctatgagttacaagaaactgcctgttgacgtgaagcctggaaatgtcatactctgcgcagatggtactatctctctggccgttctgtcttgcgatcctgatgctggaactgtgcgttgtaggtgtgagaacactgcaatgcttggtgagagaaagaactgcaatttgccaggaattgttgtggatcttcctacattgactgagaaagataaagaagatattttgggctggggtgttccaaatgacattgacatgattgctctatcctttgtccgtaaaggatcagatttggtgactgtcagacaggttcttgggcagcatgccaagcgcattaagttgatgtcaaaggttgagaaccaagagggtgttgtaaactttgatgagatcttgagggagactgatgcttttatggttgctagaggtgatctgggaatggagattccagtcgagaagattttccttgcgcagaagatgatgatctacaagtgcaacattgctggcaaacctgttgttactgctacccagatgctcgagtcgatgatcaaatctcctcggccgacacgtgctgaggccactgacgttgcaaatgccgttcttgatggaactgactgtgtcatgctcagcggagagagtgccgctggagcctaccccgaggtggctgtgaagatcatggctcgtatttgcatcgaggcagaatcttccctggaccacgaggcagttttcaaggccatgatcaggtccgcgcctcttccaatgagccctctggagtcccttgcatcatctgctgtgaggactgccaacaaggccaaggctgcactgattgtcgtcctgactcgcggtggcaccacggccaaactggtcgccaagtaccgccccagggtccccatcctctccgttgtcgtacccgtgcttacgaccgactctttcgactggaccatcagctccgagggcccagctaggcacagcctgatctacagaggcctcattcccctcctcgccgagggctccgcgaaggctacggattcagagtcgacggaggtgatccttgaggccgcgttgaagtcggccgtgcagaagcagctctgcaagcctggtgatgccatcgtggctcttcatcgtattggcgtcgcctccgtcatcaagatctgcatcgtgaagtagaacccagcggtactcgc

SEQ ID NO: 739 - DNA, 1157 bp, Zea mays
gcagtcgctgtcgttaccatggacgggccgaagcggtcgcagctgcgggtgcgcctccgcgtcacggcgcgccggcgtggtgccgatggcgacggcgccgggggcgctgccgggcctggggggcgtaagcgccggatggaggcccccgtccgcaactccgtcgccaagctgcagcgccgcgagatcgggggccgccagctcgccgcgcgcggcggcggccccgccgccgccgtgcccgagcgcttccggaacatgcagctccaggaggagttcgatacatatgatgaaaatgctcacctatttgtgaagctgcagtttcttaaaagaagatccaaaattattgagattgttgcagcaaaggatatcatatttgcccttgctaattctgggctttgtgctgcttttgaccgagtaacaaacaagcgcatagccttcttgaatttgagcccagatgaagtgattcggagcttgttttacaacaagaacaatgattctcttattactgtttcagtttatgcggctgacaaattcagcacattggagtgcagaacaaccccgattgagtatattagaaggaatcagttagatgcagggtttcctctctttgaatcagagtctctgaaatggcctggatttgtggagtttgatgatgtgaatggaaaagtactcacatattcagcgcaggatggcatatataaggtatttgaattgaagaactactccttcctatattcaataccagatgaaaacgtgcaggagataaagatcagtccaggaatcatgctcttgatatatgataggacaccaagttatgttccattgaagatactatcaattgaagatggaaagcaactgaaatcttttaagcacttgttgcatcgcaacaagaaaattgatttcatcgagcagttcaatgagaagctccttgtcaagcaagagaatgaaaacttccagatatttgatgtgcggagttctgagctaattgaagtcagtgtctccaagtttatgaccccttcagcattcatttttctgtatgagaacaacctcttcttgacattccgaaacagaacagtcgctgtatgggacttcagaggagagcttgtgacttcatttgaagaccatttgctctggcataaatagaacccagcggtactcgc

SEQ ID NO: 740 - DNA, 419 bp, Zea mays
gcagtcgctgtcgttaccatgcccggaaagcaccagcagcacatgacggcaacggcggcggcggcggcagcagcgcccaaggggtgcgtgacggtgcgcgtgggcctggagggggaggagcagcgccggttcgcggtgccgctgggtcacctcaagcacccgctcttcggcgcgctgctggaggaggccgagcgcgagtacggcttccggcaccagggcgccctcgccatcccctgccgcgtcgaccgcttcgtccagctcgagcgcctcatcggccgggacctccacggcgcctgcgcccaccacctcgtcgacctcgacggcgccgccgccgccgccgcgcagcaccagcaccagcaccacctccacctgccgcgcttcgtcggctgcttccgcgcctagaacccagcggtactcgc

SEQ ID NO: 741 - DNA, 1064 bp, Zea mays
gcagtcgctgtcgttaccatggacgatccctcctccgcctccaacaagcacaagcacaagcgggggcgcaagcccaaggcatcgccgccctcccccgaccactcctccccctctccctcggtcgcccccgctccggctgggcgccgtggccgcaagccgcgacgtcatgaggccctcgccgacgtggacgccacgcgtcctccatctccaccccgccgcggggagccgaagccggtggcaaacggaggcgatgtggtggcagtggcagagtcaggccccgcgagctgggatgaggtggtgagggtagtgccatgcatggacgctgtggtcaaggtgttctgcgtgcacacggagcccaacatctcgctaccgtggcagcggaagcggcagtactgctccagcagcagcggatttatcatcagcggccaccatgtcctcaccaatgctcactccgtggagtaccttgccaccgtcctggccatcggcacagagtgcgacattggagtttcacctattgagtttggaacattaccagtccttcaggatgcagttactgttgttggctatccaattggaggagataccatatccgtgacaagtggagtggtctctaggatagaaatgcttttatatgttcatggttctatagaacttctaggattgcagatagatgcagctattaattcaggaaattcaggtggcccagcttttaatgataggggaaaatgtgtcggtatagcttttcagtctcttaaacatgaagatgcggagaacataggttatgtgataccgactccagttattacacatttcattgaggactacaaaaatctagagaatacacaggctgcaattgagtacattcattctttatcaagggcacagcctgctcattctctcaatggtgttggtctttgtcctgctagtagatcacttagcacccatgccgccactatgtcaagcacaccacagttgaaagcacaccacgtcaagcacccaggctgccactacgtcaagcaaaacagaagacgagaagaactgatgtagaacccagcggtactcgc

SEQ ID NO: 742 - protein, 317 aa, Arabidopsis thaliana
MGLQELDPLAQLSLPPGFRFYPTDEELMVEYLCRKAAGHDFSLQLIAEIDLYKFDPWVLPSKALFGEKEWYFFSPRDRKYPNGSRPNRVAGSGYWKATGTDKVISTEGRRVGIKKALVFYIGKAPKGTKTNWIMHEYRLIEPSRRNGSTKLDDWVLCRIYKKQTSAQKQAYNNLMTSGREYSNNGSSTSSSSHQYDDVLESLHEIDNRSLGFAAGSSNALPHSHRPVLTNHKTGFQGLAREPSFDWANLIGQNSVPELGLSHNVPSIRYGDGGTQQQTEGIPRFNNNSDVSANQGFSVDPVNGFGYSGQQSSGFGFI

SEQ ID NO: 743 - protein, 432 aa, Saccharomyces cerevisiae
MNKRTQEYKNTRAIMSATLFNNIELLPPDALFGIKQRYGQDQRATKVDLGIGAYRDDNGKPWVLPSVKAAEKLIHNDSSYNHEYLGITGLPSLTSNAAKIIFGTQSDAFQEDRVISVQSLSGTGALHISAKFFSKFFPDKLVYLSKPTWANHMAIFENQGLKTATYPYWANETKSLDLNGFLNAIQKAPEGSIFVLHSCAHNPTGLDPTSEQWVQIVDAIASKNHIALFDTAYQGFATGDLDKDAYAVRLGVEKLSTVSPVFVCQSFAKNAGMYGERVGCFHLALTKQAQNKTIKPAVTSQLAKIIRSEVSNPPAYGAKIVAKLLETPELTEQWHKDMVTMSSRITKMRHALRDHLVKLGTPGNWDHIVNQCGMFSFTGLTPQMVKRLEETHAVYLVASGRASIAGLNQGNVEYVAKAIDEVVRFYTIEAKL

SEQ ID NO: 744 - protein, 451 aa, Saccharomyces cerevisiae
MLRTRLTNCSLWRPYYTSSLSRVPRAPPDKVLGLSEHFKKVKNVNKIDLTVGIYKDGWGKVTTFPSVAKAQKLIESHLELNKNLSYLPITGSKEFQENVMKFLFKESCPQFGPFYLAHDRISFVQTLSGTGALAVAAKFLALFISRDIWIPDPSWANHKNIFQNNGFENIYRYSYYKDGQIDIDGWIEQLKTFAYNNQQENNKNPPCIILHACCHNPTGLDPTKEQWEKIIDTIYELKMVPIVDMAYQGLESGNLLKDAYLLRLCLNVNKYPNWSNGIFLCQSFAKNMGLYGERVGSLSVITPATANNGKFNPLQQKNSLQQNIDSQLKKIVRGMYSSPPGYGSRVVNVVLSDFKLKQQWFKDVDFMVQRLHHVRQEMFDRLGWPDLVNFAQQHGMFYYTRFSPKQVEILRNNYFVYLTGDGRLSLSGVNDSNVDYLCESLEAVSKMDKLA

SEQ ID NO: 745 - protein, 396 aa, Escherichia coli
MFENITAAPADPILGLADLFRADERPGKINLGIGVYKDETGKTPVLTSVKKAEQYLLENETTKNYLGIDGIPEFGRCTQELLFGKGSALINDKRARTAQTPGGTGALRVAADFLAKNTSVKRVWVSNPSWPNHKSVFNSAGLEVREYAYYDAENHTLDFDALINSLNEAQAGDVVLFHGCCHNPTGIDPTLEQWQTLAQLSVEKGWLPLFDFAYQGFARGLEEDAEGLRAFAAMHKELIVASSYSKNFGLYNERVGACTLVAADSETVDRAFSQMKAAIRANYSNPPAHGASVVATILSNDALRAIWEQELTDMRQRIQRMRQLFVNTLQEKGANRDFSFIIKQNGMFSFSGLTKEQVLRLREEFGVYAVASGRVNVAGMTPDNMAPLCEAIVAVL

SEQ ID NO: 746 - protein, 236 aa, Oryza sativa
MAGADVDVGTELRLGLPGGGGGAAEAAAKAAKRGFEETIDLKLKLPTAGMEEAAAGKAEAPAAEKAKRPAEAAAADAEKPPAPKAQAVGWPPVRSFRRNIMTVQSVKSKKEEEADKQQQQPAANASGSNSSAFVKVSMDGAPYLRKVDLKMYNSYKDLSLALQKMFGTFTATGNNMNEVNGSDAVTTYEDKDGDWMLVGDVPWQMFVESCKRLRIMKGSEAIGLAPRAKDKYKNKS

SEQ ID NO: 747 - protein, 573 aa, Saccharomyces cerevisiae
MPIRSISSASQMNVFGKKEEKQEKVYSLQNGFPYSHHPYASQYSRPDGPILLQDFHLLENIASFDRERVPERVVHAKGGGCRLEFELTDSLSDITYAAPYQNVGYKCPGLVRFSTVGGESGTPDTARDPRGVSFKFYTEWGNHDWVFNNTPVFFLRDAIKFPVFIHSQKRDPQSHLNQFQDTTIYWDYLTLNPESIHQITYMFGDRGTPASWASMNAYSGHSFIMVNKEGKDTYVQFHVLSDTGFETLTGDKAAELSGSHPDYNQAKLFTQLQNGEKPKFNCYVQTMTPEQATKFRYSVNDLTKIWPHKEFPLRKFGTITLTENVDNYFQEIEQVAFSPTNTCIPGIKPSNDSVLQARLFSYPDTQRHRLGANYQQLPVNRPRNLGCPYSKGDSQYTAEQCPFKAVNFQRDGPMSYYNFGPEPNYISSLPNQTLKFKNEDNDEVSDKFKGIVLDEVTEVSVRKQEQDQIRNEHIVDAKINQYYYVYGISPLDFEQPRALYEKVYNDEQKKLFVHNVVCHACKIKDPKVKKRVTQYFGLLNEDLGKVIAECLGVPWEPVDLEGYAKTWSIASAN

SEQ ID NO: 748 - protein, 939 aa, Saccharomyces cerevisiae
MSNDPSAVSELPDKDSLDNGISNDNERAMGGNGDGGDGLRLPRTTGTLNVNALQKGTNAAHEAGGYKSMDPAKNAETTNDDDNNVVSLDDPIQFTRVSSSSVISGMSSSMSPHSNIDETKSLEAVTPNINTSNITPDHSADNTFSTINASESDHQFNDTLLSKLSLTDSTETIENNATVKHQQPVASSTVNSNKSSTDIRRATPVSTPVISKPSMTTTPRQINSASHSLSNPKHKQHKPKVKPSKPEAKSKPVSVKKSFPSKNPLKNSSPPKKQTEKSYYSSSSKKRKSGSNSGTLRMKDVFTSFVQNIKRNSQDDKRASSSSNNSSSSSITTALRISTPYNAKHIHHVGVDSKTGEYTGLPEEWEKLLTSSGISKREQQQNMQAVMDIVKFYQDVTETNGEDKMFKTFNTTTGLPGSPQVSTPPANSFNKFPPSTSDSHNYGSRTGTPMSNHVMSPTLNTDSSSANGKFIPSRPAPKPPSSASASAPIIKSPVMNSAANVSPLKQTHAPTTPNRTSPNRSSISRNATLKKEEQPLPPIPPTKSKTSPIISTAHTPQQVAQSPKAPAQETVTTPTSKPAQARSLSKELNEKKREERERRKKQLYAKLNEICSDGDPSTKYANLVKIGQGASGGVYTAYEIGTNVSVAIKQMNLEKQPKKELIINEILVMKGSKHPNIVNFIDSYVLKGDLWVIMEYMEGGSLTDVVTHCILTEGQIGAVCRETLSGLEFLHSKGVLHRDIKSDNILLSMEGDIKLTDFGFCAQINELNLKRTTMVGTPYWMAPEVVSRKEYGPKVDIWSLGIMIIEMIEGEPPYLNETPLRALYLIATNGTPKLKEPENLSSSLKKFLDWCLCVEPEDRASATELLHDEYITEIAEANSSLAPLVKLARLKKVAENMDADEDNDDDNDNEHINKTNNCDDNNDSKETVNLDVTEDDKQK

SEQ ID NO: 749 - protein, 367 aa, Arabidopsis thaliana
MALEKEEEASQNGAFCVLDGLYCEEETGFVEDDLDDDGDLDFLEKSDESVVKFQFLPLLDMFLWDDDEILSLISKENETNPCFGEQILDGFLVSCRKEALDWVLRVKSHYGFTSLTAILAVNYFDRFMTSIKLQTDKPWMSQLVAVASLSLAAKVEEIQVPLLLDLQVEEARYLFEAKTIQRMELLILSTLQWRMHPVTPISFFDHIIRRFGSKWHQQLDFCRKCERLLISVIADTRFMRYFPSVLATAIMILVFEELKPCDEVEYQSQITTLLKVNQEKVNECYELLLEHNPSKKRMMNLVDQDSPSGVLDFDDSSNSSWNVSTTASVSSSSSSPEPLLKRRRVQEQQMRLPSINRMFLDVLSSPR

SEQ ID NO: 750 - protein, 131 aa, Arabidopsis thaliana
MAFSKSLVFVLLAALLISSAVAQSPAPAPSNVGGRRISPAPSPKKMTAPAPAPEVSPSPSPAAALTPESSASPPSPPLADSPTADSPALSPSAISDSPTEAPGPAQGGAVSNKFASFGSVAVMLTAAVLVI

SEQ ID NO: 751 - protein, 100 aa, Arabidopsis thaliana
MVSSLLMSFAPATVRVYATSTKGGSGGPKEEKNPIDFVLGFMTKQDQFYETNPLLKKVDEKEGTTTGGRGTVRGGKNSAPTPVPKKSEGGFGGLGSLFKK

SEQ ID NO: 752 - protein, 334 aa, Arabidopsis thaliana
MSDAPSSSPDATASHWCYHCNKRVVVETLDDFVVCCECNKGFVESIQPTPAAYSSPAPPQPLSPDLNVEDSSIGSHFLQMLRLLAHAPSQRSPPRHLDVLSYEDDFFRLELNSRNEIDDDEDEDEDDGDEEEEDEEENLTVNDEEDEEDDLRRRNRFPLTTTQSRTGRNRILDWAEILMGIEDNSIEFRMESDRYAGNPADYIDDAAGYEALLQNLAEGDGGGGGGRRGAPPAAKSAIEALETFEVSSSEGEMVMVCAVCKDGMVMGETGKKLPCGHCYHGDCIVPWLGTRNSCPVCRFQLETDDAEYEEERKKRTSTVSDSAAASSSSSTSRY

SEQ ID NO: 753 - protein, 286 aa, Arabidopsis thaliana
MELLTSLTNWLTPTTLFLLLNFTIATIFITNRFSSCSRKHNQHQDGYGSSGHDQNQARFGRPPSLIDRVKSINFHLYNSPSPESEIHYSGSDPNPNPPPSLLQRVKSINMPYFKFPQHNSEGDYAAYELMTQPDETNRVDPIDKIPEDDVTTEPRFGAPSLLQRVKSIKLPSLYRSDPDPTPEVQTHTRTKSESSKPATKKKKKATKKMMKSASERHIGREEEETVEAVEKRRPETMRVERTTSIGDGGEEGVDDKASNFINKFKQQLKLQRLDSFLRYREMLKND

SEQ ID NO: 754 - protein, 603 aa, Oryza sativa
MDTLFRLVSLHHHHHHQHAASPSPPDQPHKSYPSSRGSTSSPSSHHTHNHTYYHHSHSHYNNNSNTNYYYQGGGGGGGGYYYAEEQQPAAYLEECGNGHQFYMDEDFSSSSSSRQFHSGTGAPSSAPVPPPPSATTSSAGGHGLFEAADFSFPQVDISLDFGGSPAVPSSSGAGAGAGAAPSSSGRWAAQLLMECARAVAGRDSQRVQQLMWMLNELASPYGDVDQKLASYFLQGLFARLTTSGPRTLRTLATASDRNASFDSTRRTALKFQELSPWTPFGHVAANGAILESFLEAAAAGAAASSSSSSSSSTPPTRLHILDLSNTFCTQWPTLLEALATRSSDDTPHLSITTVVPTAAPSAAAQRVMREIGQRLEKFARLMGVPFSFRAVHHSGDLADLDLAALDLREGGATAALAVNCVNALRGVARGRDAFVASLRRLEPRVVTVVEEEADLAAPEADASSEADTDAAFVKVFGEGLRFFSAYMDSLEESFPKTSNERLSLERAVGRAIVDLVSCPASQSAERRETAASWARRMRSAGFSPAAFSEDVADDVRSLLRRYKEGWSMRDAGGATDDAAGAAAAGAFLAWKEQPVVWASAWKP

SEQ ID NO: 755 - protein, 427 aa, Bacillus subtilis
MAADRNTGHTEEDKLDVLKSTQTVIHKALEKLGYPEEVYELLKEPMRLLTVKIPVRMDDGSVKIFTGYRAQHNDSVGPTKGGIRFHPNVTEKEVKAVKALSIWMSLKCGIIDLPYGGGKGGIVCDPRDMSFRELERLSRGYVRAISQIVGPTKDVPAPDVFTNSQIMAWMMDEYSRIDEFNSPGFITGKPLVLGGSHGRESATAKGVTICIKEAAKKRGIDIKGARVVVQGFGNAGSYLAKFMHDAGAKVVGISDAYGGLYDPEGLDIDYLLDRRDSFGTVTKLFNDTITNQELLELDCDILVPAAIENQITEENAHNIRAKIVVEAANGPTTLEGTKILSDRDILLVPDVLASAGGVTVSYFEWVQNNQGFYWSEEEVEEKLEKMMVKSFNNIYEMANNRRIDMRLAAYMVGVRKMAEASRFRGWI

SEQ ID NO: 756 - protein, 454 aa, Saccharomyces cerevisiae
MSEPEFQQAYEEVVSSLEDSTLFEQHPEYRKVLPIVSVPERIIQFRVTWENDKGEQEVAQGYRVQYNSAKGPYKGGLRFHPSVNLSILKFLGFEQIFKNSLTGLDMGGGKGGLCVDLKGRSNNEIRRICYAFMRELSRHIGQDTDVPAGDIGVGGREIGYLFGAYRSYKNSWEGVLTGKGLNWGGSLIRPEATGYGLVYYTQAMIDYATNGKESFEGKRVTISGSGNVAQYAALKVIELGGTVVSLSDSKGCIISETGITSEQVADISSAKVNFKSLEQIVNEYSTFSENKVQYIAGARPWTHVQKVDIALPCATQNEVSGEEAKALVAQGVKFIAEGSNMGSTPEAIAVFETARSTATGPSEAVWYGPPKAANLGGVAVSGLEMAQNSQRITWTSERVDQELKRIMINCFNECIDYAKKYTKDGKVLPSLVKGANIASFIKVSDAMFDQGDVF

SEQ ID NO: 757 - protein, 445 aa, Pseudomonas fluorescens
MIESVESFLARLKKRDPDQPEFHQAVEEVLRSLWPFLEANPHYLTSGILERICEPERAVVFRVSWVDDQGRVQVNRGFRIQMNSAIGPYKGGLRFHPSVNLGVLKFLAFEQTFKNSLTSLPMGGGKGGSDFDPKGKSDAEVMRFCQAFMSELYRHIGADVDVPAGDIGVGAREIGFLFGQYKRLSNQFTSVLTGKGMTYGGSLIRPEATGFGCVYFAEEMLKRREQTVEGKRVAISGSGNVAQYAARKVMDLGGKVISLSDSEGTLYCEAGLSEEQWLALLELKNVKRGRISELASAFGLEFRAGQLPWSLPCDIALPCATQNELDAESARTLLRNGCVCVAEGANMPTTLEAVDIFIEAGILFAPGKASNAGGVAVSGLEMSQNAMRLLWTGGEVDSKLHGIMQSIHHACVHYGEENGRINYVKGANIAGFVKVADAMLAQGVV

SEQ ID NO: 758 - protein, 458 aa, Bacillus halodurans
MTTLVREKQTYDVQYYVQHVYETVKRRNPNEHEFHQAVKEVFDSLLPVLVKHPQYVKQAILERIVEPERVISFRVPWVDDQGNVQVNRGFRVQFNSALGPYKGGLRFHPSVNASIIKFLGFEQIFKNALTGQPIGGGKGGSDFDPKGKSDGEIMRFSQSFMSELSNYIGPDIDVPAGDIGVGAKEIGYMFGQYKKMRGGFEAGVLTGKGIGYGGSLARKEATGYGTVYFVEEMIKDHGFSFAGSTVVVSGSGNVSIYAMEKAMQLGAKVVACSDSGGYVYDKNGIDLQTVKRLKEVERKRISEYVNEHPHAHYVQGCSGIWSVPCDIALPCATQNELDEAAATMLIANGVKAVGEGANMPSTLQAVHTFQEHGVLFAPAKAANAGGVSVSALEMAQNSTRLAWTFEEVDAKLYEIMKNIYRESIKAAELYEASGNLVVGANIAGFVKVADAMISHGVV

SEQ ID NO: 759 - protein, 428 aa, Synechocystis sp. PCC 6803
MAGSLFADASKRLEKALKYVAISDDAGERLKYPKTSLSVSIPVRMDDGSLKIFPGYRVRYDDTRGPGKGGVRYHPNVTMDEVQSLAFWMTFKCALLNLPFGGAKGGITLNPKELSRAELERLSRGYIEAIADFIGPDIDILAPDVYTNEMMMGWMMDQYSIIRRKISPAVVTGKPVTMGGSQGRNTATGTGAFYIMQGMLPKFDQYPENTTVAVQGFGNAGMVVAECLYQDGYKVVAISDSQGGIYNEQGIDIPAVIDYKQRHRTLAGMYCDQAICDLGENQQISNAELLALDVDVLIPAALENQITRDNADQVRARYIFEVANGPTTTAADDILASKGIYVFPDILVNAGGVTVSYFEWVQNRSGLYWSAKEVNDRLKEKMVEEAEHVWNITQELDVNVRTAAYIHALNRLSEAMDAKGTRDYYQDS

SEQ ID NO: 760 - protein, 680 aa, Saccharomyces cerevisiae
MTQFTDIDKLAVSTIRILAVDTVSKANSGHPGAPLGMAPAAHVLWSQMRMNPTNPDWINRDRFVLSNGHAVALLYSMLHLTGYDLSIEDLKQFRQLGSRTPGHPEFELPGVEVTTGPLGQGISNAVGMAMAQANLAATYNKPGFTLSDNYTYVFLGDGCLQEGISSEASSLAGHLKLGNLIAIYDDNKITIDGATSISFDEDVAKRYEAYGWEVLYVENGNEDLAGIAKAIAQAKLSKDKPTLIKMTTTIGYGSLHAGSHSVHGAPLKADDVKQLKSKFGFNPDKSFVVPQEVYDHYQKTILKPGVEANNKWNKLFSEYQKKFPELGAELARRLSGQLPANWESKLPTYTAKDSAVATRKLSETVLEDVYNQLPELIGGSADLTPSNLTRWKEALDFQPPSSGSGNYSGRYIRYGIREHAMGAIMNGISAFGANYKPYGGTFLNFVSYAAGAVRLSALSGHPVIWVATHDSIGVGEDGPTHQPIETLAHFRSLPNIQVWRPADGNEVSAAYKNSLESKHTPSIIALSRQNLPQLEGSSIESASKGGYVLQDVANPDIILVATGSEVSLSVEAAKTLAAKNIKARVVSLPDFFTFDKQPLEYRLSVLPDNVPIMSVEVLATTCWGKYAHQSFGIDRFGASGKAPEVFKFFGFTPEGVAERAQKTIAFYKGDKLISPLKKAF

SEQ ID NO: 761 - protein, 680 aa, Saccharomyces cerevisiae; identical to SEQ ID NO: 760

SEQ ID NO: 762 - protein, 287 aa, Oryza sativa
MGRSPCCEKAHTNKGAWTKEEDQRLIAYIKAHGEGCWRSLPKAAGLLRCGKSCRLRWMNYLRPDLKRGNFTDDDDELIIKLHALLGNKWSLIAGQLPGRTDNEIKNYWNTHIKRKLLSRGIDPQTHRPVSAGSSAAAASGLTTTASTAAFPSLAPAPPPQQHRLHNPVHAAAPSNASFARSAASPPSEDGHSSSGGSSDAPRCPDLNLDLDLDLSMSLPSSPPKTPAAASSTTASRHHHHQQQKTICLCYHLGVRNGDVCSCKAAAPSPAGPRAFRFLRPLEEGQYI

SEQ ID NO: 763 - protein, 883 aa, Escherichia coli
MNEQYSALRSNVSMLGKVLGETIKDALGEHILERVETIRKLSKSSRAGNDANRQELLTTLQNLSNDELLPVARAFSQFLNLANTAEQYHSISPKGEAASNPEVIARTLRKLKNQPELSEDTIKKAVESLSLELVLTAHPTEITRRTLIHKMVEVNACLKQLDNKDIADYEHNQLMRRLRQLIAQSWHTDEIRKLRPSPVDEAKWGFAVVENSLWQGVPNYLRELNEQLEENLGYKLPVEFVPVRFTSWMGGDRDGNPNVTADITRHVLLLSRWKATDLFLKDIQVLVSELSMVEATPELLALVGEEGAAEPYRYLMKNLRSRLMATQAWLEARLKGEELPKPEGLLTQNEELWEPLYACYQSLQACGMGIIANGDLLDTLRRVKCFGVPLVRIDIRQESTRHTEALGELTRYLGIGDYESWSEADKQAFLIRELNSKRPLLPRNWQPSAETREVLDTCQVIAEAPQGSIAAYVISMAKTPSDVLAVHLLLKEAGIGFAMPVAPLFETLDDLNNANDVMTQLLNIDWYRGLIQGKQMVMIGYSDSAKDAGVMAASWAQYQAQDALIKTCEKAGIELTLFHGRGGSIGRGGAPAHAALLSQPPGSLKGGLRVTEQGEMIRFKYGLPEITVSSLSLYTGAILEANLLPPPEPKESWRRIMDELSVISCDVYRGYVRENKDFVPYFRSATPEQELGKLPLGSRPAKRRPTGGVESLRAIPWIFAWTQNRLMLPAWLGAGTALQKVVEDGKQSELEAMCRDWPFFSTRLGMLEMVFAKADLWLAEYYDQRLVDKALWPLGKELRNLQEEDIKVVLAIANDSHLMADLPWIAESIQLRNIYTDPLNVLQAELLHRSRQAEKEGQEPDPRVEQALMVTIAGIAAGMRNTG

SEQ ID NO: 764 - protein, 894 aa, Zea mays
MAFKGLPRDSRGSLEVFNPDAPVSDRATTSPFLLPPAVASHPSLLAAGDGGDADVGRATQRAAEWGLVLQTDEHTGRPQGVVARPSGSNRTSESGNSIDERAAAAGAGRALPRVSEELRAALSAFQQTFVVSDATRPDHPILYASAGFFNMTGYSSNEVVGRNCRFLQGSGTDPVEISKIRQALAAGSNYCGRILNYKKDGTPFWNLLTVAPIKDEDGRVLKFIGMQVEVSKYTEGNKDTALRPNGLPESLIKYDARQKDHARSSVSELLLALKDPRSLSESRNNTLKRKSQESAGSALVPGKRSSETGSRRNSHSGMRNSLQKISEVPEGGNKTRKSGLRSFMGLIGMGHGNVEKNILKPREDPLLDSDDERPDSFDDDFRKKEMRKGIDLATTLERIEKNFVITDPRLPDNPIIFASDSFLRLTEYCREEILGRNCRFLQGPETDRGTVKKIRDAIDNQTEVTVQLINYTKSGKKFWNLFHLQPMRDQKGDVQYFIGVQLDGTERVREAAAKDGAILVKKTADNIDEAAKELPDANLRPEDLWANHSKPVLPKPHMKDTASWRAIQKVLENGESIDLKHFRPVRPLGSGDTGSVHLVELLGTGEYFAMKAMDKSVMLNRNKVHRATAERQILDMLDHPFLPTLYASFQTKTHICLIVDYCAGGELFMLLDRQPMKVLKEDAVRFYAAEVVTALEYLHCQGIIYRDLKPENILLHRDGHISLTDFDLSCLTSCRPQVFLPHDIDKKKKRRKSRSNPIFFAEPMRADNDFVGTEEYIAPEIITGAGHTSAVDWWALGILLYEMLYGYTPFRGKTRQRTFANILHKDIRFPASIQVSLAARQLIYRLLHRDPANRLGSYEGAMEIKQHPFFRGINWALVRAATPPELEAPLQDTL

SEQ ID NO: 765 - protein, 911 aa, Zea mays
MAFKGLPRDSRGSLEVFNPDAPVSDRATTSPFLLPPAVASHPSLLAAGDGGDADVGRATQRAAEWGLVLQTDEHTGRPQGVVARPSGSNRTSESGNSIDERAAAAGAGRALPRVSEELRAALSAFQQTFVVSDATRPDHPILYASAGFFNMTGYSSNEVVGRNCRFLQGSGTDPVEISKIRQALAAGSNYCGRILNYKKDGTPFWNLLTVAPIKDEDGRVLKFIGMQVEVSKYTEGNKDTALRPNGLPESLIKYDARQKDHARSSVSELLLALKDPRSLSESRNNTLKRKSQESAGSALVPGKRSSETGSRRNSHSGMRNSLQKISEVPEGGNKTRKSGLRSFMGLIGMGHGNVEKNILKPREDPLLDSDDERPDSFDDDFRKKEMRKGIDLATTLERIEKNFVITDPRLPDNPIIFASDSFLRLTEYCREEILGRNCRFLQGPETDRGTVKKIRDAIDNQTEVTVQLINYTKSGKKFWNLFHLQPMRDQKGDVQYFIGVQLDGTERVREAAAKDGAILVKKTADNIDEAAKELPDANLRPEDLWANHSKPVLPKPHMKDTASWRAIQKVLENGESIDLKHFRPVRPLGSGDTGSVHLVELLGTGEYFAMKAMDKSVMLNRNKVHRATAERQILDMLDHPFLPTLYASFQTKTHICLIVDYCAGGELFMLLDRQPMKVLKEDAVRFYAAEVVTALEYLHCQGIIYRDLKPENILLHRDGHISLTDFDLSCLTSCRPQVFLPHDIDKKKKRRKSRSNPIFFAEPMRADNSFVGTEEYIAPEIITGAGHTSAVDWWALGILLYEMLYGYTPFRGKTRQRTFANILHKDIRFPASIQVSLAARQLIYRLLHRDPANRLGSYEGAMEIKQHPFFRGINWALVRAATPPELEAPLQDTLEATLPPPAADGAHTDMF

SEQ ID NO: 766 - protein, 911 aa, Zea mays
MAFKGLPRDSRGSLEVFNPDAPVSDRATTSPFLLPPAVASHPSLLAAGDGGDADVGRATQRAAEWGLVLQTDEHTGRPQGVVARPSGSNRTSESGNSIDERAAAAGAGRALPRVSEELRAALSAFQQTFVVSDATRPDHPILYASAGFFNMTGYSSNEVVGRNCRFLQGSGTDPVEISKIRQALAAGSNYCGRILNYKKDGTPFWNLLTVAPIKDEDGRVLKFIGMQVEVSKYTEGNKDTALRPNGLPESLIKYDARQKDHARSSVSELLLALKDPRSLSESRNNTLKRKSQESAGSALVPGKRSSETGSRRNSHSGMRNSLQKISEVPEGGNKTRKSGLRSFMGLIGMGHGNVEKNILKPREDPLLDSDDERPDSFDDDFRKKEMRKGIDLATTLERIEKNFVITDPRLPDNPIIFASDSFLRLTEYCREEILGRNCRFLQGPETDRGTVKKIRDAIDNQTEVTVQLINYTKSGKKFWNLFHLQPMRDQKGDVQYFIGVQLDGTERVREAAAKDGAILVKKTADNIDEAAKELPDANLRPEDLWANHSKPVLPKPHMKDTASWRAIQKVLENGESIDLKHFRPVRPLGSGDTGSVHLVELLGTGEYFAMKAMDKSVMLNRNKVHRATAERQILDMLDHPFLPTLYASFQTKTHICLIVDYCAGGELFMLLDRQPMKVLKEDAVRFYAAEVVTALEYLHCQGIIYRDLKPENILLHRDGHISLTDFDLSCLTSCRPQVFLPHDIDKKKKRRKSRSNPIFFAEPMRADNDFVGTEEYIAPEIITGAGHTSAVDWWALGILLYEMLYGYTPFRGKTRQRTFANILHKDIRFPASIQVSLAARQLIYRLLHRDPANRLGSYEGAMEIKQHPFFRGINWALVRAATPPELEAPLQDTLEATLPPPAADGAHTDMF

SEQ ID NO: 767 - protein, 612 aa, Arabidopsis thaliana
MPEAPKKESLEVFDLTLDQKNKQKLQLIEELTSNADQVQRQVLEEILTRNADVEYLRRHDLNGRTDRETFKNIMPVITYEDIEPEINRIANGDKSPILSSKPISEFLTSSGTSGGERKLMPTIEEELDRRSLLYSLLMPVMSQFVPGLENGKGMYFLFIKSESKTPGGLPARPVLTSYYKSSHFKERPYDPYTNYTSPNETILCSDSYQSMYSQMLCGLCQHQEVLRVGAVFASGFIRAIKFLEKHWIELVRDIRTGTLSSLITDPSVREAVAKILKPSPKLADFVEFECKKSSWQGIITRLWPNTKYVDVIVTGTMSQYIPTLDYYSNGLPLVCTMYASSECYFGVNLRPLCKPSEVSYTLIPSMAYFEFLPVHRNNGVTNSINLPKALTEKEQQELVDLVDVKLGQEYELVVTTYAGLCRYRVGDLLRVTGFKNKAPQFSFICRKNVVLSIDSDKTDEVELQNAVKNAVTHLVPFDASLSEYTSYADTSSIPGHYVLFWELCLDGNTPIPPSVFEDCCLAVEESFNTVYRQGRVSDKSIGPLEIKIVEPGTFDKLMDYAISLGASINQYKTPRCVKFAPIIELLNSRVVDSYFSPKCPKWVPGHKQWGSN

SEQ ID NO: 768 - protein, 586 aa, Saccharomyces cerevisiae
MTTASSSASQLQQRLPEEKPWPQLSGSNADAQTFKCKYVTNHNSLGDGNFSVVKECMNIHTKDLYAMKLIKKQTVKNKIQLIQREFDLLRSISEKIRDMEKKNEHSLDIFEGHHHILQLFDYFETADNIVLITQLCQKGDLYEKIVENQCLDLETQVTSYCACLVSVLEFLHSQGIVHRDLKAENVLFRLRVNENEKNLQGEHHGDFKYDLLAHDLVLADFGLAAEYNTSKVNSLKEFVGTISYIAPEIVKCKGVGEMTPDQVGKLDKYGCPVDIWALGVLTYFMAFGYTPFDCTTDDETLECISKCDYYVDEQMMHDPKYEQFWNFVQCCFTIDPAVRRSAKNLKQHPFIKDYFATSNSLNTKDTPNFSFHPTIRRVSSTASMHTLRSPSKSRKTTTLAYLNMDGGSSETSTAFSSKMDLPDLYVDRTINSRERSLNRIRDTLKKTLSMTSLKPAGTFDYLHANKNGTSLSSSKSGLVKKNSTFVLDPKPPKNSLMNGCFSTTPESRSNFNTPKTLSRQGSSTSVKKYVNEVDLLLTPRTASMSSNDTTAINDYDTTNDKNPARKHAASFQVNVDDSDGDETMQI

SEQ ID NO: 769 - protein, 382 aa, Saccharomyces cerevisiae
MRALAYFKKGDIHFTNDIPRPEIQTDDEVIIDVSWCGICGSDLHEYLDGPIFMPKDGECHKLSNAALPLAMGHEMSGIVSKVGPKVTKVKVGDHVVVDAASSCADLHCWPHSKFYNSKPCDACQRGSENLCTHAGFVGLGVISGGFAEQVVVSQHHIIPVPKEIPLDVAALVEPLSVTWHAVKISGFKKGSSALVLGAGPIGLCTILVLKGMGASKIVVSEIAERRIEMAKKLGVEVFNPSKHGHKSIEILRGLTKSHDGFDYSYDCSGIQVTFETSLKALTFKGTATNIAVWGPKPVPFQPMDVTLQEKVMTGSIGYVVEDFEEVVRAIHNGDIAMEDCKQLITGKQRIEDGWEKGFQELMDHKESNVKILLTPNNHGEMK

SEQ ID NO: 770 - protein, 424 aa, Saccharomyces cerevisiae
MSEATLSSKQTIEWENKYSAHNYHPLPVVFHKAKGAHVWDPEGKLYLDFLSAYSAVNQGHCHPHIIKALTEQAQTLTLSSRAFHNDVYAQFAKFVTEFFGFETVLPMNTGAEAVETALKLARRWGYMKKNIPQDKAIILGAEGNFHGRTFGAISLSTDYEDSKLHFGPFVPNVASGHSVHKIRYGHAEDFVPILESPEGKNVAAIILEPIQGEAGIVVPPADYFPKVSALCRKHNVLLIVDEIQTGIGRTGELLCYDHYKAEAKPDIVLLGKALSGGVLPVSCVLSSHDIMSCFTPGSHGSTFGGNPLASRVAIAALEVIRDEKLCQRAAQLGSSFIAQLKALQAKSNGIISEVRGMGLLTAIVIDPSKANGKTAWDLCLLMKDHGLLAKPTHDHIIRLAPPLVISEEDLQTGVETIAKCIDLL

SEQ ID NO: 771 - protein, 1083 aa, Saccharomyces cerevisiae
MSSEDIIYDPQFKPVQGIYENRLRQFIDTGGDYHDLNLPKFYDKKRISLDHDHVKVWWYQVSFERGSSPVSPDKRPSWKSIIERDKKGELEFREANINQPFGPSWSTTWFKVKISLPEDWVKSNEQLLFQWDCSNEGIVIDPKTLIPVTAFSGGERTEYVLPKTSDGKHFFYIEAGNNGMFGCGAGSTINPPDDNRFFHLRKADIVWPDLDARALYIDFWMLGDAARELPGDSWQKHQARQLGNAVMNLFDPNDRSSVRKCRELLQREYFDSFLESSKVYEQGESQVLTNVYGIGNCHIDTAWLWPFAETRRKIVRSWSSQCTLMDRFPEYKFVASQAQQFKWLLEDHPEFFNKVLIPKIQQSQFFAVGGTWVENDTNIPSGESLARQFFFGQRFFLKHFGLKSKIFWLPDTFGYSSQMPQLCRLSGIDKFLTQKLSWNNINSFPHSTFNWAGIDGSQLLTHMPPGNTYTADSHFGDVLRTAKQNKTPEYYGSGLMLYGKGDGGGGPTEEMLQKMRRIRSMNNRNGNVIPKLQVGITVDEFYDDILKRTNQGHDLPTWSGELYFEFHRGTYTSQAQTKKLMRLSEIKLHDLEWIAAKTSVLYPDSYKYPSKQINELWENVLLCQFHDVLPGSCIEMVYKYEAVPMLHNVVKECTSLIDKTVQFLQSQSKADLVEMRTLTWSKPEKVSEECSLNGSYTSSVTGYDDYIVLANGKLKVIICKKTGVITSITDETLGVEYLDTEHGRNKLGANQFVIYDDKPLGWQAWDTELYSVNQYKYVTKPKKVQVSCNTKEKCAVEVIFQISEKCKIKSVISLNATAVTDAKLSKVDISTTVENWDARNKFLKVEFPVNIRNDFASYETQFGITKRPTHYNTSWDVAKFEVCHHKFADYSEYSKGVSILNDCKYGFSTHGNLMRLSLLRSPKAPDAHADMGTHEIKYAIYPHRGALSSDTVKLAHEFNYCFKYKLPKDIGMNFDDIISISGDENVILSNIKRGEDDSAVKSNYSLNPRDEQSIVVRVYESLGGESFASLNTTLNLKRIEKVDNLEMKVYKSLTATRDESNHAINRIPIKLRPFEIASFRLYF

SEQ ID NO: 772 - protein, 635 aa, Saccharomyces cerevisiae
MAPVTIEKFVNQEERHLVSNRSATIPFGEYIFKRLLSIDTKSVFGVPGDFNLSLLEYLYSPSVESAGLRWVGTCNELNAAYAADGYSRYSNKIGCLITTYGVGELSALNGIAGSFAENVKVLHIVGVAKSIDSRSSNFSDRNLHHLVPQLHDSNFKGPNHKVYHDMVKDRVACSVAYLEDIETACDQVDNVIRDIYKYSKPGYIFVPADFADMSVTCDNLVNVPRISQQDCIVYPSENQLSDIINKITSWIYSSKTPAILGDVLTDRYGVSNFLNKLICKTGIWNFSTVMGKSVIDESNPTYMGQYNGKEGLKQVYEHFELCDLVLHFGVDINEINNGHYTFTYKPNAKIIQFHPNYIRLVDTRQGNEQMFKGINFAPILKELYKRIDVSKLSLQYDSNVTQYTNETMRLEDPTNGQSSIITQVHLQKTMPKFLNPGDVVVCETGSFQFSVRDFAFPSQLKYISQGFFLSIGMALPAALGVGIAMQDHSNAHINGGNVKEDYEPRLILFEGDGAAQMTIQELSTILKCNIPLEVIIWNNNGYTIERAIMGPTRSYNDVMSWKWTKLFEAFGDFDGKYTNSTLIQCPSKLALKLEELKNSNKRSGIELLEVKLGELDFPEQLKCMVEAAALKRNKK

SEQ ID NO: 773 - protein, 479 aa, Saccharomyces cerevisiae
MSAILSTTSKSFLSRGSTRQCQNMQKALFALLNARHYSSASEQTLKERFAEIIPAKAEEIKKFKKEHGKTVIGEVLLEQAYGGMRGIKGLVWEGSVLDPEEGIRFRGRTIPEIQRELPKAEGSTEPLPEALFWLLLTGEIPTDAQVKALSADLAARSEIPEHVIQLLDSLPKDLHPMAQFSIAVTALESESKFAKAYAQGVSKKEYWSYTFEDSLDLLGKLPVIASKIYRNVFKDGKITSTDPNADYGKNLAQLLGYENKDFIDLMRLYLTIHSDHEGGNVSAHTTHLVGSALSSPYLSLAAGLNGLAGPLHGRANQEVLEWLFKLREEVKGDYSKETIEKYLWDTLNAGRVVPGYGHAVLRKTDPRYTAQREFALKHFPDYELFKLVSTIYEVAPGVLTKHGKTKNPWPNVDSHSGVLLQYYGLTEASFYTVLFGVARAIGVLPQLIIDRAVGAPIERPKSFSTEKYKELVKKIESKN

SEQ ID NO: 774 - protein, 312 aa, Saccharomyces cerevisiae
MPATLHDSTKILSLNTGAQIPQIGLGTWQSKENDAYKAVLTALKDGYRHIDTAAIYRNEDQVGQAIKDSGVPREEIFVTTKLWCTQHHEPEVALDQSLKRLGLDYVDLYLMHWPARLDPAYIKNEDILSVPTKKDGSRAVDITNWNFIKTWELMQELPKTGKTKAVGVSNFSINNLKDLLASQGNKLTPAANQVEIHPLLPQDELINFCKSKGIVVEAYSPLGSTDAPLLKEPVILEIAKKNNVQPGHVVISWHVQRGYVVLPKSVNPDRIKTNRKIFTLSTEDFEAINNISKEKGEKRVVHPNWSPFEVFK

SEQ ID NO: 775 - protein, 311 aa, Saccharomyces cerevisiae
MTASTPSNVMTLFLLRHGQSELNHENIFCGWIDAKLTEKGKEQARHSAELIEQYCKANNLRLPQIGYTSRLIRTQQTIETMCEEFKLKPQLQVVYDFNKIKLGDEFGSDDKDNMKIPILQTWRLNERHYGSWQGQRKPNVLKEYGKDKYMFIRRDYEGKPPPVDLDREMIQQENEKGSSTGYEFKEPNRQIKYELECSNHDIVLPDSESLREVVYRLNPFLQNVILKLANQYDESSCLIVGHGSSVRSLLKILEGISDDDIKNVDIPNGIPLVVELDKNNGLKFIRKFYLDPESAKINAEKVRNEGFIKNP

SEQ ID NO: 776 - protein, 214 aa, Saccharomyces cerevisiae
MSFNSPFFDFFDNINNEVDAFNRLLGEGGLRGYAPRRQLANTPAKDSTGKEVARPNNYAGALYDPRDETLDDWFDNDLSLFPSGFGFPRSVAVPVDILDHDNNYELKVVVPGVKSKKDIDIEYHQNKNQILVSGEIPSTLNEESKDKVKVKESSSGKFKRVITLPDYPGVDADNIKADYANGVLTLTVPKLKPQKDGKNHVKKIEVSSQESWGN

SEQ ID NO: 777 - protein, 751 aa, Saccharomyces cerevisiae
MSQVNTSQGPVAQGRQRRLSSLSEFNDPFSNAEVYYGPPTDPRKQKQAKPAKINRTRTMSVFDNVSPFKKTGFGKLQQTRRGSEDDTYSSSQGNRRFFIEDVDKTLNELLAAEDTDKNYQITIEDTGPKVLKVGTANSYGYKHINIRGTYMLSNLLQELTIAKSFGRHQIFLDEARINENPVNRLSRLINTQFWNSLTRRVDLNNVGEIAKDTKIDTPGAKNPRIYVPYDCPEQYEFYVQASQMHPSLKLEVEYLPKKITAEYVKSVNDTPGLLALAMEEHFNPSTGEKTLIGYPYAVPGGRFNELYGWDSYMMALGLLEANKTDVARGMVEHFIFEINHYGKILNANRSYYLCRSQPPFLTEMALVVFKKLGGRSNPDAVDLLKRAFQASIKEYKTVWTASPRLDPETGLSRYHPNGLGIPPETESDHFDTVLLPYASKHGVTLDEFKQLYNDGKIKEPKLDEFFLHDRGVRESGHDTTYRFEGVCAYLATIDLNSLLYKYEIDIADFIKEFCDDKYEDPLDHSITTSAMWKEMAKIRQEKITKYMWDDESGFFFDYNTKIKHRTSYESATTFWALWAGLATKEQAQKMVEKALPKLEMLGGLAACTERSRGPISISRPIRQWDYPFGWAPHQILAWEGLRSYGYLTVTNRLAYRWLFMMTKAFVDYNGIVVEKYDVTRGTDPHRVEAEYGNQGADFKGAATEGFGWVNASYILGLKYMNSHARRALGACIPPISFFSSLRPQERNLYGL

SEQ ID NO: 778 - protein, 393 aa, Saccharomyces cerevisiae
MSSRIIVGSAALAAAITASIMVREQKAKGQRREGNVSAYYNGQEYGSSAPPQLGKLHNIKQGIKEDALSLKDALLGVSQKAREEAPKVTKRVISPEEDAQTRKQLGQKAKDSSSQSIFNWGFSEAERRKAIAIGEFDTAKKRFEEAVDRNEKELLSTVMREKKAALDRASIEYERYGRARDFNELSDKLDQQERNSNPLKRLLKNNTGDANTEEAAARSVQGWGDTAQEFGREELEEAKRNASSEPSEAQKRLDELKKIKEKGWFGYNKGEQSEQQIAERVARGLEGWGETAAQLSKDEMDDLRWNYENSKKQLDKNVSDAMDSLSKAKEDLKQYGSHWWSGWTSKVDNDKQALKDEAQKKYDEALKKYDEAKNKFKEWNDKGDGKFWSSKKD

SEQ ID NO: 779 - protein, 333 aa, Saccharomyces cerevisiae
MSEPSEKKQKVATSSLEQLKKAGTHVVADSGDFEAISKYEPQDSTTNPSLILAASKLEKYARFIDAAVEYGRKHGKTDHEKIENAMDKILVEFGTQILKVVPGRVSTEVDARLSFDKKATVKKALHIIKLYKDAGVPKERVLIKIASTWEGIQAARELEVKHGIHCNMTLLFSFTQAVACAEANVTLISPFVGRIMDFYKALSGKDYTAETDPGVLSVKKIYSYYKRHGYATEVMAASFRNLDELKALAGIDNMTLPLNLLEQLYESTDPIENKLNSESAKEEGVEKVSFINDEPHFRYVLNEDQMATEKLSDGIRKFSADIEALYKLVEEKM

SEQ ID NO: 780 - protein, 700 aa, Saccharomyces cerevisiae
MVAQYTVPVGKAANEHETAPRRNYQCREKPLVRPPNTKCSTVYEFVLECFQKNKNSNAMGWRDVKEIHEESKSVMKKVDGKETSVEKKWMYYELSHYHYNSFDQLTDIMHEIGRGLVKIGLKPNDDDKLHLYAATSHKWMKMFLGAQSQGIPVVTAYDTLGEKGLIHSLVQTGSKAIFTDNSLLPSLIKPVQAAQDVKYIIHFDSISSEDRRQSGKIYQSAHDAINRIKEVRPDIKTFSFDDILKLGKESCNEIDVHPPGKDDLCCIMYTSGSTGEPKGVVLKHSNVVAGVGGASLNVLKFVGNTDRVICFLPLAHIFELVFELLSFYWGACIGYATVKTLTSSSVRNCQGDLQEFKPTIMVGVAAVWETVRKGILNQIDNLPFLTKKIFWTAYNTKLNMQRLHIPGGGALGNLVFKKIRTATGGQLRYLLNGGSPISRDAQEFITNLICPMLIGYGLTETCASTTILDPANFELGVAGDLTGCVTVKLVDVEELGYFAKNNQGEVWITGANVTPEYYKNEEETSQALTSDGWFKTGDIGEWEANGHLKIIDRKKNLVKTMNGEYIALEKLESVYRSNEYVANICVYADQSKTKPVGIIVPNHAPLTKLAKKLGIMEQKDSSINIENYLEDAKLIKAVYSDLLKTGKDQGLVGIELLAGIVFFDGEWTPQNGFVTSAQKLKRKDILNAVKDKVDAVYSSS

SEQ ID NO: 781 - protein, 500 aa, Saccharomyces cerevisiae
MSFDDLHKATERAVIQAVDQICDDFEVTPEKLDELTAYFIEQMEKGLAPPKEGHTLASDKGLPMIPAFVTGSPNGTERGVLLAADLGGTNFRICSVNLHGDHTFSMEQMKSKIPDDLLDDENVTSDDLFGFLARRTLAFMKKYHPDELAKGKDAKPMKLGFTFSYPVDQTSLNSGTLIRWTKGFRIADTVGKDVVQLYQEQLSAQGMPMIKVVALTNDTVGTYLSHCYTSDNTDSMTSGEISEPVIGCIFGTGTNGCYMEEINKITKLPQELRDKLIKEGKTHMIINVEWGSFDNELKHLPTTKYDVVIDQKLSTNPGFHLFEKRVSGMFLGEVLRNILVDLHSQGLLLQQYRSKEQLPRHLTTPFQLSSEVLSHIEIDDSTGLRETELSLLQSLRLPTTPTERVQIQKLVRAISRRSAYLAAVPLAAILIKTNALNKRYHGEVEIGCDGSVVEYYPGFRSMLRHALALSPLGAEGERKVHLKIAKDGSGVGAALCALVA

SEQ ID NO: 782 - protein, 327 aa, Saccharomyces cerevisiae
MSSLVTLNNGLKMPLVGLGCWKIDKKVCANQIYEAIKLGYRLFDGACDYGNEKEVGEGIRKAISEGLVSRKDIFVVSKLWNNFHHPDHVKLALKKTLSDMGLDYLDLYYIHFPIAFKYVPFEEKYPPGFYTGADDEKKGHITEAHVPIIDTYRALEECVDEGLIKSIGVSNFQGSLIQDLLRGCRIKPVALQIEHHPYLTQEHLVEFCKLHDIQVVAYSSFGPQSFIEMDLQLAKTTPTLFENDVIKKVSQNHPGSTTSQVLLRWATQRGIAVIPKSSKKERLLGNLEIEKKFTLTEQELKDISALNANIRFNDPWTWLDGKFPTFA

SEQ ID NO: 783 - protein, 447 aa, Saccharomyces cerevisiae
MPKESEVINSEFHVDVQDPERLNGHPVAKFINKLSGQPESYVNRTNYIFGRTLGAGSFGVVRQARKLSTNEDVAIKILLKKALQGNNVQLQMLYEELSILQKLSHPNIVSFKDWFESKDKFYIVTQLATGGELFDRILSRGKFTEVDAVEIIVQILGAVEYMHSKNVVHRDLKPENVLYVDKSENSPLVIADFGIAKQLKGEEDLIYKAAGSLGYVAPEVLTQDGHGKPCDIWSIGVITYTLLCGYSPFIAESVEGFMEECTASRYPVTFHMPYWDNISIDVKRFILKALRLNPADRPTATELLDDPWITSKRVETSNILPDVKKGFSLRKKLRDAIEIVKLNNRIKRLRNMYSLGDDGDNDIEENSLNESLLDGVTHSLDDLRLQSQKKGGELTEEQMKLKSALTKDAFVQIVKAATKNKHKVLAGEEEDDSKKTLHDDRESKSED

SEQ ID NO: 784 - protein, 756 aa, Saccharomyces cerevisiae
MYNSSTNHHEGAPTSGHGYYMSQQQDQQHQQQQQYANEMNPYQQIPRPPAAGFSSNYMKEQGSHQSLQEHLQRETGNLGSGFTDVPALNYPATPPPHNNYAASNQMINTPPPSMGGLYRHNNNSQSMVQNGNGSGNAQLPQLSPGQYSIESEYNQNLNGSSSSSPFHQPQTLRSNGSYSSGLRSVKSFQRLQQEQENVQVQQQLSQAQQQNSRQQQQQLQYQQQQQQQQQQQHMQIQQQQQQQQQQQQSQSPVQSGFNNGTISNYMYFERRPDLLTKGTQDKAAAVKLKIENFYQSSVKYAIERNERRVELETELTSHNWSEERKSRQLSSLGKKESQFLRLRRTRLSLEDFHTVKVIGKGAFGEVRLVQKKDTGKIYAMKTLLKSEMYKKDQLAHVKAERDVLAGSDSPWVVSLYYSFQDAQYLYLIMEFLPGGDLMTMLIRWQLFTEDVTRFYMAECILAIETIHKLGFIHRDIKPDNILIDIRGHIKLSDFGLSTGFHKTHDSNYYKKLLQQDEATNGISKPGTYNANTTDTANKRQTMVVDSISLTMSNRQQIQTWRKSRRLMAYSTVGTPDYIAPEIFLYQGYGQECDWWSLGAIMYECLIGWPPFCSETPQETYRKIMNFEQTLQFPDDIHISYEAEDLIRRLLTHADQRLGRHGGADEIKSHPFFRGVDWNTIRQVEAPYIPKLSSITDTRFFPTDELENVPDSPAMAQAAKQREQMTKQGGSAPVKEDLPFIGYTYSRFDYLTRKNAL

SEQ ID NO: 785 - protein, 485 aa, Agrobacterium tumefaciens
MQNKVQFITYVDRLTRGGFRQLKELVDGKFAGLFGGVHVLPFFNPIDGADAGFDPTDHTIVDPRLGDWEDVRALSGSVEIMADLIVNHVSSQSGAFTDFIAKGSASEFADMFMTFDKVFPDGATEEDLLRIYRPRPGLPFSKVTLADGTQRMLWTTFTPEQIDIDVHSAKGTTYLETILDRFSEANVTAIRLDAAGYAIKKAGSSCFMIDDTYAFLEEVAGKARNRGMEVLVEIHSYHRDQIEIAKKVDRVYDFALPPLILHALFTGDATPLAKWLAISPRNAITVLDTHDGIGVIDVGAHSDGRAGLLEPQAIDNLVGEIHRRSDGQSRQATGAAASNLDLYQVNCTYYDALGRNDNDYLIARAIQFFAPGIPQVYYVGLLGGVNDMDLLAKTGVGRDINRHYYGNDEIGTALETPLFHRLSNLIRFRNTHPAFGGALKATIADAGALVLSWQHGDAFAELKISFADRKASIAASGQSEMQIVE

SEQ ID NO: 786 - protein, 328 aa, Oryza sativa
MALEAVVYSHGGHFGGYGGGLMGGAPAAPWDVFAAAGGGGSWDDPGLFAAEASLDVIQGVDEWEVDQDQHASSSSKVAARPPVKAAAAAGKRKRRRAKAAKNREEIESQRMTHIAVERNRRRQMNEYLAVLRSLMPPSYAQRGDQASIVGGAINYVRELEQLLQTLEARRTIKDHIDGGAGESPSPFAGFFAFPQYSTATSGHGGGGDAHSRIVVKPAETTTTAAGGGAGAAIADIEASMVEGHASVKVQARRRPRQLLKLVAGLHQLGLTTLHLNVTTVAAMAMYSFSLKVEDGCKLGSVEEIATAVHEILERMQEEQAFADAKTSL

SEQ ID NO: 787 - protein, 319 aa, Arabidopsis thaliana
MSTDISPPYSQTHVEPVNGYPSDNKRCDDSSVPAKYDDLVRNSALFWEKLRAFLGLTSKTLKVPTVGGNTLDLHRLFIEVTSRGGIERVVKDRKWKEVIGAFSFPTTITSASFVLRKYYLKFLFQLEHVYYLEKPVSSLQSTDEALKSLANESPNPEEGIDEPQVGYEVQGFIDGKFDSGYLVTMKLGSQELKGVLYHIPQTPSQSQQTMETPSAIVQSSQRRHRKKSKLAVVDTQKPKCHRSGYNFFFAEQYARLKPEYHGQERSITKKIGHMWSNLTESEKQVYQDKGVKDVERYRIEMLEYKSSHESGATASTVAQ

SEQ ID NO: 788 - protein, 773 aa, Oryza sativa
MESSSEEELEEDFPGHEWITPQSSIRAAYQSQTEKGIRKICSELLELKDAIENLCGNMQSKYHAFLRISEEVVEAEQELIELQKHVSAQGILVQDLMSGVCRELEMWQKHCKDEHVEEKDLQTELDEILSYDTQDSKVSFLDKLDTLLAEHKIEEALLALETEEKKCMATDDPGKELDAEISTYKTALSKRKSILEDQLVRYSEQPSLSITELRKSLSGLIKIGKGSLAHQVLLKAYGSRLQKNVEAFLPTCSIYTETYSATLSKIVFSAISKVSKESSSLFGDSPMNLNRIIQWAEYEIETFARLVKENSPLPESVSALRSACICIQTSLTHCSYLESYGLKFSNLLMVLLHPYVEEVLELNFRRLRRKIVDSAKNDDILLPSPQEGSRLSSSVAPNIMLTSSGKKFMSIVNDVLDQITPMTIVHFGGTILNKFVQLFDKYVEALIEVLPGASEDDHLVESKEPIEFKAESDAQQIQLIGTAYTVADELLPAAVSKFFDIQTEKKRIGGTGEGLGSGSIYSIEYKEWKRSLQHSLDKLRDHFCLQYVLSFIYLEGKSRLDARMYLELKTDDLLWECDPSPSLPFQALFVKLRQLASVAGDVLLGKEKIQKVLLSRLTETVVMWLSNEQEFWDVFEDQSIQLRPSGLQQLILDMHFVVEIAVCGRYPHRPVQQLVSVIITRAIAAFSVRNVDPQSSLPEDEWFLDMAKVAINKQLGTSGSESELEEPVVVHDEISDSEESSISSPSTIGSEDSFASANNDDLETPVYFTDPEA

SEQ ID NO: 789 - protein, 502 aa, Oryza sativa
MASITSELLFFLPFILLALLTFYTTTVAKCHGGHWWRGGTTPAKRKRMNLPPGAAGWPLVGETFGYLRAHPATSVGRFMEQHIARYGKIYRSSLFGERTVVSADAGLNRYILQNEGRLFECSYPRSIGGILGKWSMLVLVGDPHREMRAISLNFLSSVRLRAVLLPEVERHTLLVLRAWPPSSTFSAQHQAKKFTFNLMAKNIMSMDPGEEETERLRREYITFMKGVVSAPLNLPGTPYWKALKSRAAILGVIERKMEERVEKLSKEDASVEQDDLLGWALKQSNLSKEQILDLLLSLLFAGHETSSMALALAIFFLEGCPKAVQELREEHLGIARRQRLRGECKLSWEDYKEMVFTQCVINETLRLGNVVRFLHRKVIKDVHYKGYDIPSGWKILPVLAAVHLDSSLYEDPQRFNPWRWKSSGSSGGLAQSSSFMPYGGGTRLCAGSELAKLEMAVFLHHLVLNFRWELAEPDQAFVFPFVDFPKGLPIRVHRIAQDDEQE

SEQ ID NO: 790 - protein, 393 aa, Arabidopsis thaliana
MESLLSSSSLVSAAGGFCWKKQNLKLHSLSEIRVLRCDSSKVVAKPKFRNNLVRPDGQGSSLLLYPKHKSRFRVNATAGQPEAFDSNSKQKSFRDSLDAFYRFSRPHTVIGTVLSILSVSFLAVEKVSDISPLLFTGILEAVVAALMMNIYIVGLNQLSDVEIDKVNKPYLPLASGEYSVNTGIAIVASFSIMSFWLGWIVGSWPLFWALFVSFMLGTAYSINLPLLRWKRFALVAAMCILAVRAIIVQIAFYLHIQTHVFGRPILFTRPLIFATAFMSFFSVVIALFKDIPDIEGDKIFGIRSFSVTLGQKRVFWTCVTLLQMAYAVAILVGATSPFIWSKVISVVGHVILATTLWARAKSVDLSSKTEITSCYMFIWKLFYAEYLLLPFLK

SEQ ID NO: 791 - protein, 510 aa, Oryza sativa
MEYERIEKPFPTQGGGFSPKRLRAMLLGVEKRRKGQEEEEEGDAGEVDDEYGAVPKSSVRSDADSDARRGGSMCEEYKDVDVVSTISESSSSLETGSGHRSRDTHSMGSRVRVPEEDSCDSESVASNFEFHKERGASARSVTAAIVPPFSKPAPSKWDDAQKWIASPTTNRPGRAGGVPQRKMEKTSFGGGRLPATKVVLEATEEIDTKRVDPSQEKREIGWQKAVNWAPPDPYPEVETCAKSALAEEITVADSAVTFSRHDSSATLQSATTCIPPPPTVRSVSMRDMGTEMTPIASQEPSRTGTPVRATSPDCSRPTTPRKTIGPNAIGAVIGHGECSNVELSEQELQMKTRREIMLLGTQLGKTNIAAWASNKEEEKDASLSLKGVPMDQSTQKVTEIRAAAWEEAEKAKYLARFKREEIKIQAWEDHQRAKIEAEMRKIEVDVERMRARAQDKLMSQLASARHTADEKRAAAELKRSRAAAKTAEQADHIRRTGRMPSSIGCWNWCS

SEQ ID NO: 792 - protein, 413 aa, Oryza sativa
MGSPRGRRRGDNGRLLLLAAAAVVIASLVGGGAAQPTTSGPGPNYFNPKSFNPSMAVVIVVLVTAFFFLGFFSIYIRRCAGGPLGGPGGYGVGGGGGGRVGGGFTFAAARSRRVRGLDPAVLGAFPTMAYADVKAHKAGKGALECAVCLSEFDDDETLRLLPRCSHAFHADCIDAWLASHVTCPVCRANLAFDAGVPPPPLAPPHALTTGQDVAAAPPQPAAPEQVTVDVVVADAEETEERIRREEAAELMRIGSVKRALRSKSGRRPPQFPRSHTTGHSLAAAAAVPATADDAAERYTLRLPDHVLREIVTSARLRRTTSLQSFRTTAAAGGGARAGRSVRLGQSGRWSNVSSLMRTFSARLPAWGSARRGAEADSPGKDGAKVAGDCTASVEQHCDGGGGGACPRPLGDHV

SEQ ID NO: 793 - protein, 438 aa, Oryza sativa
MASMPQLEEKDSSDLAINKGPSLDLVKSPLMMNDASATVTAMQPNEGMEEFPVKVRKPYTITKQREKWTEEEHDKFLEALKLYGRSWRQIQEHIGTKTAVQIRSHAQKFFSKVVREPGSNNAIEIPPPRPKRKPLHPYPRKCANSGSDANPATAQLKLAPGSSSSGSDQENGSPISVLSAMQSDAFGSSVSNPSTRCTSPASSDDGNNIPTFTSGEDNNVPCEPTVIDPSQSHKEIDQDRKDVNNMSEEDSSEEEVQETSLKLFGRTVVIPDPRKRSSSDPKHESEEQISQPSNEEMLQASSSVGEIPAAYCAPNGWFMSYNSFPFQFGESAADARIPPLHVWWPYYGFAPISHPRGLSTVMQQTEGSDESDGVKSHSSESSSDSGENVQMTAPQSSRIVESLGAIYVRDSGSSFELKPSANSAFVRVKPSNSGDEEI

SEQ ID NO: 794 - protein, 256 aa, Oryza sativa
MADGGGRRAPGFRFYPTEEELICFYLRNKLDGLRDDIERVIPVFDVYSVDPLQLSEIHHEMLGGGGEEGEPWFYFCPRQEREARGGRPSRTTPSGYWKAAGTPGVVYSADRRPIGMKKTMVFYRGRAPSGTKTAWKMNEYRAFHYPDASSASASSAGAAAPPNHLPPQLRSEFSLCRLYTRSGGIRQFDRRPLAGGGDENPGPSMAAAAASPEENDGSGSSMQQLELMDQGGAVDPDWDQWDDLATLTALLYWPRD

SEQ ID NO: 795 - protein, 373 aa, Oryza sativa
MEEGFVALKRTEHVEVTSLAVAVEATPSAKGGKGKVVVGGGGAGGGVGPTRVRVFCDDFDATDSSSDEDEEEVTARRRVKRYVQEIRLQRAAAVAVPPVKVKGEEVFPAAVSAKMAEAAKARVVLAAGRKRKAGGVDGAEPRFRGVRRRPWGKYAAEIRDPWRRVRVWLGTFDTAEEAAKVYDTAAIQLRGRDATTNFNQSGDSASLDVPPEVAERVPQPPGASKNASPATSYDSGEESHAAAASPTSVLRSFPPSAVVATADTANKKQPPPPPLVVRETDESVDVFGCSFSDDGGFAGELPPLYTDFDLLADFPEPPLDFLSNLPVEPFSLAPFSSNNGSPDLHLDDAPSPAAAQVDDFFQDITDLFQIPVV

SEQ ID NO: 796 - protein, 303 aa, Oryza sativa
MLLNPASREVAALDSIRHHLLEEEEETPATAPAPTRRPVYCRSSSFGSLVADQWSESLPFRPNDAEDMVVYGALRDAFSSGWLPDGSFAAVKPESQDSYDGSSIGSFLASSSSEAGTPGEVTSTEATVTPGIREGEGEAVAVASRGKHYRGVRQRPWGKFAAEIRDPAKNGARVWLGTFDSAEEAAVAYDRAAYRMRGSRALLNFPLRIGSEIAAAAAAAAAGNKRPYPDPASSGSSSPSSSSSSSSSSSSGSPKRRKRGEAAAASMAMALVPPPPPPAQAPVQLALPAQPWFAAGPIQQLVS

SEQ ID NO: 797 - protein, 248 aa, Oryza sativa
MEQLFVDDPAFASSMSSLEADIFSGAGQLPSSPWLDLDLDDDVQDLSMAPTTANAVSSGYGSGGSGSHRKLSHNAYERDRRKQLNELYSSLRALLPDADHTKKLSIPTTVSRVLKYIPELQKQVENLERKKKELTTTSTTNCKPGVLGSQLMSEGMAPIVSATCINDMEIMVQVSLLSNVAGSVLPLSKCIKVLENEGLHFISSSTSSGFGNRTFYSIHLQRSEGTINEECPAFCERLEKVVRNKAKL

SEQ ID NO: 798 - protein, 454 aa, Oryza sativa
MAGGGRCSSLLRGFVSLFFLLFIHIGHAGCCFSTGSSTQTLEEDDTGHGADGRGGGGGGSKRRKISPLAFSPSVSSSTVADERSRARRRQVSSLATSVRFYLHRIFSYSSGAKNGAGAPAAEEEDEAVTTTVSSPLAQSSSCLPQRQASSSVVLSTPSSPCASPFLSPLSPQSLSITPAVPSSPHNRQIPQATTRQSSFRSFAARGDVFPCKVCGEVLSKPQQLELHQAMKHSLSELSSLDSSMNIIRMIFLAGWKPAVMPGAGEPPSVRRILRIHHNPRVLTRFEEYRDLVRARAARRCAGAGAAAVEERCVADGNERLRFYCSTMLCTLGAGVCGSPYCCTCSILRHGFAGKQADVDGIATYSSGRAAHASLPDDVEREFAFLQVRRAMLVCRVVAGRVGRGAADDKVAYDSMVPLLPTSSFAAATRGDDDVELLVFNPRAVLPCFVIIYSC

SEQ ID NO: 799 - protein, 398 aa, Oryza sativa
MEQTTGVSGHEHIIDIPRDSGPSTSTSHSVARENHGEPNPVDRSATRALVPALQAPSAVGAPSAGHTSGARRSDNYVRRHRSPLNSGLWISIEVLVNVSQIVAAIVVLSLSRKEHPQAPLFEWVIGYTVGCFATLPHLYWRYIHRNIVNGENEPAHTLQGSSQNNSTEPSASASERRRNAARNAVLANPRINALFDHFKMALDCFFAVWFVVGNVWIFGGRSSAADAPNLYRLCIVFLTFSCIGYAMPFILCAMICCCLPCIISVMGFREDTNNTRGATSESINSLPTYKFKTKKRRHSSGNEAEGQDGGIVAAGTDKERSLSAEDAVCCICLAKYAHNDELRELPCTHCFHKECVDKWLKINALCPLCKSEIASSSGTSDTRRSDHTDIPVQEIEMH

SEQ ID NO: 800 - protein, 136 aa, Oryza sativa
MDGDGGGGWDDQGNGGGETTKYRGVRRRPSGKFAAEIRDSSRQSVRVWLGTFDTAEEAARAYDRAAYAMRGHLAVLNFPAEARNYVRGSGSSSSSRQHQQRQVIELECLDDQVLQEMLKGGDDQYRSAAGSKRNNY

SEQ ID NO: 801 - protein, 406 aa, Oryza sativa
MQESREYWRDGGDVVGEELLREILDETAAVHSNSNSNSNSNSNSKEAEEEDEREYFAAAAADEQLQVEAPCGRRRRESMVNKLISTVYSGPTISDIESALSFTAAGDHQLLADGHNFAASSCSPVVFSPEKTLSKTMENKYTLKMKSCGNNGGLADDGYKWRKYGQKSIKNSPNPRSYYRCTNPRCNAKKQVERAVDEPDTLIVTYEGLHLHYTYSHFLHSTSSSSSSTTTQQQLQPQPQMMTNCKKKPKLHLHPLLHDDPPPPPPPPEMTTMMIMQSFSIQQQQHDDDQLLQPAADDHLMVQAPPDDCYNINGSSSSGLMMSLDDDEQAAGAGGLLEDVVPLLVRRPPPPICNNNNYYYSPATTCTSDNEYGSSASASPSSSVSVSSWTTPMSPCIDMAILSNIF

SEQ ID NO: 802 - protein, 691 aa, Oryza sativa
MAPVEDGGGVEFPVGMKVLVVDDDPTCLAVLKRMLLECRYDATTCSQATRALTMLRENRRGFDVIISDVHMPDMDGFRLLELVGLEMDLPVIMMSADSRTDIVMKGIKHGACDYLIKPVRMEELKNIWQHVIRKKFNENKEHEHSGSLDDTDRTRPTNNDNEYASSANDGAEGSWKSQKKKRDKDDDDGELESGDPSSTSKKPRVVWSVELHQQFVNAVNHLGIDKAVPKKILELMNVPGLTRENVASHLQKFRLYLKRIAQHHAGIANPFCPPASSGKVGSLGGLDFQALAASGQIPPQALAALQDELLGRPTNSLVLPGRDQSSLRLAAVKGNKPHGEREIAFGQPIYKCQNNAYGAFPQSSPAVGGMPSFSAWPNNKLGMADSTGTLGGMSNSQNSNIVLHELQQQPDAMLSGTLHSLDVKPSGIVMPSQSLNTFSASEGLSPNQNTLMIPAQSSGFLAAMPPSMKHEPVLATSQPSSSLLGGIDLVNQASTSQPLISAHGGGNLSGLVNRNPNVVPSQGISTFHTPNNPYLVSPNSMGMGSKQPPGVLKTENSDALNHSYGYLGGSNPPMDSGLLSSQSKNTQFGLLGQDDITGSWSPLPNVDSYGNTVGLSHPGSSSSSFQSSNVALGKLPDQGRGKNHGFVGKGTCIPSRFAVDEIESPTNNLSHSIGSSGDIMSPDIFGFSGQM

SEQ ID NO: 803 - protein, 407 aa, Arabidopsis thaliana
MSSSSLILLFSTLSLFLNVSLADNHTAVVITTSDTPPPLPPPSPPPRHNFTSSLMPGIAVVIAVLTAFFSLTFLLLLYVKHCKRRNGSVYVNHPQRFAITRYGGGYYNGGGVVGGRKNSGIDRSVIESLPVFRFGALSGHKDGLECAVCLARFEPTEVLRLLPKCKHAFHVECVDTWLDAHSTCPLCRYRVDPEDILLIGDCNSWFELQFSKDESNSVNNNPPGLTRFIPVSRISGRHSSAGERASRLNEIRTSSSYKSNPMSFRRSLDSSLKVNDAGEEKSESVAVNCLDRLQRKDGLLLIPNRESFEGRFEHRIIISGGNRDDQRWSEVRPSDLLYLRSEMILSDCRKLAAAEGGRDVINGRSVSELTGIERRRRWGGEPRQRQATAVISRWLAWSHRASASSIV

SEQ ID NO: 804 - protein, 863 aa, Saccharomyces cerevisiae
MVDISDTSGYLHKQGVLPSVSFICTSFFACGLTSWKVELSYYIVVAAAMGNSPSTQDPSHSTKKEHGHHFHDAFNKDRQGSITSQLFNNRKSTHKRRASHTSEHNGAIPPRMQLLASHDPSTDCDGRMSSDTTIDKGPSHLFKKDYSLSSAADVNDTTLANLTLSDDHDVGAPEEQVKSPSFLSPGPSMATVKRTKSDLDDLSTLNYTMVDETTENERNDKPHHERHRSSIIALKKNLLESSATASPSPTRSSSVHSASLPALTKTDSIDIPVRQPYSKKPSIHAYQYQYLNNDETFSENSQMDKEGNSDSVDAEAGVLQSEDMVLNQSLLQNALKKDMQRLSRVNSSNSMYTAERISHANNNGNIENNTRNKGNAGGSNDDFTAPISATAKMMMKLYGDKTLMERDLNKHHNKTKKAQNKKIRSVSNSRRSSFASLHSLQSRKSILTNGLNLQPLHPLHPIINDNESQYSAPQHREISHHSNSMSSMSSISSTNSTENTLVVLKWKDDGTVAATTEVFIVSTDIASALKEQRELTLDENASLDSEKQLNPRIRMVYDDVHKEWFVPDLFLPAGIYRLQFSINGILTHSNFLPTATDSEGNFVNWFEVLPGYHTIEPFRNEADIDSQVEPTLDEELPKRPELKRFPSSSRKSSYYSAKGVERPSTPFSDYRGLSRSSSINMRDSFVRLKASSLDLMAEVKPERLVYSNEIPNLFNIGDGSTISVKGDSDDVHPQEPPSFTHRVVDCNQDDLFATLQQGGNIDAETAEAVFLSRYPVPDLPIYLNSSYLNRILNQSNQNSESHERDEGAINHIIPHVNLNHLLTSSIRDEIISVACTTRYEGKFITQVVYAPCYYKTQKSQISN

SEQ ID NO: 805 - protein, 496 aa, Oryza sativa
  misc_feature (204)..(204): Xaa can be any naturally occurring amino acid
  misc_feature (219)..(219): Xaa can be any naturally occurring amino acid
  unsure (1)..(496): unsure at all Xaa locations
MATCADTLGPLLGTAAANATDYLCNQFADTTSAVDSTYLLFSAYLVFAMQLGFAMLCAGSVRAKNTMNIMLTNVLDAAAGALFYYLFGFAFAFGAPSNGFIGKHFFGLKQVPQVGFDYSFFLFQWAFAIAAAGITSGSIAERTQFVAYLIYSAFLTGFVYPVVSHWIWSADGWASASRTSGSLLFGSGVIDFAGSGVVHMVGGXGRTLGRPHRGPPHWXFDHAGRSVALRGHSASLVVLGSFLLWFGWYGFNPGSFLTILKSYGPPGSIHGQWSAVGRTAVTTTLAGSTAALTTLFGKRLQTGHWNVIDVCNGLLGGFAAITAGCSVVDPWAAIICGFVSAWVLIGLNALAARLKFDDPLEAAQLHGGCGAWGVIFTALFARKEYVDQIFGQPGRPYGLFMGGGGRLLGAHIVVILVIAAWVSFTMAPLFLVLNKLGLLRISAEDEMAGMDQTRHGGFAYAYHDDDASGKPDRSVGGFMLKSAHGTQVAAEMGGHV

SEQ ID NO: 806 - protein, 459 aa, Emericella nidulans
MSNLPVEPEFEQAYKELASTLENSTLFEQHPEYRRALQVVSVPERVIQFRVVWENDKGEVQINRGYRVQFNSALGPYKGGLRFHPSVNLSILKFLGFEQIFKNALTGLNMGGGKGGSDFDPKGKSDSEIRRFCTAFMTELCKHIGADTDVPAGDIGVTGREVGFLFGQYRRIRNQWEGVLTGKGGSWGGSLIRPEATGYGVVYYVEHMIKHVTGGKESFAGKRVAISGSGNVAQYAALKVIELGGSVVSLSDSKGSLIVKDESASFTPEEIALIADLKVARKQLSELATSSAFAGKFTYIPDARPWTNIPGKFEVALPSATQNEVSGEEAEHLIKSGVRYIAEGSNMGCTQAAIDIFEAHRNANPGDAIWYAPGKAANAGGVAVSGLEMAQNSARLSWTSEEVDARLKGIMEDCFKNGLETAQKFATPAKGVLPSLVTGSNIAGFTKVAEAMKDQGDWW

SEQ ID NO: 807 - protein, 476 aa, Saccharomyces cerevisiae
MIASKSSLLVTKSRIPSLCFPLIKRSYVSKTPTHSNTAANLMVETPAANANGNSVMAPPNSINFLQTLPKKELFQLGFIGIATLNSFFLNTIIKLFPYIPIPVIKFFVSSLYCGGENFKEVIECGKRLQKRGISNMMLSLTIENSEGTKSLSSTPVDQIVKETISSVHNILLPNIIGQLESKPINDIAPGYIALKPSALVDNPHEVLYNFSNPAYKAQRDQLIENCSKITKEIFELNQSLLKKYPERKAPFMVSTIDAEKYDLQENGVYELQRILFQKFNPTSSKLISCVGTWQLYLRDSGDHILHELKLAQENGYKLGLKLVRGAYIHSEKNRNQIIFGDKTGTDENYDRIITQVVNDLIINGEDSYFGHLVVASHNYQSQMLVTNLLKSTQDNSYAKSNIVLGQLLGMADNVTYDLITNHGAKNIIKYVPWGPPLETKDYLLRRLQENGDAVRSDNGWPLIKAIAKSIPKRVGL

SEQ ID NO: 808 - protein, 646 aa, Saccharomyces cerevisiae
MSYESGRSSSSSESTRPPTLKEEPNGKIAWEESVKKSRENNENDSTLLRRKLGETRKAIETGGSSRNKLSALTPLKKVVDERKDSVQPQVPSMGFTYSLPNLKTLNSFSDAEQARIMQDYLSRGVNQGNSNNYVDPLYRQLNPTMGSSRNRPVWSLNQPLPHVLDRGLAAKMIQKNMDARSRASSRRGSTDISRGGSTTSVKDWKRLLRGAAPGKKLGDIEAQTQRDNTVGADVKPTKLEPENPQKPSNTHIENVSRKKKRTSHNVNFSLGDESYASSIADAESRKLKNMQTLDGSTPVYTKLPEELIEEENKSTSALDGNEIGASEDEDADIMTFPNFWAKIRYHMREPFAEFLGTLVLVIFGVGGNLQATVTKGSGGSYESLSFAWGFGCMLGVYVAGGISGGHINPAVTISMAIFRKFPWKKVPVYIVAQIIGAYFGGAMAYGYFWSSITEFEGGPHIRTTATGACLFTDPKSYVTWRNAFFDEFIGASILVGCLMALLDDSNAPPGNGMTALIIGFLVAAIGMALGYQTSFTINPARDLGPRIFASMIGYGPHAFHLTHWWWTWGAWGGPIAGGIAGALIYDIFIFTGCESPVNYPDNGYIENRVGKLLHAEFHQNDGTVSDESGVNSNSNTGSKKSVPTSS

SEQ ID NO: 809 - protein, 781 aa, Saccharomyces cerevisiae
MNIAEEPSDEVISSGPEDTDICSQQTSASAEAGDQSIKIERKTSTGLQLEQLANTNLLTIRIKWQLQEEEDDHCNSRITDQIMDTIQHYKGISVNNSDTETYEFLPDTRRLQVLEQNKDIYLYEHGSQEYEKSYKDNEEEDDWRYDTVLQAQFKYPKSLENACTDISELLKSEPIGQHIDKWSIGVNKHALTYPGNIFVGGIAKSLSIGELSFLFSKYGPILSMKLIYDKTKGEPNGYGFISYPLGSQASLCIKELNGRTVNGSTLFINYHVERKERERIHWDHVKENNNDDNFRCLFIGNLPYHNPEKVETLITPKEVIEVIKKELSKKFPDFDIISYYFPKRSNTRSSSSVSFNEEGSVESNKSSNNTNGNAQDEDMLKGYGFIKLINHEQALAAIETFNGFMWHGNRLVVNKAVQHKVYNNHNSHDRHPSISNHNDMEVLEFANNPMYDYNNYTYDRYYFNNNKNGNSNDTSNVRYFDSVRSTPVAEKMDLFYPQRESFSEGRGQRVPRFMGNKFDMYQYPSTSYSLPIPMSNQQESNLYVKHIPLSWTDEDLYDFYKSFGEIISVKVITVGGSKNKYRQQSNDSSSDNDLPVGSSRGYGFVSFESPLDAAKAILNTDGYQVSKDQVLSVSFAQKRGNLSSSDDDDQSQTDNSSKFQNFQPHNDYHKAYPTKYNKKFINALMTQNQSQQQVSRENYFIPLQYPNTNTKPVNSYNLISANQNNANWMMPMFPSFGFIPQVPPVPYIIPPQNPAANHIPIMANGSNEEEEFSSGDYSMDY

SEQ ID NO: 810 - protein, 209 aa, Saccharomyces cerevisiae
MNIYTSPTRTPNIAPKSGQRPSLPMLATDERSTDKESPNEDREFVPCSSLDVRRIYPKGPLLVLPEKIYLYSEPTVKELLPFDVVINVAEEANDLRMQVPAVEYHHYRWEHDSQIALDLPSLTSIIHAATTKREKILIHCQCGLSRSATLIIAYIMKYHNLSLRHSYDLLKSRADKINPSIGLIFQLMEWEVALNAKTNVQANSYRKVP

SEQ ID NO: 811 - protein, 513 aa, Saccharomyces cerevisiae
MTAGSAPPVDYTSLKKNFQPFLSRRVENRSLKSFWDASDISDDVIELAGGMPNERFFPIESMDLKISKVPFNDNPKWHNSFTTAHLDLGSPSELPIARSFQYAETKGLPPLLHFVKDFVSRINRPAFSDETESNWDVILSGGSNDSMFKVFETICDESTTVMIEEFTFTPAMSNVEATGAKVIPIKMNLTFDRESQGIDVEYLTQLLDNWSTGPYKDLNKPRVLYTIATGQNPTGMSVPQWKREKIYQLAQRHDFLIVEDDPYGYLYFPSYNPQEPLENPYHSSDLTTERYLNDFLMKSFLTLDTDARVIRLETFSKIFAPGLRLSLIVANKFLLQKILDLADITTRAPSGTSQAIVYSTIKAMAESNLSSSLSMKEAMFEGWIRWIMQIASKYNHRKNLTLKALYETESYQAGQFTVMEPSAGMFIIIKINWGNFDRPDDLPQQMDILDKFLLKNGVKVVLGYKMAVCPNYSKQNSDFLRLTIAYARDDDQLIEASKRIGSGIKEFFDNYKS

SEQ ID NO: 812 - protein, 730 aa, Saccharomyces cerevisiae
MTIDGTGQSKEALQDERLNTGSDKVYQNYMMPALELYDAKVSINHWQLRDCIKPGSMNQSKLYYIYDHSIRVLDTDSSVLRSPVRRHNSIQPSNSGKNSTEKTSTKGSRTTGSYISKNLHVPSEKLVEFNFKPRCFTELNGLTVCGGLIGSDDKGFPSNWNRLAQDANISLPPPSQPINISKNISFPINSHYSNPNIWKGIVEFYNQETDTMMTFTLGQFINNCVTLYDRASMQFDLFACNNDGHLYQCDVSNRDVTLVKRYADLKFPLNNASLSHDGQTMVVSGDSNKFAVYNQNELTNQFSLHYDNHPSWGSSVNRVRRIPRFALPDESEYIENIYEAPNSDHGFYNSFSENDLQFATVFQNGTCAIYDIRNMATPMAEISSTRPHSHNGAFRVCRFSYGLDDLLFISEHQGRVHVVDTRNYVNHQVIVIPDKVNMEYINERKHNTNHNFTTNNNNENESNDSKNELQGADYRSLSRRRFSLPSMPNVTTEPWITMAQRIPKKYLEPQILPFPKVMDKISNESVLFSTKGSSSSDVAHPYKRRCSFRVRRVSTSAPTADYSNNNVNASLGTPAADSIATSSSNSAPQNLIDPLILSHQQASNDVFEDDEYYEAYNDVHSTYRVSSDYHGVSARAFESFLRPPSTPDLPSDDDNFAANSRNNRGTSNFLRRPVITTQESNEFSEENNISGIDWVEDRNGSSLIIGTDYGIMRWNINSWARRSFSSYDLC

SEQ ID NO: 813 - protein, 255 aa, Saccharomyces cerevisiae
MVKLQRFSEKKSLIHEFGKFILEKQESALTGDADAVFNIAISGGSMNQALYESLVNDKNIFPHIKWPQWRIFFCDERLVPFEDPQSNYGQFKKTVLDPLVHQGNQLNLGPTVYTINESLIGGGETANRKIAEEYASMLPASFDLILLGCGEDGHTCSLFPGVEFNYLVEEMDRKVLWCNNSPKAPKDRITFTLAVVAEAKSVCFLVRGAAKKAIMHDVLIVKNSELPSVLVNEMVGTKVTWFLDDEAGALIPENC

SEQ ID NO: 814 - protein, 274 aa, Arabidopsis thaliana
MERSTPVRKPHTSTADLLTWSEVPPPDSPSSASRSAVRSHQPSDGISKVVFGGQVTDEEVESLNRRKPCSEHKMKEITGSGIFSRNEKDDASEPLPVYQQAVNGISQISFGEEENLSPKKPATVPEVAKQRELSGTMENESANKLQKQLSDAKYKEISGQNIFAPPPEIKPRSGTNRALALKDNFNLGAESQTAEEDSSVKTAKKIYDKKFAELSGNDIFKGDAASSNVEKHLSQAKLKEIGGNNIFADGKVEARDYLGGVRKPPGGETSIALV

SEQ ID NO: 815 - protein, 340 aa, Arabidopsis thaliana
MSNYVLVVYRHAVATIVMAPFAFYFDKKVRPKMTLMIFFKISLLGLLEPVIDQNLYYLGMKYTTATFATAMYNVLPAITFVLAYIFGLERVKLRCIRSTGKVVGTLATVGGAMIMTLVKGPVLDLFWTKGVSAHNTAGTDIHSAIKGAVLVTIGCFSYACFMILQAITLRTYPAELSLTAWICLMGTIEGTAVALVMEKGNPSAWAIGWDTKLLTATYSGIVCSALAYYVGGVVMKTRGPVFVTAFSPLCMIIVAIMSTIIFAEQMYLGRVLGAVVICAGLYLVIWGKGKDYKYNSTLQLDDESAQPKLELSGNGKDNVDHEVITISKQGEQRRTAVETV

SEQ ID NO: 816 - protein, 135 aa, Zea mays
MSSSRRSSSPDSNDTTDERKRKRMLSNRESARRSRARKQQRLEELVAEVARLQAENAATQARTAALERDLGRVDGDNAVLRARHAELAGRLQSLGGVLEVLQMAGAAVDIPEMVTDDPMLRPWQPSFPPMQPIGF

SEQ ID NO: 817 - protein, 447 aa, Zea mays
MGKEKTHINIVVIGHVDSGKSTTTGHLIYKLGGIDKRVIERFEKEAAEMNKRSFKYAWVLDKLKAERERGITIDIALWKFETTKYYCTVIDAPGHRDFIKNMITGTSQADCAVLIIDSTTGGFEAGISKDGQTREHALLAFTLGVKQMICCCNKMDATTPKYSKARYDEIVKEVSSYLKKVGYNPDKIHFVPISGFEGDNMIERSTNLDWYKGPTLLEALDLINEPKRPSDKPLRLPLQDVYKIGGIGTVPVGRVETGVIKPGMVVTFGPTGLTTEVKSVEMHHEALQEALPGDNVGFNVKNVAVKDLKRGYVASNSKDDPAKEAASFTSQVIIMNHPGQIGNGYAPVLDCHTSHIAVKFAELVTKIDRRSGKELEKEPKFLKNGDAGMVKMVPTKPMVVETFSQYPPLGRFAVRDMRQTVAVGVIKSVEKKDPTGAKVTKAAAKKK

SEQ ID NO: 818 - protein, 325 aa, Zea mays
MENPAPSIVVAIAAPVAAEFVKLTFRALYMRRAGPGSREMTVPGRPSDQLGRRVVTDSPVYDGRGADARLVARIQGVTVLVGNADALFTMVFETDRLKGSTLVINGMVTDGSDEWAIYGGTGVFAMATGVMKRRNLAGGSNDGNSDELALEVFCPVFGASQQPISKQQDSISSVTKIGLWGGQGGSAQDITAEQPPRRLHSITVRAGVAVDSIEFTYTDDAGQRRTAGRWGGLGGNVRTIDLGDAEDVREVSGTYGAFEGAITLTSLRLVTSSRTWGPWGIENGTRFSITAPNGSSIAGFYARAGTRLVDAIGVYIRPVVPGRPR

SEQ ID NO: 819 - protein, 113 aa, Zea mays
MASGQESREELARMAEEGQTVVPGGTGGKTLEAQEHLAEGRSHGGQTRSEQLGHEGYSEMGSKGGQTRKEQLGHEGYSEMGRKGGLSTMQESGGERAAREGIEIDESKFRTKS

SEQ ID NO: 820 - protein, 290 aa, Zea mays
MAGKEILHKVKDKVKDAFSSSGPETGKGKTKLSGKRVKHGYHLVKGKSNHPMEDYLVAEYRQVGEHDLGLFAIFDGHLGHTVPDFLSSHLFNNILSEPEFLSDPETAIRNAYQLTDQKILENAAELGRGGSTAVTAILIGSDKFVKLVVANVGDSRAVISKNGVAKQLSVDHEPNMERQTIEQKGGFVSNLPGDVPRVDGQLAVARAFGDRSLKKHLSSDPYVVEQTIDENTEFLILASDGLWKVMSNQEAVDEIKDCKDAQAAAKHLTEQAVNRKSKDDISVIVVKFMC

SEQ ID NO: 821 - protein, 476 aa, Glycine max
MGMEEESSNNSSIIEGGASLPSTGSDAKKRRVTYFYEPTIGDYYYGQGHPMKPHRIRMAHNLIVHYSLHRRMEINRPFPASPADIRRFHSDDYVDFLSSVSPETLADSAFSRHLKRFNVGEDCPVFDGLFPFCQASAGGSLGAAVKLNRADADIAINWAGGLHHAKKSEASGFCYVNDIVLGILELLKVHRRVLYVDIDVHHGDGVEEAFYTTDRVMTVSFHKFGDFFPGTGHVKDIGVGSGKNYAVNVPLNDGMDDESFRSLFRTIIQKVMEVYQPEAVVLQCGADSLSGDRLGCFNLSVRGHADCLRFLRSFNVPLMVLGGGGYTIRNVARCWCYETAVAVGVEPDNKLPYNEYYEYFGPDYTLYVDPSNMENLNTPKDMEKIRNTLLEQISQLPHAPGVPFQTTPPTLQLPEEAEEDMDRRPKLRKWDGEDYDSDPDEGGKANSKFPNVTAHMRDITDEMEEEKPEVHPSSCC

SEQ ID NO: 822 - protein, 250 aa, Zea mays
MAKNYPTVSAEYSEAVEKARRKLRALIAEKSCAPLMLRLAWHSAGTFDVSSRTGGPFGTMKHQSELAHGANAGLDIAVRLLEPIKEEFPILSYADFYQLAGVVAVEVTGGPEIPFHPGREDKPQPPPEGRLPDATKGSDHLRQVFGKQMGLSDQDIVALSGGHTLGRCHKERSGFEGAWTTNPLVFDNSYFKELLSGDKEGLLQLPSDKALLSDPVFRPLVEKYAADEKAFFDDYKEAHLKLSELGFADA

SEQ ID NO: 823 - protein, 300 aa, Zea mays
MASTSTFLSTLASRSAAADSLRSAVPSFAKIVRFLPAQAQISRRRRAAVLPTPRAAVSGTEKAPSSKHERVVRVHSTQEFDDALKAAKNRLVVVEFAASDSEDSSQIYPTMVQLSRTCGDVDFLLVLRDDESEATEELFRREGVTKVPHFNFYKGAEKVHEEEAIGPERLAGDVLYYGDSHSAVVQLHSREDVEALIDEHRGDKGKLVVLDVGLKHCGPCVKVYPTVLKLSRSMVDNTVFARMNGDENDSCMEFLRAMKIVEVPTFVFIRDGQIVGRYVGSGKGELVGEILRYNGVRVTY

SEQ ID NO: 824 - protein, 206 aa, Zea mays
MSTSRRRTLLKVIVLGDSGVGKTSLMNQYVHKKFSQQYKATIGADFVTKEVLIEDRLVTLQIWDTAGQERFQSLGVAFYRGADCCVLVYDVNSNRSFDTLNTWHDEFLNQASPSDPKTFPFILLGNKIDVDGGKSRVVSDKKAMEWCASKGNIPYFETSAKEDYNVDNAFLTVAKLALEHERDQDIYFQSVADPVPETEQRSGCAC

SEQ ID NO: 825 - protein, 217 aa, Zea mays
MAGPGDKVDYVFKVVLIGDSAVGKSQILARFARNEFSLDSKATIGVEFQTRTLVIDHRSVKAQIWDTAGQERYRAVTSAYYRGALGALLVYDITRRQSFDHIPRWLDELRAHADKNIVIMLVGNKSDLEEQRAVSTEDAKEFAEKENLFFLETSALQATNVESAFQTVLTEIFKIHSKKNMVSEPKSNGAAQAMPGTKVLVPGPAQEIPKSKCCSSM

SEQ ID NO: 826 - protein, 443 aa, Zea mays
MESTGKILMERYEVGRLLGKGTFGKVHYAKNLESNESVAIKMMDKDKVLKAGLSEQIRREITTMRLVAHKNIVELHEVMATRNNIYFVMEYVKGGELFDKIGKSGKLTEAAAHKYFQQLIGAVDYCHSRGVYHRDLKPENLLLDENENLKVSDFGLSALSESKGQDGLLHTTCGTPAYVAPEVISKTGYDGAKSDIWSCGVVLFVLVAGYLPFRAPNMMEMYRKIQNGDFRCPSWFSHKLKKLLYKILDPSPDTRISVQKIKESTWFRKGPVETRTVKEKILSENDTTNAAPAVAMRRKKNVHEDVKPPTVTSLNAFEIISFSTGLDLSGLFIRKECKKETRFTSDKGAVSIISKLEDVAKALNLRVRKKDNGVVKIQGRKVGRKGVLEFDTEIFEITASYHLIEMKQTGGDSLEYKKLLEEDIRPALKDIVWAWHGDDQQQK

SEQ ID NO: 827 - protein, 185 aa, Arabidopsis thaliana
MPNITMGLKPDPVAPTNPTHHESNAAKEIRYRGVRKRPWGRYAAEIRDPVKKTRVWLGTFDTAQQAARAYDAAARDFRGVKAKTNFGVIVGSSPTQSSTVVDSPTAARFITPPHLELSLGGGGACRRKIPLVHPVYYYNMATYPKMTTCGVQSESETSSVVDFEGGAGKISPPLDLDLNLAPPAE

SEQ ID NO: 828 - protein, 496 aa, Zea mays
MSSSRKPKTPILLFFLFLLASLAFSQEFTYKGFSASGRGGSPNLNLNGTSATEILPSGILRLTNETSRLFGHAFYPTPLRFLDQKNGTAVSFSTQFAFTVVPEFPTLGGHGFAFVVAPDPRMSGALPSQYLGLLSAADVGNATNHLFAIEFDTVQDFEFDDVNGNHVGVDLNSLISNASAKADPLNLKSGDTTAWVDYDGAARLLNVSIANGTLGKPTTPLISFRVDLSGIFREQMYVGFSASTGVLASSHYLRGWSFRLGAGAAPALDLSSLPSLPQLKSSKNRTSLILAVAFSAFVALVVLAGAGAYGAYRYKNRDIIEPWELDYGPHRFKYAELRRATRGFREREVLGSGGFGKVYRGVLRKSGETVAVKRVNHESRQGLREFVAEIASIGRLRHRNLVQLQGWCRRRGDLLLVYDYMPNGSLDRHLFGDHLKASRLTWPVRYRILRDVASALLYLHEGWESVVLYRDVKASNVLLDADMSARLGDFGLAKLH

SEQ ID NO: 829 - protein, 153 aa, Glycine max
MSLIPSFFGGRRSSVFDPFSLDVWDPFKDFPFPSSLSAENSAFVSTRVDWKETPEAHVFKADIPGLKKEEVKLEIQDGRVLQISGERNVEKEDKNDTWHRVERSSGKLVRRFRLPENAKVDQVKASMENGVLTVTVPKEEIKKPDVKAIDISG

SEQ ID NO: 830 - protein, 363 aa, Zea mays
MGIYLSTPKTEKASEDGENDKLRFGLSSMQGWRATMEDAHAAHPCLDESTSYFGVYDGHGGKAVSKFCAKYLHLQVLKSEAYLAGDLGTSLQKSFLRMDEMMRGQRGWRELAILGDKIEKLSGMLEGFIWSPRSSEANDRVDDWAFEEGPHSDFTGPNSGSTACVAVVRGNKLVVANAGDSRCVLSRKGQAHNLSKDHKPELEAEKDRILKAGGFIQVGRVNGSLNLARAIGDMEFKQNKYLPAEKQIVTADPDITSVELCDDDEFLVIACDGIWDCMSSQQLVDFIHQQLKTENKLSAVCERVFDRCLAPTAGGEGCDNMTMILIQFKKPSSSPDASSVMNQPQSSAQSSEADRSSETVESK

SEQ ID NO: 831 - protein, 296 aa, Glycine max
MAKPHSGTPAVAPKPAWVLPYRTENLREVYTLSRKLGQGQFGTTFLCTHKGTGRTYACKSIPKRKLLCKEDYDDVWREIQIMHHLSEQPNVVRIHGTYEDAASVHLVMELCEGGELFDRIVRKGHYSERQAAKLIKTIVEVVEACHSLGVMHRDLKPENFLFDTVEEDAKLKTTDFGLSVFYKPGETFCDVVGSPYYVAPEVLRKHYGPEADVWSAGVILYILLSGVPPFWAETEQGIFRQILLGRLDFQSEPWPSISDSAKDLIRKMLDRNPKTRVTAHQVLCHPWIVDDNIAPD

SEQ ID NO: 832 - protein, 334 aa, Zea mays
MGNCCVTPKAADDAGGGKKPKEPKQKKGKKPNPFSIDYNRSGQASAPKLVVLRDPTGRDIAARYELGAELGRGEFGVTYLCTDRASGEALACKSISKKKLRTAVDLEDVRREVEIMRHLPKHPNVVTLRDTYEDDNAVHLVMELCEGGELFDRIVARGHYTERAAALVLRTIVEVVQMCHKHGVMHRDLKPENFLFANKKESAALKAIDFGLSVFFTPGERFSEIVGSPYYMAPEVLKRNYGPEVDVWSAGVILYILLCGVPPFWAETEQGVAQAIIRSVIDFKRDPWPRVSDNAKDLVREMLNPDPKRRLTAHQVLGHPWLQNIKKAPNVNLG

SEQ ID NO: 833 - protein, 148 aa, Oryza sativa
MSSPSRRSSSPESNTSGGGGGADERKRKRMLSNRESARRSRARKQQRLEELIAEAARLQAENARVEAQIGAYAGELSKVDGENAVLRARHGELAGRLQALGSVLEILQVAGAPVDIPEIPDDPLLRPWQPPFAAQPIVATAMADAFQF

SEQ ID NO: 834 - protein, 508 aa, Oryza sativa
MDGNAKGGGHSEALKNYNLGRTLGIGSFGKVKIAEHKLTGHRVAIKILNRRQMRNMEMEEKAKREIKILRLFIHPHIIRLYEVIYTPTDIYVVMEYCKFGELFDYIVEKGRLQEDEARRIFQQIISGVEYCHRNMVVHRDLKPENLLLDSKYNVKLADFGLSNVMHDGHFLKTSCGSPNYAAPEVISGKLYAGPEVDVWSCGVILYALLCGTLPFDDENIPNLFKKIKGGIYTLPSHLSALARDLIPRMLVVDPMKRITIREIREHQWFQIRLPRYLAVPPPDTAQQAKMIDEDTLQDVVNLGYGKDHVCESLRNRLQNEATVAYYLLLDNRFRATSGYLGADYQESLERNFNRFASSESASSNTRHYLPGSSDPHASGLRPHYPVERKWALGLQSRAQPREIMIEVLKALQDLNVSWKKNGQYNMKCRWSVGTQATDMLDVNNSFVDDSIIMDNGDVNGRLPAVIKFEIQLYKTRDEKYLLDMQRVTGPQLLFLDFCADFLTKLRVL

SEQ ID NO: 835 - protein, 339 aa, Sorghum bicolor
MERYEVIKDIGSGNFGVAKLVRDVRTKELFAVKFIERGMKIDENVQREIMNHRSLRHPNIVKFKEVVLTPTHLAIVMEYAAGGELFERICKAGRFSEDEARFFFQQLISGVSYCHSMQICHRDLKLENTLLDGSIAPRLKIFDFGYSKSSVLHSQPKSTVGTPAYIAPEVLARKEYDGKVADVWSCGVTLYVMLVGAYPFEDPDEPKNFRKTLTRILSVQYAVPDFVRVSMECRHLLSRIFVAIPEQRITIPEIKNHPWFLKNLPIEMTDEYQMNLQLVDMNGPSQSLEEIMTIIQEARKPGDGLKHSGQLPGLGSMELDDIDVDDIDVEDSGDFVCAL

SEQ ID NO: 836 - protein, 230 aa, Arabidopsis thaliana
MGRGKIEIKRIENSTNRQVTFCKRRNGLLKKAYELSVLCDAEVALIVFSTRGRLYEYANNNIRSTIERYKKACSDSTNTSTVQEINAAYYQQESAKLRQQIQTIQNSNRNLMGDSLSSLSVKELKQVENRLEKAISRIRSKKHELLLVEIENAQKREIELDNENIYLRTKVAEVERYQQHHHQMVSGSEINAIEALASRNYFAHSIMTAGSGSGNGGSYSDPDKKILHHG

SEQ ID NO: 837 - protein, 268 aa, Zea mays
MGRGKIEIKRIENTTSRQVTFCKRRNGLLKKAYELSILCDAEIALIVFSTRGRLYEYSSNSVRSTIERYKKASASTSGTAPVTDVNSLQYFQQEAAKLRQQIQTLQNSNRHLMGESTGNMTAKELKGLESRLERGIGRIRSKKHELLLAEIEYMQKREADLHNENMFLRAKVAEAERALEQEAAEDQTMMVPAAVRGATTELKALPASFDASGYYQYQQHQHVVAAASAASSSQYAEQPQGQQEYHHQTALHLGYHVKIDSAADKGFL

SEQ ID NO: 838 - protein, 236 aa, Oryza sativa
MGRGKIEIKRIENTTNRQVTFCKRRNGLLKKAYELSVLCDAEVALIVFSSRGRLYEYANNSVKSTVERYKKANSDTSNSGTVAEVNAQHYQQESSKLRQQISSLQNANSRTIVGDSINTMSLRDLKQVENRLEKGIAKIRARKNELLYAEVEYMQKREVELQNDNMYLRSKVVENERGQQPLNMMGAASTSEYDHMVNNPYDSRNFLQVNIMQQPQHYAHQLQPTTLQLGQQPAFN

SEQ ID NO: 839 - protein, 173 aa, Arabidopsis thaliana
MGRGKIEIKRIENSTNRQVTFCKRRNGLLKKAYELSVLCDAEVALIVFSTRGRLYEYANNNIRSTIERYKKACSDSTNTSTVQEINAAYYQQESAKLRQQIQTIQNSNRNLMGDSLSSLSVKELKQVENRLEKAISRIRSKKHELLLVEIENAQKREIELDNENIYLRTKVAE

SEQ ID NO: 840 - protein, 176 aa, Glycine max
MGRGKIEIKRIENTTNRQVTFCKRRNGLLKKAYELSVLCDAEVALIVFSSRGRLYEYSNNNIRSTIERYKKACSDHSSASTTTEINAQYYQQESAKLRQQIQMLQNSNRHLMGDALSTLTVKELKQLENRLERGITRIRSKKHEMLLAEIEYFQKREIELENENLCLRTKITDVER

SEQ ID NO: 841 - protein, 72 aa, Glycine max
MGRGKIEIKRIENTTNRQVTFCKRRNGLLKKAYELSVLCDAEVALIVFSSRGRLYEYSNNNIRSTIERYKKA

SEQ ID NO: 842 - protein, 177 aa, Oryza sativa
MGRGKIEIKRIENTTNRQVTFCKRRNGLLKKAYELSVLCDAEVALIVFSSRGRLYEYANNSVKSTVERYKKANSDTSNSGTVAEVNAQHYQQESSKLRQQISSLQNANSRTIVGDSINTMSLRDLKQVENRLEKGIAKIRARKNELLYAEVEYMQKREVELQNDNMYLRSKVVENER

SEQ ID NO: 843 - protein, 372 aa, Zea mays
MLEEYKPCAAMVVTQCIYAALALLSKAAFTGGMSPLVFVVYRQAVATIVLVPVVIAANRKKMKEMTTGLGLTGFSLVFVASLVGATVNQCMYYQGVNLGSSSMATAMTNLIPAITFVMAASVGLERVEARRPRSLAKIFGTAVCVSGAMAMAFFKGPKLLGDGPNALQLLLHAGGGRWVAGALFLVGSSSCWSLWLILQVPICKSYVEPLALSAWMCVLSTLQSALLVSFLLPDPSAWRIHSLFELSCCVFSGVFGSGVTFYLQSWCISVRGPLYSAMFNPLCTVITTVFAAAVLREELHVGSLLGAIAVIAGLYVVLWGKAGDANKGGVEPEHHSDDLEKTSSARSDHNSTADVGSGIAEPLLAGGDPTEK

SEQ ID NO: 844 - protein, 554 aa, Zea mays
MRPRGTSLQQSSASALGDGDAALPKKKRNRPGNPKPDAEVIALSPRTLLATNRFVCEVCSKGFQRDQNLQLHLRGHNMPWKLKQKDPKDARRRVYLCPEPTCVHHSPSRALGDLTGIKKHYCRKHGEKKFRCDRCSKRYAVESDWKAHGKTCGAREYRCHCNALFSRKDNFITHRATCDAAVRGTAQKPPLVAGLYVGSGSDDRLGLSDAAAQMHGFADQGQSSSAAEASQFDHVMPSYSGSSMFRSQASDFSLSFFLGGGTPLIEQDLSDNGGDLSEGSQGPLLHGKAPLHGVMTHLPEQQYQPNSGNANVNLLDIGFFSGNSGGTSGSQGPLLHGKEPFHSHDLTQLPEQQHQPGSSNARVNLPNLGVFSGNSGGWPGSSHQDARLVIQDQLNGGSSSNTEHGNGMASIGSHFGGGFVPSLHNSSPSAGLSATALLMKAAQMGSTTSSTTHNPNGPSALLRAAGFAGTASVRETSSRAAEEEKSHEAYFHDLIMNSLPLTGGGTGGLSGLAGVDDGNVSTRDFLGVGRDDATAPQGLHGMGAPNPTQMKWYM

SEQ ID NO: 845 - protein, 391 aa, Zea mays
MADQQQPQQQPQEMDVDRTGGLELPPGFRFHPSDFEIVNDYLTKKVHDRDYSCIAIADADLNKTEPWDLPKVAKMGEKEWYFFYQKDRKYPTGLRANRATEAGYWKATGKDKEVYDPLAAEGLLLVGMKKTLVFYKGRAPRGDKTNWVMHEYRLEGSGRLPASPASASGSATNIAAAMMKASASACKDEWVVCRVFNKTTGIKKTAAPAYQVAMAGAEMDQNQNNIPAIPIPMPLQLPLPVPMQMQFPILPDFAMDPVAPYYPNPNAGAGMMPPMALAGMGGAGGLQINGALFGNPVPAPLPMNFYHHQMGMGAAAGQVDMGAAAGQMDMGAAGAGAGGFDVAAPESRPSSMVSQKDEQANAAEISSMMSVTGPGSATTTIEMDGIWKYKY

SEQ ID NO: 846 - protein, 279 aa, Zea mays
MSGLYSQGFSPARNLSPQIRSNPDADSQYLAELLAEHHKLGPFMQVLPVCNKLLSQEIMRVSSIVHNHGFGDFDRHRFRSPSPMSSPNPRANLPSNGFSPWSGLQERLGFPQGTSMDWQGAPPSPSSHVVKKILRLEVPVDSYPNFNFVGRILGPRGNSLKRVEASTGCRVFIRGKGSIKDSGKEDKLRGKPGYEHLSDPLHILIEAEFPASIIDARLRQAQEIIEELLKPVDESQDLYKRQQLRELAMLNSTLREDSPHPGSVSPFSNGGMKRAKTGQ

SEQ ID NO: 847 - protein, 448 aa, Zea mays
MVLQRFSWPYGGRSATFCGSFTGWRECPMGLVGAVFQVVFDLPPGVYQYRFLVDGVWRCDETKPFVRDEYGLISNEVLVENNVQPVVQPEPSIRGTNMDKGTILKTMPPEPSSQNPSMQIAVIRHVVSGILLHNTIYDVVPLSSKLTVLDTQLPVKQAFKIMHDEGLALVPLWDDRQGTITGMLTASDFVLILRKLQRNIQVIGNEEPISAWKEAKLQFYGGPDGAAMQRRPLIHVKDSDNLVDVALTIIRNEISSVPIFKCMADSSGVPFLNLATLQGILKFLCSKLQEEAEGCSLLHNQLLSIPIGTWSPHTGRSSSRQLRTLLLSSPLNTCLDILLQDRVSSIPIVDDNGSLRDVYSLSDIMALAKNDVYARIELEQVTVQNALDVQYQVHGRRQCHTCLQTSTLLEVLEGLSIPGVRRLVVIEQSTRFVEGIISLRDVFTFLLG

SEQ ID NO: 848 - protein, 506 aa, Zea mays
MVAMAAPGRVALLAAALLFGAFFPSAFATSSYPARLAGRLLSTTASAVAKQLWSLKSAATKTATASVAGRSMVRYEGGYAVDTVFDGSKLGIEPHAAQINRAGDLLLLDSINSNIYRVQLPLSPYSRPKLLAGSPEGLSGHVDGRLREARMNHPKGFTVDDRGNIYVADAMNMAIRKISDTGVTTIAGGKSIRGGYIDEPSVSDDAKFSTDFEVQYISSTCSLLVIDRGNQAIREIPLNDDDCAYQYEAGFPLGFALLCAAGFFGYMLALLQHRLLGMPSTINKPQAPPRPSIASIPPYQKPLNPYVRQPFIPREETARQEPEEGFFTSAGKLVGGAKSSVAEVFGFKKKSLSNPYHQQQRRANPWPVQESYAIPHDEPPPALDTRAPAPQKNYSSEKIHYVRHGHPYFNSWDGHRLPQQQPDQQLYHQQQQQHLQQHRQCSAGPQTFYEQSCEATNEVVFGAVQEVDSKRRMVEIKAVNYGDTFYEQYGMRYRNNFIGYNNTNNY

SEQ ID NO: 849 - protein, 80 aa, Zea mays
MALSRRMAAPVLVLMLLLVATELGTTKVAEARHCLSQSHRFKGLCMSSNNCANVCQTENFPGGECKAEGATRKCFCKKIC

SEQ ID NO: 850 - protein, 417 aa, Saccharomyces cerevisiae
MAGDNPENKDASMLDVSDAASNTTINGKHSADSTNEASLAYTFSQMNVDNPNELEPQHPLRHKSSLIFNDDDDDEIPPYSNHAENGSGETFDSDDDIDASSSSSIDSNEGDIHDADMTGNTLQKMDYQPSQQPDSLQNQGFQQQQEQQQGTVEGKKGRAMMFPVDITWQQGGNKVYVTGSFTGWRKMIGLVPVPGQPGLMHVKLQLPPGTHRFRFIVDNELRFSDYLPTATDQMGNFVNYMEVSAPPDWGNEPQQHLAEKKANHVDDSKLSKRPMSARSRIALEIEKEPDDMGDGYTRFHDETPAKPNLEYTQDIPAVFTDPNVMEQYYLTLDQQQNNHQNMAWLTPPQLPPHLENVILNSYSNAQTDNTSGALPIPNHVILNHLATSSIKHNTLCVASIVRYKQKYVTQILYTPLQ

SEQ ID NO: 851 - protein, 218 aa, Arabidopsis thaliana
MDSGKRPLSPESMAGNREEKKELCCCSTLSESDVSDFVSELTGQPIPSSIDDQSSSLTLQEKSNSRQRNYRGVRQRPWGKWAAEIRDPNKAARVWLGTFDTAEEAALAYDKAAFEFRGHKAKLNFPEHIRVNPTQLYPSPATSHDRIIVTPPSPPPPIAPDILLDQYGHFQSRSSDSSANLSMNMLSSSSSSLNHQGLRPNLEDGENVKNISIHKRRK

SEQ ID NO: 852 - protein, 371 aa, Arabidopsis thaliana
MGRAPCCEKVGIKRGRWTAEEDQILSNYIQSNGEGSWRSLPKNAGLKRCGKSCRLRWINYLRSDLKRGNITPEEEELVVKLHSTLGNRWSLIAGHLPGRTDNEIKNYWNSHLSRKLHNFIRKPSISQDVSAVIMTNASSAPPPPQAKRRLGRTSRSAMKPKIHRTKTRKTKKTSAPPEPNADVAGADKEALMVESSGAEAELGRPCDYYGDDCNKNLMSINGDNGVLTFDDDIIDLLLDESDPGHLYTNTTCGGDGELHNIRDSEGARGFSDTWNQGNLDCLLQSCPSVESFLNYDHQVNDASTDEFIDWDCVWQEGSDNNLWHEKENPDSMVSWLLDGDDEATIGNSNCENFGEPLDHDDESALVAWLLS

SEQ ID NO: 853 - protein, 226 aa, Arabidopsis thaliana
MEKRGGGSSGGSGSSAEAEVRKGPWTMEEDLILINYIANHGDGVWNSLAKSAGLKRTGKSCRLRWLNYLRPDVRRGNITPEEQLIIMELHAKWGNRWSKIAKHLPGRTDNEIKNFWRTRIQKYIKQSDVTTTSSVGSHHSSEINDQAASTSSHNVFCTQDQAMETYSPTPTSYQHTNMEFNYGNYSAAAVTATVDYPVPMTVDDQTGENYWGMDDIWSSMHLLNGN

SEQ ID NO: 854 - protein, 409 aa, Arabidopsis thaliana
MEARPVHRSGSRDLTRTSSIPSTQKPSPVEDSFMRSDNNSQLMSRPLGQTYHLLSSSNGGAVGHICSSSSSGFATNLHYSTMVSHEKQQHYTGSSSNNAVQTPSNNDSAWCHDSLPGGFLDFHETNPAIQNNCQIEDGGIAAAFDDIQKRSDWHEWADHLITDDDPLMSTNWNDLLLETNSNSDSKDQKTLQIPQPQIVQQQPSPSVELRPVSTTSSNSNNGTGKARMRWTPELHEAFVEAVNSLGGSERATPKGVLKIMKVEGLTIYHVKSHLQKYRTARYRPEPSETGSPERKLTPLEHITSLDLKGGIGITEALRLQMEVQKQLHEQLEIQRNLQLRIEEQGKYLQMMFEKQNSGLTKGTASTSDSAAKSEQEDKKTADSKEVPEEETRKCEELESPQPKRPKIDN

SEQ ID NO: 855 - protein, 222 aa, Arabidopsis thaliana
MAKMGLKPDPATTNQTHNNAKEIRYRGVRKRPWGRYAAEIRDPGKKTRVWLGTFDTAEEAARAYDTAARDFRGAKAKTNFPTFLELSDQKVPTGFARSPSQSSTLDCASPPTLVVPSATAGNVPPQLELSLGGGGGGSCYQIPMSRPVYFLDLMGIGNVGRGQPPPVTSAFRSPVVHVATKMACGAQSDSDSSSVVDFEGGMEKRSQLLDLDLNLPPPSEQA

SEQ ID NO: 856 - protein, 159 aa, Arabidopsis thaliana
MESSSSGTTSSTIQTSSGSEESLMEQRKRKRMLSNRESARRSRMKKQKLLDDLTAQVNHLKKENTEIVTSVSITTQHYLTVEAENSVLRAQLDELNHRLQSLNDIIEFLDSSNNNNNNNMGMCSNPLVGLECDDFFVNQMNMSYIMNQPLMASSDALMY

SEQ ID NO: 857 - protein, 409 aa, Arabidopsis thaliana
MASNEMEKSSKEKEPKTPPPSSTAPPSSQEPSSAVSAGMATPDWSGFQAYSPMPPPHGYVASSPQPHPYMWGVQHMMPPYGTPPHPYVAMYPPGGMYAHPSMPPGSYPYSPYAMPSPNGMTEVSGNTTGGTDGDAKQSEVKEKLPIKRSRGSLGSLNMITGKNNEPGKNSGASANGAYSKSGESASDGSSEGSDGNSQNDSGSGLDGKDAEAASENGGSANGPQNGSAGTPILPVSQTVPIMPMTAAGVPGPPTNLNIGMDYWGAPTSAGIPGMHGKVSTPVPGVVAPGSRDGGHSQPWLQDDRELKRQRRKQSNRESARRSRLRKQAECDELAQRAEVLNEENTNLRAEINKLKSQCEELTTENTSLKDQLSLFPPLEGISMDNDHQEPDTNQTGAAERKVDSYKDST

SEQ ID NO: 858 - protein, 330 aa, Arabidopsis thaliana
MADTSPRTDVSTDDDTDHPDLGSEGALVNTAASDSSDRSKGKMDQKTLRRLAQNREAARKSRLRKKAYVQQLENSRLKLTQLEQELQRARQQGVFISGTGDQAHSTGGNGALAFDAEHSRWLEEKNKQMNELRSALNAHAGDSELRIIVDGVMAHYEELFRIKSNAAKNDVFHLLSGMWKTPAERCFLWLGGFRSSELLKLLANQLEPMTERQLMGINNLQQTSQQAEDALSQGMESLQQSLADTLSSGTLGSSSSGNVASYMGQMAMAMGKLGTLEGFIRQADNLRLQTLQQMIRVLTTRQSARALLAIHDYFSRLRALSSLWLARPRE

SEQ ID NO: 859 - protein, 240 aa, Arabidopsis thaliana
MDVYGMSSPDLLRIDDLLDFSNDEIFSSSSTVTSSAASSAASSENPFSFPSSTYTSPTLLTDFTHDLCVPSDDAAHLEWLSRFVDDSFSDFPANPLTMTVRPEISFTGKPRSRRSRAPAPSVAGTWAPMSESELCHSVAKPKPKKVYNAESVTADGARRCTHCASEKTPQWRTGPLGPKTLCNACGVRYKSGRLVPEYRPASSPTFVLTQHSNSHRKVMELRRQKEQQESCVRIPPFQPQ

SEQ ID NO: 860 - protein, 382 aa, Arabidopsis thaliana
MGNSSEEPKPPTKSDKPSSPPVDQTNVHVYPDWAAMQAYYGPRVAMPPYYNSAMAASGHPPPPYMWNPQHMMSPYGAPYAAVYPHGGGVYAHPGIPMGSLPQGQKDPPLTTPGTLLSIDTPTKSTGNTDNGLMKKLKEFDGLAMSLGNGNPENGADEHKRSRNSSETDGSTDGSDGNTTGADEPKLKRSREGTPTKDGKQLVQASSFHSVSPSSGDTGVKLIQGSGAILSPGVSANSNPFMSQSLAMVPPETWLQNERELKRERRKQSNRESARRSRLRKQAETEELARKVEALTAENMALRSELNQLNEKSDKLRGANATLLDKLKCSEPEKRVPANMLSRVKNSGAGDKNKNQGDNDSNSTSKLHQLLDTKPRAKAVAAG

SEQ ID NO: 861 - protein, 264 aa, Arabidopsis thaliana
MDVYGLSSPDLLRIDDLLDFSNEDIFSASSSGGSTAATSSSSFPPPQNPSFHHHHLPSSADHHSFLHDICVPSDDAAHLEWLSQFVDDSFADFPANPLGGTMTSVKTETSFPGKPRSKRSRAPAPFAGTWSPMPLESEHQQLHSAAKFKPKKEQSGGGGGGGGRHQSSSSETTEGGGMRRCTHCASEKTPQWRTGPLGPKTLCNACGVRFKSGRLVPEYRPASSPTFVLTQHSNSHRKVMELRRQKEVMRQPQQVQLHHHHHPF

SEQ ID NO: 862 - protein, 719 aa, Oryza sativa
MEINSSGEEAVVKVRKPYTITKQRERWTEAEHNRFLEALKLYGRAWQRIEEHVGTKTAVQIRSHAQKFFTKLEKEAINNGTSPGQAHDIDIPPPRPKRKPNSPYPRKSCLSSETSTREVQNDKATISNMTNNSTAQMAGDAALEKLQRKEISEKGSCSEVLNLFREVPSASFSSVNKSSSNHGASRGLEPTKTEVKDVVILERDSISNGAGKDAKDINDQEMERLNGIHISSKPDHSHENCLDTSSQQFKPKSNSVETTYVDWSAAKASHYQMDRNGVTGFQATGTEGSHPDQTSDQMGGASGTMNQCIHPTLPVDPKFDGNAAAQPFPHNYAAFAPMMQCHCNQDAYRSFANMSSTFSSMLVSTLLSNPAIHAAARLAASYWPTVDGNTPDPNQENLSESAQGSHAGSPPNMASIVTATVAAASAWWATQGLLPLFPPPIAFPFVPAPSAPFSTADVQRAQEKDIDCPMDNAQKELQETRKQDNFEAMKVIVSSETDESGKGEVSLHTELKISPADKADTKPAAGAETSDVFGNKKKQDRSSCGSNTPSSSDIEADNAPENQEKANDKAKQASCSNSSAGDNNHRRFRSSASTSDSWKEVSEEGRLAFDALFSRERLPQSFSPPQVEGSKEISKEEEDEVTTVTVDLNKNAAIIDQELDTADEPRASFPNELSNLKLKSRRTGFKPYKRCSVEAKENRVPASDEVGTKRIRLESEAST

SEQ ID NO: 863 - protein, 483 aa, Oryza sativa
MAAPSVAVDNLNPKVLNCEYAVRGEIVIHAQRLQQQLQTQPGSLPFDEILYCNIGNPQSLGQKPVTFFREVIALCDHPCLLEKEETKSLFSADAISRATTILASIPGRATGAYSHSQGIKGLRDAIAAGIASRDGYPANADDIFLTDGASPGVHMMMQLLIRNEKDGILCPIPQYPLYSASIALHGGALVPYYLNESTGWGLEISDLKKQLEDSRLKGIDVRALVVINPGNPTGQVLAEENQRDIVKFCKNEGLVLLADEVYQENIYVDNKKFNSFKKIARSMGYNEDDLPLVSFQSVSKGYYGECGKRGGYMEITGFSAPVREQIYKVASVNLCSNITGQILASLVMNPPKAGDASYASYKAEKDGILQSLARRAKALENAFNSLEGITCNKTEGAMYLFPQLSLPQKAIDAAKAANKAPDAFYALRLLEATGIVVVPGSGFGQVPGTWHIRCTILPQEEKIPAIISRFKAFHEGFMAAYRD

SEQ ID NO: 864 - protein, 482 aa, Zea mays
MAASVTVENLNPKVLKCEYAVRGEIVIHAQRLQQQLQTQPGSLPFDEILYCNIGNPQSLGQQPVTFFREVLALCDHPCLLEKEETKSLFSADAISRAKQILATIPGRATGAYSHSQGIKGLRDAIAAGIMSRDGFPANADDIFITDGASPGVHMMMQLLIRNEKDGILCPIPQYPLYSASIALHGGALVPYYLNEKTGWGLEISDLKTQLENARSKGIDVRALVVINPGNPTGQVLAEDNQYDIVKFCKNEGLVLLADEVYQENIYVDNKKFNSFKKIVRSMGYGEDDLPLVSLQSVSKGYYGECGKRGGYMEITGFSAPVREQIYKIASVNLCSNITGQILASLVMNPPKAGDESYASYKAEKDGILESLARRAKALEDAFNKLEGFSCNKAEGAMYLFPQIHLPQKAIEAAKAAKKAPDAFYALRLLESTGIVVVPGSGFGQVPGTWHIRCTILPQEDKIPAVISRFRAFHEAFLAEYRD

SEQ ID NO: 865 - protein, 479 aa, Zea mays
MARRRPMDYEELNEKVKKAQYAVRGELYLRASELQKEGKKIIFTNVGNPHALGQKPLTFPRQVVALCQAPFLLDDPNVGLMFPPDAIVRAKRYLAMAPGGLGAYSDARGIPGIRKEVADFIHKRDGYPSDPELIYLTDGASKGVMQMLNAIIRNERDGILVPVPQYPLYSAIISLFGGSLVPYYLEEEANWNLDFANIRQAVAEARSKGITVRATVIINPGNPTGQCLSEANIRELVRYCYHENLVLLADEVYQQNVYQDERPFISARKVMFDMGPPISREVQLVSFHTVSKGYWGECGQRGGYFEMTNLPPKTVDEIYKVASIVLSPNVPGQIFMGVMVNPPKPGDISYPKFTAESKSILESLRRRARMMTDGFNSCRNVVCNFTEGAMYSFPQIQLPARAIEAAKRAGKAADVFYCLKLLEATGISTVPGSGFGQKEGVFHLRTTILPAEEDFPTIMSSFKKFNDSFMEQYEGYSRM

SEQ ID NO: 866 - protein, 527 aa, Saccharomyces cerevisiae
MSTTAAPHAKNGYATATGAGAAAATATASSTHAAAAAAAAANHSTQESGFDYEGLIDSELQKKRLDKSYRYFNNINRLAKEFPLAHRQREADKVTVWCSNDYLALSKHPEVLDAMHKTIDKYGCGAGGTRNIAGHNIPTLNLEAELATLHKKEGALVFSSCYVANDAVLSLLGQKMKDLVIFSDELNHASMIVGIKHANVKKHIFKHNDLNELEQLLQSYPKSVPKLIAFESVYSMAGSVADIEKICDLADKYGALTFLDEVHAVGLYGPHGAGVAEHCDFESHRASGIATPKTNDKGGAKTVMDRVDMITGTLGKSFGSVGGYVAASRKLIDWFRSFAPGFIFTTTLPPSVMAGATAAIRYQRCHIDLRTSQQKHTMYVKKAFHELGIPVIPNPSHIVPVLIGNADLAKQASDILINKHQIYVQAINFPTVARGTERLRITPTPGHTNDLSDILINAVDDVFNELQLPRVRDWESQGGLLGVGESGFVEESNLWTSSQLSLTNDDLNPNVRDPIVKQLEVSSGIKQ

SEQ ID NO: 867 - protein, 245 aa, Zea mays
MDNQPLPYSTGQPPAPGGAPVAGMPGAAGLPPVPHHHLLQQQQAQLQAFWAYQRQEAERASASDFKNHQLPLARIKKIMKADEDVRMISAEAPVLFAKACELFILELTIRSWLHAEENKRRTLQRNDVAAAIARTDVFDFLVDIVPREEAKEEPGSALGFAAPGTGVVGAGAPGGAPAAGMPYYYPPMGQPAPMMPAWHVPAWDPAWQQGAADVDQSGSFSEEGQGFGAGHGGAASFPPAPPTSE

SEQ ID NO: 868 - protein, 248 aa, Zea mays
MEPSPQPMGVAAGGSQVYPASAYPPAATVAPASVVSAGLQSGQPFPANPGHMSAQHQIVYQQAQQFHQQLQQQQQQQLQQFWVERMTEIEATTDFKNHNLPLARIKKIMKADEDVRMISAEAPVVFAKACEIFILELTLRSWMHTEENKRRTLQKNDIAAAITRTDIYDFLVDIVPRDEMKEDGIGLPRAGLPPMGAPADAYPYYYMPQQQVPGSGMVYGAQQGHPVTYLWQEPQQQQEQAPEEQQSA

SEQ ID NO: 869 - protein, 260 aa, Glycine max
MDHQGHSQNPSMGVVGSGAQLAYGSNPYQPGQITGPPGSVVTSVGTIQSTGQPAGAQLGQHQLAYQHIHQQQQHQLQQQLQQFWSSQYQEIEKVTDFKNHSLPLARIKKIMKADEDVRMISAEAPVIFARACEMFILELTLRSWNHTEENKRRTLQKNDIAAAITRTDIFDFLVDIVPREDLKDEVLASIPRGTMPVAGPADALPYCYMPPQHPSQVGAAGVIMGKPVMDPNMYAQQSHPYMAPQMWPQPPDQRQSSPEH

SEQ ID NO: 870 - protein, 286 aa, Zea mays
MDMDPRFNVDWSANEIEMVRSLIACHGASNSTNDDIVDELQAMFPGKDKRQVTDLYVELVVEMINSGAELSSNQLLLNSGGVHSRTMDGYLADEMKAKRMLLEEQRRRKLVAVPRQDNQQRARRFWTLEEHRNFLRGLRVYGRGNWKNISKDFVTTKTPVQVSSHAQKYFRRQESTTRKQRYSINDVGLYDAEPWEEQQQQQQNSSLPAFTSTNNNAYYNPYCYAFGGGQQQLASSPFQCHASQASSSSQTAVTWAAGGQQPPICSSAAPPMMEGGGAEMSWTTYY

SEQ ID NO: 871 - protein, 525 aa, Zea mays
MVRGIILLLLVTPLAISMALPSLSTRIEGSVIGERSNLFSQLHSDNSSPTENKLQPGEKSFASEAYAVNWNEPPDQQSQDSLEQLEPYRVIWKQPVQGEKSFVSEAYPAKWNKPPSPSKQSQDSFEPEAYRVKWNKSPPPHQQSQDSFESEAYRVKWNKSPPPHQQSQDSFEPEAYRVKWNKSPPPHQQSQDSLEQEAYRVKWNKSPPPQQQTQDSFEQEAYRVKWNKSPPPHQQSQDSFEPEAYRVKWNKPPPPHQQSQDSFEPKAYWVGWKKHAQGATDVADETTPARGHGLHVATGMLFTRKSLPPGTALPEGTKFCGHGFLDPERFELRADADAIPFSYSQLDTILRMFRIPRGSKKAEQVAATLRTCEAESPEAHACATSEQAAADFAASSLGVRASKLVALVTTVHGGKDATRYVVAPNGITRIGKAAGAAAVVPCHPMPYPYMVHYCHQPADVEALRVELTGLGDGGVTTAIAMCHANTMNWDDRYFQMLNVTRGEEICHFMPRNYVLWLPAAELLGN

SEQ ID NO: 872 - protein, 235 aa, Zea mays
MERGDCQFTVVPPRQYDEAQFMHQLMVAGDQQDPAGAGRGAAAAGGERKRRFTEEQVRSLETTFHARRAKLEPREKAELARELGLQPRQVAIWFQNKRARWRSKQLEHDYAALRAQFDAMHARVESLRQEKIALAAQVDELRGRLNERQDQSGSCEVNDAEAAADDKRNNSTSSLVQDDGATPPPAAVDASEDSAATGEYYDHVAYEYDGLRDPFVCATPDLWDTWPLLEWNAVA

SEQ ID NO: 873 - protein, 525 aa, Zea mays
MVSAPPAVGTAMPSLDFDTSVFNKEKVSLAGHDEYIVRGGRNLFPLLPEAFKGVKQIGVIGWGSQGPAQAQNLRDSLAEAKSDIVVKIGLRKGSKSFEEARAAGFTEESGTLGDIWETVSGSDLVLLLISDAAQADNYEKIFSHMKPNSILGLSHGFLLGHLQSLGLDFPKNISVIAVCPKGMGPSVRRLYVQGKEVNGAGINSSFAVHQDVDGRATDVALAWSVALGSPFTFATTLEQEYKSDIFGERGILLGAVHGIVEALFRRYTEQGMDEESAYKNTVEGITGIISKTISKKGMLEVYNSLSEEGKKEFNKAYSASFYPCMDILYECYEDVASGSEIRSVVLAGRRFYEKEGLPAFPMGNIDQTRMWKVGEKVRSTRPEGDLGPLHAFTAGVYIALMMAQIEILRKKGHSYSEIINESVIESVDSLNPFMHARGVAFMVDNCSTTARLGSRKWAPRFDYILTQQAFVAVDKDAPINQDLISNFLSDPVHGAIEVCAELRPTVDISVPANADFVRPELRQSS

SEQ ID NO: 874 - protein, 409 aa, Zea mays
MASQGSSVFAALEQAPEDPILGVTVAYNKDPSPMKVNLGVGAYRTEEGKPLVLNVVRRAEQMLINNPSRVKEYLPITGLAEFNKLSAKLIFGADSPAIQENRVATVQCLSGTGSLRVGGEFLARHYHERTIYIPQPTWGNHPKVFTLSGLNVRSYRYYDPATCSLHFEGLMEDLGSAPSGSIVLLHACAHNPTGVDPTIEQWEQIRQLMRSKSLLPFFDSAYQGFASGSLDKDAQSVRMFVADGGELLMAQSYAKNMGLYGERVGALSIVCRSADVAVRVESQLKLVIRPMYSNPPLHGASIVATILRDSEMFNEWTLELKAMADRIINMRQQLFNALKSRGTPGDWSHIIKQIGMFTFTGLNSEQVAFMRQEYHIYMTSDGRISMAGLSMRTVPHLADAIHAAVTQLK

SEQ ID NO: 875 - protein, 241 aa, Zea mays
MGSKASFRVTLLLLLLAAAWGPAAQADDAGIAELPDHRAITLKEQVSSTKIPVRLKSGSPLCSACENFTGKAVSYISEKQTQDKVMGFLHDACSQSFSFEQKCDELMDSYATLLFAKITEIKPEAFCKQYGLCRGTALFSGVTSDSTCVFCHHLLDEVMSKLKDPDAEFEIIQILIKECNKIEGHVQQCKRLVLQYIPLILVNGEKFLEKNDVCALVQACPATHKKTFSSALKEALLLSNA

SEQ ID NO: 876 - protein, 184 aa, Zea mays
MSFRSMVRDIRESFGNISRRNFEVRIHHRGKSLGSSGDLQDRPAEVQQSRWASLPPELLCDVMKRLEEDDSSWPDRKDVVSCASVCTTWRDMCKDIVRSPEHCAKLTFPVSLKQPGPRDGVIQCFIKRDKSKLTYRLYLSLSSGVLDENGKFLLAAKRSRRMAHTEYAIFMDYGELKVRKCLLD

SEQ ID NO: 877 - protein, 350 aa, Zea mays
MATPRKPIKLTLPSHETTIGKFLTHSGTFTDGDLRVNKDGLRIVSRREGGEAPPIEPLDSQLSLDDLDVIKVIGKGSSGNVQLVRHKFTGQFFALKVIQLNIDESIRKQIAKELKINLSTQCQYVVVFYQCFYFNGAISIVLEYMDGGSLADFLKTVKTIPEAYLAAICTQMLKGLIYLHNEKRVIHRDLKPSNILINHRGEVKISDFGVSAIISSSSSQRDTFIGTRNYMAPERIDGKKHGSMSDIWSLGLVILECATGIFPFPPCESFYELLVAVVDQPPPSAPPDQFSPEFCGFISACLQKDANDRSSAQALLDHPFLSMYDDLHVDLASYFTTAGSPLATFNSRQL

SEQ ID NO: 878 - protein, 422 aa, Zea mays
MIRPGSKDSQNYDNNNQRVHPQPIDDNMNQNGDSMDTVIGRIFNNISSLKSAYIQLQEAHTPYDPDKIQEADKLVIEELTRLSELKHAYREKHPKPIAASPQDSRLLSEIQEQQNLLKTYEVMVKKFQSQIQSRDTEITHLQQQIDEAKLRKSKLEKKLKQRGLLNRESEESDEEENYFSIELTPSLFTSAVDNAYQSIHDFSKPLINMMKAAGWDLDGAASAIEPGVVYTRRAHKKFAFESYICQRMFSGFQEESFSIKDSNISVSNEAFFHQFLAVRAMDPLDVLSQNPDSVFGKFCRSKYLSLVHQKMEGSFFGNVDQRNYVMSGGHPRTPFYQAFLKLAKSIWLLHRLAHSFDPKAKVFQVKKGSEFSDIHMESVVKDIILEDVAERPKVGLMVTPGFLIGTSIIQSRVYLSGAKCAD

SEQ ID NO: 879 - protein, 398 aa, Zea mays
MVAVKQLTGPARPAHTCAAHAHQLLSARYDHRGASQAELPDRISPSNASTFCTSMYSSSAADSSKSCRQAGALPFLPHPPKREQQQQQSSSSPSLLVCTDLGNGGQDEAEAEHPAELKDFLNLSGEASWRGGFHGESSGVAFRFREKVEFQFLSEQLGIAITDHDESPRLDDQEDIYDRPPQTSSCPVLSCSNQEEGLQRAGSPVKAQLSSYRAACNNKPRLRWNLELHELFVKAVNKLGGPEKATPKGVLKLMKVEGLTIYHVKSHLQKYRFAKYLPETKEDMKSSSEDKMPGSNPGRKKILKSLQVAEALRMQMEVQKQLHEQLEVQRQLQVRIEEHAKYLQKILEQQKARNSLSATTSSIQTELSESTKEEKPETQADTSSAQLPNKKNSDTDME

SEQ ID NO: 880 - protein, 582 aa, Zea mays
MARGIILLLLVIPLVVRIEGSVMGERSNSFSQDSNNSSPAENKLQPGEKSFASEAYAVNWNEPPDLQMQDSFERPELYRKQSVQGEKSFASEAYPVKWSISPSLGQQSQESFEPEAYPMKWKEPPPSGQQSQDSFEPEAYRVKWNKSPPPHQQSQDSFEPEAYRVKWNKSPPPLQQSQDSFEPEAYRVKWNKSPPPHQQSQDSFEPEAYRVKWNKSPPPLQQSQDSFEPEAYRVKWNKSPPPLQQSQDSFEPEAYRVKWNKSPPPLQQSQDSFEPEAYRVKWNKSPPPHQQLQDSFEPEAYRVKWNKSPPPLQQSQDSFEPEAYWVGWKQHAQGETDVADGTTPARGHGLHVATGMLFTRKSLLPGTALPEGTRFSGHGFPDPQRFALRADADAIPFSYSQLDAILRMFRIPRGSKKAEQVADTLRACEAESSDAHACATSEQAAADFAASSLGVRASDLVSVVTAVHGGKDATRYVVAPDGVTRIGKAAGAATAVPCHPMPYPYMVHYCHRPTDVEALRVELTGLGDDGATIAIAMCHANTMSWDDRYFQMLNATRGEEICHFMPWNYVLWLPAADLLANN

SEQ ID NO: 881 - protein, 136 aa, Zea mays
MARTKQTARKSTGGKAPRKQLATKAARKSAPTTGGVKKPHRYRPGTVALREIRKYQKSTDLLIRKLPFQRLVREIAQDFKTDLRFQSHAVLALQEAAEAYLVGLFEDTNLCAIHAKRVTIMPKDIQLARRIRGERA

SEQ ID NO: 882 - protein, 492 aa, Zea mays
MASGGSSRYSSYKAPGLRGALLEAAHVSCLEDRYALGPQLGWGQFGVIRSCSDLVTGEALACKSIAKGRLVSPDDVRGVRLEIDVMARLAGHPNVVGLKAVYEDRDSVHLVMELCAGGELFHRLHERGCFPEREAAALFRHLMEVVAHCHAKGIVHRDLKPENILLVSRSPQSPIKLADFGLATYTQPGRSLSGMVGSPFYIAPEVLSGGYNEAADVWSAGVILYILLSGIPPFWGKTKSKIFDCIRSMELRFPSDPWDRVSDSAKELVTGMLRRDPRLRLTAKQVLEHPWMQEHADPQDSCGQCHETGLQREGAGSCSFSTPLASRSRDVSFDTRGPIAWRGGGEDEATCCSPTFAAVCRSSFSAFITDPAPPPCSASSALGGSGFSFGEPCEPLDGGGGGGFPMPMASMPSFSFFCARDSSEPAEPQPVAASSTPRTARGSTPRGVNGRRNHTIGGGGREHLDVAVESVIRWASCTNFSTAPSLRASLVC

SEQ ID NO: 883 - protein, 148 aa, Zea mays
MAPKAEKKPAEKKPAAEEKAEKTTAGKKPKSEKRLPASKSSGKEGGEKKGKKKAKKSVETYKIYIFKVLKQVHPDIGISSKAMSIMNSFINDIFEKLAGEAAKLARYNKKPTITSREIQTSVRLVLPGELAKHAVSEGTKAVTKFTSN

SEQ ID NO: 884 - protein, 167 aa, Zea mays
MGKQKIVLKLPLDDERKRRKAFKAAVGMNGVTSATMEGDKITVVGDGVDPITLTTILRRSLGYAELLSVSSGDDKKKGDGYGYGSAGGMMYGGGGYGGGKEGKESKESSGGKSSGGGGGYGGHYQAMPSVSYPAAYQQYNAMPPYPAAYSYPAAYPQQEQDPGCSIM

SEQ ID NO: 885 - protein, 416 aa, Zea mays
MEAAVAAALKSPTAARPSWRPAAPGATSLPFDRRRSFAFGSIKGLGRQQLTSRTRRRSSVVRASWSPSESLPPSSSMAPLRMESPAGQLLSQILHTHPHLLPAAAEQQLELLQTDREAEKNKDKESDAGDKLAPTGVDLVLYRRIAQVKEKERRRTLEEILYALVVEKFVEAGVSLVPALSRSIDSSGRVDQWAETVEGRLQRLHSPEAYEMIENHLALILGQRQSDATIAAISKLRVGQVYAASVMYGYFLKRVDQRFQLEKTMKSLPWGSEEEDGALYQVMTTDSMPSAQSSSSHPEMGSWTAAPDFNAGGPSESIKPCRLRSYVMSFDPDTLQRYATVRSKEAFGIIEKHTEALFGKAEIVVTPGGTVGSSKDEHIRISFAGLRRLVLEAVTFGSFLWDVESFVDSSYHFVTS

SEQ ID NO: 886 - protein, 391 aa, Zea mays
MLASAATVKPSTAAAAATCKAAFKPLHLPPLPAAAGLRPLSLSVSARPLYRQEHVLASVAVAAAGRNERATSPAPPSATADGARPLEVAAPAETGRRAKIGVYFATWWALNVIFNIYNKKVLNAFPYPWLTSTLSLAAGSAIMLASWATRIAEAPQTDLDFWKALTPVAIAHTIGHVAATVSMAKVAVSFTHIIKSGEPAFSVLVSRFFLGEHFPAPVYFSLLPIIGGCALAAVTELNFNMVGFMGAMISNLAFVVRTIFSKKGMKGKSVSGMNYYACLSIMSLVILLPFAVAMEGPKVWAAGWQTAVAEIGPNFVWWVAAQSVFYHLYNQVSYMSLDEISPLTFSIGNTMKRISVIVASIIIFQTPVQPINALGAAIAILGTFIYSQAKQ

SEQ ID NO: 887 - protein, 206 aa, Zea mays
MPHLAATPPTSSAAAVPAAGRIAFRRPWNTPQPEALRLRLRLRARGVRREDGGGVRTEEQEQTAPRTFYDLLGISADGSPDDVRASYRRLALKYHPDVSPPGAAAENTRRFIEVQEAYETLSDPSRRASYDRALARGVCRLAFSGRRSQSHHAYYHYQEQEEGSGWRRSWEDQIAELKRRSVAKDSEENLSWGARMRRRAEASAAE

SEQ ID NO: 888 - protein, 360 aa, Zea mays
MDAGDDEPPVLLDRAARASRGKRITKLLEDEVEQDEAFWNQEALKDEENDDNYVEEPDAGDEFDSDFGEDESETDDEPEKEVRERLPIKKRLMFPGKTLRKTSVKKKKATPKPEDGTKADKSADKPSSSTQADIPDELEAEKAIRKSTRTSVIVRQAEREAIRAEKEATAKPIKRKKEGEEKRMTQEEMLLEAAETEIMNMRNLERVLAREEEVKKKAVVHKDTYEGPTVRFFSRDGESRLEFINGASFGSELCTTSSPYPEKPVCVVTGLPAKYRDPKTGLPYATMEAFKIIRESFLKEEADRKRPNMSNMGELFESITGGHLMPKKRRVEIRSPNMLGGSRHGGRTWRIPAFDMVDED

SEQ ID NO: 889 - protein, 296 aa, Glycine max
MKKRSSSSSSSSVFEANGVEEPQQPSSCAAAALDELHKEKNENGEETLVPSNPYPNLDDGFYEIETIRRKRLRKGQLQYLIKWRGWPETANTWEPLENLQSVPDLVDAFEDSLKSGKHQKRKRKHVDVLQLTLLKKRSERSTTSYSLRHFPPLTPTNANDYDPKLSELKAPTHTGVQLDNLAIHFQQPIPSRGAKRRKSASSVKRFKRDTDAAALQPISAPINMPDANTACNIVKIIKPIGYSASLSDNMHDVLVTFMAMRSDGTEVMVDNRYLKAYNPLLLINFYEMHPRYTPTP

SEQ ID NO: 890 - protein, 464 aa, Glycine max
MKGGGGKRKASTSEAPNDVVVVVAAASAPSDDADLGVGDVGGVKVQNFEGNEGTQLRNTEEQEEEPHHVEGDEGGEDEEDYAEGEEEYEEENGGAVAGGQQGFPALGENFFEVEAIRRKRLRKGEVQYLIKWNGWPETANTWEPLENLESVPDVVEAFEESLKSGKHRKRKRKHVVHHTQPKKRLERSTTPYSLRRFSTSTAENHTQSAPPLNDPSLPDIPAFPHTVLFSDDVGNGAEGSSLRKATPSNANRSANGSEQNIKRNEENDYDPVLSELKAMTSNGNDADRLAIRIPEAKGSGPSGSNGQMDAKSKGACMETSESDRCRGSKRRKCGSVKRFKKELYANEPANAENPVSMPVGTAEPERTRDAGSGGNTNHARPASNIVNIVKPVGYSASVASGMQDVLVTFVASKSDGTEVMVDNKYLKAFNPLLVVPYTFTLLHLIIGCIIFLVPHLLRISVFSP

SEQ ID NO: 891 - protein, 237 aa, Zea mays
MAGADVDVGTELRLGLPGGGADAAKAAKRGFEDTIDLKLKLPTAGMEEAAAAAAAKPEPAAEKAKRPAEAPAADAEKPPAPKAQAVGWPPVRSYRRNVMTVQSVKSKKEEEPEKQQSAANAGGNGSAFVKVSMDGAPYLRKVDLKMYNSYTELSVALKKMFSTFTTSGNNMNEGKLVDPVSGADVVTTYEDKDGDWMLVGDVPWEMFVESCRRLRIMKSSEAIGLAPRTKDKCKNRS

SEQ ID NO: 892 - protein, 553 aa, Glycine max
MTTSFSDLLASPTDNNKPPHGGGGGLSERTGSGVPKFKSTPPPSLPLSPPPISPSSYFSIPPGLSPAELLDSPVLLNSSNILPSPTTGAFVARSFNWKSSSGGNQRIVKEEDKGFSNFSFQTQQGPPASSTATYQSSNVTVQTQQPWSYQETTKQDNFSSGKSMMKTEKSSSMQSFSPEIASVQNNHSNGFQSDYGNYPPQSQTLSRRSDDGYNWRKYGQKQVKGSENPRSYYKCTYPNCPTKKKVERSLDGQITEIVYKGTHNHPKPQNTRRNSSNSSSLAIPHSNPISAEIPDQSYATHGSGQMDSAATPENSSISIGDDDFEQSSQKCKSGGDEYDEDEPDAKRWKIEGENEGMSAPGSRTVREPRVVVQTTSDIDILDDGYRWRKYGQKVVKGNPNPRSYYKCTHPGCPVRKHVERASHDLRAVITTYEGKHNHDVPAARGSGSHSVNRPMPNNASNPTNTAATAISPLQVIQHSDNSHQNQRSQAPPEGQSPFTLEMLQSPGSFGFSGFGNPMQSYMNQQQQQLSDNVFSSRAKEEPRDDMFLESLLC

SEQ ID NO: 893 - protein, 452 aa, Glycine max
MVPADFDNHASEKSTQIDGQGKAQAFDSSPLVKNESASPSNELSLSSPVQMDCSGGSARVEGDLDELNPRSNITTGLQASQVDNRGSGLSVAADRVSDDGYNWRKYGQKHVKGSEFPRSYYKCTHPNCEVKKLFERSHDGQITEIIYKGTHDHPKPQPNRRYSAGTIMSVQEERSDKVSLTSRDGNGSYMCGQGSHLAEPDSQPELSPVATNDGDLDGLGVLSNRNNDEVDDDDPFSKRRKMDLGIADITPVVKPIREPRVVVQTLSEVDILDDGYRWRKYGQKVVRGNPNPRSYYKCTNTGCPVRKHVERASHDPKAVITTYEGKHNHDVPTARNSCHDMAGPASASGQTRIRPEESDTISLDLGMGISPAAENTPNSQGRMMLSEFGDSQTHTSNSNFNFVHTTTVPGYFGVLNNNSNPYGSRENPSDGPSLNHSAYPCPQNIGRILMGP

SEQ ID NO: 894 - protein, 195 aa, Glycine max
MSSHALNTNVNALDHFEIPVTTPFQDVSASVPSIAAFCRSSSFRNIFLTENWAELPLKENDTNDMVIYGALRDAAATGWFPANGNEVSNVSVAVKMENEGQNSKTTAARGTRTPPKKGLSYRGVRRRPWGKYAAEIRDTKRNGVRVWLGTYETAEDAALAYDRAAFKMRGSKAKLNFPHLIGSDHEPIKVTLKKH

SEQ ID NO: 895 - protein, 401 aa, Glycine max
MDAISCMDESTTTESLSISLSPTSSSEKAKPSSMITSSEKVSLSPPPSNRLCRVGSGASAVVDPDGGGSGAEVESRKLPSSKYKGVVPQPNGRWGAQIYEKHQRVWLGTFNEEDEAARAYDIAAQRFRGKDAVTNFKPLAGADDDDGESEFLNSHSKPEIVDMLRKHTYNDELEQSKRSRGVVRRRGSAAAGTANSISGACFTKAREQLFEKAVTPSDVGKLNRLVIPKQHAEKHFPLQSSNGVSATTIAAVTATPTAAKGVLLNFEDVGGKVWRFRYSYWNSSQSYVLTKGWSRFVKEKNLKAGDTVCFHRSTGPDKQLYIDWKTRNVVNNEVALFGPVGPVVEPIQMVRLFGVNILKLPGSDTIVGNNNNASGCCNGKRREMELFSLECSKKPKIIGAL

SEQ ID NO: 896 - protein, 717 aa, Saccharomyces cerevisiae
MEQTQTAEGTDLLIGDEKTNDLPFVQLFLEEIGCTQYLDSFIQCNLVTEEEIKYLDKDILIALGVNKIGDRLKILRKSKSFQRDKRIEQVNRLKNLMEKVSSLSTATLSMNSELIPEKHCVIFILNDGSAKKVNVNGCFNADSIKKRLIRRLPHELLATNSNGEVTKMVQDYDVFVLDYTKNVLHLLYDVELVTICHANDRVEKNRLIFVSKDQTPSDKAISTSKKLYLRTLSALSQVGPSSSNLLAQNKGISHNNAEGKLRIDNTEKDRIRQIFNQRPPSEFISTNLAGYFPHTDMKRLQKTMRESFRHSARLSIAQRRPLSAESNNIGDILLKHSNAVDMALLQGLDQTRLSSKLDTTKIPKLAHKRPEDNDAISNQLELLSVESGEEEDHDFFGEDSDIVSLPTKIATPKNWLKGACIGSGSFGSVYLGMNAHTGELMAVKQVEIKNNNIGVPTDNNKQANSDENNEQEEQQEKIEDVGAVSHPKTNQNIHRKMVDALQHEMNLLKELHHENIVTYYGASQEGGNLNIFLEYVPGGSVSSMLNNYGPFEESLITNFTRQILIGVAYLHKKNIIHRDIKGANILIDIKGCVKITDFGISKKLSPLNKKQNKRASLQGSVFWMSPEVVKQTATTAKADIWSTGCVVIEMFTGKHPFPDFSQMQAIFKIGTNTTPEIPSWATSEGKNFLRKAFELDYQYRPSALELLQHPWLDAHII

SEQ ID NO: 897 - protein, 888 aa, Glycine max
MLTWWGKSSSKETKKKANKESFFDTLHRKLRISSKGKVSIRSGGSRRHCNDTISEKGDHSPCGSRSPSPSKVARCQSFIDRPHAQPLPLPGLHPSSVGRVDSEISISSKSRLEKVSKPLSFLTLPTPGCIRCRPNPADLDGDMVTASVFSDCSADSDEPADSHNRSPLAIDCETGTRTAAGSPSSLMLKDQPPAVSQLNSTGVKKPGNILSNHMSSTSPKRRPLRNHVPNLQVPPHGAFYSAPDSSLSSPSRSPLRAFGTDQVLNSAFLAGKPYPEINFVGSGHCSSPGSGHNSGHNSMGGDMSGPLLWQPSRGSPEYSPVPSPRMTSPGPSSRIQSGAVTPIHPKAGGTPTESQTHRLPLPPLSVSNSSLFSHSNSAATSPSMPRSPARADNPNSGSRWKKGKLLGSGSFGHVYLGFNSERGEMCAVKEVTLFSDDPKSMESAKQFMQEIHLLSRLQHPNIVQYYGSETVDNKLYIYLEYVSGGSIHKLLREYGQFGELVIRSYTQQILSGLAYLHAKNTLHRDIKGANILVDPTGRVKLADFGMAKHITGQSCPLSFKGTPYWMAPEVIKNSNGCNLAVDIWSLGCTVLEMATTKPPWFQYEGVAAMFKIGNSKELPTIPDHLSNEGKDFVRKCLQRNPHDRPSASELLDHPFVKNAAPLERPIPAPEALDPVSGITQGAKALAIGQGRNLSSLDSDRLSVHSSRFLKTNPHESEIHIPRNISCPVSPIGSPLLRSRSPQHRNGKMSPSPISSPRTASGASTPLAGGSGAIPFGNHSKQSIYFQEGFGSIPKSSNGVYMNGHSHHDSNVDIFRGMQMGSHISPELVSSENDVLVKQFARHPHAEPYDFQSVLADRVGRQLLGEHVKINPSIDLSPNSSLLSRPNGL

SEQ ID NO: 898 - protein, 318 aa, Glycine max
MNKSGGGEMSKWPFTMSQWQELEHQALIYKYMVAGLPVPPDLVLPIQNSFHSISQTFLHHPSTTMSYCSFYGKKVDPEPGRCRRTDGKKWRCSKEAYPDSKYCERHMHRGRNRSRKPVESQTMTQSSSNVSSLTVTAGSSSSATGNFHNLTTTNAYGNPQGTGSGSDQTHYHMDSIPYGIPSKEYRYFQGPKSEGGEHSFLSKTLGSNKVLHMESQMDNTLMPTSGVASFSTLRSNNNSMLQGDYLQPSFLSSEYASAETVKQEGQFLRPFFDEWPKRRDSWSGLEDEGSNHTQLSISIPMSASNFSTTSSHSPHGEI

SEQ ID NO: 899 - protein, 380 aa, Glycine max
MAEDKEMSTSVINGNDSLTGHIISTTIGGKNGEPKQTISYMAERVVGTGSFGIVFQAKCLETGEAVAIKKVLQDRRYKNRELQLMRVMDHPNVISLKHCFFSTTSTDELFLNLVMEYVPESMYRVLKHYSNANQRMPIIYVKLYMYQIFRGLAYIHTGPKVCHRDLKPQNILVDPLTHQVKLCDFGSAKVLVEGEANISYICSRFYRAPELIFGATEYTSSIDIWSAGCVLAELLLGQPLFPGENAVDQLVHIIKVLGTPTREEVRCMNPNYNDFRFPQIKAHPWHKIFHKKMPPEAIDLASRLLQYSPSLRCTALEACAHPFFDELREPNARLPNGRPFPPLFNFKQELSGASSELVNKLIPDHVKRQMGIQFMHLGGS

SEQ ID NO: 900 - protein, 403 aa, Zea mays
MATALGGEPNPTADAMEVDPPRASADEKHVATIIAGGSDAVTGHIISTTIGGKNGEPKRTISYMAERVVGTGSFGVVFQAKCIETGETVAIKKVLQDKRYKNRELQIMRSIDHCNVISLKHCFFSTTSRDELFLNLVMEFVPESLYRVLKHYKDMKQRMPLIYVKLYMYQIFRGLAYIHTVPGICHRDIKPQNILVDPLSHQVKVCDFGSAKILIKGEANISYICSRYYRAPELIFGATEYTTSIDIWSAGCVLAELLLSQPLFPGESAVDQLVEIIKVLGTPTREEIRCMNPNYTEFKFPQIKACPWHKIFHKRMPPEAIDLVSRLLQYSPNLRCSALEACAHSFFDELRESHARLPNGRPFPPLFNFKQELANAPPELVSRLLPEHARRHSGFGSLFGSGP

SEQ ID NO: 901 - protein, 493 aa, Zea mays
MDPYKHRPSSAFNAPYWTTNSGAPVWNNDSSLTVGARGPILLEDYHLVEKLANFDRERIPERVVHARGASAKGFFEVTHDITHLTCADFLRAPGVQTPVIVRFSTVIHERGSPETLRDPRGFAVKFYTREGNWDLVGNNFPVFFIRDGIKFPDMVHALKPNPRTHIQDNWRILDFFSHHPESLHMFSFLFDDVGIPADYRHMDGSGVHTYTLVSRAGTVTYVKFHWRPTCGVRSLMDDEAVAVGGANHSHATKDLTDAIAAGNFPEWTLYIQTMDPEMEDRLDDLDPLDVTKTWPEDAFPLQPVGRLVLNRNIDNFFAENEQLAFCPGLIVPGIYYSDDKLLQTRIFSYSDTQRHRLGPNYLLLPANAPKCAHHNNHYDGFMNFMHRHEEVDYFPSRYDAARNAPRYPIPTAHIAGRREKTVISKENNFKQPGERYRAMDPARQERFITRWVDALSDPRLTHEIRTIWLSNWSQADRSLGQKLASRLSAKPSM

SEQ ID NO: 902 - protein, 76 aa, Zea mays
MSCNCGSSCGCGSSCKCGKKYPDLEETSTAAQATVVLGVAPEKKAAPEFVEAAAESGEAAHGCSCGGNCKCDPCNC

SEQ ID NO: 903 - protein, 406 aa, Zea mays
MEAPPVPELMDLDAPPPAAADAAAAAPVPPAVSDKKKEGEGGDTVTGHIISTTIGGKNGEPKRTISYMAERVVGTGSFGIVFQAKCLETGETFAIKKVLQDRRYKNRELQLMRAMEHPNVICLKHCFFSTTSRDELFLNLVMEFVPETLYRVLKHYSNANQRMPLIYVKLYMYQLFRGLAYIHNVPGVCHRDVKPQNVLVDPLTHQVKLCDFGSAKVLVPGEPNISYICSRYYRAPELIFGATEYTTSIDIWSAGCVLAELLLGQPLFPGESAVDQLVEIIKVLGTPTREEIRCMNPNYTEFRFPQIKAHPWHKIFHKRMPPEAIDLASRLLQYSPSLRCSALDACAHPFFDELRAPNARLPNGRPFPPLFNFKHELANASPDLINRLVPEHIRRQNGVNFGHIGS

SEQ ID NO: 904 - protein, 691 aa, Zea mays
MAAVAPPPAPAPAPVPAPAPATVPVADQTTDLLQKLSLDSQPKPADATQPAAATAKKQGAAASQPLSVAIPPEPSITPVIQDFTDPNLFYLPAYYYGGYDSSMSEWDDYPRYLNSDGVEIAPAVYSDIYGYGYAPYGAYSPATSPVPTVDGQMFGAQHYQYPTAYFQPPTPVPSTTQSNLQSSKNPEKPAAKADPAKTTNGVPNGTAHSNSGTVPLASSQQNSSLTPDGTYRAPLLGGVPSAGYLDTTYGYDSTGAHFAWYDGSAYANGQQRTATTNHFPSSTFGNGSPARYQNKSTTTPQMGMQNRRPTTTSPAPTYPNRMYPSSRPYTQYGNSIKTGLPYGSNGYDSRIYGRWGLGMDNRYRPRGRNGYYGYGNESQDGTIELNRGPRSGRFKNQKLYGHTVTIAVKGQSLPSGESKDDSAVPDRAQFNRDDFPVQYDAAKFFVIKSYSEDDIHKSVKYNVWASTTNGNKKLDAAYQEAQSKGSACPIFLFFSVNTSGQFVGVAEMTGAVDFEKTLGYWQQDKWNGSFSVKWHIVKDVPNNILKHIILENNENKPVTNSRDTQEIHLEQGLQMLKIFREHVSKTSILDDFAFYESRQKLMQDKRSKQQQVQKQVWDSRTPISVTGSEQQQEAANGKPNPSVPNGVPAEVKAAKASAENGTATPAISYAAKVAQAATEKPVLANGDAKTG

SEQ ID NO: 905 - protein, 366 aa, Zea mays
MAFPQISRRALGLLLVIAAAAAIVSPATADEVVALTEADFEKEVGQDRGALVEFYAPWCGHCKKLAPEYEKLGASFKKAKSVLIAKVDCDEHKSVCSKYGVSGYPTIQWFPKGSLEPKKYEGQRSVEALAEFVNSEAGTNVKIAAIPSSVVVLTSETFDSIVLDETKDVLVEFYAPWCGHCKHLAPIYEKLASVFKQDDGVVIANIDADKHTDLAEKYGVSGFPTLKFFPKGNKAGEDYDGGRDLDDFVKFINEKCGTSRDPKGHLNQEAGLVPSLNPLVKEFLNAADDKRKEVLSKIEEDVAKLSGSAAKHGKIYVTAAKKIIDKGSDYTKKETERLHRMLEKSISPSKADEFIVKKNILSIFSS

SEQ ID NO: 906 - protein, 198 aa, Zea mays
MFSGTQQKCKVCTKTVYPMDQLSTDGVVFHRSCFKCQHCKSTLSLSNYSSFEGVPYCKTHFEQLFKETGSYNKSFQSQSPAKITPEKLAPELTRSPSKAARMFSGTQDKCATCGKTAYPLEKVTVEEKSYHKSCFKCSHGGCAITPSNYAALEGILYCKHHFSQLFKEKGSYNHLIKCASVKRAAEAQPEQPASDSSS

SEQ ID NO: 907 - protein, 319 aa, Zea mays
MLDCVAQRETILPFVLYIQKTLRRRPFLIKNLENVMRKFLQSLEFFEENERKKLAIFTALAFSQKLSGLPPETVFQPLLKDNLVAKGIVLSFITEFFKEYLKENTLDDLIALLKKGKMEDNLLDFFPSAKRSSEALSEHFIKEGLTSLVEYNEKKMFEVKLKEIKSTLTTMINDEAAIPEVIETVKQQVKDAKFPDLEVIRMLWDVLMEAVQWSGKNQQQNSNAALRQVKAWAELLNAFCTSGRLELELIYKVQTQCYEDAKLMKLFPEIIRTLYDQDVLAEDTVLLWFRKGSNQKGRQSFVKALEPFVKWLEEAEEEE

SEQ ID NO: 908 - protein, 333 aa, Glycine max
MSEAPPSQPPPPTANASPPPYWCYHCEKRVSIETLANLPDVVCGECKNGFVESIHTPSRSRSPSASSDDPYFGSQFLQVLRLIAQSARDDDASPPPPPSRSPENDFLRIELGGWDNDEENDNDNNDDEEFEEHEEAEDRSGNEDPHGRDDEDLRRRRRELLRLRIRDLATRTRSMRNRILDWAEILMGLEDNSIEFRLQLPESDRYVGNPEDYVDAAEYEALLHTLAESDGGGRRGAPPASKAAVEALPTVKVASESEAVACAICKDLLGVGDLAKRLPCGHGYHGDCIVPWLSSRNSCPVCRYELPTDDKEYEEERVVNSASSSGGDGSAIA

SEQ ID NO: 909 - protein, 151 aa, Arabidopsis thaliana
MAMELELDDDVFFADISKQLNLLITDEDEQNPISLSSSVSFQGLFRGNYQTSATPYMMYNEQINYNVIRESKGTGVFIPRSSQPRRKHNHHPHQKKQGRFIGSFIPKQQFPHHGHDNNLTTLNNNNQESITFHHASTNPRRTYRDAASLFT

SEQ ID NO: 910 - protein, 223 aa, Zea mays
MAALLARQAAQALRARQSAQLGPTTSAMQGHLRTYMNAGIPKRFKEEEEKEQLAKDIAKDWNAVFERSINTLFLTEVVRGLMLTLKYFFERNVTINYPFEKGPLSPRFRGEHALRRYESGEERCIACKLCEAICPAQAITIEAEEREDGSRRTTRYDIDMTKCIYCGFCQEACPVDAIVEGPNFEFATETHEELLYDKEKLLENGDRWETEIAENLRSESLYR

SEQ ID NO: 911 - protein, 222 aa, Glycine max
MAAILARKSLLALRARQLAVSGQGLHSSQYYGLRLSAHSFSTKREDEEREQLAKDISKDWSSVFERSINTLFLTEMVRGLMLTLKYFFETKVTINYPFEKGPLSPRFRGEHALRRYPTGEERCIACKLCEAICPAQAITIEAEEREDGSRRTTRYDIDMTKCIYCGFCQEACPVDAIVEGPNFEFATETHEELLYDKEKLLENGDRWETEIAENLRSESLYR

SEQ ID NO: 912 - protein, 134 aa, Zea mays
MRKHRIVSLVAALLILLALAVSSTRNAQEDSMADNTGTLAGGIKDVPGNENDLHLQELARFAVDEHNKKANALLGFEKLVKAKTQVVAGTMYYLTIEVKDGEVKKLYEAKVWEKPWENFKELQEFKPVEEGASA

SEQ ID NO: 913 - protein, 245 aa, Glycine max
MRASNSSSSISIAKRYFFFFLLFIFFALRSSSGDCSEYHHHHSPMATIGGLHDSQGSQNSVETEALARFAVDEHNKKQNSLLEFARVVRAQEQVVAGTLHHLTLEAIEAGEKKLYEAKVWVKPWLNFKELQEFKPAGDAPSFTSADLGVKKDGHQPGWQSVPTHDPQVQDAANHAIKTIQQRSNSLVPYELHEVADAKAEVIDDFAKFNLLLKVKRGQKEEKFKVEVHKNNQGGFHLNQMEQDHS

SEQ ID NO: 914 - protein, 517 aa, Zea mays
MENPAPPTNPASATPSPSRQLPDFQQSVRLKYVKLGYHYLITHGMYLLLTPLMVLVAVYLSTLSPRDVADLWAHLRLNLISVLACSTLLVFLGTAYFLTRPRPVYLVDFACYKPGPERRCTRDTFMRCSRLTGCFTDASLEFQRKILERSGLGEDTYLPPAVTRVPPNPSMDEARAEAREVMFGAVDELLAKTGVKPKDIGILVVNCSLFNPTPSLSAMVVNHYKLRGNVVSYNLGGMGCSAGLLSVDLAKDLLQTHPGSYALVISTENITLNWYSGNDRSKLVSNCLFRMGGAAVLLSNRRSDRRRAKYELVHTVRTHKGADDRCFGCVTQEEDGEGVVGVSLSRDLMAVAGDALKTNITTLGPLVLPLSEQLLFMATLVAKKLLKMKKVKPYIPDFKLAFEHFCIHAGGRAVLDELESNLALTDWHMEPSRMTLHRFGNTSSSSLWYELAYSEAKGRIRRRHRVWQIAFGSGFKCNSAVWRALRSVNPAEETNPWMDEIDRFPVDVPKVSKVSSD

SEQ ID NO: 915 - protein, 489 aa, Glycine max
MAASRRLRDLQSQPANKICVDCSQKNPQWASVSYGVFMCLECSGKHRGLGVHISFVRSVTMDSWSEIQIKKMEAGGNDKLNAFLLQYGIPKETDIVAKYNSNAASVYRDRIQALADGRPWRDPPVVKEAVRSSSAAFKGKPPLSASSNNNGGWDNWDADDGFGSARGGSDLRRNQSTGDVRGFGGGGNVARSKSTQDIYTRAELEASAANKEEFFARKRAENESRPEGLPPSQGGKYVGFGSGPAPPQRGNQQNDYFSVVSQGLGKLSLAAASAANVVQAGTKELSAKVKEGGYDYKVNETVNVVSQKTTEIGQRTWGMMKGVMALASQKVEEFARDNPNWTSDNWQRNESDRNGFYQEFNRENNGRNSSTREGQHSSGGQTNTFHSSSWDDWGHNDFRKEEPAKGSAPQSSGGKFDNYNSSSWDDWDQEDTRKKEPAKGSSARSSDGWAGWDNAKDDGFDDIYGSASNSKGVTHNDKSGAAWTGGGFL

SEQ ID NO: 916 - protein, 454 aa, Zea mays
MASTAARRLRELQAQTGNKTCVDCAQRNPQWASVSYGVFMCLECSGKHRGLGVHISFVRSVTMDSWTEAQLRKMEAGGNDRLNAFLTARGVPKETPHVAKYNSNAAAAYRDRIAALAEGKPWTDPPVVKETPGSGAPAPARKPPVHTSAASGGGGWDDWDDDFRPDMRRNQSVGSFAAAGAQSGRQPPRSKSTQDMYTRQQLEASAANKEDFFARRMAENESKPDGIPPSQGGKYVGFGSSPPPSANRNGGAAQGDVMQVVSQGFGRLSLVAASAAQSAASAVQVGTKEIQSKMRDGGYDQKVNETVSVVANKTAEIGSRTWGIMRGVMALASQKVEEYAKEGGVGGWGEDWQHSEQKSEPYQRFEHETNGNSWNSSQNSSSKNNSSSWDDWDDPGKKDEPAKPHQSSDSWAGWDDGKDDGFDSPSYNNHSTSNKGSNQNGTSGGTFWTEGGFR

SEQ ID NO: 917 - protein, 443 aa, Glycine max
MKLEESVSNSNITAPLLPPEDPSPSPQNGSISGAVFNITTTMIGAGIMSIPATMKVLGIVPGLVVIVLVALITDVTVEFMLRYTSSGKSSTYAGMMAESFGSIGSLAVKICVIITNLGVLIIYFIILGDVLCGNESNGITHLGILQEWFGINWLTSRAFALLFVALFIMLPLVMLRRVDSLRYSSAISILLALVFVVICSSMAVSALLSGKSQTPRIVPDFSQVTVLDLFTAIPVFVTGFGFHVNVHPIRAELIKVEHMGLAARISLIICVAIYFAIGFFGYLLFGDSIMPDVLVNFDQNSHTSTGRLLNAIVRLSYALHLALVFPIMNYSLRANIDELIFSNKNKPPLASDTPRFVSLTLTLLALTYLVAVTIPNIWYFFQFLGSTTIVSTSFIFPAAIVLRDMHGISKTKDQVMAIVVIVLAVGTSGIAIWTNLNGSGDDQ

SEQ ID NO: 918 - protein, 477 aa, Zea mays
MGGGAVNDHFPGASDPLLPTKRDGDGDEDDAGASAFHEFDGASFAGAVFNLSTTIVGAGIMALPATMKVLGLVPGLVMIVLAALLTDASIELLVRFSRAAGARSYSAAMADAFGWWGRRLLQVCVVINNVGVMIVYMIIIGDVLSGSTSGGEHHYGVLEGWFGIHWWNGRLFVLLVTTLCVFTPLACLKRIDSLSYTSTISVALAVVFVIITAGIAVIKLIGGQIPMPKLFPTVSDLASVWELFTAVPVLVTAYVCHYNVHPIHNELKDSTQIKPIVHTSLTLCSTIYITTSFFGYLLFGESTLSDVLSNFDSNLGIPYSSVLNDAVRVSYAVHLMLVFPMIFHALRLNLDGLLFASARPLSSDNRRFGIITASLLLVIFGSAIFIPSIWDAFQFTGATAAVCIAFIFPAAITLRDSQGIAKKWDKILAIFMIVLAVVSNVVAVYSDAYKIFNKESAPSNAWIGESTENRSSWWLVR

SEQ ID NO: 919 - protein, 700 aa, Zea mays
MSVSPSSLCGGDPAMRIVVWFRRDLRVEDNPALAAAARAGGEVVPAYVWSPEEEGPYYPGRVSRWWISQSLNHLDASLRRLGAGKLVTRRSADAAVALLQLVRDTGATHVYFNHLYDPISLVRDRRLKEMLAAEGIVVQSFNSDLLYEPWEVVDDEGQPFTMFDPFWNRCLSMPYDPPAPLLPPKRINSGDLSMCPSEDLIFEDESERGSNALLARAWTPGWQNADKALTAFLNGPLADYSVNRKKADSASTSLLSPHLHFGELSVRKVFHLVRMKQLVWSNEGNHAAEESCTLFLRSIGLREYSRYLSFNHPSSHERPLLAHLRFFPWVVDESYFKIWRQGRTGYPLVDAGMRELWATGWLHDRIRVVVASFFVKVLQLPWRWGMKYFWDTLLDADLESDALGWQYITGSLPDGRELDRIDNPQFEGYKFDPHGEYVRRWIPELARLPTEWIHHPWDAPVSVLQAAGIELGSNYPLPIVELDAAKGRLQAALSEMWQLEAASRATMNNGTEEGLGDSSEVLFPQELQMEVDRQPAPAEAAANVHVPVPMPARRRGDQMVPTMTTSSLNRAGTEVSADLVVANSEEEDTRAQVPFHAHLHPRAEAPPAARRTNNGARQHDVFQQPRNHRREALLAPSASEASSSWTGREGAVVPVWSPPAASGHSDAFAADEADVSSRSYLGRHPQSHRLMNWSQLSQSS

SEQ ID NO: 920 - protein, 654 aa, Zea mays
MAGPEKTVVWFRRDLRIQDNPALAAAAKGGSVLPIFIWCPSDYGQYYPGRCSRWWLKQSLAHLGKSLELLGCPLVLIRAEDSTLAALLECVRSISATRVVYNRLYDPISLVLDNKIKNELPAHGISIQSFNGDLLYEPWDVYDENGQAFTTFNKYWEKCMSLPIEISQYLAPTRLVAAPGLANVRCCSIDDLGLESSKDVESSNALLSRAWSPGWRNAENMLEEFVSYGLPEYSEHGMKVGGSTTSLLSPYLHFGELSVRMIYQLVKMRQVKWQNEGKSEAEESVRLFLRSIGFREYSRYLCFNYPFTHERSFLGNLKHYPWLLDEGRFKSWRQGMTGYPLVDAGMRELWATGWTHNRIRVIVSSFAVKFLQIPWIWGMKYFWDVLLDADLESDILGWQYISGSLPDGHELSRLDNPEVQGQKYDPDGEYVRTWIPELARMPTEWIHSPWAAPNSILQVAGVELGFNYPKPIVELHMARECLDDAISTMWQLDTAAKLAELDGEVVDDNLNNIRNFDIPKVVLNKKLSPSTSSMEHRVLSTNGKDEKSQPTEVKALYKQIIRDDMMNDSNMDDTCSTANLKVTRKRSSSDSAFNVPSCSSSLVMESRIHHNEPSSVLYSGYFQKTADRDGTSKVEDNDSEDSGTSISRPSKKAA

SEQ ID NO: 921 - protein, 220 aa, Oryza sativa
MASSAPTPPPLLPVTNPAAAGSSPAATAVGSDAPIATPAFRLFLSKLSDSARRSLSDRRPWTELVDRSAFSRPDSLSDATSRLRRNLAYFRVNYAAVVAFALGASLLAHPFSLLVLLGLLAAWCFLYLFRGSDQPVVLFGRTFSDRETLLGLVVASFVAFFFTSVASLIISGLLVGGAIVAVHGACRMPEDLFLDDADAASGNSAAQGLLSFLGAPGSRV

SEQ ID NO: 922 - protein, 198 aa, Glycine max
MTTYGTISEEASSNSNSVFVSQAKERIEDGLGTTRPWSEMLQTCHLKLPSSFFGAIQRINTNAKHFRANYVIIILLVLFLSLLGHPISLIILVVMMIAWLYLYFLRDTPLVILRFEMDERLVVISLLLITIGLLVLTNVTYNVIVGMCVALVVVLVHAIMRETEDLFTMDEDVGVVKGFRDVVKVPLRQPGSSSFTLP

SEQ ID NO: 923 - protein, 161 aa, Zea mays
MAAVLVARQGRELQRYSQSTGGRIVVGCIPYRVRRDGELEVLVITSQKGHGMMFPKGGWEVDESMDEAARREALEEAGVLGDTGPVLGLWHYKSRRYVDQTYEGFMFPLRVADELHQWPEMASRKRTWATVQQAMDGCPHWWMREALERLVARQAVLQSAL

SEQ ID NO: 924 - protein, 182 aa, Zea mays
MCDLVARTGRHQQRYEDGRRLVAGCIPFRYRANNDETSGDKTKKLVEVLMINSQSGPGLLFPKGGWENDETVEEAAAREAIEEAGVRGDIVHFLGLYDFKSKTHQDACCPEGMCRAAVFALHVKEELASWPEQSTRQRTWLTVPEAASSCRYQWMQEALLTGFSDWHDKWSRGGGGTNCDPA

SEQ ID NO: 925 - protein, 181 aa, Zea mays
MCDLVARTGRHLQRYENGHRLVAGCIPFRYRDINDGASDDEQKKLVEVLMISSQSGPGLLFPKGGWENDETVEEAAAREAIEEAGVRGDLVQLLGFYDFKSKQPEATCRAAIFALHVKEELASWPEQSTRQRSWLTVPEAAERSRYPWMQEALVTGFSAWLENWRNGGGGGGGGCVDRTER

SEQ ID NO: 926 - protein, 476 aa, Oryza sativa
MAMETTSQDSQVIMGRYKLGRLLGRGTFAKVYKAYKLATGEAVAIKVFDKEAVQRSGTVEQVKREVDVMRRVHHRHVIRLHEVMATRSRIYFVMEYASGGELFTRLSRSPRFPEPVARRYFQQLITAVEFCHSRGVYHRDLKPENLLLDARGDLKVTDFGLSALDGGLRGDGLLHTTCGTPAYVAPEVLLKRGYDGAKADIWSCGVILFVLLAGYLPFNETNLVILYRNITESNYRCPPWFSVEARKLLARLLDPNPKTRITISKIMDRPWFQQATCPLGDMSLVASAPSVLLARKEASQQHDDEEDDGFAREKKKRSNVIMSSPVIDVRPSSMNAFDIISRSRGLDLSKMFDAEERRSEARFSTRETTTAIVSKLEEIAEAGRFSFKLKEKGRVELEGSQDGRKGALAIEAEIFKVAPEVHVVEVRKTGGDSPDFRDFYKQELKPSLGDMVWAWQGGDSPPLVPAAGRRPITKRS

SEQ ID NO: 927 - protein, 461 aa, Oryza sativa
MVNGEAEAECTRASLLGRYEIGRTLGEGNFGKVKYARHLATGAHFAIKILDRNKILSLRFDDQIRREIGTLKLLKHPNVVRLHEVAASKTKIYMVLEYVNGGELFDKIAVKGKLSEHEGRRLFQQLIDAVSYCHDKGVYHRDLKPENVLVDRRGNIKISDFGLSALPQHLGNDGLLHTTCGSPNYIAPEVLQNRGYDGSLSDIWSCGVILYVMLVGYLPFDDRNLVVLYQKIFKGDTQIPKWLSPSARDLLRRILEPNPMKRINIAGIKEHEWFQKDYTPVVPYDDDDDNYLDSVLPIKEQIDEAKQEKPTHINAFQLIGMASALDLSGFFEEEDASQRKIRFTSTHSPKDLFDKIENVVTEMGFQVQRGNSKLKVMKNGRGSKNLRNPSSFLVCTEVVELGPSLYVVELKKSHGDPILYRQLCERLSDELGVCKTEQIQRTESLEDDLESFDSGSSLPGF

SEQ ID NO: 928 - protein, 505 aa, Oryza sativa
MEGAGRDGNPLGGYRIGKTLGIGSFGKVKIAEHILTGHKVAIKILNRRKIKSMEMEEKVKREIKILRLFMHPHIIRLYEVIDTPADIYVVMEYVKSGELFDYIVEKGRLQEEEARRFFQQIISGVEYCHRNMVVHRDLKPENLLLDSKCNVKIADFGLSNVMRDGHFLKTSCGSPNYAAPEVISGKLYAGPEVDVWSCGVILYALLCGTLPFDDENIPNLFKKIKGGIYTLPSHLSPLARDLIPRMLVVDPMKRITIREIREHQWFTVGLPRYLAVPPPDTAQQVKKLDDETLNDVINMGFDKNQLIESLHKRLQNEATVAYYLLLDNRLRTTSGYLGAEFHESMESSLAQVTPAETPNSATDHRQHGHMESPGFGLRHHFAADRKWALGLQSRAHPREIITEVLKALQELNVCWKKIGHYNMKCRWSPSFPSHESMMHNNHGFGAESAIIETDDSEKSTHTVKFEIQLYKTRDEKYLLDLQRVSGPQLLFLDLCSAFLTQLRVL

SEQ ID NO: 929 - protein, 290 aa, Oryza sativa
MGNASGKEGEENGHVAAGAAAGVAGSAGAAARAPPPLMPPDAVMRELPPPVPYVFTPQVPVAPLHIPTEFSPVFNNSWINESDESTNNHPQEKGIPTLISWSQGGNEVFVEGSWDNWTSRRVLEKSGKDHTILLVLPSGVYHYRIIVDGEPKYVPELPHVADEGGQVANLLDVHDYIPESLGSVAGFDSPPSPEHSYDLQLPGDEEFAKEPPILPPQLVMSVLGDTDNSEEQTLKPKHVVLNHLYIEKGWGSQSLLALGVTHRFQSKYVSFVLYKPLRRSSTAKRTKNGG

SEQ ID NO: 930 - protein, 283 aa, Glycine max
MGNANGREDGSIPPAAADPSAAARGTHAPPVSLPPVRAFSSDSMANSPPHSPRRSRSPILFGPQVPLAPLQRGNGPPFLNQMWQNESHGIVNHPSEQGIPVMITWNYGGNNVAVEGSWDNWTSRKALQRAGKDHSFLIVLPPGIYHYRFIADGEERFIPELPNVADEMGHVCNLLDVNDYVPENPDGVSEFEAPPSPESSYGQAFPAEEDFAKEPMAVPSQLHLTVLGMENSDIGSSSKPQHVVLNHVFIEKNLASKSVVALGLTHRFQSKYVTVVLYKPLKR

SEQ ID NO: 931 - protein, 441 aa, Glycine max
MSQPKIKRRVGKYEVGRTIGEGTFAKVKFARNSETGEPVALKILDKEKVLKHKMAEQIRREVATMKLIKHPNVVRLYEVMGSKTKIYIVLEFVTGGELFDKIVNHGRMSENEARRYFQQLINAVDYCHSRGVYHRDLKPENLLLDTYGNLKVSDFGLSALSQQVRDDGLLHTTCGTPNYVAPEVLNDRGYDGATADLWSCGVILFVLVAGYLPFDDPNLMNLYKKISAAEFTCPPWLSFTARKLITRILDPDPTTRITIPEILDDEWFKKEYKPPIFEENGEINLDDVEAVFKDSEEHHVTEKKEEQPTAMNAFELISMSKGLNLENLFDTEQGFKRETRFTSKSPADEIINKIEEAAKPLGFDVQKKNYKMRLANVKAGRKGNLNVATEIFQVAPSLHMVEVRKAKGDTLEFHKFYKKLSTSLDDVVWKTEDDMQMRETK

SEQ ID NO: 932 - protein, 453 aa, Zea mays
MEKKPTILMNRYELGRTLGQGTFAKVYHGRNLASGESVAIKVIDKEKVMRVGMIDQIKREISVMRLVRHPNVVQLHEVMASKSKIYFAMEYVRGGELFARVARGRLKEDAARRYFHQLVGAVDFCHSRGVYHRDLKPENLLVDEHGNLKVSDFGLSALRECQKQDGLLHTTCGTPAYVAPEIINKKGYDGAKADIWSCGVILFVLLAGYLPFHDANLVEMYRKISRADVKYPQWFSPELRRLMPKLLEPNPNNRITIEKLVEHPWFKKGYRPAVMLAQPHGSSSLKDVQVAFSNADHKDSSSKVEQPADSSLKPASLNAFDIISHSRGFDLSSLFEVDQEQKASNSRFMTQKPASAIVSKLEQIAETERFMVKKQDGLVKLQGSKQGRKGQLAIDAEIFEVTPAFHVVEVKKSAGDTLEYEMFCSKGLRPSLSDICWSSRSEENMAPSVVQPS

SEQ ID NO: 933 - protein, 459 aa, Zea mays
MMEAEKNGNILMQKYEVGKLLGQGTFAKVYHARNIETSQSVAIKVIDKDKIFKVGLMEQIKREISVMKLVRHPNIVQLYEVMATKSKIYFVLEYVKGGELFNKIAKGKLREDASRKYFQQLVSAVDFCHSRGVYHRDLKPENLLVDENGNLKISDFGLSALAESRRQDGLLHTTCGTPAYVAPEVISRKGYDGAKVDTWSCGVILFVLMAGYLPFQDSNLMEMYRKIGKADFKCPPWFPSDVRKLVSRILDPNPRTRMPITKIVECFWFKKGIDNKLIRKNIEMKGKVSALTDVNVVFSSTGIGSNNNKLVDVEQDVAKITNLNAFDIISLSEGFNLSGLFEESEKRKEARFTSSQSASTIISKLEDAATCSKMTIKKKEGGVLKMEGANEGRKGVLSIDAEIFEVTPAFHLVEIKKNNGDTLEYENLFKQDMKPALKDIVWAWQGESKDQQAKDHNQS

SEQ ID NO: 934 - protein, 449 aa, Zea mays
MSASVGRTRVGRYELGRTLGEGTFAKVKFARNVETGENVAIKILDKEKVLKHKMIAQIKREISTMKLIRHPNVIRMYEVMASKTKIYIVMELVTGGELFDKIASRGRLKEDDARKYFQQLINAVDYCHSRGVYHRDLKPENLLLDASGTLKVSDFGLSALSQQVREDGLLHTTCGTPNYVAPEVINNKGYDGAKADLWSCGVILFVLMAGYLPFEDSNLMSLYKKIFKADFSCPSWFSTSAKKLIKKILDPNANNRITIAELINNEWFKKGYQPPRFETADVNLDDVNSIFDESGEPAQLVVERREERPSVMNAFELISTSQGLNLGTLFEKQTGSVKRETRFASRLPANEILSKIEAAAGPMGFNVQKRNYKLKLQGENPGRKGQLAIATEVFEVTPSLYMVELRKSNGDTLEFHKFYHNISNGLKDVMWKPESGIVEGDEARQRRSP

SEQ ID NO: 935 - protein, 440 aa, Zea mays
MSTTKVKRRVGKYELGRTIGEGTFAKVRFARDTVTGEAVAIKILDKEKVLKHKMVEQIKREISTMKLIKHPNVVRIYEVMGSKTKIYIVLEFATGGELFDTIVNHGRMREDEARRYFQQLINAVDYCHSRGVYHRDLKPENLLLDSYGNLKVSDFGLSALSQQIKDDGLLHTTCGTPNYVAPEVLEDQGYDGAMADLWSCGVILFVLLAGYLPFEDSNLMTLYKKISNAEFTFPPWTSFPAKRLLTRILDPNPMTRITIPEILEDEWFKKGYKRPEFDEQYDTTLDDVDAVFNDSEEHHVTEKKEEEPVALNAFELISMSAGLNLGNLFDSEQEFKRETRFTSKCPPKEIVRKIEEAAKPLGFDVQKKNYKLRLEKVKAGRKGNLNVATEILQVAPSLHMVEVRKAKGDTLEFHKFYKNLSKTLKDVVWKSDDLQTQHAS

SEQ ID NO: 936 - protein, 460 aa, Zea mays
MVNGERRADAECTRASLLGRYEIGRTLGEGNFGKVKYARHIASGGHFAIKILDRSKILSLRIDDQIRREIGTLKLLKHPNVVRLHEVAASKTKIYMVLEFVNGGELFDKIAIKGKLSEHEGRRLFQQLIDGVSYCHDRGVYHRDLKPENVLVDRKGTIKISDFGLSALPQHLGSDGLLHTTCGSPNYIAPEVLQNRGYDGSLSDLWSCGVILYVMLVGCLPFDDRNLVVLYQKIFKGDCQIPKWLSPAAQDLLKRILQPNPMKRINVAGIREHEWFKKDYVPAVPHDDDEDVLPSPAPSIKPIDEPAQEKCSPINAFQLIGMASSLDLSGFFEEEDAAQRKIRFTSTHPPKDLFDKIESVVMEMGFKVHRGAGKLKVLRNSKCSRNPSSLLVCTEVFELGPSLYVVELRKSHGDSTLYRQLCERLSDELGACKTDQIARTESSSDDLSSVDGEAFPLSGF

SEQ ID NO: 937 - protein, 443 aa, Zea mays
MEDAVAADGKSVLQGRYELGRVLGHGNFGRVHAARDLRTGRSVAVKVVAKDKLERAGMAEQIKREIAVMKMVSHPNIVELHEVMATRSKIYLALELVRGGELFSRIARAGRVREDVARCYFRQLVAAVDFCHGRGVFHRDLKLENLLLDEVGNLKVADFGLSALAGHARSDGLLHTACGTPSYVAPEVLGGKGYDGAKADLWSCGVILYVLLVGSLPFHEDNLMVMYRKMQRGEFLCPPWVSADARKLIGELLDPDPSTRITVARLVETPWYRKPLPVLPPLNLKEPTPDARRATSDKEEPEVLNAFHLISFSEGFDLSPLFDQGRGGGVGRSSAGGIRFVTREAASSVVSRLESLVTGRGANMRVTKSGSRGVRLEAVSRGRSGARLAVAAEIFSVAPSVLLVDVKKDGGDTMEYRSFCSEELRPALKDIVWASSQDTPGAA

SEQ ID NO: 938 - protein, 463 aa, Zea mays
MARSGREADPGEEERKLVLGKYELGRLLGQGTFAKVYYARDLSAGAGTGHSCSVAIKVIDKARLRRTEGMVEQLRREISIMRMVRHPNVVGIREVLASRSRVFVVMEYARGGELFAKVARGRLPEDHARRYFQQLVAAVGFCHRRGVAHRDLKPENLLLDEAGRLKVTDFGLAALPEQLRHDGLLHTQCGTPAYVAPEVLRKRGYDGARADLWSCGVVLYVLLCGFLPFQHDNYVKLYQKIFKADYQVPPWVSGDARRLIARLLVVDPAKRASIAEIMCTPWFRKGFVPPVLSPPVTPKKQQLDEGAALFDNDDDDDNSNHSGATSPRSCNAFQLISSMSSGFDLSGLFESEQKTATVFTARAPAATVVEKLESVARALGFEVTRGKGWKVRMEAKAEGTNGRLAATAEVLEVAVDVAVVEFVHDAGDALDFNKFCAVDVRPGLTEIVWAWQGDSPAAAVGTA

SEQ ID NO: 939 - protein, 451 aa, Zea mays
MVGGGGGGPLRRVGKYEVGRTIEEGTFAKVKFAQNTETGESVAMKVLDRSSILKNKMAEQIKREISIMKLVRHPNVVRLHEVLASRKKIFIILEFITGGELFDKIIRHGRLSEADARRYFQQLIDGVDFCHKKGVYHRDLKPENLLLDSQGNLKISDFGLSAWPAQGSFLLRTTCGTPNYVAPEVLSHKGYNGALADTWSCGVILYVLLAGYLPFDEVDLTTLYGKIESAEYSFPAWFSGGAKSLIRRILDPNPETRIRIEEIRSDEWFQKNYEPIKEIENEEVNLDDVNAAFDDPEDDNEDAFEDETGPLTLNAFDLIILSQGLNLAALFDRRQDCDKLQNRFLSRNPAKVILSSMEVVAQSMGFKTHIRNYKMRVEGLNADKTSHLSVMVEVFEVAPSIFMVELQRAAGDTSEYNTFVNNYCSKLDDIIWKFPTEKGKSRIPRLSKSHS

SEQ ID NO: 940 - protein, 503 aa, Zea mays
MEGAGRDANPLGGYRIGKTLGIGSFGKVKIAEHILTGHKVAIKILNRRKIRSMEMEEKVKREIKILRLFMHPHIIRLYEVIDTPADIYVVMEYVKSGELFDYIVEKGRLHEEEARRFFQQIISGVEYCHRNMVAHRDLKPENLLLDSKCNIKIADFGLSNVMRDGHFLKTSCGSPNYAAPEVISGKLYAGPEVDVWSCGVILYALLCGTLPFDDENILNLFKKIKGGIYTLPSHLSPSARDLIPRMLVVDPMKRITIREIREHVWFKIQLPRYLAVPPPDTAQQVKKLDEETLNDVIKMGFDKNQLIESLHNRLQNEATVAYYLLMDNRLRTTSGYLGSEFQESMDPSFSQVHAETPTSATEHRQHVFTESPGSGLRQHFASERKWALGLQSRAHPREIISEVLKALQELNVYWKKIGHYNMKCRWSPGCLESMMHNCDGFSAESAIIETDDLIAKSTRIVKFEIQLYKTRDEKYLLDLQRVSGPQLLFLDLCSAFLTQLRVL

SEQ ID NO: 941 - protein, 509 aa, Zea mays
MDGSSKGSGHSEALRNYNLGRTLGIGTFGKVKIAEHKLTGHRVAIKIINCRQMRNMEMEEKAKREFKILKLFIHPHIIRLYEVIYTPTDIYVVMEYCKYGELFDYIVEKGRLQEDEARRIFQQIISGVEYCHRNMVVHRDLKPENLLLDSKYNVKLADFGLSNVMHDGHFLKTSCGSPNYAAPEVISGKLYAGPEVDVWSCGVILYALLCGTLPFDDENIPNLFKKIKGGIYTLPSHLSALARDLIPRMLVVEPMKRITIREIREHQWFQIRLPRYLAVPPPDTTQQAKMIDEDTLRDVVNMGFNKNHVCESLCSRLQNEATVAYYLLLDNRFRATSGYLGADYQESMDRNLNQLASSESSSSGTRNYVPGSSDPHSSGLRPYYPVERKWALGLQSRAHPREIMVEVLKALQELNVRWKKNGHYNVKCRWCPGFPEVNDTLDASNSFLGDSTIMDNDDANGRLPTVIKFEFQLYKTKDDKYLLDMQRVTGPQLLFLDFCAAFLTKLRVL

SEQ ID NO: 942 - protein, 279 aa, Zea mays
MATPAAEKPEDVEIREVWADNLETEFAVIRDIVDDYPYVAMDTEFPGVVCRPLGTYKSAAEFNYATLKANVDMLKLIQLGLTLSDEHGGLPALGPDGRPCVWQFNFRGFDPRTDVAAADSIDLLRRSGIDFSRHAADGVDSRCFAELLMSSGVVLNSDVHWVTFHSGYDFGYLLKLLTGTNLPDTLPGFFDLIKIYFPVIYDIKHLMRFSNSLHGGLNKLAELLDVARVGICHQAGSDSLLTALSFKKLKEAYFNGLTEKYAGVLYGLGFEGVETTSAH

SEQ ID NO: 943 - protein, 188 aa, Glycine max
MRSSNGTSSSRASNGNTGRHPVYRGVRRRSSGKWVSEIREPKKPNRIWLGTFATPEMAAIAYDVAALALKGKDAELNFPNSASSLPIPASSAAHDIQMAAALAATAVGAANDALEGSQGGNVSVSLAEEFSGGNLNHFVDEDLIFDMPNILVNMAEGMLLSPPRFDNFAATDYEYMDEDPNLWGFPNY

SEQ ID NO: 944 - protein, 305 aa, Glycine max
MEVAVAKALKPSLRREFIVQQMLCEDIFSLNANTVAAGEDFSVDDLFDFSNGSLHNEQQQEYDEGKQSLSASEDRGEDDCNSNSTGVSYDSLFSTELAVPAGDLEDLEWVSHFVDDSLPELSLLYPVRSEEANRFVEPEPSAKKTPCFPWEMKITTKARTVRNRKPSNSRMWSLGSPLLSLPSSPSSPSSCSSSVREPPAKKQKKQAQAQPVGAQIQRRCSHCHVQKTPQWRTGPLGAKTLCNACGVRYKSGRLFSEYRPACSPTFCSDIHSNSHRKVLEIRKRKEVAQPDTGLAQAQTQMVPTC

SEQ ID NO: 945 - protein, 303 aa, Glycine max
MSNISMVEAKLPPGFRFHPRDEELVCDYLMKKVAHNDSLLMINVDLNKCEPWDIPETACVGGKEWYFYTQRDRKYATGLRTNRATASGYWKATGKDRSILRKGTLVGMRKTLVFYQGRAPKGNKTEWVMHEFRIEGPHGPPKISSSKEDWVLCRVFYKNREVSAKPRMGSCYEDTGSSSLPALMDSYISFDQTQTHADEFEQVPCFSIFSQNQTSPIFNHMATMEPKLPANHATNAYGGAPNLGYCLDPLSCDRKMLKAVLNQITKMERNPLNQSLKGSPSLGEGSSESYLSEVGMPHMWNNY

SEQ ID NO: 946 - protein, 451 aa, Zea mays
MDQPEENPEFPSCDAYFEAIQSKKKLPLTLQESLTAAFAQIPVSSFPEVPAGRVIEIPGDTSVIDAVRTLSEQNIRAAPVLNPEPGAPTDWQGRYLGVIDYSAIILWVLENAELAAVALSAASATAAGVGMGAVGAVGVAALGTTGPAAVAGLTAAAIGASVAGGLTAEKGVAKDGLTAADHLGEDFYKVLLQQEPFRSTTVRSIVESYRWSPFVPITLDTSMLTVLLLLSKYRLRNVPVIEPEKPIIRNFITQTGVVKGLQQCKGRDWFDYISALPLSDLGLPFMSIDEVITVNSDDLILEAFKCMKDNKIGGVPVVEGPKRKLVGSVSIRDIRFLLLRPNLFSNFRQLTVIEFMKTLGSTLPDSESNCLVKPPPTCTPDASLGSVIDSIASRITHRIYVVDDDLEVVGVVTLRDVISCFIHEPPGYCDNYLASAMEKLEGKGVRSVEKI

SEQ ID NO: 947 - protein, 478 aa, Zea mays
MATAAADGPPVEPQSLKKLSLWSLKRSLDLFAPAHALLFTPDAESKRIRTGCKVSAEYGAVKDLTPEQGRGGQGKGPAPPSSTALALPGTQDTKDAHGEGSRNAIVPAPLMLPKAPESTIPGKNTTLSIPGSSDRFSTSALMERIPSRWPRPTWHAPWKNYRVISGHLGWVRSIAFDPANEWFCTGSADRTIKIWDLASGTLKLTLTGHIEQIRGLAVSQRHTYLFSAGDDKQVKCWDLEQNKVIRSYHGHLSGVYCLALHPTIDILLTGGRDSVCRVWDIRTKAHVSALTGHDNTVCSVFARPTDPQVVTGSHDTTIKFWDLVAGRTMCTLTHHKKSVRAMALHPKEKAFASASADNVKKFNLPKGEFLHNMLSQQKTIINSMAVNEDGVLATGGDNGSLWFWDWKSGHNFQQDQTIVQPGSLESEACIYAFSYDVSGSRLVSCEADKTIKMWKEDLTATPETHPINFKPPKDIRRY

SEQ ID NO: 948 - protein, 464 aa, Oryza sativa
MERYSSDADTTAPNSSLSSAASSTGSLARCSSLSRLSFDCSPSAAVAAAATSCSPPRASVLLRPHRSGDVAWAAIRAASTTSAAPLGPRDFKLVRRIGGGDIGTVYLCRLRSSPERESPCMYAMKVVDRRAVARKQKLGRAAAEKRILRQLDHPFLPTLFADFDATPHFSCAVMEFCPGGDLHSLRHRMPSRRFPLPSARFYAAEVLLAIEYLHMMGIVYRDLKPENVLIRADGHIMLTDFDLSLQSTTSPSLDGDTDTDDEASGGASCFPDHLLRFKRRRNAVAAPRPRFVAEPVDARSCSFVGTHEYVAPEVASGGAHGAAVDWWAYGVFLYELIYGRTPFAGATNEATLRNIVRRPLAFPSGSGSCGPADADARDLIARLLAKDPAARLGSRRGAADVKSHPFFKSLNLALLRSSRPPVVPGAGAGAAPLHRSQSCKAAPTTPPPPTTTKPANATARFDLF

SEQ ID NO: 949 - protein, 587 aa, Oryza sativa
MASMDEPLYPIAILIDELKNEDIQLRLNSIRRLSTIARALGEERTRKELIPFLSENNDDEDEVLLAMAEELGVFIPYVGGVEHAHVLLPPLETLCTVEETCVRDKAVESLCRIGAQMKESDIVDWFVPVVKRLAAGEWFTARVSSCGLFHIAYPSAPDQLKAELRTIYGQLCQDDMPMVRRAAASNLGKFAATVEQNYLKTEVMSIFDDLTQDDQDSVRLLAVEGCAALGKLLEPQDCVAHILPVIVNFSQDKSWRVRYMVANQLYELCEAVGPEHSREQLVPAYVRLLRDNEAEVRIAAAGKVTKFCRILSPQLAIQHILPCVKELSSDSSQHVRSALASVIMGMAPVLGKEATIEQLLPIFLSLLKDEFPDVRLNIISKLDQVNQVIGIDLLSQSLLPAIVELAEDRHWRVRLAIIEYIPLLASQLGVGFFDDKLGALCMQWLEDKVFSIRDAAANNLKRLAEEFGPEWAMQHIIPQVLEKINNPHYLYRMTILQAISLLAPVMGAEITCQQLLPVVINSSKDRVPNIKFNVAKVLQALIPILDQSVVEKNVKPCLVELSEDPDVDVRYYANQALQACDQIMMSS

SEQ ID NO: 950 - protein, 416 aa, Zea mays
MFVEFGCGFVSDSLGLISDACHMLFDCAALAIGLYASYIARLPANGMYNFGRGRFEVLSGYVNAVFLVLVGVLIVLESFERILEPREISTSSLLSVSIGGLVVNIIGLVFFHEEHHHAHGGTCSHSHSHSHHGHEHHQHHGHEEHKHHNHDHHGANNVKACCDHHGDDNHRHDHHGNSKSEGIHNNIMDNTCKEKHSHGHEHHHYEHSEHCHQSREHSHQNCNNITVEQQLLDIPLSNISSHDTESHSSKEGLRPSDSGNSNKPGHRHHIDHNMEGIFLHVLADTMGSVGVVISTLLIKYKGWLIADPICSVFISVMIVSSVIPLLRNSAEILLQRVPRNHEKDLAVALDDVMKIEDVLGVNNVHVWNLTNTDTVGTFQLHVSAEADKSSIRNKASRIFQEAGVQDLTIEIECVKR

SEQ ID NO: 951 - protein, 433 aa, Zea mays
MVSSSSSSSSFLLPLLLLCSHLSLASAETASAAADLLSEARAPGFAAWLRGVRRRIHQRPELAFQEFRTSELVRAELDAIGVPYRWPVAQTGVVATIAGAAAGPVVALRADMDALPVQELVDWEHKSQESGKMHACGHDVHTTMLLGAARILQDRKSDLMGTVKLVFQPAEEGQGGAYYVLQEGVLDDASAIFGLHVDPALPVGVVSSRPGPFAATSGRFLATVTGKGGHAAMPHESIDPVVAAATTVVSLQKIISREIDPLQGAVVSVTFLKGGEAYNVIPENVAFGGTMRSMTNEGLSYLKKRIKEIVEGQAAVHHCSASVDFMEDTMKPYPAVVNDEGMYAHAKEVAEGLLGEKNVRVGPQVMGAEDFGFYAQRMAGAFFTIGVGNASTMATIHSTHSPHFVVDEDVLPVGAAFHAAVAIEYVRKNRAST

SEQ ID NO: 952 - protein, 318 aa, Zea mays
MALASLAASLPVAATAAAVRFPFRFRIGRAMASAAAGASPARVAVVQMTSVGDVDANYATCSRLTKEAAASGVKFLCFPEVFSFIGSKDGEAMKLAEPLDGPIMQRYCSLAKESSMWLSLGGFQEKGPDDSHQYNTHVLIDDTGKVRSSYRKIHLFDVDVPGNMVYKESRFTAAGDTIVAVDSPFGRLGLTVCYDLRFPELYQILRFKHQAQVLLVPSAFTKITGEAHWEILLRARAIETQCYVIAAAQAGKHNEKRESYGDSIIIDPWGTVIARLPDRLSTGFAVADLDLSKVEAVRTRMPISEHRKFDSDWKPTPL

SEQ ID NO: 953 - protein, 441 aa, Glycine max
MGNCGTREESAVVSNAQVVQQLHHATSLGASARSQNAGSEKKHGHGHGHRHNLSECASDLSESCSTPHGNNSNNTLLYTHVIAFTLYELETITKSFRGDYILGEGGFGTVYKGYIDENVRVGLKSLPVAVKVLNKEGLQGHREWLTEVNFLGQLRHPNLVKLIGYCCEDDHRLLVYEFMFRGSLENHLFRKATVPLSWATRMMIALGAAKGLAFLHNAERPVIYRDFKTSNILLDSDYTAKLSDFGLAKAGPQGDETHVSTRVMGTYGYAAPEYVMTGHLTARSDVYSFGVVLLELLTGRKSVDKTRPGKEQSLVDWARPKLNDKRKLLQIIDPRLENQYSVRAAQKACSLAYYCLSQNPKARPLMSDVVETLEPLQSSSVGPGEVSLSGSNSGSAGPFAMNKISDYRMRHKFSNNVGPGATCRSPNPNCSPGGPATLRVR

SEQ ID NO: 954 - protein, 224 aa, Glycine max
MVRGKTQMKRIENATSRQVTFSKRRNGLLKKAFELSVLCDAEVALIIFSPRGKLYEFASSSMQESIERYRRHTKHVNPTTFRSVEQNMQHLKQEAENMMKKIDLLEAAKRKFLGEGLGACSIEELQRIEQQLERSLSNVRARKVFKEQIEQLKEKEKALLDENAKLTENARLSEKHDIHLQPATKNQNVNQPQCNAESSSSSDVETELFIGLPDTRARHISHHV

SEQ ID NO: 955 - protein, 218 aa, Glycine max
MSSADPEHREEEEAPAVGDDEDTGAHVAPIVKLEEVAVTTGEEDEDAILDLKSKLYRFDKDGNQWKERGAGTVKFLKHKASGKVRLLMRQSKTLKICANHLILPTMSVQEHAGNEKSCVWHARDFADGELKDELFCIRFPSIENCKSFMETFQEVAETQKAEDEKESSDAAGLIEKLSVEEKADAEKKDEEKSEDKTVEKESASGKESKAVEEPASSA

SEQ ID NO: 956 - protein, 210 aa, Zea mays
MADPAEHRPAEEDEEAAAAGEDEDTGAQVAPIVKLEEVAVTTGEEDEDVLVDMKAKLYRFDKEANQWKERGTGTVKLLKHKETAKVRLVMRQAKTLKICANHLVVATTKMQEHAGSDKSCVWHALDFADGELKEEMFAIRFGSVENCKKFKDTVEEIAEEQGKTEVKENEEVSTAAADLVQKLTVTEASKEGNAEEEEAPASDDKKDAKG

SEQ ID NO: 957 - protein, 172 aa, Zea mays
MMLRAAGRRLLGVGGGDPAPAVAAAVAASRSRGYHERVVDHYNNPRNVGSLDKDDTDVGTGIVGAPACGDVMKLQIRVDEGSGRIVDARFKTFGCGSAIASSSVASEWVKGKQVEEVVAIKNTEIAKHLSLPPVKLHCSMLAEDAIKAAVKDYEAKKGKKMAKAEEQDTPCP

SEQ ID NO: 958 - protein, 232 aa, Zea mays
MAALAASSTAAFAAKPRLPRARLTVACSATGGDGNGSSSSVSLASSVKTFSAALALSSVLLSSAATSPPPAAADIAGLTPCKESKAFAKREKNSIKKLTASLKKYAPDSAPALAINATIEKTKRRFENYGKFGLLCGADGLPHLIVSGDQRHWGEFVTPGLLFLYIAGWIGWVGRSYLIAISGEKKPAMREIIIDVELATRLLPRGFIWPVAAYRELINGDLVVDDKDIGYY

SEQ ID NO: 959 - protein, 547 aa, Zea mays
  misc_feature (476)..(476): Xaa can be any naturally occurring amino acid
  unsure (1)..(547): unsure at all Xaa locations
MARRALELAAVLLALAALAAVAAGGDIVHQDDEAPKIPGCSNDFVLVKVQTWINKKDKDEFVGVGARFGPKIESKEKHANWTNLLLADPSDCCTPPREKVAGDILLVERGNCKFTTKAKVAESAGASAIIIINDKHELYKMVCETNETNLDIGIHAVLLPKDAGSSLQRSLSSGEVLVELYSPDRPLVDTAEVFLWLMAVGTILCASYWSAWSAREADIEQEKLLKDGREVAPNFEPGGSSGMVDINMVSAILFVVIASCFLITLYKLMSHWFVELLVVIFCIGGVEGLQTCLVALLSMSRRFKPAAESYVKVPFFGAVSYLTLAVCPFCILFAVLWGVYRRLPYAWIGQDILGITLIVTVIQIVRIPNLKVGSALLGCAFLYDIFWVFISKMLFHESVMIVVARGDKTDEDGVPMLLKIPRMFDPWGGYSIIGFGDILLPGLLVAFALRYDWAAKKTLQSGYFLWSMVAYGSGNXLLITYVALNLMDGHGQPALLYIVPFTIGTFLALGMKRGELRNLWTKGQPERVCTHMHPSPKDSPVAVSSLS

SEQ ID NO: 960 - protein, 165 aa, Zea mays
  misc_feature (77)..(77): Xaa can be any naturally occurring amino acid
  unsure (1)..(165): unsure at all Xaa locations
MNVEKLKKMAGAVRTGGKGSVRRKKKAVHKTTTTDDKRLQSTLKRIGVNSIPGIEEVNIFKDDVVIQFVNPKVQASXGANTWVVSGTPQTKKLQDLLPSIINQLGPDNLDNLRRLAEQFQKQASGASGAEAGASAGAVQDDDDDVPELVPGETFEEAAEEKKESS

SEQ ID NO: 961 - protein, 344 aa, Zea mays
MTGGGEEQGRSLFGVSLTNRPRWQQFLICSSGFFFGYLVNGICEEYVYNRLQFSYGWYFTFVQGFVYLALIRLQGFTVEQMVNPWRTYVRLSAVLMGSNGLTKGSLAFLNYPAQIMFKSTKVLPVMVMGAFIPGLRRKYAFQEYVSAVMLVVGLILFTLADAQTSPNFSMAGVAMVSGALVMDAFLGNLQEAIFKMNPDTTQMEMLFCSTVVGLPFLAVPMVLTGELVTAWTSCSQHLYVYAVLVLEAMATFVGQVSVLSLIALFGAATTAMVTTARKAVTLLLSYLIFTKPLTEQHATGLLLITMGIVIKLLPENKEGRPRRSPKNDDDDKPREGREAGEETA

SEQ ID NO: 962 - protein, 411 aa, Zea mays
MNALAATSRNFKQAAKLLGLDSKLEKSLLIPFREIKVECTIPKDDGTLASYVGFRVQHDNARGPMKGGIRYHHEVDPDEVNALAQLMTWKTAVANIPYGGAKGGIGCSPGDLSISELERLTRVFTQKIHDLIGIHTDVPAPDMGTNSQTMAWILDEYSKFHGYSPAVVTGKPVDLGGSLGRDAATGRGVLFATEALLAEHGKGISGQRFVIQGFGNVGSWAAQLINEAGGKVIAISDVTGAVKNVNGLDIAQLVKHSAENRGIKGFNGGDAIDPNSLLTEECDVLIPAALGGVINKDNANDIKAKYIIEAANHPSDPEADEILSKKGVIILPDILANSGGVTVSYFEWVQNIQGFMWDEEKVNAELRTYMTRAFGDVKEMCRSHNCDLRMGAFTLGVNRVARATVLRGWEA

SEQ ID NO: 963 - protein, 174 aa, Oryza sativa
VDRGISQVCTKKQAPAGPVPTPMYSSTSSHSDPESIAESNPHPPPMKKKKKAKKPAAPAAASDAEADADAADADYEEGGALALPPGTVRRCTHCQIEKTPQWRAGPLGPKTLCNACGVRYKSGRLFPEYRPAASPTFMPSIHSNSHKKVVEMRQKATRTADPSCDLLQYIRRRD

SEQ ID NO: 964 - protein, 766 aa, Zea mays
MASHIVGYPRMGPKRELKFALESFWDGKSTAEDLEKVATDLRASIWKQMADAGIKYIPSNTFSYYDQVLDTTAMLGAVPERYSWTGGEIGFDTYFSMARGNATVPAMEMTKWFDTNYHFIVPELGPNTKFSYASHKAVNEYKEAKALGVDTVPVLVGPVSYLLLSKPAKGVEKGFPLLSLLSSILPVYKEVIAELKAAGASWIQFDEPTLVLDLDSDKLAAFSAAYAELESVLSGLNVLVETYFADVPAESYKTLTSLSSVTAYGFDLVRGTQTLGLVTSAGFPAGKYLFAGVVDGRNIWADDLATSLSTLQSLEAVVGKDKLVVSTSCSLMHTAVDLVNETKLDSEIKSWLAFAAQKVVEVDALAKALAGQKDEAYFAANAAAQASRKSSPRVTNEEVQKAAAALKGSDHRRATNVSARLDAQQKKLNLPILPTTTIGSFPQTVELRRVRREYKAKKISEEEYVTAIKEEINKVVKLQEELDIDVLVHGEPERNDMVEYFGEQLSGFAFTANGWVQSYGSRCVKPPIIYGDVSRPNPMTVFWSKTAQSMTSRPMKGMLTGPVTILNWSFVRNDQPRFETCYQIALAIKKEVEDLEAGGIQVIQIDEAALREGLPLRKAEHAFYLDWAVHSFRITNCEIQDTTQIHTHMCYSNFNDIIHSIIDMDADVITIENSRSDEKLLSVFREGVKYGAGIGPGVYDIHSPRIPSAEEIADRIDKMLAVLDTNILWVNPDCGLKTRKYTEVKPALTNMVSAAKLIRTQLASAK

SEQ ID NO: 965 - protein, 226 aa, Zea mays
MEWTTVETRDGAKLSVRLFKPPASGTGLEPEPREDVAVVLVHPYTILGGVQGLLRGMAEGVARRGYTAVTFDMRGAGRSTGRASLTGSTEVGDVVAVCRWVAENIKPRGILLVGSSAGAPIAGSAVDKVDEVIGYVSIGYPFGLMASVLFGRHNDAILKSEKPKLFIMGTKDGFTSVKQLQNKLKSAAGRADTHLIEGAGHFQMEGPAFDAQMVEIIIKFINSLPK

SEQ ID NO: 966 - protein, 344 aa, Zea mays
MSKSGALDLASGLGGKINKVEVKSAVDEYEKYHGYYGGKEEARKSNYTDMVNKYYDLATSFYEYGWGESFHFAHRWNGESLRESIKRHEHFLALQLGLKPGMKVLDVGCGIGGPLREIARFSSTSVTGLNNNEYQITRGKELNRLAGISGTCDFVKADFMKMPFDDNTFDAVYAIEATCHAPDPVGCYKEIYRVLKPGQCFAVYEWCITDHYDPNNATHKRIKDEIELGNGLPDIRSTRQCLQAVKDAGFEVVWDKDLAEDSPLPWYLPLDPSRFSLSSFRLTSVGRMITRTMVKALEYVGLAPQGSERVSNFLEKAAEGLVEGGKKEIFTPMYFFLVRKPLLE

SEQ ID NO: 967 - protein, 254 aa, Glycine max
MLAIFHKAFAHPPEELNSPASYKGSKKPKVPEETLKDFLSHHPHNTCSMSFGEAAVLAYVRPDQSFSRHQRLFCGIDNIYCLFLGSLNNLSLLNKQYGLSKSTDEAMFVIEAYKTLRDRGPYPADQVVKELDGSFAFVVYDSKVGSVFAALGSDGGVKLYWGIAADGSVVISDDLEVIKEGCAKSFAPFPTGCMFHSEGGLMSFEHPMNKLKAMPRVDSEGAMCGANFKVDKFARVNSIPRVGSQSNWMEWDQH

SEQ ID NO: 968 - protein, 327 aa, Zea mays
MVKSKAIRVHELGGPEVLRWEEVEVGEPGEGEIRIRTTAVGVNFIDIYFRKGVYAAPTMPFTPGMEAVGVVTAVGPGLTGRKVGDVVAYAGNPMGSYAQEQILPAAVAVPVPPSVDHKQAASVMLKGMTAHVLLRRVFKVESGHTILVHAAAGGVGSLLCQWANALGATVIGTVSNQEKAAQAAQDGCHHPIIYTSEDVVARVKDITSGKGVNVVYDSVGKDTYKASLECLASRGFLVSFGQSSGKPDPIPTSDLASKSLFLTRPSLMHYTATRDELLESAGEVFANVANGVLHVRVNHTYPLSEAAQAHADLEGRKTSGSIVLIPG

SEQ ID NO: 969 - protein, 715 aa, Glycine max
MDGGSGDDFDAADNPPRKKRYHRHTPQQIQELESLFKECPHPDEKQRLELSRRLNLETRQVKFWFQNRRTQMKTQLERHENSLLRQENDKLRAENMSMREAMRNPICSNCGGPAMIGEISLEEQHLRIENARLKDELDRVCALAGKFLGRPVSSLTSSIGPPMPNSSLELGVGSNGFGQGLSTVPSTMPDFGVGISSPLAMVSPSSTRPTTTALVTPSGFDNRSIERSIVLELALAAMDELVKMAQTGEPLWIRSLEGGREILNHEEYTRTITPCIGLRPNGFVTEASRQTGMVIINSLALVETLMDSNRWSEMFPCMIARTSTAEVISNGINGTRNGALQLMHAELQVLSPLVPVREVNFLRFCKQHAEGLWAVVDVSIDTIRETSGAPTFVNCRRLPSGCVVQDMPNGYSKVTWVEHAEYDESQIHQLFRPLLSSGMGFGAQRWVTTLQRQCECLAILMSSAAPSREHSAISSGGRRSMLKLAHRMTNNFCSGVCASTVHKWNKLNAGNVGEDVRVMTRKSVDDPGEPPGIVLSAATSVWLPVSSQRLFDFLRDERLRSEWDILSNGGPMQEMAHIAKGQDHANCVSLLRASAINANQSSMLILQETCTDASGSLVVYAPVDIPAMHVVMNGGDSAYVALLPSGFAIVPDGSGEEQGGASQQRAASGCLLTVAFQILVNSLPTAKLTVESVETVNNLISCTVQKIKSALHCES

SEQ ID NO: 970 - protein, 274 aa, Glycine max
MGRKANCDNQYAMNRGPWSAEEDKILMNYVQVHGEGKWRELSKRAGLKRCGKSCRLRWLNYLKPDIKRGNISSDEEDLIIRLHKLLGNRWSLIAGRLPGRTDNEIKNYWNTYLRKKAEHKHDKIPSHNDNIPIKLRIESPGCSKNSFGNVLDPTKSPHPMRCTKVMMPVNDSVNTTNLITTSWDNHNPSSASMQLDDYNHCLTGVLQEFDISDLLMSYEDDFRFNGYACVEIPQHIFEDETCRLDDSLGEEAWYENWKNDPYFPQDQDMGFSSF

SEQ ID NO: 971 - protein, 762 aa, Oryza sativa
MMPPRFRCQDYLLPLLLALSPAAAAAREVEYHHCHCDGGGGGGGGGLWSMDSIFRWQKVSDLLIAAAYFSIPLEILYFVAGLRHLLPFRWVLVQFGAFIVLCGLTHLLTAFTYEPHPFMVVLLLTTAKFLTALVSFLTAITLLTLIPQLLRVKVRESLLWLKARELDREVVLMKRQEEASWHVRMLTHEIRKSLDRHTVLYTTLIELSRVLGLTNCAVWMPAAGEMCLTHELRRDGGGEDGVVGVDDADVVEVRGSDGVKLLGPDSVLAAASGGKEEGTGAVAAIRMPMLKVSDFKGGTPEVIQTSYAVLVLVPPAGKSWGRHEMEIVEVVAGQVAVALSHATLLEESRAMRDRLAEQNRELLQARRDALMANEARQAFQGVMSQGMRRPIHSILGLVSMVQEEALAPEQRLVVDTMARTATVVSTLVNDVMEMSADSRERFPLETRPFHLHAMIRDAACVARCLCDFRGFGFAVHVENALPDLVVGDERRIFHVLLHMVGNLIGRTEPGHVTLRVRAADDDVLDDRLGQRWDPWWPSYSTGYSSVKFVIGVKRQQNGDAGSPLSRRPSGKGIDLRLSFSMCRKLVQMMQGNIWAILDPQGLPESMTLVLRFQLQSPLTSSSLGGSFEQKHSSPSCQIAGLKVLLIDDDDDINLVVARKLLEKLGCVVSSPPSGSGFLSSVGSSAAAFQLVMVNLEMKRVKALDVATRISQYRSGRWPIVMAMASDQKAWEKCAQSGINGILKKPVILQELKDELARILQST

SEQ ID NO: 972 - protein, 287 aa, Glycine max
MASSFSPSLSSLVPLLVSLFIVVCAAGNFNQDFQITWGDGRAKILNNANLLTLSLDKASGSGFQSKNEYLFGKIDMQLKLVPGNSAGTVTAYYLSSKGSTWDEIDFEFLGNLSGDPYILHTNVFSQGKGNREQQFYLWFDPTADFHTYSILWNPQRIVFSVDGTPIREFKNLESIGVPFPKRQPMRIYSSLWNADDWATRGGRIKTDWSKAPFTASYRNFNANACVWNRGKSTCKSNSPSSNAWLSQELDSTAQQRLSWVQKNYMIYNYCSDKNRFAQGLPLECTHS

SEQ ID NO: 973 - protein, 209 aa, Zea mays
MAARCSTAASVVRTGSRDLSPSFSFTAAALPSARLRPVGAWVRGGGYTCRLRAVRAMGSAPSSSQSPSPHTPSGQTQGKADYKSLSEEEWKKRLTEEQYYVTRQKGTERAFTGEYWNTKTPGIYQCVCCDTPLFQSSTKFDSGTGWPSYYKPIGENVKSKLDMSIIFMPRTEVLCATCDAHLGHVFDDGPPPTGKRYCINSASLKLKPQ

SEQ ID NO: 974 - protein, 556 aa, Zea mays
MGETNELPPPPVAAPPPMMPMQSMMVGAGAIHPPHEQFHHLNYCVHSNPSWVQVAALAFLHYLVMLGSTVMLATAIVPAMGGNAGDKARVIQSFLFMSGINTLLQTLIGTRLPTVMNASFAFVVPVLSIAKEIESNNFLNDHERFKHTMRTAQGALIVASILNMILGFSTIWGAYAKKFSPVIMTPVVCVVGLGLFQLGFPQVGKCVEIGLPMLILAVVVQQYVPNYFSYIHQRVTFLFERYSLLLCIGIVWAFAAILTAAGAYDHASPKTQQHCRTDKSFLMSSAPWIKIPLPFEWGPPIFTAGHSFGMMGAVLVAAFESTGAHFATARLAGATPPPAYVLSRSVGLQGIGMFLEGIFSVPAGSSVSVENIGLLGLTKVGSRRVIQISTGFMIFFSIFGKFGAFFASIPLPIFAAIYCILFGIVAAVGVSFMQFANKNSMRNIYIIGLSLFLGISVPQYFNGYTSSAGGHGPARTNAGWFNDIINTVFASGPTVALIVASVLDNTLEFRGYEADRGLSWFQPFLRRHKGYSDPRNEEFYSFPISVYDVIPDRFRR

SEQ ID NO: 975 - protein, 624 aa, Glycine max
MDDMNLIQQTQRHHLVVREIGEEIDLEIGAGEDDPSFGSTTLIGAPMRESSVEEHGESKQMGMISQLPNDAQDMSKTQQGKRKKKVVKRWREEWADTYKWAYVDVKDGTPRIFCSVCREYGRKHRRNPYGNEGSRNMQMSALEEHNNSLLHKEALRLQMASKDKIVVDKPVYVKVAMSKTAGSILEATLKRDPHEVEFIQAVQEAVQALERVIAKNSRYINIMERLLEPERMIVFRVSWVDDRGGTCVNRGFRVQFNQSMGPCRGGIRFHPSMNLSVAKFLGFEQTLKNALSPYKLGGAAGGSDFDPKGKSDNEIMRFCQSFMSEMYRYLGPDKDLPSEEMGVGTREMGYLFGQYRRLAGHFQGSFTGPRIFWSGSSLRPEATGYGLVFFAQLMLADMNKELKGLRCAVSGSGKIAMHVLEKLIAYGALPISVSDSRGYLVDEDGFDYMKISFLRDIKAQQRSLRDYSKTYARSKYYDEAKPWSERCDVAFACTSQNEIDQSDAINLVNSGCRILVEGSNMPCTPEAVQILRKASVLIAPAMAAGAGGVVAGELELNHECSLMHWSPEDFESKLQEAMKQTYQRAMKAATDFGYQKESPEALVHGAVISAFLTIAQAMTDQGSI

SEQ ID NO: 976 - protein, 425 aa, Oryza sativa
MEMESPRSPEAEIGHRVEDLWEVAEPQLSPSEKLNSCFEDIAVASFPRPLGSQVIEIPSNASLADTVEILSKNKILSAPIRNVDAPEDASWIDKYIGIVEFAGIAMWLLYQSEAAANGTAGSAVGSPVANLVSRLGSFTFRRTSSGRVETTTDPESDETASVGGSFFETLTSSEFYKNTKVGDISGSFRWAPFLALQTSDTFLTMLLLLSKYRMKSLPVVDIGGDKIENIITQSSVVHMLAECVGLPWFESWGTKKLSELGLPLMKPCKLVKVNEDQPVLKAFQLMREKGVGGLPVMDTSGTKAIGNISIRDVQYLLTAPNIYKDYRTITAKDFLTAVRQHLQEQHEASPLLGSVITCRRDDEVKDIILKLDSEKIHRIYVIDDKGNTEGVITLRDIISKLVHEPRHYFGDFFDGVVPLPPNSTV

SEQ ID NO: 977 - protein, 197 aa, Oryza sativa
MSASRFIKCVTVGDGAVGKTCMLISYTSNTFPTDYVPTVFDNFSANVVVDGSTVNLGLWDTAGQEDYNRLRPLSYRGADVFLLAFSLISKASYENVSKKWIPELRHYAPGVPIILVGTKLDLRDDKQFFVDHPGAVPISTAQGEELRKLIGAAAYIECSSKTQQNIKAVFDAAIKVVLQPPKQKKKKKKAQKGCAIL

SEQ ID NO: 978 - protein, 197 aa, Oryza sativa
MSTARFIKCVTVGDGAVGKTCMLISYTSNTFPTDYVPTVFDNFSANVVVDGNTVNLGLWDTAGQEDYNRLRPLSYRGADVFLLAFSLISKASYENIHKKWIPELRHYAPNVPIVLVGTKLDLREDKQFFLDHPGLAPISTAQGEELKRMIGAAAYIECSSKTQQNVKSVFDSAIKVVLCPPKPKKKNTRKQRSCWIL

SEQ ID NO: 979 - protein, 214 aa, Oryza sativa
MASSASRFIKCVTVGDGAVGKTCMLICYTSNKFPTDYIPTVFDNFSANVVVDSTTVNLGLWDTAGQEDYNRLRPLSYRGADVFVLAFSLVSRASYENIMKKWIPELQHYAPGVPIVLVGTKLDLREDKHYLLDHPGMIPVTTAQGEELRKQIGAAYYIECSSKTQQNVKGVFDAAIKVVIQPPTKQREKKKKKSRQGCSMMNMFRGRKMSCFKS

SEQ ID NO: 980 - protein, 214 aa, Oryza sativa
MSSAAAATRFIKCVTVGDGAVGKTCMLICYTCNKFPTDYIPTVFDNFSANVSVDGSVVNLGLWDTAGQEDYSRLRPLSYRGADVFILSFSLISRASYENVQKKWMPELRRFAPGVPVVLVGTKLDLREDRAYLADHPASSIITTEQGEELRKLIGAVAYIECSSKTQRNIKAVFDTAIKVVLQPPRHKDVTRKKLQSSSNRPVRRYFCGSACFA

SEQ ID NO: 981 - protein, 341 aa, Zea mays
MEKKKVAIPLVCHGHSRPVVDLFYSPVTPDGYFLISASKDTNPMLRNGETGDWIGTFQGHKGAVWSCCLDRNALRAASASADFSAKVWDALTGDELHSFEHKHIVRACAFSEDTHLLLTGGMEKTLRVYDINRPDAAPRELDKSPGSVRTAAWLHSDQTILSSCTDMGGVRLWDVRTGKIVQTLETKASITSAEVSQDGRFITTADGSSVKFWDANHFGLVKSYDMPCNVESASLEPKSGSKFVAGGEDLWVHVFDFFTGEEIACNKGHHGPVHCVRFAPGGESYASGSEDGTIRIWQLSPVNADDDEAANANGKANAAVNEVTTKLEGGFHIPKEGQAGG

SEQ ID NO: 982 - protein, 381 aa, Zea mays
MSWRRNQLRAFLVLAVILLITAATYRANAQPAPPADPTPAADTCADPSVEGACRNVPKALRLKLIAIPTILVSSVIGVCLPLLSRSVPALRPDRNLFVIVKAFASGVILATGYMHVLPDSFSNLTSPCLPRKPWADFSFTTFVAMLAALFTLMVDSLMLSFYNRRKGGNTSGRRTSGAVADHESPAHEHHWHSHGHGHGHGHAGGIVVADKPEDDEASQVQLRRNRVVVQVLEMGIVVHSVVIGLGMGASQNVCTIRPLVTAMCFHQLFEGMGLGGCILQAEYGAKMKAGLVFFFSTTTPFGIALGLALTKVYRENSPTALIVVGLLNAASAGLLHYMALVELLAADFMGPKLQSSVRLQLLCFLAVLLGAGGMSIMAKWA

SEQ ID NO: 983 - protein, 384 aa, Zea mays
MAAAGAGTGSEGKKRGASRSWILLDAAGEEQLLDADKYAIMRRVDINARDLRILDPLLSYPSTILGRERAIVLNLEHIKAIITSNEVLLRDPSDENVIPVVEELHRRLAPSSATQHDGKENLSGQHDVEGAEEDESPFEFRALEVTLEAICSFLDARTTELETDAYPALDELTSKISSRNLDRVRKLKSGMTRLTARVQKVRDELEQLLDDDDDMADLYLSRKLAGASSPVSGSGGPNWFPASPTIGSKISRASRASAATVHGNENDVEELEMLLEAYFMQVDGTLNKLTTLREYIDDTEDYINIQLDNHRNQLIQLELFLSSGTVCLSLYSLVAGVFGMNIPYTWNDGHGYIFKWVVLVSGLFCAFIFVSIVAYARHKGLVGS

SEQ ID NO: 984 - protein, 404 aa, Zea mays
  misc_feature (1)..(184): Xaa can be any naturally occurring amino acid
  misc_feature (258)..(404): Xaa can be any naturally occurring amino acid
  unsure (1)..(404): unsure at all Xaa locations
XXXXXXXXXXXXXXXXXXXXXXXXXXXXXXXXXXXXXXXXXXXXXXXXXXXXXXXXXXXXXXXXXXXXXXXXXXXXXXXXXXXXXXXXXXXXXXXXXXXXXXXXXXXXXXXXXXXXXXXXXXXXXXXXXXXXXXXXXXXXXXXXXXXXXXXXXXXXXXXXXXXXXXXXXXXXXXXXXXXXXXXXCTRKLGLELLGDGPDGVDDAGEVAEEGEDKADPELNPAAELEEDPERRQDNGEDDVDAGRRAVRHGPAGACFFXXXXXXXXXXXXXXXXXXXXXXXXXXXXXXXXXXXXXXXXXXXXXXXXXXXXXXXXXXXXXXXXXXXXXXXXXXXXXXXXXXXXXXXXXXXXXXXXXXXXXXXXXXXXXXXXXXXXXXXXXXXXXXXXXXXXXXXXXXXXXXXXXXX

SEQ ID NO: 985 - protein, 159 aa, Oryza sativa
MESLRVHASALLSLSSPAASASQPTSSSSTTEGVFECKTCSKRFPSFQALGGHRTSHTRLQAKLLSDPAAAAAAAAERDRARVHECAVCGVEFSMGQALGGHMRRHRGETGTTTVVLADADDSGGATVPQPPEPMPDLNYPPLEDAGDGSEPELLNLLV

SEQ ID NO: 986 - protein, 238 aa, Glycine max
MKIQCDVCEKAPATVICCADEAALCAKCDVEVHAANKLASKHQRLLLQCLSNKLPRCDICQDKPAFIFCVEDRALFCKDCDEPIHLASSLSANHQRFLATGIRVALGSNCTKGHEKGNMEPSNPNAQEVPVKTPSQQVPSFTSSWAVDDLLELTDFESPDKKQSLEFGELEWLADAGLFSEQFPHEALVAAEVPQLPVPHTSSVASHKAPKSLVSYKKPRIEVLDEDDDEHCTVPDLG

SEQ ID NO: 987 - protein, 401 aa, Zea mays
MEQATGVSGPEHIIDIPREIGPPASVSRSAGRENHEESNPVDRPSTRALVPALQAPSAIGAVPITGHTSGTRRNDNYVRRHRSPLNSGLWISIEVIVNFSQIVAAIVVLCVSRKEHPQAPLLEWVIGYTVGCFATLPHLYWRYIHRNIVNGEHESSHTPQGSAHNNSNEATHAASASERRRNAARNAVLANPRINALFDHFKMALDCFFAVWFVVGNVWIFGGRSSAADAPNLYRLCIVFLTFSCIGYAMPFILCAMICCCLPCIISVMGFREDTNNTRGASSESINALPTYKFKIKKRRHGSGSETEGQEGGILAAGTDKERSLSAEDAVCCICLAKYAHNDELRELPCAHCFHKDCVDKWLKINALCPLCKSEIVSSSGTSDARQSDQNTVPVQEIEMH

SEQ ID NO: 988 - protein, 412 aa, Zea mays
MDVLPVGSERESQTDSHPLLMEHAIGIPRHDVASTSTPHRDNNDGMDQLPRDSESSSGTTDASYSPNAPLARRDDNRLRRQQSLNSGFWISIELAVNLSQIIAAICVLSVSKNEHPHAPLFEWVIGYTIGCIATLPHLYWRYLQRNQLATVQGSNQNYVPDNSFESSSFTGISPPPVSEAGVVTVSNGVLRNNVVTTNLRAQAFADHFKMALDCFFAVWFVVGNVWVFGGHSSAHDAPNLYRLCIAFLTFSCIGYAMPFILCALICCCLPCIISLMGFREDLDENRGATSDAINALGTYRFRSKKPRNGEANEGSGGVFAPGTDKERAVSAEDAVCCICLARYVDNDDLRLLPCGHFFHKDCVDKWLKINALCPLCKAEIDVVPRTAPPAIGFGRRDSHRRVGNDIESQRLP

SEQ ID NO: 989 - protein, 414 aa, Zea mays
MAHTSCDGVHHVISVAHGETASTSTSHQDMCSDSDEPHQEDRLSTSTQTLSSESSPSISPTAYSTRNLSFPRRDSIYGHGRSPWNSGLWISFEIVMYIAQVVAAIVILIFSRHEHPHAPLFAWIIGYTLGCIASLPLIYWRYVHRNRHLDQEPQQPPTTYPTLTPSQSSEGRNHRTSGIVLHLGCISISCPRLSVLAYHFKTGVDCFFAVWFVVGNVWIFGGRSISSDAQDAPNMYRLCLAFLALSCVGYAIPFIMCAAICCCFPCLISVLRLQEDLGQNRGATQELIDALPTYKFKPKRVKNWGIDHASSSEHLDEGGILGPGTKKERVVSAEDAVCCICLTKYGDDDELRELPCTHFFHVQCVDKWLKINAVCPLCKTEIGGVVRSFFGLPFGRRRVDRIAARGVASSRFSV

SEQ ID NO: 990 - protein, 357 aa, Zea mays
MASLTDLVNLDLSDCTDRIIAEYIWIGGSGIDLRSKARTVKGPITDPSQLPKWNYDGSSTGQAPGEDSEVILYPQAIFKDPFRKGNHILVMCDCYTPQGEPIPTNKRYSAAKVFSHPDVAAEVPWYGIEQEYTLLQKDVSWPLGWPVGGYPGPQGPYYCAAGADKAFGRDVVDAHYKACLYAGINISGINGEVMPGQWEFQVGPSVGISAGDEIWVARYILERITEMAGIVLSLDPKPIKGDWNGAGAHTNYSTKSMREAGGYEVIKAAIDKLGKRHKEHIAAYGEGNERRLTGRHETADINTFKWGVANRGASIRVGRDTEREGKGYFEDRRPASNMDPYVVTGMIAETTILWNGN

SEQ ID NO: 991 - protein, 155 aa, Zea mays
MQIFVKTLTGKTITLEVESSDTIDNVKAKIQDKEGIPPDQQRLIFAGKQLEDGRTLADYNIQKESTLHLVLRLRGGAKKRKKKTYTKPKKIKHKHKKVKLAVLQFYKVDDATGKVTRLRKECPNAECGAGVFMANHFDRHYCGKCGLTYVYNQQA

SEQ ID NO: 992 - protein, 154 aa, Glycine max
MGLEPPLFHTLQHMMDMSEDAAGENKTYSAPTRSYVRDAKAMAATPADVKEYPNSYVFEIDMPGLKSGDIKVQVEDDNVLLISGERKRDEEKEGVKYLRMERRVGKFMRKFVLPENANTDAISAVCQDGVLSVTVQKLPPPEPKKPRTIEVKVF

SEQ ID NO: 993 - protein, 170 aa, Zea mays
MAPTVMMASSATAVAPFQGLKSAASLPVARRSTRSLGNVSNGGRIRCMQVWPAYGNKKFETLSYLPPLSTDDLLKQVDYLLRNGWIPCLEFSKLGFVYRENSTSPCYYDGRYWTMWKLPMFGCTDATQVYKELQEAIAAYPDAFHRVIGFDNVRQTQCVSFIAYKPPGSE

SEQ ID NO: 994 - protein, 325 aa, Zea mays
MLIFSSVLSLCEGKHLDGKLTAGQNTVSALGRFVLIIWLFVVLIINSSYTASLTSILTVQQLATGITGIDSLISSGLPIGYQAGKFTRNYLIEELNIPESRLVPLNTIQEYADALKRGPKDGGVVAIVDEMPYVEIFLSYHCNFRIVGQEFTKEGWGFAFKRDFPLAADLSTAILQLSESGQLQRIHDEWFTRPSCSSDDSEVGATRLGLGSFWGLFLVCALICLLALLVFFIRICWQYNKYSNSEAAGEPSAAAAAAAAVDAAAAAADAVERQRRPSRLGSFKDIIQFVDKKEEEIKKTMKRRVSEKDNNQAAGSSEAHSVASA

SEQ ID NO: 995 - protein, 361 aa, Zea mays
MALVTSGSGADQVIAEVAMNGGADPSATTVRATVVQASTIFHDTPATLDKAERLIAEAAGYGSQLVVFPEAFIGGYPRGSTFGFGISISIINPKDKGKEAFRRYHASAIDVPGPEVTRLAAVATKYKVFLVMGVIEREGYTLYCSVLFFDPLGRYLGKHRKLMPTALERIIWGFGDGSTIPVYDTPLGKIGALICWENKMPLLRTALYGKGIEIYCAPTADSRPVWQASMTHIALEGGCFVLSANQFCRRKDYPPPPEYEFAGLGEEPSADTVVCPGGSVIISPSGEVLAGPNYEGEALITADLDLGEIVRAKFDFDVVGHYSRPEVLRLVVNDQPQLPVSFTSAAERTPAAKSDIDTKSY

SEQ ID NO: 996 - protein, 285 aa, Zea mays
MPFRFQFPWLKNPTTNGGTSNIDTNPSPRFPNPFLPIQAHVTSFLSSFPRALPPPPPWARITSPASTSGALPTSEIEERLAGVPVYALANAAQEFVLVSSTRVGGQGGESVSPTQALGLLCFRKEDADALLEQMDGDMRAGSGVVPVALNKVIQMKSDGVAFRFLPDSSQVANAIKLMQDEGLYAGEGFPGVPVFQSRSLVLMSDNKRYRPVFFRKEDLDNSLHRTSRDQQKPNPAVRFGDTQVSSLEDIIKSMKDSSSSKWDDVVFIPPGFDLATGSTPSQLRK

SEQ ID NO: 997 - protein, 289 aa, Zea mays
  misc_feature (163)..(163): Xaa can be any naturally occurring amino acid
  misc_feature (177)..(177): Xaa can be any naturally occurring amino acid
  misc_feature (183)..(183): Xaa can be any naturally occurring amino acid
  unsure (1)..(289): unsure at all Xaa locations
MGRSPCCEQAHTNKGAWTKEEDQRLVAYIKAHGEGCWRSLPKAAGLLRCGKSCRLRWINYLRPDLKRGNFTEEEDDLIIKFHELFGNKWSLIAGRLPGRTDNEIKNYWNTHIKRKLLARGMDPQTHRPLASATAGQQHYQLQEPQKRAAGGGPAGHPHQDHLXGRRHLELAGRGLQXVAATTXPRSATPPRRHLDIDLNLSISLAAYQPPEETGIIKQPLVMKQEQETAAGGTNAAAVCLCLNSLGYRPGVECVCGDGSSSSSSSHSHSHSHQWALNFLQAAAPCYRGQ

SEQ ID NO: 998 - protein, 226 aa, Zea mays
MGRSPCCEKAHTNKGAWTKEEDQRLVAYIKAHGEGCWRSLPKAAGLLRCGKSCRLRWINYLRPDLKRGNFTQEEDDVIIKLHQVLGNKWSLIAAQLPGRTDNEIKNYWNTHIKRKLIARGIDPRTHQPASAAAVAPAAAAAAAAQSSFRHHGDDEAVARRSCSRDSGCIAAHSSDDDDSTSGSLPHQHAVGGIDLNLSLSPPTSQPSSPAAAKGVVASGYGQGSES

SEQ ID NO: 999 - protein, 210 aa, Glycine max
MGRSPCCEKAHTNKGAWTKEEDHRLISYIRAHGEGCWRSLPKAAGLLRCGKSCRLRWINYLRPDLKRGNFTLEEDQLIIKLHSLLGNKWSLIARRLPGRTDNEIKNYWNTHIRRKLLSRGIDPATHRPLNDDKVLERCPDLNLELTISPPRQPQSDQHHLKPVGRNSNLCFACSLGLQNSKDHCSCALNTANAASGHDFLALKTSVLEMK

SEQ ID NO: 1000 - protein, 475 aa, Zea mays
MAGGFRVLHLVRPFLAFLPEVQSADRKIPFREKVIYTVISLFIFLVCSQLPLYGIHSTTGADPFYWMRVILASNRGTVMELGITPIVTSGMVMQLLVGSKIIEVDNSVREDRALLNGAQKLLGILIAIGEAVAYVLSGMYGSVSQLGTGNAILIILQLFFAGIIVICLDELLQKGYGLGSGISLFIATNICENIIWKAFSPTTINSGRGAEFEGAVIALFHLLITRTDKVRALREAFYRQNLPNVTNLLATVLVFLIVIYFQGFRVVLPVRSKNARGQQGSYPIKLFYTSNMPIILHSALITNLYFISQLLYRKYSGNFLVNLLGMWKESEYSGHSVPVGGLAYYVTAPSSLADVLANPFHALFYVVFMLSACALFSKTWIEVSGSSAKDVAKQLKEQQMVMPGHRESNLQKELNRYIPTAAAFGGVCIGALTVLADFMGAIGSGTGILLAVTIIYQYFETFEKERATELGFFGF

SEQ ID NO: 1001 - protein, 476 aa, Glycine max
MGGGFRVLHLVRPFLSFLPEVQTADRKVPFREKVIYTVISLFIFLVCSQLPLYGIHSTTGADPFYWMRVILASNRGTVMELGITPIVTSGLVMQLLAGSKIIEVDNNVREDRALLNGAQKLLGILIAVGEAVAYVLSGMYGSVGQLGVGNAILIILQLCFAGIIVICLDELLQKGYGLGSGISLFIATNICENIIWKAFSPTTINSGRGAEFEGAVIALFHLLITRTDKVRALREAFYRQNLPNVTNLLATILIFLIVIYFQGFRVVLPVRSKNARGQQGSYPIKLFYTSNMPIILQSALVSNLYFISQLLHRKYSGNFIVDLLGKWKESEYGGGQSVPVGGIAYYITAPSSLADMAANPFHALFYLVFMLSACALFSKTWIEVSGSSARDVAKQLKEQQMVMPGHRESNLQKELNRYIPTAAAFGGICIGALTVLADFMGAIGSGTGILLAVTIIYQYFETFEKERASELGFFGF

SEQ ID NO: 1002 - protein, 72 aa, Oryza sativa
MASGRCCTFLEILLAIILPPLGVFLRFGCCSMEFCICLLLTILGYVPGIIYAVYVLVALDSDQYQREYHTLA

SEQ ID NO: 1003 - protein, 149 aa, Zea mays
MADQLTDDQIAEFKEAFSLFDKDGDGCITTKELGTVMRSLGQNPTEAELQDMINEVDADGNGTIDFPEFLNLMARKMKDTDSEEELKEAFRVFDKDQNGFISAAELRHVMTNLGEKLTDEEVDEMIREADVDGDGQINYEEFVKVMMAK

SEQ ID NO: 1004 - protein, 149 aa, Oryza sativa; identical to SEQ ID NO: 1003

SEQ ID NO: 1005 - protein, 341 aa, Oryza sativa
MLQHKMGCVILSFLEKLYKRYVIKRNQRKRQREEDLKKEDKKTSEKRPKTNDETLSESGPSNQGESVEMIKAGKGTAHSAGQPNKDDETKMNAGHSAAAQDELVKEGKEKMSADHSTAPPKELIKEGEENMNTDNSAAVHVEPVADEKMEDEEPDYEEDPEEVELYEDDEEMDEAAAEELVEQNEDNLNDKAKQEVTTEEDGNKNTEERESENNANMLEKAASGEDKQSVVEKSASVEGKQSVSEKGDKAVGKEVKTTRSQKGDSTKDEVVDKELLQAFRYFDQNRAGYLKVDDLRCILHNLGKFLSNRDVKDLVQIALVESNSARDNRIIYTKLAKKVDL

SEQ ID NO: 1006 - protein, 413 aa, Oryza sativa
MGNCGTREENAVVAAHAQVQQLHLLQHPVKNAVAERKHTRISSDMSDPSTPRKIEDAKNISIYNDVIDFTLFELETITKSFRADYVLGEGGFGTVYKGYIDENVRVGLKSLPVAVKVLNKDGHQGHREWLTEVRFLGQLRHPNLVKLIGYCCEDDHRLLVYEFMFRGSLENHLFRRTATPLSWATRMSIALGAAKGLACLHNAERPIIYRDFKTSNILLDSDYTAKLSDFGLAKAGPEGDQTHVSTRVMGTYGYAAPEYVMTGHLTARSDVYSFGVVLLELLTGRKSIDKSRPSREHSLVDWALLKLNDKRRLLQIIDPKLEGQYSVRAAHKACSLAYYCLSQNPKARPLMSDVVETLEPLQGSGGSDGAVQSVLGSGLPSYRVNRRLTTNSVHCRAIPNPKCSPAVPACRVR

SEQ ID NO: 1007 - protein, 966 aa, Oryza sativa
MARNAADKGTSIDAQLRILAPKKLSEDDKLVEYDALLLDRFLDILQDLHGEDIRETVQECYELAAEYESKVDPKQLDAIGNVLTRLDPGDSIVMTKSFSHMLILANLAEEVQIAYRRRIKLKKGDFADENSATTESNFEETLKRLVGELKKSPHEVFDALKNQTIDLVLTAHPTQSVRRSLLQKHGRIRSCLTKLYAKDITPDEKQELDEALKREIQAAFRTDEIRRAPPTPQDEMRAGMSYFHETIWKGVPKFLRRVDTALKNIGINERVPYNAPLIQFSSWMGGDRDGNPRVTPEVTRDVCLLARMMAANLYYAQIEDLMFELSMWRCSDELRVKADQLHRCAKKNTTKHYIEFWKQVPPSEPYRVILSNVRDKLYNTRERARHLLASGFSEIPDEATFTDVEQFLEPLELCYRSLCACGDNSIADGSLLDFLRQVSTFGLSLVRLDIRQESDRHTDVMDAITQYLGIGSYREWSEEKRQEWLLSELNGKRPLFGPDLPQTDEIADALDTFHVIAELPYDSFGAYVISMATAPSDVLAVELLQRECHVKKPLRVVPLFEKLADLEAAPAALARLFSVDWYRNRIDGKQEVMIGYSDSGKDAGRFSAAWELYKAQEELIKVAKQFGVKLTMFHGRGGTVGRGGGPTHLAILSQPPDTIHGSLRVTVQGEVIEQSFGEEHLCFRTLQRFTSATLEHGMHPPISPKPEWRALMDEMAAVATKEYRSIVFQEARFVEYFRLATPELEYGRMNIGSRPSKRKPSGGIESLRAIPWIFAWTQTRFHLPVWLGFGAAFKHVLQKDIRNLQILQEMYNEWPFFRVTIDLVEMVFAKGDPGIAALYDKLLVSEDLWPFGARLRANYEETKQLLLQVAGHKDLLEGDPYLRQRLRIRDSYITALNVCQACTLKRIRDPGFHVSPRAHLSKDIMDSGKPAAELVKLNTTSEYGPGLEDTLILTMKGIAAGMQNTG

SEQ ID NO: 1008 - protein, 967 aa, Zea mays
MAALGAKMERLSSIDAQLRMLVPGKVSEDDKLIEYDALLLDRFLDILQDLHGDDLKEMVQECYEVAAEYETKHDLQKLDELGKMITSLDPGDSIVIAKSFSHMLNLANLAEEVQIAYRRRIKLKKGDFADENSAITESDIEETLKRLVVDLKKSPAEVFDALKSQTVDLVLTAHPTQSVRRSLLQKHSRIRNCLVQLYSKDITPDDKQELDEALQREIQAAFRTDEIRRTQPTPQDEMRAGMSYFHETIWKGVPKFLRRVDTALKNIGINERVPYNAPLIQFSSWMGGDRDGNPRVTPEVTRDVCLLARMMASNLYCSQIEDLMFELSMWRCSDELRMRADVLHLSTKKDAKHYIEFWKKVPPNEPYRVILSDVRDKLYNTRERSRELLSSGHSDIPEEATLTNVEQLLEPLELCYRSLCACGDSVIADGTLLDFLRQVSTFGLSLVRLDIRQESDRHTDVLDAITTYLGIGSYREWTEERRQEWLLSELNGKRPLFGSDLPKTEEISDVLDTFHVIAELPSDNFGAYIISMATAPSDVLAVELLQRECHVKTPLRVVPLFEKLADLEAAPAALARLFSIDWYRQRINGKQEVMIGYSDSGKDAGRLSAAWQLYKAQEELIKVAKDFGVKLTMFHGRGGTVGRGGGPTHLAILSQPPDTIHGSLRVTVQGEVIEQSFGEEHLCFRTLQRFTAATLEHGMHPPNAPKPEWRALLDEMAVVATEEYRSIVFKEPRFVEYFRLATPETEYGRMNIGSRPSKRKPSGGIDSLRAIPWIFAWTQTRFHLPVWLGFGAAFKNVLQKDIRNLHMLQEMYNEWPFFRVTIDLVEMVFAKGNPGIAALYDKLLVSEELHPLGEKLRANYEETQKLLLQVAGHRDLLEGDLYLKQRLRLRDAYITTLNVCQAYTLKRIRDPDYHVALRPHLSKEIMDSTKAAAELVKLNPGSEYAPGLEDTLILTMKGIAAGLQNTG

SEQ ID NO: 1009 - protein, 967 aa, Glycine max
MATRNLEKMASIDAQLRQLAPAKVSEDDKLIEYDALLLDRFLDILQDLHGEDLKETVQEVYELSAEYEGKHDPKKLEELGNLITSLDAGDSILVAKSFSHMLNLANLAEEVQISRRRRNKLKKGDFADENNATTESDIEETLKKLVFDLKKSPQEVFDALKNQTVDLVLTAHPTQSIRRSLLQKHGRIRNCLSQLYAKDITPDDKQELDEALQREIQAAFRTDEIRRTPPTPQDEMRAGMSYFHETIWNGVPRFLRRVDTALNNIGIKERVPYNAPLIQFSSWMGGDRDGNPRVTPEVTRDVCLLARMMAANLYYSQIEDLMFELSMWRCNDELRVRAEELHRSSKKDEVAKHYIEFWKKVPPNEPYRVVLGEVRDRLYQTRERSRHLLSNGYSDIPEEATFTNVEEFLESLELCYRSLCACGDRAIADGSLLDFMRQVSTFGLSLVRLDIRQESDRHTDVLDAITKHLEIGSYQEWSEEKRQEWLLSELSGKRPLFGPDLPQTEEIRDVLDTFHVIAELPPDNFGAYIISMATAPSDVLAVELLQRECHIKHPLRVVPLFEKLADLEAAPAALARLFSIDWYRNRINGKQEVMIGYSDSGKDAGRFSAAWQLYKAQEELINVAKKFGVKLTMFHGRGGTVGRGGGPTHLAILSQPPDTIHGSLRVTVQGEVIEQSFGEQHLCFRTLQRFTAATLEHGMHPPISPKPEWRALMDQMAVIATEEYRSIVFKEPRFVEYFRLATPELEYGRMNIGSRPAKRRPSGGIETLRAIPWIFAWTQTRFHLPVWLGFGAAFKKVIEENVKNLNMLQEMYNQWPFFRVTLDLVEMVFAKGDPKIAALNDRLLVSKDLWPFGDQLRNKYEETRKLLLQVAGHKEILEGDPYLKQRLRLRHAPITTLNIVQAYTLKRIRDPNYNVKVRPRISKESAEASKSADELVKLNPTSEYAPGLEDTLILTMKGIAAGMQNTG

SEQ ID NO: 1010 - protein, 162 aa, Zea mays
MAMRALPLTPSRSSSFGAHQTRPSGGGPRSVRAYAKGDEEGDKQSLFGSITEALDFSQVRSEKDAELLYEARESTKGGGRMTREQYGALRRKIGGTYQDFFKSYVEVDGQYVEEGWVDKTCKICKKDTRGEPRQVDKLGRYAHVACLENPKPTNFFAKIFAR

SEQ ID NO: 1011 - protein, 517 aa, Zea mays
MEPAYVVTLSFLFLFLLHHLLGRHRRRTNGKNKRTQLPPSPPAIPVLGHLHLLRKPIHAALARLAERYGPVFFLRLGSRQAVVVSSAACATECFTENDVCFANRPRFPTLLLVSFGGATLPMCRYGSYWRNLRRVATVQLLSAHRVSCMLPVISAEVRAMARRMYQSAAAAPAGAARVELKRRLFELSHSALMETIARTKTSRAVADDDTDMSPEAQEFMKALDVFLPLLSGANAWDYLPVLRWLDVFGVRNKILRAVSARDAFLRRLIDAERRRLEEGGENNDKKSMIGVLLSLQKSEPEVYTDTMIMALCSSMFAGGSETTATTAEWAMSLLLSHPDVLKKAQAEIDASVGHSRLLGADDLPRLGYLHCIISETLRLYPVVPTLVPHESTADCTVGGHRVPSGTMLLVNVYAIHRDPAIWADPAAFRPERFEDGRADGLFVMPFGMGRRKCPGEALALRTLGLVLGTLIQCFDWDTVGGAEVDMAEGGGITLPRAVPLEAICKPRHAMLGVLKGL

SEQ ID NO: 1012 - protein, 106 aa, Zea mays
MAELVGPRVYSCCTCRNHVCLHDDIISKAFQGRNGRAFLFSHAMNVVVGAKEDRHLMTGLHTVADIYCNDCREVLGWKYVRAYEETQKYKEGKFIFEKSKIVKENW

SEQ ID NO: 1013 - protein, 129 aa, Zea mays
MGRLFLMHLDGNVYSCKHCKTHLGVASDIISKAFQCKHGKAYLFHKVVNVTSGVKEDRMMITGMHTVSDIFCVGCGSIVGWKYDAAHEKGQRYKEGKFILERYKVSGPDGSQYWVPQDAHLGGSDADDI

SEQ ID NO: 1014 - protein, 157 aa, Glycine max
MSIIPNLFGGRRSNVFDPFSLDVWDPFEGFPFSTGHVPSSGGESSAIANTRVDWKETPAAHVFNVDLPGLKKEEVKVEVEDGRVLQISGERTKEQEQKDDRWHRVERSTGKFMRRFRLPENAKMDQVKAAMENGVLTVTVPKEEDKKPQVKSIQISA

SEQ ID NO: 1015 - protein, 716 aa, Zea mays
MATADQSRIFMKDVKRVIIKVGTAVVTRHDGRVSTGNFGVLCEQVKEINALGYEVIIVSSGAVGVGKQRLNYRKLVNSSFADMQKPQTELDGKACAAVGQSGLMALYDMLFTQLDVSSSQLLVTDSDFENPNFRERLRETVESLLDLKVVPIFNENDAISTRKAPYEDSSGIFWDNDSLAGLLAIELKADLLVLLSDVDGLYSGPPSEPQSKMIHTYIKDKYHNEITFGDKSRVGRGGMTAKVKAALVASNSGTPVVITSGSASGSIIRVLQGEKIGTLFHKDASLWEPSSDVSACEMAVTARECSRRLQNLSSDERNKILLDVADALEKNENLIRTENEADVAAAQDAGYEKFLVDRLTLKPGKISALAKSIRTLARMEDPINQILKRTEIAENLILEKTSCPLGVLLVIFESRPDALVQIASLAIRSGNGLLLKGGKEAMRSNKVLHKVITGAIPSNVGEKLIGLVTSRDEIADLLKLHDVIDLVIPRGSNKLVSQIKTSTKIPVLGHADGICHVYIDKSANMNMAKQIVMDAKIDYPAACNAMETLLVHKDLIKAPGLDDLLLSLKTKGVAIFGGPVAHEVLCIPEANSFHHEYSSMACAIEFVDDVQSAIDHIHCYGSAHTDCIVTTDDKVAETFLRQVDSAAVFHNASTRFSDGARFGLGAEVGISTGRIHARGPVGVEGLLTTRWIMRGSGQVVNGDNDIAYTHKNLPLP

SEQ ID NO: 1016 - protein, 316 aa, Glycine max
MATLKVPQPLPPVADDCEQLRKAFSGWGTNEELIVSILAHRNAAQRKLIRETYAQTYGEDLLKALDKELTSDFERLVHLWTLDSAERDAFLANEATKKWTSSNQVLVEIACTRSSEQLFAARKAYHVLYKKSLEEDVAHHTTGDFRKLILPLVSSYRYEGDEVNLTLAKTEAKLLHEKISNKAYNDDDFIRILATRSRAQINATLNHYKDAFGQDINKDLKADPKDEFLSLLRATVKCLIRPEKYFEKVVRLAINKRGTDEGALTRVVATRAEVDLKNIADEYQRRSSVPLERAIVKDTTGDYEKMLVALLGHDDA

SEQ ID NO: 1017 - protein, 313 aa, Glycine max
MATLIAPSNHSPQEDAEALRKAFEGWGTDENTVIVILGHRTVYQRQQIRRVYEEIYQEDLVKRLESEIKGDFEKAVYRWILEPADRDAVLANVAIKSGKNYNVIVEIATILSPEELLAVRRAYLNRYKHSLEEDVAAHTSGHLRQLLVGLVTAFRHVGDEINPKLAQSEAEILHDAVKEKKGSYEETIRVLTTRSRTQLVATFNRYREIHGTSISKKLVDEGSDEFQRALYTAIRAINDPIKYYEKVVRNAIKKVGTDEDALTRVVVSRAEKDLKIISEVYYKRNSVLLEHAIAKEISGDYKKFLLTLLGKED

SEQ ID NO: 1018 - protein, 326 aa, Glycine max
  misc_feature (307)..(307): Xaa can be any naturally occurring amino acid
  unsure (1)..(326): unsure at all Xaa locations
MATLTVPPVPPSPRDDAMQLYRAFKGFGCDTSAVINILAHRDATQRAYIQQEYKAMYSEELSKRLASELSGKLETAVLLWLHDPAGRDATIIRKSLTADNKTLEGATEVICSRTPSQLQYLKQIYHSMFGVYLEHDIQTNTSPGDHQKLLLAYISTPRHEGPEVNREIAQKDAKGLYKAGEKKLGTDEKTFIHIFSERSAAHLAAVSSYYHDMYGHSLKKAVKNETSGAFEHALLTIIQCAVNPGKYFAKVLHKAMKGLGTDDSTLIRVVVTRTEVDMQYIKAAYLKKHKKTLNDEVHSETSSHYRXFFSHFWALITSSRPSFLVQ

SEQ ID NO: 1019 - protein, 214 aa, Glycine max
MKVSIAKFHSLPLCFLLLLAINTQPLLAAEPEPVVDKQGNPLVPGVGYYVWPLWADNGGLTLGQTRNKTCPLDVIRDPSFIGSPVRFHASGLNHIPTLTDLTIDFPVVTVCNQPTVWRLSKEGSGFWFVSTRGNPQDLITKFKIERLEGDHAYEIYSFKFCSSVPGVLCAPVGTFVDADGTKVMAVGDNIDPYYVRFQKVSTFGQDKKQPFSIV

SEQ ID NO: 1020 - protein, 239 aa, Zea mays
MDSDLWISRLMAAKRQFALQRAQRQHAAPASHHDRFGYDDIEPEDDVRSDFPCPYCYEDHDVTSLCAHLEDEHPFESKIVSCPVCLARISKNLLDHITLQHGYLFKLQRHHRVRRVTGNGNHNLSYAGRDLQLQETYLKVLLGNSSRSSSTNASSTVTDSLLSSLVLNLSSLEVEDTSKSSAPSVVENNWFKRSLPSKTWKLSAVDSSLSHEERERRRRRAVVRSAFVQHLLVTTLFED

SEQ ID NO: 1021 - protein, 78 aa, Zea mays
MGGLSTKLFVVLLLLVCYTGTQGGPVTMVSARKCESQSFRFKGPCSRDANCANVCLTEGFTGGVCKGLRHRCFCTRDC

SEQ ID NO: 1022 - protein, 387 aa, Glycine max
MVIEEGEMKSQGEVESWLQQEAKKNHHSPLFSSSSYLGRQTSSIYSLTLDEFQHSLCESGKNFGSMNMDEFLSSIWNAEENSQAITNNNVPLSSTLTILRKQPSLPRQPSLSLPAPLCRKTVDEVWSQIQKEQNKNNNISNVLNDNTESAPRQPTFGEMTLEDFLVKAGVVRETTCAPPLPVSHSHQPHYANNNNNVAMAPSFVGRHVGAVSNVVAPGYQQVVGEASGGYGKRDHNGGGYHCFGGGGGGYGVGPTMGMGGPVSPANSSDGIGNDGGQFGLDMGGLRGRKRVVDGPVEKVVERRQRRMIKNRESAARSRARKQAYTVELEAELNQLREENSQLKQALAELERGRKQQCFEEVNVSVKTKAQKAKEKLRALRRNMSCPL

SEQ ID NO: 1023 - protein, 331 aa, Arabidopsis thaliana
MSVFESETSNFHVYNNHEIQTQPQMQTFLSEEEPVGRQNSILSLTLDEIQMKSGKSFGAMNMDEFLANLWTTVEENDNEGGGAHDDGEKPAVLPRQGSLSLPVPLCKKTVDEVWLEIQNGVQQHPPSSNSGQNSDENIRRQQTLGEITLEDFLVKAGVVQEPLKTTMRMSSSDFGYNPEFGVGLHCQNQNNYGDNRSVYSENRPFYSVLGESSSCMTGNGRSNQYLTGLDAFRIKKRIIDGPPEILMERRQRRMIKNRESAARSRARRQAYTVELELELNNLTEENTKLKEIVEENEKKRRQEIISRSKQVTKEKSGDKLRKIRRMASAGW

SEQ ID NO: 1024 - protein, 328 aa, Glycine max
MSNNNAGKVVCVTGASGFIASWIVKFLLQRGYTVRATVRYPSNLKKVDHLVKLEGAKERLQLFKADLLEEGSFDSVVEGCHGVFHTASPVRFVVNDPQAELLDPAVKGTLNVLKSCAKSPSVKRVVLTSSISAVAFNRRPKTPQVVVDETWFSDPDVCRELELWYTLSKTLAEDAAWKFVNENSIDMISINPTMVAGPLLQPEINESVEPILNLINGKPFPNKSFGWVDVKDVANAHILAYEIASASGRYCLVERVIHYSELATILRGLYPTLQIPDKCEVDEPYIPTYQISTEKAKKDLGIEFTPLEVSLRETVESFREKKIVNFNP

SEQ ID NO: 1025 - protein, 323 aa, Brassica napus
MSTEREVVCVTGASGCIGSWLVHLLLLRGYSVHATVKNLQDEKETKHLEALEGAATRLHLFEMDLLKYDTVSAAVNGCSGVFHLASPCIVDEVQDPQKQLLDPAVKGTLNVLTAAKEAGVKRVVVTSSISAITPSPNWPADKIKNEDCWADEDFCKQNGLWYPLSKTLAEKAAWEFAEEKGLDVVVVNPGTVMGPVIPPSINASMLMLQRLLEGCTETYENFFMGSVHFKDVALAHILVYENPSAKGRHLCVEAISHYGDFVAKVAELYPNYSVPKLPRETQPGLLRAKNAAKKLMELGLEFSSMEVIIKDGVESLKSKGFIS

SEQ ID NO: 1026 - protein, 320 aa, Glycine max
MEKVVCVTGGSGCIGSWLVHLLLDRGYTVHATVQNLNDEAETKHLQSLDGASTRLRLFQMDLLRHDTVLAAVRGCAGVFHLASPCIVDQVHDPQKELLDPAIKGTMNVLTAAKEAGVRRVVLTSSISAVTPSPNWPGDVAKTEECWTDVEYCKQKGLWYPLSKTLAEKAAWDFAKENDLDVVVVNPGTVMGPVIPPRLNASMVMLVRLLQGCAETYEDFFMGSVHFKDVALAHILVYENKSAAGRHLCVEAISHYGDFVAKVAELYPEYNVPKMQRDTQPGLLRTKDGAKKLMDLGLQFIPMEKIIKDAVEDLKSKGFLS

SEQ ID NO: 1027 - protein, 323 aa, Zea mays
MGTGKVVCVTGASGYIASWIVRLLLDRGYTVRATVRDTADPKKTLHLTALDGAKDRLHLFKASLLEEGSFDAAVHGCDTVFHTASPFYHNVKDAKAELLDPAVKGTLNVLGSCKKASIKKVVVTSSMAAVAYNGRPRTPEVTVDETWFSDPQICETNQQWYILSKTLAEEAAWKFSRDNGLEIVTINPAMVIGPLLQPTLNTSAEAILKLINGSSSTYPNFCFGWVNVKDVALAHILAYEVPSSNGRYCMVERVVHYSELVNIIRNMYPTLPLPDKCADDKPFVPPYQVSKEKIKSIGIELIPLETSVKETIESLKEKGFASF

SEQ ID NO: 1028 - protein, 451 aa, Arabidopsis thaliana
MSSIPPFLSKTYDMVDDPLTDDVVSWSSGNNSFVVWNVPEFAKQFLPKYFKHNNFSSFVRQLNTYGFRKVDPDRWEFANEGFLRGQKQILKSIVRRKPAQVQPPQQPQVQHSSVGACVEVGKFGLEEEVERLQRDKNVLMQELVRLRQQQQVTEHHLQNVGQKVHVMEQRQQQMMSFLAKAVQSPGFLNQFSQQSNEANQHISESNKKRRLPVEDQMNSGSHGVNGLSRQIVRYQSSMNDATNTMLQQIQQMSNAPSHESLSSNNGSFLLGDVPNSNISDNGSSSNGSPEVTLADVSSIPAGFYPAMKYHEPCETNQVMETNLPFSQGDLLPPTQGAAASGSSSSDLVGCETDNGECLDPIMAVLDGALELEADTLNELLPEVQDSFWEQFIGESPVIGETDELISGSVENELILEQLELQSTLSNVWSKNQQMNHLTEQMGLLTSDALRK

SEQ ID NO: 1029 - protein, 400 aa, Glycine max
MAGICCGVVGEAAETSSPIEPTSRPSARRSLDLLPLKYIAADVSVPPLENSRKRQRLDRRASPARECDNAVHSSKSKVVEVVPNYSSKSPTLDSTSPTVVEEYPRYGVTSVCGRRRDMEDAVSVHPSFCQETLSHDKKLGFHFFAVFDGHGCSHVATMCKERLHEIVKEEVHQAKENLEWESTMKKCFARMDEEVLRWSQNNETPSCRCELQTPHCDAVGSTAVVAVVTPEKIIVANCGDSRAVLCRNNVAVPLSDDHKPDRPDELLRIQVAGGRVIYWDGPRVLGVLAMSRAIGDNYLKPYVISEPEVTVTERSEEDECLILGSDGLWDTVQNDIACKVVRMCLNAQKPPSPPSSPRREMAVDCSDKACSNASILLTKLALVRQSSDNVSVVVVDLRRT

SEQ ID NO: 1030 - protein, 280 aa, Glycine max
MAEFTSTTTNTNSNSGLRLKAKVAIVTGGASGIGEATARVFAEQGARMVVLADIQDELGNQVAASIGTQRCTYIHCDVADEEQVQNLVQSTVDAYGQVDIMFSNAGILSPSQQTVPELDMSQLDRLFAVNVRGMAACVKHAARAMLEGRVRGSIVCTASVGGSHGGPNATDYIMSKHAVLGLMRSASVQLAEHGIRVNCVSPNGLATPLTCKQRGMSEEEGQEVYRKYARLQGVVLTPKHVADAVLFLVSDDSAFVTALDLRVDGGFTLPSISISNSILL

SEQ ID NO: 1031 - protein, 496 aa, Glycine max
MAKPHSGTPAVAPKPAWVLPYRTENLREVYTLSRKLGQGQFGTTFLCTHKGTGRTYACKSIPKRKLLCKEDYDDVWREIQIMHHLSEQPNVVRIHGTYEDAASVHLVMELCEGGELFDRIVRKGHYSERQAAKLIKTIVEVVEACHSLGVMHRDLKPENFLFDTVEEDAKLKTTDFGLSVFYKPGETFCDVVGSPYYVAPEVLRKHYGPEADVWSAGVILYILLSGVPPFWAETEQGIFRQILLGRLDFQSEPWPSISDSAKDLIRKMLDRNPKTRVTAHQVLCHPWIVDDNIAPDKPLDSAVLSRLKQFSAMNKLKKMALRVIAERLSEEEIGGLKELFRMIDADNSGTITFDELKEGLKRVGSELMESEIKDLMDAADIDNSGTIDYGEFIAATVHLNKLEREENLVSAFSYFDKDGSGYITIDEIQQACKEFGLDDVHIDEIVKEIDQDDDGQIDYGEFAAMMRKGNGGIGRRTMRSTLNFRDTLGIKGHGSD

SEQ ID NO: 1032 - protein, 542 aa, Oryza sativa
MGNQCQNGTLGSDYHNRFPREHAVGYVQGDSYLDLKKFDDTWPEVNNFKPTAASILRRGLDPTSINVLGRKTADLREHYIIGRKLGQGQFGTTYLCTEINTGCEYACKTIPKRKLITKEDVEDVRREIQIMHHLSGHKNVVAIKDVYEDGQAVHIVMELCAGGELFDRIQEKGHYSERKAAELIRIIVSIVAMCHSLGVMHRDLKPENFLLLDKDDDLSIKAIDFGLSVFFKPGQVFTELVGSPYYVAPEVLHKRYGPESDVWSAGVILYVLLSGVPPFWAETQQGIFDAVLKGHIDFQSDPWPKISDSAKDLIRKMLSHCPSERLKAHEVLRHPWICENGVATDQALDPSVISRLKQFSAMNKLKKLALRVIAERLSEEEIAGLREMFKAVDTKNRGVITFGELREGLRRFGAEFKDTEIGDIMEAAHNDNNVTIHYEEFIAATLPLNKIEREEHLLAAFTYFDKDGSGYITVDKLQRACGEHNMEDSLLEEIISEVDQNNDGQIDYAEFVAMMQGSNVGLGWQTMESSLNVALRDAPQVH

SEQ ID NO: 1033 - protein, 534 aa, Oryza sativa
MGNSCQNGTYGNNYQNSNRFQNDRFASRYVDGNDTEDCYSGSSRASLAGALRQGLNLKSPVLGYKTPNVRELYTLGRELGQGQFGKTYLCTEISTGCQYACKTILKSNLRCVSDIEDVRREIQIMHHLSGQKNIVTIKDTYEDEQAVHIVMELCAGGELFSKIQKRGHYSERKAAELIKIIVGIIETCHSHGVMHRDLKPENFLLLDADDEFSVKAIDFGLSVFFRPGQVFREVVGSPYYIAPEVLEKRYGPEADIWTAGVILYVLLTGVPPFWADTQSGIYEKVLDGRIDFKSNRWPRISDSAKDLIKKMLCPYPSERLKAHEVLKHPWICDNGVATNRALDPSVLPRLKQFSAMNRLKKLSLQIIAERLSEEEIVGLREMFKAMDTKNRSVVTFGELKGLKRYSSVFKDTEINDLMEAADDTTSTINWEEFIAAAVSLNKIEREKHLMAAFTYFDKDGSGFITVDKLQKACMERNMEDTFLEEMILEVDQNNDGQIDYAEFVTMMQSNNFGLGWQTVESSLNVALREAPQVY

SEQ ID NO: 1034 - protein, 290 aa, Oryza sativa
MEDERNTESHQGGEAAEQVEVKDRGLFDNLLGRKKDDQPEEKKHEEELVTGMEKVSVEEPKKEEHHAEGEKKESLLSKLHRSSSSSSSSSDEEEEVIDDNGEVVKRKKKKGLKEKIKEKLPGHKDHAGEHAPPPAATGFPAPAPPASVVTAAPTPAPAPVVTHGDHHHDTAVPVEKIEGDHAKTEATLPRAPEEEKKGFLDKIKEKLPGGHKKPEDATAVPPPAASPAAPATTPAPAHPPPATEEVSSPDGKEKKGILGKIMEKLPGYHKGSGEEDKTAAAATGEHKSSA

SEQ ID NO: 1035 - protein, 259 aa, Oryza sativa
MASGRIALLCLLGLLLVAASPAAIAAKDDKIFYQITFMWPGAYCAQTKAGCCMPKTDVAPASDFYVAGFTVYNATTNSSLSSCSNTPFDMNQIGDVTRLMQYWNNIRCPSKSGQKGWKNAWETSGVCSDLTESAYFDTALALRDKINPLSRLVSNGIKPDFGLYSVKKIKEVIEEGIGAPALIQCSKGPFNKFQLYQIYVCVAEDAKTFVECPSPRKPYTCGDDILFHPFKKWMLKTNSTKSYAAADAIDQLLEAVMEI

SEQ ID NO: 1036 - protein, 185 aa, Zea mays
MDSEHWISRLAAAKRFYAAQLGHSDRAGMDELEMDEEVRPEFPCPYCYEDHDVGSLCAHLEEEHPFEPLSLLSRDLREAHLQVLLGGGGQRSSDNSSSSSATNISADPLLSSFGLGFPTSDAEQASKSTVSIPDDATTVKEAPAQARKLSIDSSLTSEERELKRKQARVRATFVQDLLLSTLFGD

SEQ ID NO: 1037 - protein, 285 aa, Glycine max
MAKHDVEGGSFAAKDYHDPPPAPLIDAEELTQWSFYRALIAEFIATMLFLYITVLTVIGYKSQSDVKAGGDVCGGVGILGIAWAFGGMIFILVYCTAGISGGHINPAVTFGLFLARKVSLIRAIMYMVAQCLGAICGVGLVKAFQKAYYNRYGGGANELSEGYSTGVGLGAEIIGTFVLVYTVFSATDPKRNARDSHVPVLAPLPIGFAVFMVHLATIPVTGTGINPARSLGAAVMYNQQKAWDDHWIFWVGPFIGAAIAAFYHQFILRASAAKALGSFRSNPTI

SEQ ID NO: 1038 - protein, 284 aa, Glycine max
MAKDVEVAERGSFSGKDYQDPPPAPLIDAEELTKWSFYRALIAEFIATLLFLYITVLTVIGYKHQTDHADACGGVGILGIAWAFGGMIFILVYCTAGISGGHINPAVTFGLFLARKVSLIRAIMYMVAQCLGAICGVGLVKAFQKSYFNKYGGGANSLADGYSTGTGLGAEIIGTFVLVYTVFSATDPKRNARDSHVPVLAPLPIGFAVFMVHLATIPVTGTGINPARSLGAAVIYNQDKPWDDHWIFWVGPFIGAAIAAFYHQFILRAGAAKALGSFRSNPHN

SEQ ID NO: 1039 - protein, 214 aa, Zea mays
MAPMKLYGAVMSWNVTRCATALEEAGSDYEIVPINFATAEHKSPEHLVRNPFGQVPALQDGDLYLFESRAICKYAARKNKPELLREGNLEEAAMVDVWIEVEANQYTAALNPILFQVLISPMLGGTTDQKVVDENLEKLKKVLEVYEARLTKCKYLAGDFLSLADLNHVSVTLCLFATPYASVLDAYPHVKAWWSGLMERPSVQKVAALMKPSA

SEQ ID NO: 1040 - protein, 354 aa, Zea mays
MITFGKVVCRKKNPNCGACPFSASCKYYNSSLAKKSLPLPEKHEQGEQQTSMVAYGSCTPSSQQMYRYQIAISSTTTETPPIHSCEPIVEMPPSPEYEYNETPNEQEDFYEDYACDIEDFAPGVQYDSEINICSNKHTLNNNSWTPNCGKDLAVINPKCSFGQSKKLKNTGRLRTEHNAYVLPDGHVILEEFEDRVPGDRCPYLLVVISCPDDYKVKGTVLIPCRTANRGKFPLNGTYFQENEVFADYSSSRNPITVPRECIGMLERSIVYFGSSIHSITKGQTRQDIQECLKEGYICVRSFHRKTRIPLRLCSTLHATNTKPAREKPMKRTRTSPEGKKNGTSPEGKKNESLF

SEQ ID NO: 1041 - protein, 591 aa, Oryza sativa
MAAMNEKVLDKCGRNISSLKRKRDNPAARCADAGNTSKLHKHPADNSVVRFYVDEGHKAKIKCHFKMQIIQSYQNFMTSALPKRILLRQGGEWKDFPKQIVKLAHSDFRTKKTITEGEHQTHLFLLDFVHMTFIDSKTGLQRPIAWIDENGKQYFPEFFIEDKTLYRKKELGNGNNVYIIVEPNGTQEMNDHFGTSESSAESSNFESSTDDVSSPKRAKAERSVAGNKTGGVKETIGENEPHALLPIPCRSLPQDKLGDHSRVQLAISAVQKLLLQGLGTVLGSKDIVGIYRTPAVDNHKEFRYNLFKKQAEHTKCKRGNANVRYAWLACSKDAVDEMMLNGVMHFEKTVKCPDYGIGTILAPANCSNTCVNYSDVDENGIVHMMLCRVVMGNVEIVHHGSKQHRPSNEYFDSGVDDIKNPQHYIVWDMNVNSHIYSEFVVTIKLPSRVKDSPATEEDCHNLSEVSSLILSSGSPDSVSQDMNLQASPALGGHYEAPMLGDKVERAPSTPWMPFSMLFAAISTKVSAENMDMVNSCYEEFKSKKISRVDLVKKLRHIVGDRMLISTIMRLQDKLPPMSRHEAPKHVGQDDG

SEQ ID NO: 1042 - protein, 302 aa, Zea mays
MHSLERSAVSDAFFEDPNSFKKVPCPSVLDPPEKYISLIVPAYNEEYRLPEALTETLNYLKRRSTADKSFSYEVLIVDDGSTDGTSKVAFSFVKQHKIDNVRVLLLGRNHGKGEAVRKGMLHSRGELLLMLDADGATKVTDLEKLEAQIHALAKKAKSSPGTSTSSSQNLSDVEVAVFGSRAHLEKQALATRKWYRNFLMKGFHLVVLLTAGPGIKDTQCGFKMFTRAAARKLFTNIRLKRWCFDVELVYLCKRLRIPMVEVSVNWTEIPGSKVRMTSIMHMVFELLLIKVGYGLGIWKIGS

SEQ ID NO: 1043 - protein, 495 aa, Zea mays
MARKMLIDGEVAAVADGGHYDYDLFVIGAGSGGVRGSRTAASFGAKVAICELPFHPISSEWLGGHGGTCVIRGCVPKKILVYGASFRGEFEDSKNFGWEINGDINFNWKTLLENKTKEIVRLNGVYQRILTSAGVTMIEGAGSLVDAHTVEVSQPDGSKQRYTAKHILIATGSRAQRVNIPGKDLAITSDEALSLEELPKRAVILGGGYIAVEFASIWRGMGAEVDLFYRRDLPLRGFDDEMRAIVASNLEGRGIKLHPGTNLSELSKTADGIKVVTDKGEELIADVVLFATGRTPNSQRLNLQAAGVEIDRVGAIKVDEYSRTSAPSVWAVGDVTNRINLTPVALMEATCFAKTVFGGQQVKPDHRDVPCAVFSIPPLSVVGLSEEQALEEANGDILVFISSFNPMKNSISKRQEKTIMKLVVDAETDKVLGASMCGPDAPEIIQGIAIAVKCGATKADFDSTVGIHPSAAEEFVTMRTVTRRLSPTSKPKTNL

SEQ ID NO: 1044 - protein, 500 aa, Glycine max
MAMANLARRKGYAVVLSSRSSLCLTRWRGFASGSDENDVVVIGGGPGGYVAAIKAAQLGLKTTCIEKRGTLGGTCLNVGCIPSKALLHSSHMYHEAKHAFANHGVKFSSVEVDLPAMMAQKDKAVSNLTKGIEGLFKKNKVNYVKGYGKLVSPSEVSVDTTEGGNTVVKGKHIIIATGSDVKSLPGITIDEKKVVSSTGALALTEIPKRLIVIGAGYIGLEMGSVWGRLGSEITVVEFASEIVPTMDAEVRKQFQRSLEKQGMKFKLKTKVVGVDTSGDGVKLTLEPAAGGDQTTLEADVVLVSAGRTPFTAELGLDKIGVETDKIGRILVNERFATNVSGVYAIGDVIPGPMLAHKAEEDGVACVEYIAGKVGHVDYDKVPGVVYTMPEVASVGKTEEQVKELGVEYRVGKFPFLANSRAKAIDNAEGLVKILAEKETDKILGVHIMAPNAGELIHEAAIALQYDASSEDIARVCHAHPTMSEAVKEAAMATYDKPIHI

SEQ ID NO: 1045 - protein, 496 aa, Oryza sativa
MARKMLKDEEVEVAVTDGGSYDYDLFVIGAGSGGVRGSRTSASFGAKVAICELPFHPISSDWQGGHGGTCVIRGCVPKKILVYGSSFRGEFEDAKNFGWEINGDINFNWKRLLENKTQEIVRLNGVYQRILGNSGVTMIEGAGSLVDAHTVEVTKPDGSKQRYTAKHILIATGSRAQRVNIPGKELAITSDEALSLEELPKRAVILGGGYIAVEFASIWKGMGAHVDLFYRKELPLRGFDDEMRTVVASNLEGRGIRLHPGTNLSELSKTADGIKVVTDKGEEIIADVVLFATGRTPNSQRLNLEAAGVEVDNIGAIKVDDYSRTSVPNIWAVGDVTNRINLTPVALMEATCFSKTVFGGQPTKPDYRDVPCAVFSIPPLSVVGLSEQQALEEAKSDVLVYTSSFNPMKNSISKRQEKTVMKLVVDSETDKVLGASMCGPDAPEIIQGMAVALKCGATKATFDSTVGIHPSAAEEFVTMRTLTRRVSPSSKPKTNL

SEQ ID NO: 1046 - protein, 166 aa, Glycine max
MATSSAKSVHDFTVKDAKGNDINLGDYKGKVLIIVNVASQCGLTNSNYTELSQLYEKYKQKGLEILAFPCNQFGAQEPGSNEQIQEFVCTRFKAEFPVFDKVDVNGDKAAPLYKYLKSSKGGLFGDGIKWNFSKFLVDKEGNVVDRYAPTTSPLSIEKDLLKLLDA

SEQ ID NO: 1047 - protein, 168 aa, Zea mays
MAASSTATSVHDFIVKDASGKDVDLSTYKGKVLLIVNVASQCGLTNSNYTELAQLYEKYKDQGFEILAFPCNQFGGQEPGTNEEIVQFACTRFKAEYPIFDKVDVNGNNAAPIYKFLKSSKGGLFGDSIKWNFSKFLVDKEGRVVDRYAPTTSPLSIEKDIKKLLGSS

SEQ ID NO: 1048 - protein, 170 aa, Zea mays
MGAAESVPETSIHEFTVKDCNGKEVSLETYKGKVLLVVNVASKCGFTETNYTQLTELYQKYRDKDFEILAFPCNQFLRQEPGTDQQIQDFACTRFKAEYPVFQKVRVNGPDAAPVYKFLKASKPGLFGSSRIKWNFTKFLVDKDGKVIERYGTSTAPMAIEKDIQKALEE

SEQ ID NO: 1049 - protein, 535 aa, Zea mays
MALAFDEFGRPFIILREQEKKTRLRGLDAQKANIASAKAVARILRTSLGPKGMDKMLQSPDGDVIITNDGATILEQMDVDNQIAKLMVELSRSQDYEIGDGTTGVVVMAGALLEQAEKLLERGIHPIRVAEGYEMASKVAFDHLEHISEKFEFSADNIEPLVQTCMTTLSSKIVNRCKRALAEIAVKAVLAVADLERKDVNLDLIKVEGKVGGKLEDTELVYGIIVDKDMSHPQMPKRIEDAKIAILTCPFEPPKPKTKHKVDIDTVEKFQTLREQEQKYFDEMVQKCKDAGATLVICQWGFDDEANHLLMHRNLPAVRWVGGVELELIAIATGGRIVPRFQELSPEKLGKAGLVREKSFGTTKDRMLYIEKCANSRAVTIFIRGGNKMMIEETKRSLHDALCVARNLIRNNSIVYGGGSAEISCSIAVETAADRHPGVEQYAIRSFADALDAVPLALAENSGLSPIDTLTAVKAQQVKESNPHCGIDCNDVGTTDMKEQNVFETLIGKQQQILLATQVVKMILKIDDVISPSEY

SEQ ID NO: 1050 - protein, 194 aa, Glycine max
MATSGGDEGQNNPALDPDLDAPDDPDHEFAEFGSGCFWGAELAFQRVVGVVKTEVGYTQGHTPDPNYKLVCTGTTNHVEVVRVQFDPKVCPYNDLLALFWSRHDPTSINRQGNDVGAQYRSGIYYYNDTQARLGQESKDAKQLELKEKIVTEILPAKRFYKAEEYHQQYLEKGGGQGNKQSAEKGCTDPIRCYG

SEQ ID NO: 1051 - protein, 494 aa, Arabidopsis thaliana
MVLTKTATNDESVCTMFGSRYVRTTLPKYEIGENSIPKDAAYQIIKDELMLDGNPRLNLASFVTTWMEPECDKLIMDSINKNYVDMDEYPVTTELQNRCVNIIARLFNAPLEESETAVGVGTVGSSEAIMLAGLAFKRKWQNKRKAEGKPYDKPNIVTGANVQVCWEKFARYFEVELKEVNLSEGYYVMDPDKAAEMVDENTICVAAILGSTLNGEFEDVKRLNDLLVKKNEETGWNTPIHVDAASGGFIAPFIYPELEWDFRLPLVKSINVSGHKYGLVYAGIGWVVWRAAEDLPEELIFHINYLGADQPTFTLNFSKGSSQIIAQYYQLIRLGFEGYKNVMENCIENMVVLKEGIEKTERFNIVSKDQGVPVVAFSLKDHSFHNEFEISEMLRRFGWIVPAYTMPADAQHITVLRVVIREDFSRTLAERLVADISKVLHELDTLPSKISKKMGIEGIAENVKEKKMEKEILMEVIVGWRKFVKERKKMNGVC

SEQ ID NO: 1052 - protein, 408 aa, Oryza sativa
MASSAMELSLLNPAAMRGLSAAKPRVVSSRRIVRFRVASSAAAPPAAKPGTPKKRGKTEIQETLLTPRFYTTDFDEMERLFNAEINKQLNQEEFDALLQEFKTDYNQTHFVRNPEFKAAADKMEGPLRQIFVEFLERSCTAEFSGFLLYKELGRRLKKTNPVVAEIFSLMSRDEARHAGFLNKGLSDFNLALDLGFLTKARKYTFFKPKFIFYATYLSEKIGYWRYITIFRHLKANPEYQVYPIFKYFENWCQDENRHGDFFSALLKAQPQFLNDWKAKLWSRFFCLSVYVTMYLNDCQRTTFYEGIGLDTKEFDMHVIIETNRTTARIFPAVLDVENPEFKRKLDRMVEINKKIIAIGESDDIPLVKNLKRIPHVAALVSEIIAAYLMPPIESGSVDFAEFEPQLVY

SEQ ID NO: 1053 - protein, 404 aa, Glycine max
MGGEEVARVKAELFDDNESDRNDDDVLSESKDSGVTTAHAVKEEMDDGAANWSSSSSTSPKPMEGLHEVGPPPFLKKTFEMVEDPHTNPIVSWSQTRHSFVVWDSHEFSKTLLPKYFKHSNFSSFVRQLNTYGFRKVDSDRWEFANEGFQGGKKHLLKNIRRRSKCNKLHQGAFNMMKPDVDSEVEKLKKDQNILKVEILKLRQQQENSHVQLTNVQERIRCAEMKQFQMMYFLTRMARRPAFVEQLVHKIRRKREIDGNDMVKRPRLMGNPCHVPFPKTMETTPNFDYRHQQGHKQFATLQSELNVTEVNSSRMEHPTPSPLEDELGNSLQGLRAHGCSRARAQDASSSAYHVMSEKLMRENSIVDEELDVNDSNIYLELEDLITKPTDWSVGSASGLVEQTS

SEQ ID NO: 1054 - protein, 289 aa, Glycine max
MAPPLEHNGVSTSGDSLRSIPTPFLTKTFQLVDDHTIDHVISWNDSGSSFIVWNTTAFAKDLLPKYFKHNNFSSFVRQLNTYGFRKVVPDRWEFSNEYFRRDEKRLLCEIQRRKILPATPPTRATATAAVLSPLPLSTIPPAKLIVSPSNSAEEQVISSNSSPAELLDENDRLRKENILLTKELEEMRSLCNNIFNLMSNYANVQADGGSAGVAARCFGEDAVEEMNPKLFGVVIGTKRAREENDTVLSLHQPFHADVKSEALDFARRGENKKTPWLNQCHRANQRVCN

SEQ ID NO: 1055 - protein, 391 aa, Oryza sativa
MEPAHAPGRDRLSALPDNVLRRIMSFLNARQSVQTCVLSRRWRHLWRSLPRINADYTEFCFACLDEKKEKVQEARFKKFVSTLLLRRDPVPLLDKFWLRYQVSDGNNNEKASAEAGLWISHALQLQTPVVEVLTFQFPLMLDHAVFTSDYLRKLGLSNAYLRMGFFEQLSRGCPQLEDVFLNDCIILDDEISSTTLKTLNIYASRFSEDYRASISTPSLTSLTLYKPDASVPSLKDMKSLVSASIILDDNTDIHELLMSLSGVRNLDLECPQKMVTIAKNTQWCPEFKDLVNLSLGQFCLGSKLYALTVFLKNSPKLEKLTLDPPEVIIDKLEERSFECEHLKIVEVICSEDDSTLLKLVEDIFVTSGMNSLQINRKSSYKQYYSDDFFQI

SEQ ID NO: 1056 - protein, 490 aa, Glycine max
MDGGGSTPAAPIPNANAPPPFLSKTYDMVEDPSTDAIVSWSATNNSFIVWDPPQFARDLLPKYFKHNNFSSFVRQLNTYGFRKVDPDRWEFANEGFLKGQKHLLRSITRRKPAHGQNHQQPQQPHGQSSSVGACVEVGKFGLEEEVERLKRDKNVLMQELVRLRQQQQTTDNQLQTMVQRLQGMEQRQQQMMSFLAKAVQSPGFFAQFVQQQNDSNRRITEVNKKRRLKQEGMAETEHAATPDGQIIKYQPMVNEAAKAMLRQIMKWDTSCVESLNKNSDNYVIGDASSSSSGMDSSSSSGWTSGVTLKEVSPASVQSSHVPAATGTQGHVPSTVKPEILSVPQAVASEKVMKDGAHDPPSIPVSQADVMIPDLPPITEMVTGNILDIPEENYMATETDEGYMDSSLGAGGSFPIDFEGISPDADIDDLLANPIWDEILQTSVPEDIDTNVAEASKGNEVQPMENGWGKTQHMDHLTEQMGLLSSDAKRV

SEQ ID NO: 1057 - protein, 285 aa, Glycine max
MLQQRSVPAPFLTKTYQLVEDPGTDEVISWGESGNTFVVWKHADFAKDLLPKYFKHNNFSSFVRQLNTYGFRKIVPDKWEFANEHFKRGQKELLSEIKRRKTVPQSSTHSPDAGKPGAEGNSPSNPGGCDDAGSTSTSSSSSGSKNQGSVETNTTPSHQLSSENEKLKKDNETLSCELARARKQCDELVAFLRDRLMVGPDQIDRIMRQGSCGSENAVGEGGGGGHCLKLFGVWLKGDTLTDKRNNHKRGREDQMGFGGPRLKESKPVVDFSRNRMMMINEKGKG

SEQ ID NO: 1058 - protein, 282 aa, Glycine max
MSQQQRSTPAPFLTKTYLLVDDPATDDVVSWSEGGNTFVVWKHADFAKDLLPKYFKHNNFSSFVRQLNTYGFRKTVPDKWEFANEYFKRGQTDLLAEIRRRKVVSPVTGKSTGGGVNISASHSGGDDMGSTSTGSMEAATAAGADISGENEKLKKDNEKLSGELALAKKQCEELVAFLRDSLNVSPDVIERIIRQGTCVSSNNDAVRFDAIINNDLDDDENAVGECEPQQPPPKGDNGESLKLFGVWLKGQNGKENSIGKCRKRGRQDYPIAATAKELKTLV

SEQ ID NO: 1059 - protein, 154 aa, Glycine max
MSLIPSIFGGPRSNVFDPFSLDMWDPFKDFHVPTSSVSAENSAFVNTRVDWKETQEAHVLKADIPGLKKEEVKVQIEDDRVLQISGERNVEKEDKNDTWHRVERSSGKFMRRFRLPENAKVEQVKACMENGVLTVTIPKEEVKKSDVKPIEISG

SEQ ID NO: 1060 - protein, 153 aa, Glycine max
MSLIPSFFSGPRSNVFDPFSLDVWDPFKDFHFPTSVSAENSAFVSTRVDWKETPEAHVLKADIPGLKKEEVKVQIEDDRVLQISGERNLEKEDKNDTWHRVERSSGKFMRRFRLPENAKVEQVKASMENGVLTVTVPKEEIKKPDVKAIEISA

SEQ ID NO: 1061 - protein, 802 aa, Zea mays
MAAKLTRLHSLRERLGATFSSHPNELIALFSRYVHQGKGMLQRHQLLAEFDALFDSDKEKYAPFEDILRAAQEAIVLPPWVALAIRPRPGVWDYIRVNVSELAVEELSVSEYLAFKEQLVDGQSNSNFVLELDFEPFNASFPRPSMSKSIGNGVQFLNRHLSSKLFQDKESLYPLLNFLKAHNYKGTTMMLNDRIQSLRGLQSSLRKAEEYLLSVPQDTPYSEFNHRFQELGLEKGWGDTAKRVLDTLHLLLDLLEAPDPANLEKFLGTIPMMFNVVILSPHGYFAQSNVLGYPDTGGQVVYILDQVRALENEMLLRIKQQGLDITPKILIVTRLLPDAAGTTCGQRLEKVIGTEHTDIIRVPFRNENGILRKWISRFDVWPYLETYTEDVSSEIMKEMQAKPDLIIGNYSDGNLVATLLAHKLGVTQCTIAHALEKTKYPNSDIYLDKFDSQYHFSCQFTADLIAMNHTDFIITSTFQEIAGSKDTVGQYESHIAFTLPGLYRVVHGIDVFDPKFNIVSPGADMSVYYPYTETDKRLTAFHPEIEELINSDVENSEHKFVLKDKKKPIIFSMARLDRVKNMTGLVEMYGKNARLRELANLVIVAGDHGKESKDREEQAEFKKMYSLIDEYKLKGHIRWISAQMNRVRNGELYRYICDTKGAFVQPAFYEAFGLTVIESMTCGLPTIATCHGGPAEIIVDGVSGLHIDPYHSDKAADILVNFFDKCKADPSYWDKISQGGLQRIYEKYTWKLYSERLMTLTGVYGFWKYVSNLERRETRRYIEMFYALKYRSLASQVPLSFD

SEQ ID NO: 1062 - protein, 501 aa, Zea mays
MWKQLLSKLPRKSPACGDSGQCSNGTGIQRTSSCGSIPPGRPASAIRRMSSAVFPSSVVAGIEPLVSFKDVPNSEKQNLFVSKLSLCCVVFDFSDPNKSSVEKDIKRQALLDLIEFVESTNARFSEAAIAACSRMCAINLFRAFPPSCRSGSSGGGEGDEEEPMFDPAWCHLQLVYELLLKFIGSSSLDAKVGKKHFDHSFIVKLLNLLDSEDPRERDCLKTILHRVYGKFMVHRPFIRKAVSNIFYQFVFETDRHNGIAELLEVFGSVISGFALPLKEEHKIFLWRVLIPLHKPKSVGVYLQQLTYCVTQFLEKDPKLASSVIIGLLRYWPITNCQKEVMFLSEIEEILESTSQAEFQKCMVPLFRRIAHCITSSHFQVAGRALFVWNNDHIISLIAQNRQVIMPLVVPALEQNIQNHWNQAVLNLTVNVKKMLSEMDDDLFSSCLAKYKDEEEKRASLEAKRRLTWEKLESAAAFQPVTGHTAVLVGHRPSANLIATMI

SEQ ID NO: 1063 - protein, 362 aa, Arabidopsis thaliana
MAENLACGETSESWIIDNDDDDINYGGGFTNEIDYNHQLFAKDDNFGGNGSIPMMGSSSSSLSEDRIKEMLVREIEFCPGTDYVKRLLSGDLDLSVRNQALDWILKVCAHYHFGHLCICLSMNYLDRFLTSYELPKDKDWAAQLLAVSCLSLASKMEETDVPHIVDLQVEDPKFVFEAKTIKRMELLVVTTLNWRLQALTPFSFIDYFVDKISGHVSENLIYRSSRFILNTTKAIEFLDFRPSEIAAAAAVSVSISGETECIDEEKALSSLIYVKQQERVKRCLNLMRSLTGEENVRGTSLSQEQARVAVRAVPASPVGVLEATCLSYRSEERTVESCTNSSQSSPDNNNNNNNSNKRRRKH

SEQ ID NO: 1064 - protein, 376 aa, Arabidopsis thaliana
MAIRKEEESREEQSNSFLLDALYCEEEKWDDEGEEVEENSSLSSSSSPFVVLQQDLFWEDEDLVTLFSKEEEQGLSCLDDVYLSTDRKEAVGWILRVNAHYGFSTLAAVLAITYLDRFICSYSLQRDKPWMLQLVSVACLSLAAKVEETQVPLLLDFQVEETKYVFEAKTIQRMELLILSTLEWKMHLITPISFVDHIIRRLGLKNNAHWDFLNKCHRLLLSVISDSRFVGYLPSVVAAATMMRIIEQVDPFDPLSYQTNLLGVLNLTKEKVKTCYDLILQLPVDRICLQIQIQSSKKRKSHDSSSSLNSPSCVIDANPFNSDESSNDSWSASSCNPPTSSSSPQQQPPLKKMRGAEENEKKKPILHLPWAIVATP

SEQ ID NO: 1065 - protein, 338 aa, Arabidopsis thaliana
DALYCEEEKWDDEGEEVEENSSLSSSSSPFVVLQQDLFWEDEDLVTLFSKEEEQGLSCLDDVYLSTDRKEAVGWILRVNAHYGFSTLAAVLAITYLDRFICSYSLQRDKPWMLQLVSVACLSLAAKVEETQVPLLLDFQVEETKYVFEAKTIQRMELLILSTLEWKMHLITPISFVDHIIRRLGLKNNAHWDFLNKCHRLLLSVISDSRFVGYLPSVVAAATMMRIIEQVDPFDPLSYQTNLLGVLNLTKEKVKTCYDLILQLPVDRICLQIQIQSSKKRKSHDSSSSLNSPSCVIDANPFNSDESSNDSWSASSCNPPTSSSSPQQQPPLKKMRGAE

SEQ ID NO: 1066 - protein, 428 aa, Arabidopsis thaliana
MVTSRSIVPQQSTDDVVVVDGKNVAKGRNRQVLGDIGNVVRGNYPKNNEPEKINHRPRTRSQNPTLLVEDNLKKPVVKRNAVPKPKKVAGKPKVVDVIEISSDSDEELGLVAAREKKATKKKATTYTSVLTARSKAACGLEKKQKEKIVDIDSADVENDLAAVEYVEDIYSFYKSVESEWRPRDYMASQPDINEKMRLILVEWLIDVHVRFELNPETFYLTVNILDRFLSVKPVPRKELQLVGLSALLMSAKYEEIWPPQVEDLVDIADHAYSHKQILVMEKTILSTLEWYLTVPTHYVFLARFIKASIADEKMENMVHYLAELGVMHYDTMIMFSPSMVAASAIYAARSSLRQVPIWTSTLKHHTGYSETQLMDCAKLLAYQQWKQQEEGSESSTKGALRKKYSKDERFAVALIPPAKALLTGTESA

SEQ ID NO: 1067 - protein, 513 aa, Zea mays
MGGWERDNVLLASFICLCCLRKKRRRAPPPPQHYGYPPPPPPYKEDPYGGTYQSWQQNAPPAPPPEHVVKMHPSPPPAYANRPPQPPAPPPPAMLNSSGGSGSNYSGGEILPPPSPGAVLGFSKSTFTYEELLRATDGFSDANLLGQGGFGYVHRGLLPNGKEIAVKQLKLGSGQGEREFQAEVEIISRVHHKHLVSLVGYCISGGKRLLVYEFVPNNTLEFHLHAKGRPTMEWPARLKISLGAAKGLAYLHEDCHPKIIHRDIKASNILLDFQFEAKVADFGLAKFTTDNNTHVSTRVMGTFGYLAPEYASSGKLTEKSDVFSFGVMLLELITGRRPVDTTQTYMDDSLVDWARPLLMRALEDGEYDALVDPRLGKDFNPNEMARMIACAAACVRHSARRRPRMSQVVRALEGNVSLEDLNEGVRPGHSRFFGSYSSSDYDSGQYNEDMKKFKKMAFNNNYTSSQYSAPTSEYGQIPSASSSEGHQTQEMESGAMKKGGYSGGYSSGYSGAS

SEQ ID NO: 1068 - protein, 246 aa, Zea mays
MSFVQLSGAGVAAVAFTNKSLVSRHAALRVCSSRRSIRSLVVKAATVVTPKYTSLKPLGDRVLVKLGAAEEKTVGGILLPSTAQTKPQGGEVVAVGAGRTIGDKKIAVDIETGAQVVYSKYAGTEVEFNDSKHLILKEDDIIGILETDDVKDMKPLNDRVLIKVAEAEDKTPGGLILTETTKEKPSIGTVVAVGPGPLDEEGKRQPLSVSAGSTVLYSKYAGSEFKGADGTAYIVLRASDVMAVLS

SEQ ID NO: 1069 - protein, 267 aa, Zea mays
  misc_feature (41)..(41): Xaa can be any naturally occurring amino acid
  unsure (1)..(267): unsure at all Xaa locations
KFVQKSRLLQDHGRSGGGERCLAATDPCGPSRGRLRPAPAXAADSASTEKVSAPAPEVRSRGFRLLGEDTSVHKSLGGGKTADVLLWKDKKTSAVVIGGATVIWVLFEVLDYHLLTLISHVLIGVLATLFLWSKATTFIKKSPPDIPVVQVSEDLVVNVSRALRNDINRALHLFREIAMGHDLKKFLGVIVGLWVLSGVGSSCDFLTLTYIAVLMLHTVPILYDKYQDKVDHFAGRAHTEALKQYKVLDAKVLSKIPRGAVKSKKQN

SEQ ID NO: 1070 - protein, 267 aa, Zea mays
MFPSLIHHASHGRPDVAVAEDAPRSGCGLGLPGHGGGPSVVLTADPKPRLRWTADLHDRFVDAVAQLGGPDKATPKAIMRTMGVKGLTLFHLKSHLQKYRLGRQSGKELTEQSKDASYLMEAQSGTTLSPRGSTPDVKESQEVKEALRAQMEVQRRLHEQVEVQKHMQIRMEANQKYIDTILDKAFKIVSEQLSGFSISDQDLPILTSARAMLSPADHLSSSVFPQLSVSSVSLHNPGPGGGKGLPHVADSHVFSQRPPEQFKRKSR

SEQ ID NO: 1071 - protein, 509 aa, Zea mays
MASLWLARASSQLARRAAARRPPPRPARHGSDQPTSSWFLGSVPPPALGSAAADTCRRGFCSVRRFAGESSAAAAAAAVVDEEPESGFAAGDQQAVDFPGGKVSFVAEMNFLPESTRERINCYRVLDDDGRTISGSRFQEVSRELALKMYSEMVTLQIMDTIFYEAQRQGRISFYLTSNGEEAINIASAAALSMDDIVLPQYREPGVLLWRGFTLQEFANQCFGNKLDYGKGRQMPIHYGSNRLNYFTVSSPIATQLPHAVGAAYSLKMDKKDACAITYFGDGGTSEGDFHAALNFAAVMEAPVIFFCRNNGWAISTPTTEQFRSDGVVIRGQAYGIRGIRVDGNDALAVYSAIHAAREMAVTEGRPILVEALTYRVGHHSTSDDSTKYRPVDEIEHWRTARDPISRYRKWVQGNDWWSDAEESELRSRVRKELLQAIQVAERMPKPPVTELFTDVYDKIPSNLHEQEQLLRDTIMRHPADYPTDVPVGVVLRYAEGLTRRSSFGQSRF

SEQ ID NO: 1072 - protein, 280 aa, Zea mays
MEFEDRCHKVQEPKFDCLLFDLDDTLYPLSAGIAGHVKKNIEDYMVEKLGIDETKIENLGNLLYKNYGTTMAGLRAIGYSFDYDEYHAFVHGRLPYDNIKPDPILKHILKNLRIRKLIFTNGDMVHAVRALKRLGLEDCFEGIICFETLNPPCPPQGDQEPEIFDIADHFARSGTADELPKTPVLCKPNVDAMEEALRIANVNPHKAIFFDDSVRNIQAGKQIGLHTVLVGKSQRVKGADHALESIHNIREALPELWEEAEKAEDVLYPERVAMETSVTA

SEQ ID NO: 1073 - protein, 282 aa, Oryza sativa
MQEFQSIPGLAGRLFGGAAAADIRRAQAQQGPASRCGGIPSPEAVKCPRCESTNTKFCYYNNYNLSQPRHFCKSCRRYWTKGGVLRNVPVGGGCRKTKRSGSSSAASSAPSTPTAATDNAKNQRRASASSPRSSSGGSGNTSPTAAAATTPTTPATPSSNTIAVINHATTTTTTTNPFPTDVPPPAPIFADQAAALASLFAPPPPPPLPVFSFAAQAKTEDGIASVLLAGQTTAPTAATVADMTPFTSLDAGIFELGDVPPAAYWNAGSCWTDVPDPNVYLP

SEQ ID NO: 1074 - protein, 215 aa, Zea mays
MSKLHSELLKDCISQIVQDAKKNRKFTETVELQISLKNYDPQKDKRFSGSVKLPHIPRPKMKVCMLGDAQHVEEAEKMGLDYMDVEALKKMNKNKKLVKKLAKKYHAFLASETIIKQIPRLLGPGLNKAGKFPTLVTHQESLESKVNETKATVKFQLKKVLCMGVAVGNLSMEEKQIQQNIQMSINFLVSLLKKNWQNVRCLYIKSTMGKPFRIF

SEQ ID NO: 1075 - protein, 718 aa, Oryza sativa
MVGIDLNTVEEEEDEEEGGATGTVTAPAEARAGGAVCLELWHACAGPVAPLPRKGSAVVYLPQGHLEHLGAAPGSGPGAAVPPHVFCRVVDVSLHADAATDEVYAQVSLVADNEEVERRMREGEDGAACDGEGEDAVKRPARIPHMFCKTLTASDTSTHGGFSVPRRAAEDCFPPLDYSLQRPFQELVAKDLHGTEWRFRHIYRGQPRRHLLTTGWSGFINKKKLVSGDAVLFLRGEDGELRLGVRRAAQLKNASPFPALHNQISNTSSLSEVAHAVAVKSIFHIYYNPRLSQSEFIIPYWKFMRSFSQPFSVGMRFKLRYESEDASERRRTGIIIGSREADPMWHGSKWKCLVVKWDDDVECRRPNGVSPWEIELSGSVSGSHLSTPHSKRLKSCFPQVNPDIVLPNGSVSSDFAESARFHKVLQGQELLGLKTRDGTVNTASQATEARNFQYTDERSCSINMSNNILGVPRLGVKTPSGNPGFSYHCSGFGESQRFQEVLQGQEVFRPYRGGTLSDACIRGSGFRQPDGNHAPGAAFKWLAPQGCDHHGITTSVLPQASSPSSVLMFPQTSSKMPGLEYIYGCLDRNENSRHFKIGPTQDMTRTDQTLRLWPHLISGKVLDECTRNEKLHSPVSGAEHESNNKCLNTNGCKIFGISLTEKAQAGDEVDCGNASYHSRLQSLKPQMPKSLGSSCATVHEQRPVVGRVVDISAVNTMI

SEQ ID NO: 1076 - protein, 826 aa, Oryza sativa
MAPPPPPQGSSTGDPLYDELWHACAGPLVTVPRVGDLVFYFPQGHIEQVEASMNQVADSQMRLYDLPSKLLCRVLNVELKAEQDTDEVYAQVMLMPEPEQNEMAVEKTTPTSGPVQARPPVRSFCKTLTASDTSTHGGFSVLRRHADECLPPLDMTQSPPTQELVAKDLHSMDWRFRHIFRGQPRRHLLQSGWSVFVSSKRLVAGDAFIFLRGENGELRVGVRRAMRQLSNVPSSVISSQSMHLGVLATAWHAINTKSMFTVYYKPRTSPSEFIIPYDQYMESVKNNYSVGMRFRMRFEGEEAPEQRFTGTIIGSENLDPVWPESSWRSLKVRWDEPSTIPRPDRVSPWKIEPASSPPVNPLPLSRVKRPRPNAPPASPESPILTKEAATKVDTDPAQAQRSQNSTVLQGQEQMTLRSNLTESNDSDVTAHKPMMWSPSPNAAKAHPLTFQQRPPMDNWMQLGRRETDFKDVRSGSQSFGDSPGFFMQNFDEAPNRLTSFKNQFQDQGSARHFSDPYYYVSPQPSLTVESSTQMHTDSKELHFWNGQSTVYGNSRDRPQNFRFEQNSSSWLNQSFARPEQPRVIRPHASIAPVELEKTEGSGFKIFGFKVDTTNAPNNHLSSPMAATHEPMLQTPSSLNQLQPVQTDCIPEVSVSTAGTATENEKSGQQAQQSSKDVQSKTQVASTRSCTKVHKQGVALGRSVDLSKFSNYDELKAELDKMFEFDGELVSSNKNWQIVYTDNEGDMMLVGDDPWEEFCSIVRKIYIYTKEEVQKMNSKSNAPRKDDSSENEKGSVKRDDTRGRSHGVLRERCHSAGPSQVNPLMCW

SEQ ID NO: 1077 - protein, 380 aa, Zea mays
MAPQLAAAGPTLYAPRFGTALPCRARTRKPVSRRRAALPKDEDYYLIDADESIGDGFSFSGGKYGDGPSKSDEWFAQGKMVNAYPVYGDKGKAKDPFFGLTMGSGSQSSYDIFRWFCVEAGSSSSPKVLLIHGLPSQAYSYRNVMPVLADKYHAIAFDWLGFGFSDKPQPKYGFDYTLDEYTSSLEFLVNAVAPDKLSIVVQGYFAPVAVKYASEHQDKLNHLVLVNPPITDKHLNLPSTLASFSNFLLGEIFSQDPLRASDKVLTSCGPYMMKEEDAMVYRRPYLVSGSSGFALNAISKAMKKDLKAYIESMRSILRSSSWKTKTTVCWGMRDRWLSYDGVEEFFGGLNQKIVELPMAGHHVQEDRGEELGNIIKSILR

SEQ ID NO: 1078 - protein, 207 aa, Zea mays
MLARPSAPPLVTAQTPEVGIFITARNVSGALVAKLPGNKNNCGGRSNVRQQNSRREWRALSAADQAQASTPDVDEECKRVLTPLGFSSEDAEKMLKKAFGWTHSPYWSEEREKEVPTAEAVAGVLDYIRSLGLSDEDLGRLLKKFPEVLGCDLDGEVRPNVGKLDSDWGINGKTLRSLLLRNPKVLGYNVDCRGDCMAQCTRCWVRF

SEQ ID NO: 1079 - protein, 299 aa, Zea mays
MMGWGEEVVALSLRGYGYGNEEDDRPEKPRRYGVTEMRSPFYSFRPANQALQEILDSLSPFVDGLKFSGGCHSLMGKELVREITDLAHRHDIYVSTGDWAEHLLRQGPSSFKQYVEECKALGFDTIELNAGSLNLPEEALLRLVRLIKSSGLRAKPMFSVKFDSSDIPASGDRAFGAYIAPVKGKTSERVEDVDLLIRRAERCLEAGADMIMIDADDVCQRAESLRTDIIAKIVGRLGLDKTMFEASNSNTSEWFVRRYGPRVNLFVEHSDVMNLERLRGFNMRRSNSASRFASPFFLI

SEQ ID NO: 1080 - protein, 83 aa, Zea mays
MSSCCGGKCGCGSSCSCGSGCNGCGMYPDVETAATSSVKTTVLAAPTTKASAGGFEAATEGGGCDCNTCKCGTSCGCSCCSCN

SEQ ID NO: 1081 - protein, 579 aa, Zea mays
MASTFGATSTVGLMAAPTGKNVRLQRRANFRVKAAKELYFNKDGSAIKKLQTGVNKLADLVGVTLGPKGRNVVLESKYGSPKIVNDGVTVAREVELEDPVENIGAKLVRQAAAKTNDLAGDGTTTSVVLAQGLIAEGVKVVAAGANPVQITRGIEKTAKALVEELRKLSKEVEDSELADVAAVSAGNNYEIGNMIAEAMSKVGRKGVVTLEEGKSSENFLYVVEGMQFDRGYISPYFVTDSEKMTAEYENCKLLLVDKKITNARDLINVLEEAIRGAYPILIIAEDIEQEALATLVVNKLRGSLKIAAIKAPGFGERKTQYLDDIAILTGATVIRDEVGLSLDKADKSVLGTAAKVVLTKESTTIVGDGSTQEEVTKRVAQIKNLIEAAEQEYEKEKLNERIAKLAGGVAVIQVGAQTETELKEKKLRVEDALNATKAAVEEGIVVGGGCTLLRLAAKVDAIKDTLENDEQKVGAEIVRRALSYPLNLIAKNAGVNGSVVTEKVLSNDNFKYGYNAATGQYEDLMAAGIIDPTKVVRCCLEHAASVAKTFLTSDVVVVDIKEPEATPVANPMDNSGYGY

SEQ ID NO: 1082 - protein, 577 aa, Zea mays
MYRAAASLASKARQAGNSLAARQVGSRLAWSRNYAAKDIKFGVEARALMLRGVEELADAVKVTMGPKGRNVVIEQSFGAPKVTKDGVTVAKSIEFKDRVKNVGASLVKQVANATNDTAGDGTTCATVLTKAIFTEGCKSVAAGMNAMDLRRGISMAVDAVVTNLKGMARMISTSEEIAQVGTISANGEREIGELIAKAMEKVGKEGVITIADGNTLYNELEVVEGMKLDRGYISPYFITNSKTQKCELEDPLILIHDKKVTNMHAVVKVLEMALKKQKPLLIVAEDVESEALGTLIINKLRAGIKVCAVKAPGFGENRKANLQDLAILTGGEVITEELGMNLENFEPHMLGTCKKVTVSKDDTVILDGAGDKKSIEERAEQIRSAIENSTSDYDKEKLQERLAKLSGGVAVLKIGGASEAEVGEKKDRVTDALNATKAAVEEGIVPGGGVALLYASKELDKLQTANFDQKIGVQIIQNALKTPVHTIASNAGVEGAVVVGKLLEQENTDLGYDAAKGEYVDMVKTGIIDPLKVIRTALVDAASVSSLMTTTESIIVEIPKEEAPAPAMGGGMGGMDY

SEQ ID NO: 1083 - protein, 605 aa, Zea mays
MASAFGTASTCGIKHAPAGVALAAPMKHLSLVSPSLVSLPRKMRPRRKYNFRVNAAKELHFNKDGSAIRKMQNGVNKLADLVGVTLGPKGRNVVLESKYGSPKIVNDGVTVAKEVELEDPVENIGAKLVRQAAAKTNDLAGDGTTTSVVLAQGMITEGVKVVAAGANPVQITRGIEKTAKALVSELQKMSKEVEDSELADVAAVSAGNNYEIGNMIAEAMKKVGRQGVVTLEEGKSAENNLYSVEGMQFDRGYISPYFVTDSEKMTVEYENCKLLLVDKKINNARDLITILEDAIRSGYPILIVAEDIEQEALATLVVNRLRGALKIAAIKAPGFGERKSQYLDDIATLTGGTVIREEVGLSLDKADNAVLGTAAKVVVTKDSTTIVGDGTTQEEVNKRVTQIKNQIEATEQEYEREKLNERIAKLSGGVAVIQVGAQTETELKEKKLRVEDALNATKAAVEEGIVVGGGCTLLRLASKVDAIIETLENDEQKVGAEIVRKSLSYPLKLIAKNAGVNGSVVTEKVLANENFRYGYNAATGEYEDLMAAGIIDPTKVVRCCLEHAASVAKTFITSDAVVVDAKVAEQAPSSPANPMAMGGGSGFGF

SEQ ID NO: 1084 - protein, 588 aa, Oryza sativa
MAAPTGIVSDKKPSSLSSVSSVSVASRPRNARLQRKCNFRVKAAKELYFNKDGSAIKKLQTGVNKLADLVGVTLGPKGRNVVLESKYGSPRIVNDGVTVAREVELEDPVENIGAKLVRQAAAKTNDLAGDGTTTSVVLAQGLIAEGVKVVAAGANPVQITRGIEKTAKALVEELKKLSKEVEDSELADVAAVSAGNNYEIGNMIAEAMSKVGRKGVVTLEEGRSSENNLYVVEGMQFERGYISPYFVTDSEKMSAEYENCKLLLVDKKITNARDLINVLEEAIRGAYPILIIAEDIEQEALATLVVNKLRGSLKIAAIKAPGFGERKTQYLDDIAILTGATVIRDEVGLSLDKADKSVLGTAAKVVLNKESTTIVGDGSTQEEVTKRVAQIKNLIEAAEQEYEKEKLNERIAKLAGGVAVIQVGAQTETELKEKKLRVEDALNATKAAVEEGIVVGGGCTLLRLAARVDAIKDNLENDEQKVGAEIVRRALSYPLKLIAKNAGVNGSVVTEKVLSNDNFKFGYNAATGQYEDLMAAGIIDPTKVVRCCLEHAASVAKTFLTSDVVVVEIKEPEPAPVTNPMDNSGYGY

SEQ ID NO: 1085 - protein, 167 aa, Zea mays
MAGAEGERWVGLATDFSEGSRAALRWAAANLLRAGDHLLLLHVIKEPDYEQSEAILWESTGSPLIPLSEFSDPIIAKKYGAKPDIETLDILNTTATQKDIVVVVKVLWGDPREKLCQVIHDTPLSCLVIGSRGLGKLKRVLLGSVSDYVVNNATCPVTVVKSTSTEG

SEQ ID NO: 1086 - protein, 191 aa, Zea mays
MAIAGQCSSCYYTSPTLQLQLQRRHSHLPLQPQAARRARRPRLQVATAAGSGPIRAATDAEFFQPSDTRPIMLFDGVCNLCNGGVRFVREHDPNRSIRYVPLQSESGRKLLQRSGRSPDDISSVVLVEKDRSFIKSEAVLRIMEYLNLPFPQLAVFLKFVPLFLRDFAYDNVANNRYAMFGRSEAEACEIL

SEQ ID NO: 1087 - protein, 432 aa, Zea mays
MESMAQERDALDSPALSIDKRLRSDAVESPLVDDATQPKEGADGYPVKVRKPYTITKQREKWTEEEHGKFLEALKLYGRSWRQIQEHIGTKTAVQIRSHAQKFFSKVVREPGASNSIEIPPPRPKRKPLHPYPRKCADSTVTNAPMGEPKNAPVSSPSGSDQENGSPVSVLSAMQSDAFGSSISNPSTGGTSPASSDDGNNVPEIVNGEENLLTQQIEDRSHQESKQDNSDGELSEEDSSRVQETSLKLFGKTVIIPDPKKVCSSDGGAGDDTQEVMQTSWVGGGVAAYPAHNGWFLPFHSFPAHMYESGDARISPLHMWWPYYGFPAGHPRGFGTGLLNEGAIESDADNSPSVETNSDRTGNVHVQTTTPTIHNNAVKESVGPVEMPESGPSIELKPSANSAFVRVKPSSSVSGDQSLVRGFVPYKRCKVE

SEQ ID NO: 1088 - protein, 637 aa, Oryza sativa
MTELESDVVVEVGEMSFYLHKFPLLSRSGVLQRMISEYQAPQEDGGGGGGMCTLQLDDIPGGAKAFELAARFCYDVKIELNAHNVVCLRCAAEYLRMTDDYAEGNLITQAESFLADVLANWKDSIKALETCEGVLPTAEDLHIVSRCITALASKACASDAAACSTGHAAASASAVAVAAKNASYDALWNGIGSGGTPRGGGGAAGAAAGCSGMDWWYEDVSFLSLPMFKRLIQAMEGKGMRPESIAGAIMFYAGRFLPGLKRNTSFSNASFGGDCGAGSRSITPRAANVSAPSEGDQRYFLEEIVALLPAKKGVASTRFLLGMLRTAMLLHASPLCRENLERRIGAQLEDACLDDLLVPNLGYTVETLYDIDCVQRILDYFMSSTDGLGTGYTSPAVVEEGSQLGALHAGSPSSLSPITMVAKLMDGYLAEVAPDTNLKLPKFQALAAVVPDYARPVDDGIYRAMDIYLKSHPWLSESEREQLCRLMNCQKLSLEACTHAAQNERLPLRVVVQVLFFEQLRLRTSIAGWFFVSGNAAAGGDGAPQPHPGGSAIVPKGAAAAGQSDADAEADEGKGKELPAEAITDVKARVSELEKECMSMKQEIRRLGKPRRSWSLLTRKCRFGTKVQQAQPTMSSK

SEQ ID NO: 1089 - protein, 572 aa, Arabidopsis thaliana
MSSCLLPQFKCPPDSFSIHFRTSFCAPKHNKGSVFFQPQCAVSTSPALLTSMLDVAKLRLPSFDTDSDSLISDRQWTYTRPDGPSTEAKYLEALASETLLTSDEAVVVAAAAEAVALARAAVKVAKDATLFKNSNNTNLLTSSTADKRSKWDQFTEKERAGILGHLAVSDNGIVSDKITASASNKESIGDLESEKQEEVELLEEQPSVSLAVRSTRQTERKARRAKGLEKTASGIPSVKTGSSPKKKRLVAQEVDHNDPLRYLRMTTSSSKLLTVREEHELSAGIQDLLKLERLQTELTERSGRQPTFAQWASAAGVDQKSLRQRIHHGTLCKDKMIKSNIRLVISIAKNYQGAGMNLQDLVQEGCRGLVRGAEKFDATKGFKFSTYAHWWIKQAVRKSLSDQSRMIRLPFHMVEATYRVKEARKQLYSETGKHPKNEEIAEATGLSMKRLMAVLLSPKPPRSLDQKIGMNQNLKPSEVIADPEAVTSEDILIKEFMRQDLDKVLDSLGTREKQVIRWRFGMEDGRMKTLQEIGEMMGVSRERVRQIESSAFRKLKNKKRNNHLQQYLVAQS

SEQ ID NO: 1090 - protein, 172 aa, Zea mays
MDRELSPRGNAPGRGSGGASSSKHKNGGGGKKPIKVLYIANPMRVQTSAEGFRALVQELTGQHADPSKYSPGDLDSGAAAQGLSPRARVADVSSETIVASHSPGSKAAPHGGDYYDVEEDEDDVFRSPHMLLENNYTVFSPPTLLYDHHPHSKATSESEAGFAAEHDNFWSK

SEQ ID NO: 1091 - protein, 420 aa, Arabidopsis thaliana
MLALSPATRDGCDGASEFLDTSCGFTIINPEEEEEFPDFADHGDLLDIIDFDDIFGVAGDVLPDLEIDPEILSGDFSNHMNASSTITTTSDKTDSQGETTKGSSGKGEEVVSKRDDVAAETVTYDGDSDRKRKYSSSASSKNNRISNNEGKRKVKVDWTPELHRRFVEAVEQLGVDKAVPSRILELMGVHCLTRHNVASHLQKYRSHRKHLLAREAEAANWTRKRHIYGVDTGANLNGRTKNGWLAPAPTLGFPPPPPVAVAPPPVHHHHFRPLHVWGHPTVDQSIMPHVWPKHLPPPSTAMPNPPFWVSDSPYWHPMHNGTTPYLPTVATRFRAPPVAGIPHALPPHHTMYKPNLGFGGARPPVDLHPSKESVDAAIGDVLTRPWLPLPLGLNPPAVDGVMTELHRHGVSEVPPTASCA

SEQ ID NO: 1092 - protein, 878 aa, Oryza sativa
MFSRSYTNLVDLANGNLSALDYGGGGGGGGGGNGAGGRPPRARRMQRTMTTPGTLAELDEERAGSVTSDVPSSLASDRLIVVANTLPVRCERRPDGRGWSFCWDEDSLLLHLRDGLPDDMEVLYVGSLRADVPSAEQDDVAQALLDRFRCVPAFLPKDVLDRFYHGFCKQTLWPLFHYMLPFTSDHGGRFDRSQWEAYVLANKLFSQRVIEVLNPEDDYIWIHDYHLLALPSFLRRRFNRLRIGFFLHSPFPSSELYRSLPVRDEILKSLLNCDLIGFHTFDYARHFLSCCSRMLGIEYQSKRGYIGLDYFGRTVGIKIMPVGINMTQLQTQIRLPDLEWRVAELRKQFDGKTVMLGVDDMDIFKGINLKVLAFEQMLRTHPKWQRKAVLVQIANPRGGGGKDLEEIQAEIDESCRRINAQFSRPGYVPVVIINRALSSVERMAYYTVAECVVVTAVRDGMNLTPYEYIVCRQGFPDLDGSGDDGPRRKSMLVVSEFIGCSPSLSGAIRVNPWNIDTTAEAMNESIALSENEKQLRHEKHYRYVSSHDVAYWSKSYIHDLERSCRDHFRRRCWGIGLGFGFRVVALDRNFKKLTVDSIVTDYKNSKSRVILLDYDGTLVPQTTINRTPNESVVKIMNALCDDKKNVVFIVSGRGRDSLEKWFSPCQDLGIAAEHGYFMRWTRDEQWQLNNQCSEFGWMQMAKPVMNLYTEATDGSYIETKESALVWHHQDADPGFGSSQAKEMLDHLESVLANEPVCVKSGQQIVEVKPQGVSKGFVAEKILSTLTENKRQADFVLCIGDDRSDEDMFEGIADIMRRSIVDPQTSLYACTVGQKPSKAKYYLDDTNDVLNMLEALADASEETDSQEDAEEITSIPDPE

SEQ ID NO: 1093 - protein, 244 aa, Oryza sativa
MAAATSSALSKLAPLEAILFDIDGTLCDSDPIHFCAFRELLQQVGFNNGVPISEEFYSANISGGHNDDLARALFPDLDHDKAMKFMDDKEALYRRLAPEQLVAVEGLHDLCRWIKDHKLKRAAVTNAPRSNAELMLSLLGLTEFFPVLVIGSECDRAKPFPDPYLKALELIGASPDHTFIFEDSASGIRAGVAANVPVVGLTTRNPEKVLQDAGASLLIKDFQDPKLLSILEEIEPTVAAVEQV

SEQ ID NO: 1094 - protein, 591 aa, Oryza sativa
MLEKKATRSTRVDGVSGEAVIEEFERVTRDAANVQRETLRRILAENGGVEYLRGLGLAGATDPATFRARVPLATHADLEPYIDRIADGDASPVLTAKPATSISLSSGTTQGKRKYLLFNEELVKSTMQIYRISYAFRNREFPVENGKALQFIYSSRETRTKGGLTATTATTNVYRSEEFKATMRDIQSQCCSPDEVIFGPDFAQSLYCHLLAGLLAAGDVQIVSATFAHSVVLAFQTFERAWEDLCADIRRGEVSPSRVTSPAVRRAMAALLAAPNPGLADEVARKCAALSNWYGVIPALWPNARYVYGIMTGSMEHYVKKLRHYAGGLPLVAAEYGASEGWVGANVEPGTPPERATFTVLPDIAYFEFIPLKPVAGDGGYAEAEPVGLTEVAAGELYEVVMTTFAGLYRYRLGDVVKVAGFYNATPKLKFVCRRNLMLSINIDKNSEQDLQLAVDAAARAVLAGEKLEVVDYTSHADVSSDPGHYVVFLELNAADPAAVDGDVMQACCDELDRAFADAGYVGSRKSGAIAPLELRVLQRGTFQKVLRHYLSLGAPVSQFKSPRCVSRSNSGVLQILAGCTVNVFFSSAYD

SEQ ID NO: 1095 - protein, 581 aa, Oryza sativa
MTICSCEETINEFEMLTRDAARVQKDTLKKILEINASAEYLQNFGLGGRTDAESYKSCIPLCVHNDIEPYIQRIVDGDTSPVVTGEPITNLSLSSGTTHGKPKFIPFNDELLETTLQIYRTSYAFRNREYPIGQGKALQFVYGSKQVITKGGILATTATTNLYRRQRYKEGMKDIQSQCCSPDEVIFGPDFHQSLYCHLLCGLIYSEEVHSVFSTFAHSLVHAFQTFEEVWEDLCTDIRDGVLSKKVTAPSIREAVSKILKPNPELADSIYKKCIGLSNWYGVIPALWPNAKYVYGIMTGSMEPYLKKLRHYAGNLPLISADYGASEGWVGSNIDPTVPPEQVTYAVLPQVGYFEFIPLEKPIGEETENSASIHYIESDPVGLTEVEVGKIYEVVITNFAGLYRYRLGDVVKIARFHNSTPELQFICRRSLVLSINIDKNTEKDLQLAVEEASKFLEGEKLEVMDFTSFVERSSDPGRYVIFWELSGDASDEVLSSCANALDLAFIDAGYTGSRKIKTIGPLELRILRKGTFKEILDHFLSLGGAVSQFKTPRFVNPSNSKVLQILSRNVTQSYFSTAYGF

SEQ ID NO: 1096 - protein, 591 aa, Oryza sativa
MDDHNLDYKGSGALEELEMLTVNAKEAQELILTKILERNQATEYLSKFMNGSTNISAFKRHVPVVTYDKVHPYILRIATGEESSILCGEYILELLRSSGTSRGEPRLMPSILKDLDRRTYLYSLIMPIMNKYISGLGEGKAMYLLFVKAETLTDSGIPVRSVLTSYYKSPHFLHRKHDLYNNYTSPDEVILCPDSQQSMYCQLLCGLVERQHVLRIGAVFASAFLRSISFLEQHWRDLVNDIRIGQLNSSITSPACRLAMLNFLALPNPELADQVEAICSCGSWKGILGRLWPNVKYIEAVLTGTMAQYIPMLEFYGGGAIPFVCTMYASSESYFGVNLSPLCSPADVSYTILPNMAYFEFIPLEDGLRLTDHEEVIENDKLVSLVDVKVGCYYELVVTTFSGLYRYRVGDVLQVTGFYNRAPQFKFICRRNVILSIDSDKTNEEDLHNSVTTAKKILENQNYLLLEYTSYTDISTVPGHYVLFWEIKSTHDERPAPLDAQLLESCCAAVEESLDYVYRRCRAHDRSIGPLEIRLVEAGAFDALMDLLVSHGSSINQYKTPRCIESSLALKLLNSKVIACFFSPQDPECGM

SEQ ID NO: 1097 - protein, 610 aa, Oryza sativa
MPEAPTAKTAPAYGYAPGAHAEALEFIEHVTANAGQVQRRVLGEILAQNAPAEYLRRYGIPGSPDVVDAFRRLVPLVTYEGLQPDILRIANGDTSPIFSGKPISEFLTSSGTSGGERKLMPTIADEMNRRSLLYSLLMPVMSQSVSGLDKGKAMYLLFVKAESRTPGGLAARPVLTSYYRSRQFLDRPRDPYTSYTSPDEAILCVDSYQSMYAQLLCGLVHRADVLRVGAVFASGFLRAIHFLEKHWARLCHDIRTGELDPEITDRVVRDAVGRVLRADPALADAIEDECARASWEGIIRRLWPRTKYIDVIVTGTMSQYIPTLEFYGGGLPLTCTMYASSECYFGLNLNPMCKPSDVAYTLIPTMCYYEFLPVNCNNATAEASHRDLVDLVDVKLGHEYELVVTTYSGLYRYRVGDVLRVAGFKNKAPMFSFVRRQNVALSVDSDKTDETELHAAVSGAVQHLAPFGASLVEYTSYADAATIPGHYVLFWELRAGSTAVPASVFEECCLSVEEALNSVYRQGRACDRSIGPLEIRVVAEGTFDKLMDYAISRGASINQYKAPRCVRPGPVVELLDARVQGKYFSPKCPKWSPGNKQWNKSKDLVGKGDA

SEQ ID NO: 1098 - protein, 240 aa, Triticum aestivum
MGRGKIVIRRIDNSTSRQVTFSKRRNGIFKKAKELGILCDAEVGLVIFSSTGRLYEYASSSMKSVIDRYGRAKEEQQLVANPNSELKFWQREAASLRQQLHNLQENHRQLMGQDLSGMGVKELQTLENQLEISLRCIRTKKDQILIDEIHELNHKGSLVHQENMELYKKINLIRQENAELHKKLSETEAATEVNRDSRTPYNFAVVEDANVSVNLELNSPQQQNDVQHTAPPKLGLQLHP

SEQ ID NO: 1099 - protein, 429 aa, Synechocystis sp. PCC 6803
MKRVLAIILGGGAGTRLYPLTKLRAKPAVPLAGKYRLIDIPVSNCINSEIVKIYVLTQFNSASLNRHISRAYNFSGFQEGFVEVLAAQQTKDNPDWFQGTADAVRQYLWLFREWDVDEYLILSGDHLYRMDYAQFVKRHRETNADITLSVVPVDDRKAPELGLMKIDAQGRITDFSEKPQGEALRAMQVDTSVLGLSAEKAKLNPYIASMGIYVFKKEVLHNLLEKYEGATDFGKEIIPDSASDHNLQAYLFDDYWEDIGTIEAFYEANLALTKQPSPDFSFYNEKAPIYTRGRYLPPTKMLNSTVTESMIGEGCMIKQCRIHHSVLGIRSRIESDCTIEDTLVMGNDFYESSSERDTLKARGEIAAGIGSGTTIRRAIIDKNARIGKNVMIVNKENVQEANREELGFYIRNGIVVVIKNVTIADGTVI

SEQ ID NO: 1100 - protein, 479 aa, Oryza sativa
MNVLASKIFPSRSNVASEQQQSKREKATIDDAKNSSKNKNLDRSVDESVLGIILGGGAGTRLYPLTKKRAKPAVPLGANYRLIDIPVSNCLNSNISKIYVLTQFNSASLNRHLSRAYGNNIGGYKNEGFVEVLAAQQSPDNPNWFQGTADAVRQYLWLFEEHNVMEFLILAGDHLYRMDYEKFIQAHRETDSDITVAALPMDEKRATAFGLMKIDEEGRIVEFAEKPKGEQLKAMMVDTTILGLDDVRAKEMPYIASMGIYVISKNVMLQLLREQFPGANDFGSEVIPGATNIGMRVQAYLYDGYWEDIGTIEAFYNANLGITKKPVPDFSFYDRSAPIYTQPRHLPPSKVLDADVTDSVIGEGCVIKNCKIHHSVVGLRSCISEGAIIEDSLLMGADYYETEADKKLLGEKGGIPIGIGKNCHIRRAIIDKNARIGDNVKIINVDNVQEAARETDGYFIKSGIVTVIKDALLPSGTVI

SEQ ID NO: 1101 - protein, 444 aa, Oryza sativa
MREILHIQGGQCGNQIGAKFWEVICDEHGVDATGRYAGDSDLQLERINVYYNEASGGRYVPRAVLMDLEPGTMDSVRSGPFGQIFRPDNFVFGQSGAGNNWAKGHYTEGAELIDSVLDVVRKEAENCDCLQGFQVCHSLGGGTGSGMGTLLISKIREEYPDRMMLTFSVFPSPKVSDTVVEPYNATLSVHQLVENADECMVLDNEALYDICFRTLKLATPTFGDLNHLISATMSGVTCCLRFPGQLNSDLRKLAVNLIPFPRLHFFMVGFAPLTSRGSQQYRALTVPELTQQMWDAKNMMCAADPRHGRYLTASAMFRGKMSTKEVDEQMLNVQNKNSSYFVEWIPNNVKSSVCDIPPRGLKMAATFVGNSTSIQEMFRRVSEQFTAMFRRKAFLHWYTGEGMDEMEFTEAESNMNDLVAEYQQYQDATADEEYEDEEEEAEAE

SEQ ID NO: 1102 - protein, 450 aa, Oryza sativa
MREIISIHIGQAGIQVGNACWELYCLEHGIEPDGTMPSDTTVGVAHDAFNTFFSETGAGKHVPRAIFVDLEPTVIDEVRTGSYRQLFHPEQLISGKEDAANNFARGHYTVGKEIVDLCLDRVRKLADNCTGLQGFLVFNAVGGGTGSGLGSLLLERLSVDYGKKSKLGFTIYPSPQVSTAVVEPYNSVLSTHSLLEHTDVAVLLDNEAIYDICRRSLDIERPTYTNLNRLISQIISSLTTSLRFDGAINVDVTEFQTNLVPYPRIHFMLSSYAPVISAEKAYHEQLSVPEITNAVFEPSSMMAKCDPRHGKYMACCLMYRGDVVPKDVNAAVATIKTKRTVQFVDWCPTGFKCGINYQPPSVVPGGDLAKVQRAVCMISNNTAVAEVFSRIDHKFDLMYAKRAFVHWYVGEGMEEGEFSEAREDLAALEKDYEEVGAEGADDENDDGEDY

SEQ ID NO: 1103 - protein, 753 aa, Zea mays
MGCVSSKQFHGGDDHGDGKPRRRPSSNSLKRLVSYSSSKRHEELEEEDEVGAAVAATSSSGGRRAGNDASTARLIRKPPALVVEAVPALSEEAATLAVGVVDAERAVAAATGNRKRPPADVHINGAAEQGLSSVGVRTEGEAKPRIRDVPNGVQGEHVVAGWPRWLTEVAAEAVRGWQPRRAESFEKLDKIGQGTYSSVYKARDLENGKIVALKKVRFANMDPESVRFMAREIHILRRLDHPNVIKLEGLVTSRMSSSLYLVFEYMEHDLAGLAATPGLKFSEPQVKCYMQQLLSGLDHCHNRGVLHRDIKGANLLLDNNGILKIADFGLATFFNPKQKQHLTSRVVTLWYRPPELLLGATNYGAAVDLWSAGCILAELLSGKPIMPGRTEVEQLHKIFKLCGSPSEEFWANLKLSRATIFKPQHPYRRCVNDVYKDFPTTALTLLDHLLAVEPGNRGTAASALDSEFFTTKPYACDPSSLPKYPPSKEYDAKLRDEEARRQRAAAKGQEAEAGRRKQPPAPDGNSGLQHRRVQMNPKSSSYKFTPKEDAVSGFPIDPPARAAADNGYPQRVPLMQAGRSSSTLGRSSGMDPKAQRFHTSQIVTTEMSGQSTASGQRGNAPKMSNLGESARRQYLREHRSSSRYSQLTAADPSDRPEWNHQFQERPSSSHRKDDAVANKEHTVVNGTKKNRIHYSGPLMPPGVNMDEILREHERQIQQAVRRARLDKGKGKHSGERDQSESLLCTTGNLRADR

SEQ ID NO: 1104 - protein, 438 aa, Oryza sativa
MEMKLTIKRVPTVVSNYQEDAAATAGERPRAGCGRDCLGDCCLPDSKLPLYAFKASPKKPSSQEDASNDEFFVNLLLGLWEDRMARGLFRYDVTACETKVIPGNLGFVAQLNEGRHLKKRPTEFRVDRVLQPFDAAKFNFTKVGQEEVLFQFENGGGDDSFFVESSPISVADRAPNVVAINVSPIEYGHVLLIPRVLDRLPQRIDQESFLLALHMAAEAASPYFRLGYNSLGAFATINHLHFQAYYLTVPFPVEKAATKRIFLAEGTMNSGVKVSKLMNYPVRGLVFEGGNSLSDLANVVSSACIWLQDNNVPYNVLISDCGKKIFLFPQCYAEKQALGEVSQELLDTQVNPAVWEISGHIVLKRRSDYEEASEASAWRLLAEVSLSEERFEEVKAYIFDAAGLVQSDEEEVSEDEDATYTPVSIAPPAVAEGCLVLQ

SEQ ID NO: 1105 - protein, 332 aa, Zea mays
MAKEPMRVLVTGAAGQIGYALVPMIARGVMLGADQPVILHMLDIPPAAEALNGVKMELVDAAFPLLKGVVATTDVVEACTGVNVAVMVGGFPRKEGMERKDVMSKNVSIYKTQASALEAHAAPNCKVLVVANPANTNALILKEFAPSIPDRNVTCLTRLDHNRALGQISERLSVQVSDVKNVIIWGNHSSTQYPDVNHATVKTSTGEKPVRELVADDEWLNGEFITTVQQRGAAIIKARKFSSALSAASSACDHIRDWVLGTPEGTFVSMGVYSDGSYGVPSGLIYSFPVTCSGGEWKIVQGLPIDELSRKKMDATAQELSEEKSLAYSCLE

SEQ ID NO: 1106 - protein, 461 aa, Oryza sativa
MEKAINRQRVLLAHLEPAASPAAAAPAITASACAAGDSAAYHRGACFADDVVIVAAYRTAICKSKRGGFKDTPAEDLLVPVFKALIDKTKLNPSEVGDIVVGTVLAPGSQRAIECRMAAFYAGFPDTVPLMTVNRQCSSGLQAVANVASNIKAGLYDIGIAAGLESMTVNQVRLDGQVNPKVELFSQARDCLLPMGLTSENVAKRFGITRMEQDQAAVESHRKAAAAAASGKFKEEIVPVHTKIVDPKTGEEKEIVVSADDGIRPGTSLAVLSKLKPAFSKDGTTTAGNASQVSDGAGAVLLMRRDIAMQKGLPIVGVFRSFAAVGVDPAIMGVGPAVAIPAAVKAAGLQIDDVDLFEINEAFASQYVYCCKKLGLDPAKVNVNGGAMALGHPLGATGARSVSTLLNEMKRRGKDCRFGVISMCIGSGMGAAAVFERGDAVDELTNARCIPTHNRLSKDAM

SEQ ID NO: 1107 - protein, 229 aa, Zea mays
MAVSFANLNTEAGLKKLDEYLLTRSYITGYQASKDDLAVYTSFSSAPSSKYINVARWFNHIDALVRLSGITAEGQGVKVESSAVPSAPTPDVAEAQAPAAEEEDDDDVDLFGEETEDEKKAAEERAAAAKASGKKKESGKSSVLLDVKPWDDETDMAKLEEAVRSVQMEGLLWGASKLVPVGYGIKKLQIMMTIVDDLVSVDTLIEDYLCAEPVNEYVQSCDIVAFNKI

SEQ ID NO: 1108 - protein, 355 aa, Zea mays
MSAYCGKYKDELIKNAAYIGTPGKGILAADESTGTIGKRLSSINVENVEENRRALRELLFCCPGALQYISGVILFEETLYQKTKDGKPFVDVLKEGGVLPGIKVDKGTIEVVGTDKETTTQGHDDLGKRCAKYYEAGARFAKWRAVLKIGPNEPSQLAIDLNAQGLARYAIICQENGLVPIVEPEILVDGPHDIDRCAYVTETVLAACYKALNEHHVLLEGTLLKPNMVTPGSDSKKVTPEVIAEYTVRTLQRTVPAAVPAVVFLSGGQSEEEATRNLNAMNKLSTKKPWSLSFSFGRALQASTLKAWAGKVENLEKARAAFLARCKANSEATLGTYKGDAAADTESLHVKDYKY

SEQ ID NO: 1109 - protein, 207 aa, Zea mays
MVSLKVPKRLAASVLKCGKGKVWLDPNEVSEISMANSRHNIRKLVKDGFIIKKPQKIHSRSRARRAHEAKQKGRHSGYGKRRGTREARLPTKVLWMRRMRVLRRLLRKYREAKKIDKHMYHDMYMKVKGNSFKNKRVLMESIHKSKAEKAREKTLSDQFEARRAKSKASRERKNARREERLAQGPREIPPPVSATAPTTGAPKKAKK

SEQ ID NO: 1110 - protein, 530 aa, Zea mays
MNGDGSKEDANRRLEWATLNLERGVVVSETTKGDGNGNAGRKAPISIVRLFLACMVSGGIQYGWALQLSLLSPYSQTLGISHSYVSLTWICGPIAGFVVQPIVGYYSDRCTSKMGRRRPFILAGCIIICLSVLVIGFSADIGRRLGDTKEHCSTFTGSRWSAAAVYIVGFWFLDFANNTVQGPARAMMADLAAGQHGPNVGQAIFSLWMALGSVLGYLSGANAKWHDWLPWLKTAACCDACANLKGAFLTAVVLIIISMSVTLWLAGEERLDKESVDTSGGACSAFMDLFKTLKKLPPAMFSVLAVTAVTWLSWFPFFQYNTDWMGREIFHGEPQGAGGKADLYEAGVREGAIGLLFCSVALGVTSFFIPRLCRKLTSRVVWSVSSLMVFVLMTAMVVLGMVSMKGYRPSLAASLSGPDHSFKGGALAIFALIGIPQAVLYSVPWAVASEVATEDGGGQGLTIGVLNIAIVLPQLVIALGAGPIDGAFNKGNTPAFGIGAAFALICAVLALILLPKTRGVSNATVMAGGH

SEQ ID NO: 1111 - protein, 220 aa, Zea mays
MGRRPARCYRQIKNKPYPKSRYCRGVPDPKIRIYDVGMKRKGVDEFPYCVHLVSWEKENVSSEALEAARIACNKYMTKSAGKDAFHLRVRVHPFHVLRINKMLSCAGADRLQTGMRGAFGKPQGTCARVDIGQVLLSVRCKDNNAAHASEALRRAKFKFPGRQKIIESRKWGFTKFSRADYLKYKSEGRIVPDGVNAKLLGNHGRLEKRAPGKAFLEAVA

SEQ ID NO: 1112 - protein, 159 aa, Zea mays
MAEQTEKAFLKQPKVFLSSKKSGKGKKPGKGGNRFWKSIGLGFKTPREAIEGTYIDKKCPFTGTVSIRGRIIAGTCHSAKMNRTIIVRRNYLHFVKKYQRYEKRHSNIPAHISPCFRVKEGDHVIIGQCRPLSKTVRFNVVKVIPAGSAAAGKKAFTAA

SEQ ID NO: 1113 - protein, 140 aa, Zea mays
MAEQEAPVVVEAPTPVLGEPMDLMTALQLVMKKSSAHDGLVKGLREAAKAIEKHAAQLCVLAEDCDQPDYVKLVKALCAEHNVHLVTVPAAKTLGEWAGLCKIDSEGKARKVVGCSCVVVKDYGEESEGLNIVQEYVKSH

SEQ ID NO: 1114 - protein, 403 aa, Oryza sativa
MADPSRSSPTAAAAGDALLAAAAAPGDAPDATALAVAADADAEFGFQRAELGTEKLAGTVQFHERHVFLCYKGPEVWPSHVEAAESDRLPRLLAAAIKTHKSDLKKKTKLTICEGEDGTESSNGDVLIFPDMIRYRGLTHFDVDNFVQEVLVKDTEWLPGSPEAIKGSYVFVCCHASRDKRCGVCGPALIKRFKEEIGVQGLADQVSVSACSHVGGHKYAGNVIVFSADAKGEVTGHWYGYVSPDDVPVLLHKHIGQGEIVDHLWRGQMGLSEEEQRKALESKHVTNGVTEDGAHESPEETTNGSACNPVAAGGCCQGNGGFTCCQSDLPKEDKSITAEQNQKSSEKGADKECAAGSKKRHMKMCSMPTWFETWETADTYAALGIVAAAASVFVAFRIYKNLN

SEQ ID NO: 1115 - protein, 150 aa, Zea mays
MSRRKTREPKEENVTLGPTVREGEYVFGVAHIFASFNDTFIHITDLSGRETLVRITGGMKVKADRDESSPYAAMLAAQDVAQRCKELGITALHIKLRATGGNKTKTPGPGAQSALRALARSGMKIGRIEDVTPVPTDSTRRKGGRRGRRL

SEQ ID NO: 1116 - protein, 321 aa, Zea mays
MFLKACLYSRRSWGYLCRLSDLSRFKWHYSLGRVGAADVHLGTKNCDFQMERYAFKRRTDGIYIINLGKTWEKLQLAARVIVAIENPQDIIVQSARPYGQRAVLKFAQYTGAHAIAGRHTPGTFTNQLQTSFSEPRLLILTDPRTDHQPIKESALGNIPTIAFCDTDSPMRYVDIGIPANNKGRNSIGCLFWLLARMVLQMRGTILPGHKWEVMVDLFFYRDPEEAKEQEEEAAVAPEFAAITDYQGADQWGGDQWTSDVTAPPVAPTGADWGAAPAPVPTGDGWDQAGAPAPVVDGTVPPVVAPTGWDQAAPPPTAQGWE

SEQ ID NO: 1117 - protein, 306 aa, Zea mays
MASLQVTPTSAFTQWNELKFEGLYLFHKYQGSGANQTQVISNKAPIGIGATVVNNWTVCDGPGPNAKLVARAQGLHIQAGNWVNSFSLVFVDQRFSGSTLEVTGIVVESGEWAIVGGTGQFAMANGVISKKLHGKTSEGDIIQLTIHAFCPVLGPTKRSATKVGPWGGSGGSPMDITAEPQRLKSITVATGIAVTSIAFSYVDSAGQTQSAGRWGGSGGETEPVIQLGDSEVLTELSGTIGNVDGLTVITSIKFVTSLKTYGPFGAWGDGSDTPFAIPVQQGSAIVGFFARAGIYLDALGVYVRSL

SEQ ID NO: 1118 - protein, 523 aa, Oryza sativa
MLMMLGAASQWILAAAAAAAVAALLWLAVSTLEWAWWTPRRLERALRAQGIRGNRYRLFTGDVPENVRLNREARKKPLPLGCHDIIPRVLPMFSKAVEEHGKPSFTWFGPTPRVMISDPESIREVMSNKFGHYGKPKPTRLGKLLASGVVSYEGEKWAKHRRILNPAFHHEKIKRMLPVFSNCCTEMVTRWENSMSIEGMSEVDVWPEFQNLTGDVISKTAFGSSYEEGRRIFQLQAESAERIIQAFRTIFIPGYWFLPTKNNRRLREIEREVSKLLRGIIGKRERAIKNGETSNGDLLGLLVESNMRESNGKAELGMTTDEIIEECKLFYFAGMETTSVLLTWTLIVLSMHPEWQERAREEVLHHFGRTTPDYDSLSRLKIVTMILYEVLRLYPPVVFLTRRTYKEMELGGIKYPAEVTLMLPILFIHHDPDIWGKDAGEFNPGRFADGISNATKYQTSFFPFGWGPRICIGQNFALLEAKMAICTILQRFSFELSPSYIHAPFTVITLHPQHGAQIKLKKI

SEQ ID NO: 1119 - protein, 369 aa, Zea mays
MDMGSGSSPVITDPISISPPLLGGLTSNLMPFSVMSGGCSSSPSMSNSSRRKIEEVLVNGLLDAMKSSSPRKKHNLAFGQDNSPDEDPAYTAWLSKCPSALASFKHIVANAKGRRIAVFLDYDGTLSPIVDDPDKAFMSPVMRAAVRNVAKYFPTAIVSGRSRKKVFEFVKLTELYYAGSHGMDIVTSAAAHATEKCKEANLFQPACEFLPMINEVSKCLVEVTSSIEGARVENNKFCVSVHYRNVAEKDWKVVAGLVKQVLEAFPRLKVTNGRMVLEVRPVIDWDKGKAVEFLLRSLGLSDSEDVVPIYIGDDRTDEDAFKVLRERSCGYGILVSQVPKDTEAFYSLRDPSEVMGFLNSLVRWKKHPL

SEQ ID NO: 1120 - protein, 294 aa, Glycine max
MEQYEKVEKIGEGTYGVVYKARDRVTNETIALKKIRLEREDEGVPSTAIREISLLKEMQHRNIVRLQDVVHSEKRLYLVFEYLDLDLKKHMDSSPEFVKDPRQVKMFLYQILCGIAYCHSHRVLHRDLKPQNLLIDRRTNSLKLADFGLARAFGIPVRTFTHEVVTLWYRAPEILLGSRHYSTPVDVWSVGCIFAEMVNRRPLFPGDSEIDELFKIFRILGTPNEDTWPGVTSLPDFKSTFPKWPSKDLANVVPNLDAAGLNLLSSMLCLDPSKRITARSAVEHEYFKDIKFVP

SEQ ID NO: 1121 - protein, 428 aa, Zea mays
MASAGNSGSGDDDAGGKLLADRYQKGEVLGEGTYGVVFKAIDTKTGNTVAVKRIRIGKDKKEGVNFTALREIKLLKELKDPNIIELIDCFPYKENLHLVFEFMETDLEALIKDKNIILSPADTKSYVQMMLKGLAFCHKKWVLHRDMKPNNLLIGADGQLKLADFGLARVFGSPGRNFTHQVFARWYRAPELLFGSKQYGSGVDIWAAGCIFAELLTRRAFLQGSSDIDQLGKIFAALGTPKSSQWPDMVYLPDYVEYQYVAAPPLRTLFPMASDDALDLLSKMLTYDPKARISAQQALEHRYFSSLPAPTRPSQLPRPRRKGDQGNNKIPDLNLQDGPMVLSPPRKLRRVTAHEGMEGMHRTDKVDEHPSGMRHTDDMPSQSSRIPMSVDVGAVFGTRPAPRPTLNSADKSRLKRKLDMDPEFGYAE

SEQ ID NO: 1122 - protein, 190 aa, Zea mays
MLPRRQSIFHLGEEGGAAAVHHRVSVVGAASSSMAMGGGRRARERERLVVGLQILVHHHHHGRHGHGHAHAANVVLKQMVRPRAAVAAAAGSRHGHGSHAFSCSFLKACYLCKRELSPDKDVYMYRGDQGFCSEECRWQQILVDEAREREAAAVMSNKELQRRAQARHHSPHRTPMPIRGRPPRKTLAVA

SEQ ID NO: 1123 - protein, 169 aa, Glycine max
MKKQVEAIARVLHLFQSYKEDNIPCKIDEGLYLGSIATAANKPALKDCNITHVLTVAGRIPPAHPHDFVYKIIDVVDKDDEDLKQYFNECFDFIDEAKRHDGGVLVHCFAGRSRSVTIVVAYLMKTRGMSFFEALQHVRSIRPAAGPNQGFICQLQDFEKSLQGANKLH

SEQ ID NO: 1124 - protein, 199 aa, Oryza sativa
MSMPEAGRSERDGREQDDDYEQQQARVLMALMQGFCAARYRKADNIPCPIVQGLYLGSVGAAMNKDALKSLNITHILIVARSLNPAFAAEFNYKKIEVLDSPDIDLAKHFDECFSFIDESISSGGNVLVHCFAGRSRSVTIIVAYLMKKHQMSLENALSLVRSKRPQVAPNEGFMSQLENFEKSMQVEQERKLMQPVQN

SEQ ID NO: 1125 - protein, 501 aa, Oryza sativa
MNRGGGVGVGDESGSDYESGGGMRKPLLMHTGSWYRMGSRQGSLTGAGTSSMAILRESHVSAFLCTLIVALGPIQFGFTGGFSSPTQDAIIRDLDLTLSEFSVFGSLSNVGAMVGAIASGQMAEYIGRKGSLMIAAIPNIIGWLAISFAKDSSFLYMGRLLEGFGVGVISYTVPVYIAEISPQNMRGALGSVNQLSVTVGILLAYLLGMFVPWRLLAVIGILPCTVLIPGLFFIPESPRWLAKMNMMDDFETSLQVLRGFETDISAEVNDIKRAVASANKRTTIRFQELNQKKYRTPLILGIGLLVLQQLSGINGILFYAGSIFKAAGLTNSDLATCALGAIQVLATGVTTWLLDRAGRRILLIISSAGMTLSLLAVAVVFFLKDSISQDSHMYYTLSMISLVALVAFVIAFSFGMGAIPWIIMSEILPVSIKSLAGSFATLANWLTSFGITMTANLMLSWSAGGTFVSYMVVSAFTLVFVILWVPETKGRTLEEIQWSFR

SEQ ID NO: 1126 - protein, 479 aa, Zea mays
METYTTDDALTIMGFGKFQALVLFYAGMGWVAEAMELMLLSFLGPFIREEWNVSPENESPLSSVVFAGMLLGACAWGFVSDKYGRRTGLIFSTLFTSGMGFLSALSPNYLCLVALRFLVGVGVGGSHVFISWFLEFVPAQNRGTWMVIFSLFWTLGTILEASLAWVVLPALNWRWLLVFTALPCFLLLPFFGLTPESPRYLCAQNRMSDATSVLERMANANQSALPPGVLTYNRQTKCDHDVLAPESECLLPVREKECTVDNAKSSESGSLAALRMLLSRELLRSTLLLWFVFYANSFAYYGLVLLTSQLSDANKSCASGVSFGLRQKEINLYKDTFITSLAEIPGLFLSAVLVDWFGRKASMWSMMFACCAFLGPLVLQQTELLTTILLFGARACAMGSFTVLCLYAPEVYPTFVRSTGAGIATAIGRIGGVVCPLVAVAMLRSCHQMEALIVFEVILCLAAVACMFFPVETKGRGMD

SEQ ID NO: 1127 - protein, 354 aa, Zea mays
MPYLVRERLYFGGIKDAIAALTESSSTPDFTHVLSVVSSASISFITDCRPGLEIPTEEVLRVVAGEEGAAPTAAVPPGTLMRVVERAGHGLRVTRMAVPLRDTEEEDLLDRLEPCLEFIDEGRKVGNVLVHCFAGVSRSASIIVAYLMRAEQKSLEEALEALKEISESACPNDGFLDQLKLFEEMGFKVDTSSPLYKRFRLKLLGQSYISGEKISSYMFEDDPGLSLESGSCQDSSKVEQRKTAYRCRKCRRVIAVEGNVISHVPGEGESCFDWNRRKSGHPYNNKEHGCSSLFVEPLKWMTPVEDGALEGKLSCIHCGARLGYFNWSGIQCNCGSWVTPAFQIVKSKVDISTI

SEQ ID NO: 1128 - protein, 926 aa, Oryza sativa
MEQREARQEEEEEEERDAPAVPPGENDEERDRNLSSRVVSLLFGGDISAQTFEKWVSLVRKRSGAFRPSGFPRRNSRIEVMPSGSFSLFSAADLSEQVVTAELIGKEDIPLTSSQPTEISLWERLGNASALDIESPDFSWNMLSSLHHTEHSSSSDHSEDEMCKPLEVTVNSGGVVFFALFNSSSNVLPKEAAAVIKFSSSKMSTQAERLGYEFARLLGVQTPQARVVHNSSLEWQDIRKAAENARSVAVSNSDEVGEMTCSELLEALELSRCLLLMSYIHGSPLLESSKAFSPREAACVTASSLGRVLMLDLILRNEDRLPCRQLGWRGNPANLMISDRPSAPSVDRLDDSKCTTESSIPTITQLVQSDKRTHTANATINSPELVSMSPKPDALKSVRGNADSLDGPVHIVAIDTGVPRRPPAGRRVKDHERYPKVVQLMLNNSDYSSNILYEISGGKLGTPGPDEAIAFTDSCCSISDEDNTAAIHEFRGAFRAALRDLEGFHLFLLQLYQKLDGVLRVFLSIVTKGSEESDNNDATVPDFPSPGANYSTPCAPSKQQNSELHGDSEILKSTTKPSSAGSRGSSDSVSPLSRESWSNKYFKGSAEGPRSLRMTMKLRDFYKTPKVDPELVKEIEQWNEALKSDVIKFCEENNFHSGFFDGNENNMVADAYELKVRLEHIIERIALVSDAANTERPSLVINNLFIGGALAARSMYTLQHLGITHILCLCSNEIGQSDSQFPDLFEYKNFSISDDDDANISDLFEEASDYFDHVDHVGGKVLVHCFEGKSRSATIVLAYLMLRKGLTLAKAWNLLKKVHRRAQPNDGFAKALLALDRKLHGKVSMDWQHKRPEMKVCPICSKNVGLSTSSLKLHLQKAHKRLSAGSVDSAMTLEIQKSIQSLRISRGGSLSPSQKLTKAFADELSF

SEQ ID NO: 1129 - protein, 504 aa, Oryza sativa
MAVGGDDDSMERDFAARLRLAHSPSPATPAAAASSSPTAAGGIAFRAPQEQFTADDFVLGKIYGVGSYSKVVRAKKKDTGRVYALKIMDKKFITKENKISYVKMERIVLDQLDHPGVIRLFFTFQDTYSLYMALESCEGGELFDQIVRKGRLSEDYARFYAAEIVDILEYLHGLGLIHRDVKPENLLLTSDGHIKIADFGSVKPTRDTPIKVLPNSTTERACTFVGTAAYVPPEVLNSAPATFGNDLWALGCTLYQMLSGSSPFKDASEWLIFQRIIARDLKFPEYFSAEARDLVDKLLDVDPGKRPGAGPDGYSSLKEHPFFRGIDWKNLRKTRPPKLAIDANVNEDEDSQDSNWLAHMGSVAVNQQSNTVGNNGAPSSSEVRSHISKLASIDSFDSKWQEFLDPGESVVLISKLKKINKLANKKIQLILTDKPQLICVDPSKMVAKGNIIWSDDPSELSVQVSDSSHFRICTPKKVSTFEDAKQRAWQWKKAIEDLQRCQRN

SEQ ID NO: 1130 - protein, 477 aa, Oryza sativa
MEKPAASVEEPLLVGAGEKKGESAAAAELKRLLRLAGPLVASGVLRNVVQMVSVMFVGHLGELPLAGASLATSLANVTGFSLLFGMASALDTLCGQAYGARQHHLLGVYKQRAMLVLAVAAVPIALVWASAGEILLLFGQDPAIAAEAGAYARWLIPSLVPFVPLVCHIRFLQAQSAVLPVMASCGVTAASHVAVCWALVRKAGMGSRGAALANAVSYGVNLTIMSLYVRLSRSCEKTWTGFSMEAFRELRQYAELAIPAAMMVCLEWWSFEFLVMLSGLLPNPKLETSVLSICLNTGALLVMVPIGLSTAISTRVWNELGAGNPQAAKLATRVVICMAMTEGSVVAFTMILLRNSWGHMYSDEAEVVTYIARMIPVLAISFFIDGMHSALSGVLTGCGKQKIGARVNLGAFYLAGIPMAVFLAFVLHLNGMGLWLGIVCGSLSKLILLFWITMSINWEKESTRAKELVFSSSLPVA

SEQ ID NO: 1131 - protein, 439 aa, Zea mays
MASAAAATQVGTYFLRNYYNLLQQTPDVVHQFYSEASTMVRVDDLTGTTAAANNMMDIHSLIMSLNFTQIEIKTANFVNSWGDGVLVMVSGLVQTKEYSHQRKFIQMFFLAPQEKGYFVLNDYFHFVDQEHVQPAPVIAQEDYESNLAPNTVVETAPEYVHEEEAQQIAPEVHDVVENYTYSEPQQQVVSDNWGEEPLPEEPPSFSNEMAVAPEEPVQAPPVPLPHVDEPVCEPVKKTYASILKTAKAPPAFPVAQQVPVSKTSHPTTESNQTQHSVMASSMGTEKPRSDVFGEGASHDDEESKSVYVGNVPSSVSEADLENEFKKFGRLIPDGVAIRSRKETGGYYAFVEFEELSGVHNALKASPIEINGRQIYVEERKPNSGIRGGRRGGRGRFSGGGRGYSRGGGDEYNSNRGRSNGYGRAPHQERGILGSHTPRN

SEQ ID NO: 1132 - protein, 161 aa, Glycine max
MTTTLERGFSEEQEALVVKSWNVMKKNSGELGLKFFLKIFEIAPSAQKLFSFLRDSTVPLEQNPKLKPHAVSVFVMTCDSAVQLRKAGKVTVRESNLKKLGATHFRTGVANEHFEVTKFALLETIKEAVPEMWSPAMKNAWGEAYDQLVDAIKSEMKPPSS

SEQ ID NO: 1133 - protein, 161 aa, Glycine max; identical to SEQ ID NO: 1132

SEQ ID NO: 1134 - protein, 207 aa, Glycine max
MATLSNSTNIFWQDCQVGRLERQKLLNQKGCVVWITGLSGSGKSTLACSLSRELHSKGKLSYVLDGDNLRHGLNKDLGFKAEDRAENIRRTGEVAKLFADAGLICVASLISPYRRDRDTCRAMLPDANFIEVFMNMPLELCEARDPKGLYKLARAGKIKGFTGIDDPYEPPINCEIEIKQENGDCPTPTLMAGQVVTYLENKGFLES

SEQ ID NO: 1135 - protein, 323 aa, Oryza sativa
MAGRSELVVSFGEMLIDFVPTVAGVSLAEAPAFVKAPGGAPANVAIAVARLGGGAAFVGKLGDDEFGRMLAAILRDNGVDDGGVVFDAGARTALAFVTLRADGEREFMFYRNPSADMLLTHAELNVELIKRAAVFHYGSISLIAEPCRSAHLRAMEIAKEAGALLSYDPNLREALWPSREEARTKILSIWDQADIVKVSEVELEFLTGIDSVEDDVVMKLWRPTMKLLLVTLGDQGCKYYARDFRGAVPSYKVQQVDTTGAGDAFVGALLRRIVQDPSSLQDQKKLEEAIKFANACGAITATKKGAIPSLPTEVEVLKLMESA

SEQ ID NO: 1136 - protein, 335 aa, Zea mays
MAPLGDGGAAAAAASNNLVVSFGEMLIDFVPDVAGLSLAESGGFVKAPGGAPANVACAIAKLGGSSAFVGKFGDDEFGHMLVNILKQNNVNSEGCLFDKHARTALAFVTLKHDGEREFMFYRNPSADMLLTEAELDLGLVRRARVFHYGSISLISEPCRSAHMAAMRAAKAAGVLCSYDPNVRLPLWPSPDAAREGILSIWKEADFIKVSDDEVAFLTRGDANDEKNVLSLWFDGLKLLVVTDGDKGCRYFTKDFKGSVSGFKVDTVDTTGAGDAFVGSLLVNVAKDDSIFHNEEKLREALKFSNACGAICTTKKGAIPALPTVATAQDLIAKAN

SEQ ID NO: 1137 - protein, 303 aa, Glycine max
MTLETLQSNEFSNFIIYDTISATPFSSHGSPEASFLESFVNYQEQHDHPTFDNCAMRTRKREASEPESIGRRQNSVAVQGRKKRRRKPRVCKNTEEAETQRITHITVERNRRKQMNEHLAVLRSLMPESYVQRGDQASIVGGAIEFVKELEHLLQSLEARKLQLLHQEVAQTNENTAISKLMQPPFAHCFSYPQYTWSQTPNKYTSKTKAAIADIEVTLIETHANLRILTRRSSHGQLTKLVAGFQTLCLTVLHLNVTTIDPLVFYSFSAKVEEGFQLGSVDGIATAVHHLLARIEEEASLCC

SEQ ID NO: 1138 - protein, 326 aa, Arabidopsis thaliana
MDLDSMDCTSTMDVTDDEEIHQDRHSYASVSKHHHTNNNTTNVNAAASGLLPTTTSVHELLECPVCTNSMYPPIHQCHNGHTLCSTCKARVHNRCPTCRQELGDIRCLALEKVAESLELPCKHMSLGCPEIFPYYSKLKHETVCNFRPYSCPYAGSECSVTGDIPFLVAHLRDDHKVDMHSGCTFNHRYVKSNPREVENATWMLTVFHCFGQYFCLHFEAFQLGMAPFYMAFLRFMGDETEARNYNYSLEVGGYGRKLIWEGTPRSVRDSHRKVRDSHDGLIIQRNMALFFSGGDRKELKLRVTGRIWKEQQQSGEGGGACIPNLS

SEQ ID NO: 1139 - protein, 302 aa, Zea mays
MASVTYIDDSHAEVIDPPKNEEMLDATELVGDHIQNSPKPNVASYGNVRELLECPVCLSAMYPPIHQCSNGHTLCSGCKPRVHNRCPTCRHELGNIRCLALEKVAASLELPCKYQNFGCLGIYPYYCKLKHESQCQYRPYTCPYAGSECTVAGDIPYLVNHLKDDHKVDMHNGSTFNHRYVKSNPHEVENATWMLTVFSCFGQYFCLHFEAFQLGMAPVYIAFLRFMGDDAEAKNYSYSLEVGGSGRKMTWQGVPRSIRDSHRKVRDSYDGLIIQRNMALFFSGGDRKELKLRVTGRIWKEQ

SEQ ID NO: 1140 - protein, 770 aa, Arabidopsis thaliana
MVAPALLPELWTEILVPICAVIGIAFSLFQWYVVSRVKLTSDLGASSSGGANNGKNGYGDYLIEEEEGVNDQSVVAKCAEIQTAISEGATSFLFTEYKYVGVFMIFFAAVIFVFLGSVEGFSTDNKPCTYDTTRTCKPALATAAFSTIAFVLGAVTSVLSGFLGMKIATYANARTTLEARKGVGKAFIVAFRSGAVMGFLLAASGLLVLYITINVFKIYYGDDWEGLFEAITGYGLGGSSMALFGRVGGGIYTKAADVGADLVGKIERNIPEDDPRNPAVIADNVGDNVGDIAGMGSDLFGSYAEASCAALVVASISSFGINHDFTAMCYPLLISSMGILVCLITTLFATDFFEIKLVKEIEPALKNQLIISTVIMTVGIAIVSWVGLPTSFTIFNFGTQKVVKNWQLFLCVCVGLWAGLIIGFVTEYYTSNAYSPVQDVADSCRTGAATNVIFGLALGYKSVIIPIFAIAISIFVSFSFAAMYGVAVAALGMLSTIATGLAIDAYGPISDNAGGIAEMAGMSHRIRERTDALDAAGNTTAAIGKGFAIGSAALVSLALFGAFVSRAGIHTVDVLTPKVIIGLLVGAMLPYWFSAMTMKSVGSAALKMVEEVRRQFNTIPGLMEGTAKPDYATCVKISTDASIKEMIPPGCLVMLTPLIVGFFFGVETLSGVLAGSLVSGVQIAISASNTGGAWDNAKKYIEAGVSEHAKSLGPKGSEPHKAAVIGDTIGDPLKDTSGPSLNILIKLMAVESLVFAPFFATHGGILFKYF

SEQ ID NO: 1141 - protein, 770 aa, Arabidopsis thaliana; identical to SEQ ID NO: 1140

SEQ ID NO: 1142 - protein, 360 aa, Glycine max
MGRPPCCDKVGIKKGPWTPEEDIILVSYIQEHGPGNWRSVPTNTGLSRCSKSCRLRWTNYLRPGIKRGNFTPHEEGMIIHLQALLGNKWAAIASYLPQRTDNDIKNYWNTHLKKKLKKFQAALDPHSASDSTASGQFLPKSFSDRRSTLDISSNNNNNHGSSIRLSHHQSQSSSTTTYASSTENISRLLEGWMRSSPKQLNKGSIISQYDEDHQLQGINDDDDNNNNNFVSTTKLVNLHHLHQHKIRNKDHEQEGGGVDNNMVSHHEEFDSILSFENQNNAAWDKSTCDSMPEKSSEASAAADHHHHHHHDIAAAHERNNVRQKSENSSGAPPLSFLEKWLLDENVGHQVEEMMELSPMF

SEQ ID NO: 1143 - protein, 593 aa, Zea mays
MGTSSGANFHQQPPPTQGMLPPRHGPRPSGLQTSLSLASSEQVGSPDMQEPGSNSEPGHDSATESASSKDTWPAEPNQSNGGVAASDVVSKAAEKEVANGVSKPQVIHGPSSRVSGMLLREVARERVDLVAEKMKMMSDEHLEEVKNELRSILEGTGGSHHIEEFLYLQKLVQDRHDLTPSMLSVAHHVQLEILVAIKTGIQAFLHPSVTIPHNRLVEVFLYKRCRNIACQSALPAEECRCNVCASRNGFCNLCMCVICNKFDFEVNTCRWIGCDFCSHWTHTDCAIHNGQIGMGQSVKSSIGHAEMLFRCRACQRTSELLGWVKDVFQQCAPGWDRDALLRELEFVCKIFRLSEDAKGRVLFRKCLDLIERLRNTPADSINPRMILQALQELEMDSPKISENEDVGHLITPQEACNRIAEVVQEAVRKMELVAEEKMRLYKKARLAVEACDRELEEKVREAQELKAERQRKKQQVEELESIVRLKQAEAEMFQLKANEARQEAERLQSIALTKSKTAEQDYASMYLKRRLEEAEAEKQFLFEKIKLQENQRPTVGVGSSSGAGGDSTPMMMLSKIQDLLKNVRSMPAKSEGH

SEQ ID NO: 1144 - protein, 271 aa, Glycine max
MANPEGSSRGSRWSLKGTTALVTGGTRGIGHAVVEELAEFGATVYTCSRNEEELNACLKEWKEKGFSVSGLVCDASSPPHRENLIQQVASAFNGKLNILVNNVGTNVRKPTIEYTAEEYSKLMATNLDSTYHLCQLAYPLLKASGNGSIVSISSVASQTSVGSGAIYAATKAAIDQLTKYFACEWAKDNIRSNGVAPWYTITSLVEPLLANKQLVSEIISRTPIKRMAETHEVSSLVTFLCLPAASYITGQIVSVDGGFTANGFQPSMRIS

SEQ ID NO: 1145 - protein, 210 aa, Glycine max
MANPEGSSRGSRWSLKGTTALVTGGTRGIGHAVVEELAEFGATVYTCSRNEEELNACLKEWKEKGFSVSGLVCDASSPPHRENLIQQVASAFNGKLNILVNNVGTNVRKPTIEYTAEEYSKLMATNLDSTYHLCQLAYPILKASGNGSIVSISSVASQTSVGSGAIYAATKAAIDQLTKYFACEWAKDNIRSNGVAPWYTITSLVEPLLA

SEQ ID NO: 1146 - protein, 290 aa, Oryza sativa
MERPAPVRKSHTSTADLLAWPQQQHQPDGHAASTPSPARRPHQPSEALRKVVFGGQVTEEEAESLNKRKPCSAPKWKEMTGSGIFAAGADGEAEEPGSAAAPGRAAPRNYQPVTVSHISFAEDGSVPPKKPTSVAEVAKQRELSGTLQSEADSKMKKQISNAKSKELSGHGLFDPQDVRPNGARNTANGTGASHTPVRNANVSSFSFGEANTDSVTKTAKKITGKKFTDLTGNNIFKGDEAPASAEKHLSTAKLKEMTGSNIFAEGQAPTREYHSGNRKPPGGESSIALV

SEQ ID NO: 1147 - protein, 320 aa, Glycine max
MSTAAAAGGDMEAGFAKLQGEDFEYYMQTYSIVLGRNSKKSTVDVDLSSLGGGMNISRHHARIFYDFARRRFALEVLGKNGCLVEGVLHLPGNPPVKLDSQDLLQIGDKEFYFLLPVRSILGGPVGPRHYPNHATPGPVVPHYNNYHLGPGPVKKAPRREYYEEEFDDEDDVGGRKMRRDGYDGYGYAGGKSSLSAPMDKKSEGRSRVDRDADNLQLQQLEEKDVVSSVATVLSDLCGPGEWMPMEKLHTELLEQYSSVWHHNRVRRYLTSEDWPGPESKGKPWYGLLMLLRKYPEHFVINTRSKGRVTHEFVSLVSLLS

SEQ ID NO: 1148 - protein, 263 aa, Zea mays
MSELKSSSSCSNLAWSGDIRLKEVHFSYPLRSNVEILNGLDLTIECGKVTALVGPSGAGKSTVVQLLARYYEPTQGSITVAGEDIRVFDKREWSRVVSLVNQDPVLFSVSVGENIAYGLPDDVVSKDEIIKAAKAANAHEFIISLPQGYDTLVGERGSLLSGGQRQRIAIARALLKNAPILILDEATSALDATSERLVQEALNHLMKGRTSLVIAHRLSTVQNAHRIAVCSEGRITELGTHRELVAKGGSYASLVGTQRLAFE

SEQ ID NO: 1149 - protein, 153 aa, Glycine max
MATCFAPFSVSGGSHELWLTKRVGPKLTVQRRSNLVIKRNHTSSISAEYRDNRGGGGGDFVAGFLLGGAVFGTLAYIFAPQIRRSLLNEDEYGFRKAKRPIYYDEGLERTRQTLNEKIGQLNSAIDNVSSRLRGGNNVPAAKIESDPEVEATM

SEQ ID NO: 1150 - protein, 143 aa, Glycine max
MTEAYIRKKPGMASVKDMPVLQDGPPPGGFAPVRFARRIPNKGPSAVAIFLTAFGAFSWGMYQVGQGNKIRRALKEEKYAARRSILPVLQAEEDERFVKEWHKYLEYEAEVMKDVPGWKVGESVYHSGRWVPPASGELRPDVW

SEQ ID NO: 1151 - protein, 192 aa, Glycine max
MAKKRKSISTSLDEVDRTIYSSFSSATNSLSHLYTLSMNHQKLSFQAGERHSLEKLYQWVWRQQESGSRVATVDILSYIQNELDYCGEEPCMSPRAPLHQQQSQPVMQVTTGAGFPVTTGFSGQTIVGQELRPEHCDNQSKNSMFSNALSNPVRQIGEGGNHPSGLSMGNGNQSTDSAAFSSNDSAMDMHAD

SEQ ID NO: 1152 - protein, 428 aa, Arabidopsis thaliana
MATAFAPTKLTATVPLHGSHENRLLLPIRLAPPSSFLGSTRSLSLRRLNHSNATRRSPVVSVQEVVKEKQSTNNTSLLITKEEGLELYEDMILGRSFEDMCAQMYYRGKMFGFVHLYNGQEAVSTGFIKLLTKSDSVVSTYRDHVHALSKGVSARAVMSELFGKVTGCCRGQGGSMHMFSKEHNMLGGFAFIGEGIPVATGAAFSSKYRREVLKQDCDDVTVAFFGDGTCNNGQFFECLNMAALYKLPIIFVVENNLWAIGMSHLRATSDPEIWKKGPAFGMPGVHVDGMDVLKVREVAKEAVTRARRGEGPTLVECETYRFRGHSLADPDELRDAAEKAKYAARDPIAALKKYLIENKLAKEAELKSIEKKIDELVEEAVEFADASPQPGRSQLLENVFADPKGFGIGPDGRYRCEDPKFTEGTAQV

SEQ ID NO: 1153 - protein, 364 aa, Zea mays
MELAGTWRKVMPYMAMVFLQFGFAGMFLISVASLRQGMSHYVLVVYRNVVAAIVMAPFALWFERKTRPKMSLPVFIKILALGLLEPVLDQNFIYMGVNSTSASFSSALTNILPALTFVNAIILRMERIVIKERRSQAKIAGTAITVCGALLMILFKGPIINFPWSKHASHAVSDSGVHNSGHWLMGTFMILLSCFCWSAFFILQSYTLRSYPSELSLTTLICAMGATESGAVALVMERDTKAWSIGFDMRLFTAIYSGIMCSGVAYYVQGIVIKDRGPVFVTAFSPLCMILVTVLGSFILSEVVTLGRLIGATVIVVGLYALIWGKNKDHVKSQNSFDKHDTFELPFSTSAVNNTTGPVLATSI

SEQ ID NO: 1154 - protein, 602 aa, Oryza sativa
MKYVLVTGGVVSGLGKGVTASSIGVVLKACGLRVTTIKIDPYLNTDAGTMSPFEHGEVFVLDDGGEVDLDLGNYERFLDIKLTRDNNITTGKIYQSVINKERRGDYLGKTIQVVPHITDEIQDWIERVAMNPVDGKEGPPDVCVIELGGTIGDIESMPFIEALGQFSYRVGPGNFCLVHVSLVPVLNVVGEQKTKPTQHSVRGLRGLGLAPDILACRSTEPLEENVKAKLSQFCHVPVSSIINLHDVTNIWHIPLLLRDQRAHEAILKVLDLQFVGKVPREPKLVEWTERASKFDKLKATVKIAMVGKYTGLSDSYLSVLKALLHASVAMGRKLVVEWVPSCDLEDSAAKETPEAHKKAWKLLKGAEGILVPGGFGDRGVQGKILAAKYARENNVPYLGICLGMQIAVIDFACSIMKLPGANSTEFDPDTMSPCVIFMPEGSKTHMGATMRLGSRRTYFHATACKSAKLYGNARFVDERHRHRYEVNPEMVPEFEKAGLSFVGKDESGRRMEIIELPSHKFFIGVQFHPEFKSRPGKPSPLFLGLIAAASGQLETLLQPSSNIVNPNPMPRFPIPKKTIYHAKKPLDSLVNGYFANGNVIHT

SEQ ID NO: 1155 - protein, 603 aa, Zea mays
MKYVLVTGGVVSGLGKGVTASSIGVVLKACGLRVTTIKIDPYLNTDAGTMSPFEHGEVFVLDDGGEVDLDLGNYERFLDIKLTRDNNITTGKIFQAVINKERRGDYLGKTVQVVPHITDEIQDWIERVAVVPVDGKEGPPDVCVIELGGTIGDIESMPFIEALGQFSYRVGPGNFCLVHVSLVPVLNVVGEQKTKPTQHSVRGLRGLGLAPDVLACRSTEPLEEHVKAKLSQFCHVPVSNIVNLHDVTNIWHIPLLLRDQKAHEAILKVLDLQYDGKVPREPELTKWTKRATKFDKLKTPVKIAMVGKYTGLSDSYLSVIKALLHASVAMERKLVVEWVPSCDLEDSSAKETPEAHKKAWKLLKGADGVLVPGGFGDRGVQGKILAAKYARENNVPYLGICLGMQIAVIEFARSVMKLRGANSTEFDPATTSPCVIFMPEGSKTQMGATMRLGSRRTYFHVSGCKSAKLYGNASSVDERHRHRYEVNPDMVPDFEKAGLQFVGKDESGKRMGIVELPSHKFFIGAQFHPEFKSRPGKPSPLFLGLIAAASGQLEPLLQRSNPTTKACSISKVPKLKLYPTGPVNNPLNSLVNGYYPNGTGIHT

SEQ ID NO: 1156 - protein, 531 aa, Zea mays
MDGNAETIQFSWGKRRGKGGAKMDTQFFGSFTLDNVKYSLFDCVYLFKHGDPEPYIGKIVKIWEKDNDKKVKILWFFHPDEVQNYLSGPVMGKEIFLACGEGAGLADINPLEAVAGKCTVICTSKDKRNRQPSPQELQIADYIFYRVFDVKSLTLSDQLPDKIAAFTVDLLLNPKDELVIPANVLVNPNVDEGMVATVPTPPSAVKLEDRSQAAALPLTQTGQVDENLPATVPLPQSEVKEEQKPVIAIPISQTVVKKEDKKSLSDIPLSHSAVKEDETPVASIGPPQSAVMENIPKHTQLQDAHAGERPPKKLKLSQETTEQDIDPTNTEQRPLELQPKNIDRSKWFNIEWNDRLKMADDKGTLVYIQNLDIRFGPADIEELVRKALQLNCTAKPINHPTYDDPNNGKAYAIFRTKDAADAAISKINSGLVVGGRPLYCSKGLLEVPKPSANLVGHLSSYVKIGQKQRDEQKKAVATSHCSQPNTIEYDLALDWMLLREKQDQSFRVLHKKHREARKGFASLVGKGSKAE

SEQ ID NO: 1157 - protein, 129 aa, Glycine max
MGRLFVVNLEGKIYSCKHCHTHLALYDDIYSRTFHCRHGKAYLFNKVVNVSIGEMEDRPMMTGLHTVADIFCVGCGSIVGWKYETAYEKNQKYKEGKSVLERYKVSGPDGSNYWISNEAHVGGSDADDA

SEQ ID NO: 1158 - protein, 570 aa, Arabidopsis thaliana
MEEKDVYTQDGTVDIHKNPANKEKTGNWKACRFILGNECCERLAYYGMGTNLVNYLESRLNQGNATAANNVTNWSGTCYITPLIGAFIADAYLGRYWTIATFVFIYVSGMTLLTLSASVPGLKPGNCNADTCHPNSSQTAVFFVALYMIALGTGGIKPCVSSFGADQFDENDENEKIKKSSFFNWFYFSINVGALIAATVLVWIQMNVGWGWGFGVPTVAMVIAVCFFFFGSRFYRLQRPGGSPLTRIFQVIVAAFRKISVKVPEDKSLLFETADDESNIKGSRKLVHTDNLKFFDKAAVESQSDSIKDGEVNPWRLCSVTQVEELKSIITLLPVWATGIVFATVYSQMSTMFVLQGNTMDQHMGKNFEIPSASLSLFDTVSVLFWTPVYDQFIIPLARKFTRNERGFTQLQRMGIGLVVSIFAMITAGVLEVVRLDYVKTHNAYDQKQIHMSIFWQIPQYLLIGCAEVFTFIGQLEFFYDQAPDAMRSLCSALSLTTVALGNYLSTVLVTVVMKITKKNGKPGWIPDNLNRGHLDYFFYLLATLSFLNFLVYLWISKRYKYKKAVGRAH

SEQ ID NO: 1159 - protein, 491 aa, Arabidopsis thaliana
MLAMEKEFDSKLVLQGNSSNGANVSRSKSFSFKAPQENFTSHDFEFGKIYGVGSYSKVVRAKKKETGTVYALKIMDKKFITKENKTAYVKLERIVLDQLEHPGIIKLYFTFQDTSSLYMALESCEGGELFDQITRKGRLSEDEARFYTAEVVDALEYIHSMGLIHRDIKPENLLLTSDGHIKIADFGSVKPMQDSQITVLPNAASDDKACTFVGTAAYVPPEVLNSSPATFGNDLWALGCTLYQMLSGTSPFKDASEWLIFQRIIARDIKFPNHFSEAARDLIDRLLDTEPSRRPGAGSEGYVALKRHPFFNGVDWKNLRSQTPPKLAPDPASQTASPERDDTHGSPWNLTHIGDSLATQNEGHSAPPTSSESSGSITRLASIDSFDSRWQQFLEPGESVLMISAVKKLQKITSKKVQLILTNKPKLIYVDPSKLVVKGNIIWSDNSNDLNVVVTSPSHFKICTPKKVLSFEDAKQRASVWKKAIETLQNR

SEQ ID NO: 1160 - protein, 533 aa, Zea mays
MEQYEVVEQIGRGAYGSAYLVLHKAERKRYVMKKIRLSKQNDKFQRTAYQEMSLMASLSNPYIVEYKDGWVDEGTSVCIVTSYCEGGDMAERIKKARGILFSEERVCRWFTQLLLALDYLHCNRVLHRDLKCSNILLTRDNNIRLADFGLAKLLMEDLASSVVGTPNYMCPEILADIPYGYKSDIWSLGCCMFEILAHRPAFKATDMAALVNKINRSSISPMPPIYSSALKQIVKSMLRKNPEHRPTAGELLRHPHLQPYLSESSNCSPIYLPVKPTKGNLVDKQSKKPSSGRKRAVKANGSNGTLETAAEHAVEARDSSTNFSDVSTIGTQEALILQMPVDPDAGSKEEQNVDVVPFQHAAENLMATTDRQVDATIRLKAIRTSNAKEAAPVTVADQKFNEAPIPNEELTIGVVQEQRKDVKPRSYQAGKPEMCDTTVTEESSPISTLKLAHTESAPAEWDHLNIVQQRADALESLLELCAKLLEQERLDELAGVLRPFGEGAVSSRETAIWLTKSLMTPPPKFGESPTKLL

SEQ ID NO: 1161 - protein, 644 aa, Zea mays
MDQYEVLEQIGKGAFGSALLVRHKLERKKYVLKKIRLARQTDRTRRSAHQEMQLIANVRNPFIVEHKDSWVDKGCYVCIVIGYCEGGDMAEAIKRANDTHFSEEKLCQWLVQLLMALDYLHAHHILHRDVKCSNIFLTRDQNIRLGDFGLAKILTADDLASSIVGTPSYMCPELLADIPYGTKSDIWSLGCCMYEMAALKPAFRAFDMQNLINKITKSIVSPLPTRYSGAFRRLVRSMLRRSPEHRPSAAELLKHPHLEPYVLQLHLKSHLSRSIVPVHQSPSEKRMTFAAEPVCRSKGRRNSLGSERMIAAFSKPSPDRSSVSSIRSVKDEYTATQSVRELSVDDSMVEVASKPVASRTSDVMRTPKATPWKMMTTLRNRLEAPQASYDHTEFSRTPVDKRNSRVARRASLPLPVFETPKQRSSMSVLEQLESPDVSVNSPRIDRIAEFPLASCEDPLFSTVKPPTPASASASATPPFVDRSITKDKCTAQTLRSAARDGGNGRSEDGGGLSSGRTTTTAASSGGTSGSLQPKGRFDTTSYQQRAEALEGLLEFSAQLLQQERYEELGVLLRPFGPDEMVSPRETAIWLTKSFKEAMATGLQRWPPCTGMDGSGIQDRPSALQAVDGRMASPVLACVGQVGRL

SEQ ID NO: 1162 - protein, 198 aa, Arabidopsis thaliana
MATDDVNEPLPAAAELPATEAEKQPHKLERKWSFWFDNQSKKGAAWGASLRKAYTFDTVEDFWGLHETIFQTSKLTANAEIHLFKAGVEPKWEDPECANGGKWTWVVTANRKEALDKGWLETLMALIGEQFDEADEICGVVASVRPQSKQDKLSLWTRTKSNEAVLMGIGKKWKEILDVTDKITFNNHDDSRRSRFTV

SEQ ID NO: 1163 - protein, 237 aa, Glycine max
MVVEDTQKSVITEDQYPSRVVSDNNNDDDDDDLEEGEIPVDGEDSGATATTKPPAALARNPHPLENSWTFWFDNPSSKSKQAAWGSSIRPIYTFATVEEFWSIYNNIHHPSKLGLGADFHCFKHKIEPKWEDPICANGGKWTMTFPRGKSDTSWLYTLLAMIGEQFDHGDEICGAVVNVRSRQDKIAIWTKNASNEAAQVSIGKQWKEFLDYNDTIGFIFHEDAKKLDRGAKNKYVV

SEQ ID NO: 1164 - protein, 237 aa, Glycine max; identical to SEQ ID NO: 1163

SEQ ID NO: 1165 - protein, 235 aa, Arabidopsis thaliana
MAVEDTPKSVVTEEAKPNSIENPIDRYHEEGDDAEEGEIAGGEGDGNVDESSKSGVPESHPLEHSWTFWFDNPAVKSKQTSWGSSLRPVFTFSTVEEFWSLYNNMKHPSKLAHGADFYCFKHIIEPKWEDPICANGGKWTMTFPKEKSDKSWLYTLLALIGEQFDHGDEICGAVVNIRGKQERISIWTKNASNEAAQVSIGKQWKEFLDYNNSIGFIIHEDAKKLDRNAKNAYTA

SEQ ID NO: 1166 - protein, 302 aa, Zea mays
MASVTYIDDSHAEVIDPPKNEEMLDATELVGDHIQNSPKPNVASYGNVRELLECPVSLSAMYPPIHQCSNGHTLCSGCKPRVHNRCPTCRHELGNIRCLALEKVAASLELPCKYQNFGCLGIYPYYCKLKHESQCQYRPYTCPYAGSECTVAGDIPYLVNHLKDDHKVDMHNGSTFNHRYVKSNPHEVENATWMLTVFSCFGQYFCLHFEAFQLGMAPVYIAFLRFMGDDAEAKNYSYSLEVGGSGRKMTWQGVPRSIRDSHRKVRDSYDGLIIQRNMALFFSGGDRKELKLRVTGRIWKEQ

SEQ ID NO: 1167 - protein, 593 aa, Zea mays
MESTLKGIRGSDAPCVLDLDDAATVAGGVEDTYGEDRATEEQLVTPWTVSVASGYNLLRDPRYNKGLAFTERERETHYLRGLLPPAIVSQELQERKIMNNIRQYQLPLQRYMALMDLQEGNERLFYKLLIDNVEELLPIVYTPTVGEACQKYGSIFSRPQGLYISLKEKGKILEVLKNWPERSIQVIVVTDGERILGLGDLGCQGMGIPVGKLSLYTALGGVRPSACLPITLDVGTNNEELLNDEFYIGLRQRRATGQEYTDFLQEFMTAVKQNYGEKVLIQFEDFANHNAFDLLARYGTTHLVFNDDIQGTASVVLAGLIAAQTLLGGSLADHTYLFLGAGEAGTGIAELIALEISRQTKAPIEECRKKIWLVDSKGLIVSTRKESLQHFKKPWAHEHKPLSNLLDAVNAIKPTVLIGTSGKGQTFTKDVVEAISSFNERPIILALSNPTSQSECTAEQAYTWSKGQAVFATGSPFDPVEYNGKIHVPGQANNAYIFPGFGLGVVMSGAIRVHDDMLLAASEALAQQVTEENFEKGLIYPPFSNIRKISAHIAASVAAKAYELGLASRRPRPKDLVKYAESCMYSPIYRNYR

SEQ ID NO: 1168 - protein, 459 aa, Zea mays
MIEEVERSLATPTALLRGIADAMVAEMERGLRGDIHAQLKMLISYVDNLPTGDEHGLFYALDLGGTNFRVLRVQLGGREKRVVKQQYEEVSIPPHLMVGTSIELFDFIAAALAKFVDTEGEDFHLPEGRQRELGFTFSFPVNQTSISSGTLIKWTKGFSINGTVGEDVVSELSRAMERQGLDMKVTALVNDTVGTLAGGRYMDNDVVAAVILGTGTNAAYVEHANAIPKWTGLLPKSGNMVINTEWGSFKSGKLPLSEYDKAMDFESLNPGEQIYEKMISGMYLGEIVRRILLKLAHDASLFGDVVPTKLEQPFILRTPDMSAMHHDSSHDLKTLGSKLKDIVGVADTSLEVRYITRHICDLVAERGARLAAAGIYSILKKIGRDKVPSSGSKMPRTVIALDGGLYEHYKKFSSCVEATLTDLLGEEASSSVVAKLANDGSGIGAALLAASHSQYGESD

SEQ ID NO: 1169 - protein, 235 aa, Zea mays
MGAGGVIPPPKTYFDKVQAIVKKYDILFIADEVITAFGRLGTMFGCDYYNIKPDLVSLAKALSNAYVPIGATLVSPEISDVIHSQSNKLGSFAHGFTYSGHPVACAVAIEALKLYRERDIPGHVKQIAPKFQDGIRALADSPIIGEIRGLGMIMGTEFTNNKSPTDLFPAEWGVGAIFGEECQKRGMLVRVAGDAIMMSPTLIMTPGEVDELVRIYGEALKATEERVAALQSKKN

SEQ ID NO: 1170 - protein, 337 aa, Zea mays
MGKIKIGINGFGRIGRLVARVALQSEDVELVAVNDPFITTDYMTYMFKYDTVHGQWKHSDITLKDSKTPLFGEKPVTVFGIRNPEEIPWGEAGAEYVVESTGVFTDKDKAAAHLKGGAKKVVISAPSKDAPMFVVGVNEDKYTSDVNIVSNASCTTNCLAPLAKVIHDNFGIIEGLMTTVHAITATQKTVDGPSAKDWRGGRAASFNIIPSSTGAAKAVGKVLPELNGKLTGMSFRVPTVDVSVVDLTVRIEKGASYEEIKKAIKAASEGPLKGIMGYVEEDLVSTDFTGDSRSSIFDAKAGIALNDHFIKLVSWYDNEWGYSNRVVDLIRHMFKTQ

SEQ ID NO: 1171 - protein, 475 aa, Zea mays
MGRHGVDQIGAVAAFVWVTLLPLLLVCVVWPGAQAGHTSEYRRQLGSAIDMPLDADVFRPPPGYNAPEQVHITQGNHDGTAMIISWVTTSEPGSSTVIYGTSEDNLNYTANGKHTQYTFYNYTSGYIHHCTIKKLEFDTKYYYAVGIGQTVRKFWFLTPPKSGPDVPYTLGLIGDLGQSFDSNVTLTHYESNAKAQAVLFVGDLSYADNYPYHDNVRWDTWARFVERSVAYQPWIWTAGNHEIDFAPELGETKPFKPFSHRYPTPYKASGSTAPYWYSIKRASAYIIVLASYSAYGKYTPQYKWLEAEFPKVNRSETPWLVVLMHAPWYNSYNYHYMEGETMRVMYEPWFVKYKVDVVFAGHVHAYERTHRISNVAYNVVNGLCTPIPDQSAPVYITIGDGGNQEGLATNMSQPQPSYSAFREASFGHAILDIKNRTHAYYTWHRNQDGSAVAADSMWFTNRYWEPTDDSADDFQ

SEQ ID NO: 1172 - protein, 434 aa, Zea mays
MLGDQRMILGLDSATSSSTAPDLTRAEEDPSVSRSCVIDRLQVGWAQKGGQVEGLVNCYSKKNKTGSGSRNLAARAWSSEMEGSDEGGEVNTGDLIGGIGRELAISCLLRLPRSYYYDVACVNRSFYSLVRFGELYRLRREAGIVEQMIYCSCNVLEWEGFDPRRQRWFSIPSMPPIECFTLADKESLAVGTNILVFGKRVEAHVVLRYSLLTNSWTTGEMMNTPRCLFGSASFGEKAIVAGGIGQNGTLDSAELYDSEMQTWTTLPSMNRARQMCSGFFMDGKFYVIGGKSERHNEILSCAEDFDLESSTWRLIPDMAQGLNGGSGAPPLVAVVNNELYAADYATREVRKYDKESNAWITLGLLPGRYTSVHGWGIAFRSCGNMLIVIGAMSAGGSGVIEICSWVPNNGLPDWKIIGTRRSGSFVYNCAVMSC

SEQ ID NO: 1173 - protein, 385 aa, Zea mays
MSGRGKGGKGLGKGTPRVPFSSLFLNVAGAPASCLSPPASDREGIGMASHHSEPLDPADADDPSDNNPELPCPSYHIVTKPGQLPVEFLEPPATQKLVIGFDCEGVDLCRNGALCIMQLAFPDAVYLVDAIEGGKELIQACKPALESDHITKVIHDCKRDSEALYFQFGIKLHNVMDTQIAYSLIEEQEQEGKKMTSDDYNYISFVSLLADKRYCGILYPEKEEVRTLLRQDPNFWTIRPLSDMMVRAATDDVRFLLSIYAKMMEKLSKVSLWRLAVRSELYCRCFCLSDNQFADWSPLPPVPDDIEADVYVPEADILSVLDVPPGKMGRVIGRKGSTIMAVKECCKVEIHIGGAKGPPDRVFIIGPEKEVRKAEAIFRGRMLEF

SEQ ID NO: 1174 - protein, 464 aa, Zea mays
MPPPPQRPRNRPKHPQGPGDAPKGSESHTVQSNKKQGLGTGPLVGIIAGSIVAVLCVFLLLLCCMCNAQKRTDDASSESKDFGGPLTVNIERASSREIPEQMDDTSIATVKLPPAEKMTPERVYGKNGSVRKTKVPITATPYTVASLQVATNSFCQDSLLGEGSLGRVYKADFPNGKVLAVKKIDSAALSLQEEDNFLEAVSSMSRLRHPNIVPLTGYCVEHGQRLLVYEYIVNGTLHDMLHFSVEISRKLTWNIRVRIALGTARALEYLHEVCMPSLVHRNLKSSNILLDEEHNPHLSDCGLAALTPNTERQVSTEVFGSFGYSAPEFAMSGIYTVKSDVYSFGVVMLELLTGRKPLDSSRERSEQSLVRWATPQLHDIDALARMVDPALNGMYPAKSLSRFADVIALCVQPEPEFRPPMSEVVQQLVRLMQRASIVRRQSGEELGFSYRVPEREGDLRDISL

SEQ ID NO: 1175 - protein, 433 aa, Zea mays
MSTATAPSPSPSPSPSSGTRPLLRIGAARRFAMAFPPWAALLFAGVLVVVLAAAGAEAGGGSVCFDRMFSFGDSLTDTGNFLLSVPDDFPDPARNLPYGQTFFGRPSGRYSDGRNLLDFFAEAFGLPYVPPYLGGGDFQNGANFAVGGATALNGSFFRERGVEPTWTPHSLDEQMQWFKKLLTSIAPLETEQNKIISKSLFFVGEVGGNDYNHLIVRDKSVDELHEVVPNVVGAISSAITDLINLGAKKLVVPGNFPIGCVPLYLAIFQSQKEDYYEEQTGCIKWLNDLAEYHNKMLQEELEKLRNLHPDVTIIYADYYGAALNIFRAPLQFGFTVPLNACCGSDAPYNCSPSISCGRPGSTVCPDPSKYISWDGLHFTEASYKVVIQGVLGGYAKPPLSETCKGAEFKVSQLHQCTDNPTNTVSYDALSSFI

SEQ ID NO: 1176 - protein, 534 aa, Zea mays
MAAMAAAGGVGLHLIGAATATLIVAVLVAAVLGRRRRARARAQAPPVEGKPAPEAGCAVGDGAGPDVGTDVIIVGAGVAGSALAYTLGKDGRRVHVIERDLTEPDRIVGELLQPGGYLKLIELGLQDCVEEIDAQRVLGYALFKDGRNTKLAYPLEKFHSDVAGRSFHNGRFIQRMRQKAASLPNVQLEQGTVTSLLEENGTVKGVQYKTKSGEELKAYAPLTIVCDGCFSNLRRALCSPKVDVPSCFVGLVLENCQLPHPNHGHVILANPSPILFYPISSTEVRCLVDVPGQKVPSIASGEMANYLKTVVAPQIPPEIYDSFIAAIDKGSIRTMPNRSMPAAPLPTPGALLMGDAFNMRHPLTGGGMTVALSDIVVLRNLLKPLRNLHDASSLCKYLESFYTLRKPVASTINTLAGALYKVFSASPDQARNEMRQACFDYLSLGGVFSNGPIALLSGLNPRPLSLVAHFFAVAIYGVGRLMLPLPSPKRMWIGARLISGACGIILPIIKAEGVRQMFFPATVPAYYRAAPTGE

SEQ ID NO: 1177 - protein, 248 aa, Zea mays
MAMDAERRQAELIAQFSAQAAALSSAPQLAALVLEATSHPALFAFSELLTLPALSKLTGTQYASSLDLLRLFAYGTLNDYKSNSGFLPALLPDQVRKLKQLSVLTLAESTKILPYDQLMQELDVSNVRELEDFLINECMYSGIVRGKLDQLRRCFEVQFAAGRDLTPDQLKNMIETLSDWLGTSDRLLHQIQEKIKWADTMSEVNKKHQKEFEDRVEEAKKSIKKLNNLSRQTLTYGGMTSFSLNLEE

SEQ ID NO: 1178 - protein, 147 aa, Sorghum bicolor
MSSSRGSSSPDSNNNTDVSGGGGGGFAADERKRKRMLSNRESARRSRAKKQQRLEELVAEVARLQAENAAAQSRIAAFEREFAKVDGDNAVLRARHGELSSRLESLGGVLEVLQMAGAAVDIPEMVTEDPMLRPWQPSFPPMQPIGF

SEQ ID NO: 1179 - protein, 459 aa, Arabidopsis thaliana
MTLTFSSSAATVAVAAATVTSSARVPVYPLASSTLRGLVSFRLTAKKLFLPPLRSRGGVSVRAMSELVQDKESSVAASIAFNEAAGETPSELNHSRTFLDARSEQDLLSGIKKEAEAGRLPANVAAGMEELYWNYKNAVLSSGASRADETVVSNMSVAFDRMLLGVEDPYTFNPYHKAVREPFDYYMFVHTYIRPLIDFKNSYVGNASIFSELEDKIRQGHNIVLISNHQSEADPAVISLLLEAQSPFIGENIKCVAGDRVITDPLCKPFSMGRNLICVYSKKHMNDDPELVDMKRKANTRSLKEMATMLRSGGQLIWIAPSGGRDRPNPSTGEWFPAPFDASSVDNMRRLVEHSGAPGHIYPMSLLCYDIMPPPPQVEKEIGEKRLVGFHGTGLSIAPEINFSDVTADCESPNEAKEAYSQALYKSVNEQYEILNSAIKHRRGVEASTSRVSLSQPWN

SEQ ID NO: 1180 - protein, 152 aa, Glycine max
MACSDHSSASTTTEINAQYYQQESAKLRQQIQMLQNSNRHLMGDALSTLTVKELKQLENRLERGITRIRSKKHEMLLAEIEYFQKREIELENENLCLRTKITDVERIQQVNMVSGPELNAIQALASRSFFNPNMLEGGTVYPHSDKKILHLG

SEQ ID NO: 1181 - protein, 324 aa, Arabidopsis thaliana
METEEEMKESSISMVEAKLPPGFRFHPKDDELVCDYLMRRSLHNNHRPPLVLIQVDLNKCEPWDIPKMACVGGKDWYFYSQRDRKYATGLRTNRATATGYWKATGKDRTILRKGKLVGMRKTLVFYQGRAPRGRKTDWVMHEFRLQGSHHPPNHSLSSPKEDWVLCRVFHKNTEGVICRDNMGSCFDETASASLPPLMDPYINFDQEPSSYLSDDHHYIINEHVPCFSNLSQNQTLNSNLTNSVSELKIPCKNPNPLFTGGSASATLTGLDSFCSSDQMVLRALLSQLTKIDGSLGPKESQSYGEGSSESLLTDIGIPSTVWNC

SEQ ID NO: 1182 - protein, 395 aa, Arabidopsis thaliana
MANSFSQVPPGFRFHPTDEELVDYYLRKKVASKRIEIDIIKDVDLYKIEPCDLQELCKIGNEEQSEWYFFSHKDKKYPTGTRTNRATKAGFWKATGRDKAIYIRHSLIGMRKTLVFYKGRAPNGQKSDWIMHEYRLETSENGTPQEEGWVVCRVFKKKLAATVRKMGDYHSSPSQHWYDDQLSFMASEIISSSPRQFLPNHHYNRHHHQQTLPCGLNAFNNNNPNLQCKQELELHYNQMVQHQQQNHHLRESMFLQLPQLESPTSNCNSDNNNNTRNISNLQKSSNISHEEQLQQGNQSFSSLYYDQGVEQMTTDWRVLDKFVASQLSNDEEAAAVVSSSSHQNNVKIDTRNTGYHVIDEGINLPENDSERVVEMGEEYSNAHAASTSSSCQIDL

SEQ ID NO: 1183 - protein, 578 aa, Arabidopsis thaliana
MATTEQALLSMEALPLGFRFRPTDEELINHYLRLKINGRDLEVRVIPEIDVCKWEPWDLPGLSVIKTDDQEWFFFCPRDRKYPSGHRSNRATDIGYWKATGKDRTIKSKKMIIGMKKTLVFYRGRAPRGERTNWIMHEYRATDKELDGTGPGQNPYVLCRLFHKPSDSCDPAHCEEIEKVNFTPTTTTRCSPDDTSSEMVQETATSGVHALDRSDDTERCLSDKGNNDVKPDVSVINNTSVNHAETSRAKDRNLGKTLVEENPLLRDVPTLHGPILSEKSYYPGQSSIGFATSHMDSMYSSDFGNCDYGLHFQDGASEQDASLTDVLDEVFHNHNESSNDRKDFVLPNMMHWPGNTRLLSTEYPFLKDSVAFVDGSAEVSGSQQFVPDILASRWVSEQNVDSKEAVEILSSTGSSRTLTPLHNNVFGQYASSSYAAIDPFNYNVNQPEQSSFEQSHVDRNISPSNIFEFKARSRENQRDLDSVVDQGTAPRRIRLQIEQPLTPVTNKKERDADNYEEEDEVQSAMSKVVEEEPANLSAQGTAQRRIRLQTRLRKPLITLNNTKRNSNGREGEASHRKV

SEQ ID NO: 1184 - protein, 293 aa, Arabidopsis thaliana
MAMKVDQDYSCSIPPGFRFHPTDEELVGYYLKKKIASQRIDLDVIREIDLYKIEPWDLQERCRIGYEEQTEWYFFSHRDKKYPTGTRTNRATVAGFWKATGRDKAVYLNSKLIGMRKTLVFYRGRAPNGQKSDWIIHEYYSLESHQNSPPQEEGWVVCRAFKKRTTIPTKRRQLWDPNCLFYDDATLLEPLDKRARHNPDFTATPFKQELLSEASHVQDGDFGSMYLQCIDDDQFSQLPQLESPSLPSEITPHSTTFSENSSRKDDMSSEKRITDWRYLDKFVASQFLMSGED

SEQ ID NO: 1185 - protein, 557 aa, Arabidopsis thaliana
MEAFIGGGSDHSSLFPPLPPPPLPQVNEDNLQQRLQALIEGANENWTYAVFWQSSHGFAGEDNNNNNTVLLGWGDGYYKGEEEKSRKKKSNPASAAEQEHRKRVIRELNSLISGGVGGGDEAGDEEVTDTEWFFLVSMTQSFVKGTGLPGQAFSNSDTIWLSGSNALAGSSCERARQGQIYGLQTMVCVATENGVVELGSSEIIHQSSDLVDKVDTFFNFNNGGGEFGSWAFNLNPDQGENDPGLWISEPNGVDSGLVAAPVMNNGGNDSTSNSDSQPISKLCNGSSVENPNPKVLKSCEMVNYKNGIENGQEEDSSNKKRSPVSNNEEGMLSFTSVLPCDSNHSDLEASVAKEAESNRVVVEPEKKPRKRGRKPANGREEPLNHVEAERQRREKLNQRFYSLRAVVPNVSKMDKASLLGDAISYISELKSKLQKAESDKEELQKQIDVMNKEAGNAKSSVKDRKCLNQESSVLIEMEVDVKIIGWDAMIRIQCSKRNHPGAKFMEALKELDLEVNHASLSVVNDLMIQQATVKMGNQFFTQDQLKVALTEKVGECP

SEQ ID NO: 1186 - protein, 401 aa, Arabidopsis thaliana [sequence omitted]

SEQ ID NO: 1187 - protein, 407 aa, Oryza sativa
MASSSVFAGLAQAPEDPILGVTVAYNKDPSPVKVNLGVGAYRTEEGKPLVLNVVRRAEQMLINNPSRVKEYLPITGLADFNKLSAKLIFGADSPAIQENRVATVQCLSGTGSLRVGGEFLARHYHERTIYIPQPTWGNHPKVFTLAGLTVRSYRYYDPATRGLDFQGLLEDLGSAPSGAIVLLHACAHNPTGVDPTLDQWEQIRQLMRSKALLPFFDSAYQGFASGSLDQDAQSVRMFVADGGELLMAQSYAKNMGLYGERVGALSIVCGSADVAVRVESQLKLVIRPMYSNPPIHGASIVATILKDSAMFNEWTVELKGMADRIISMRQQLFDALKTRETPGDWSHIIKQIGMFTFTGLNSDQVAFMRQEYHIYMTSDGRISMAGLSGRTIPHLADAIHAAVTKLK

SEQ ID NO: 1188 - protein, 279 aa, Zea mays
MAERTKPQAAPRATASTTTLHRTRTETNRSTMAAGGDDTTIAQVHSGIDSSNKTLLKSEALYKYVLDTSVLPHEPESMRELRLVTDKHEWGFMQSSPDEASLLRMLIKLSGARRTLEVGVFTGYSLLATALALPADGKVIAFDVSREYYDIGRPFIERAGVAGKVDFREGPALEQLDELLADPANHGAFDFAFVDADKPNYVRYHEQLLRLVRVGGTVVYDNTLWAGTVALPPDAPLSDLDRRFSAAIRELNVRLSQDPRVEVCQLAIADGVTICRRVV

SEQ ID NO: 1189 - protein, 479 aa, Zea mays
MPLYYGTPASCSGLSSVSLSTSMQGAMARVRAPFTPSQWIELEHQALIYKYLAANSPIPHSLLIPIRRSLAASPYPPSYFGTSTLGWGSFQLGYSGNADLEPGRCRRTDGKKWRCSRDAVADQKYCERHMNRGRHRSRKHVEGQPGHAAKAMSAVAAAAAAATQPAAMAGAGAPAAGLTVNQHQLTAKSYATGATDPCSLQYNRELVNKQNESENMQDSDNLSMLTSMNTGNTGSVFPFSKQNTNPFEVTSSRLEFGLVSSDSLMSSPHSSLENVNLLGSQSMNEHQNPASLQHFVDWPRTPAQGGLSWPEAEDMQAQRSQLSISAPMASSELSSASTSPIHEKLMLSPLKLSREYSPTGLGIAANRDEVSQLEATWATMFRDSSMGGPLGEVLAKNGNVEARNYLSAPLNLLTDYWDSSHGMESSPVGVLQKTTAFGSVSSSTGSSPRAENHGAYDGFGNLRDDLGSIVVRHPSIRLV

SEQ ID NO: 1190 - protein, 691 aa, Zea mays
MASSAFLPELGTQVVVPVAAVVGIAFAVLQWVLVSKVKLSPEPRRGDGSAGKSGAGAGASEYLIEEEEGLNEHNVVVKCAEIQNAISEGATSFLFTEYKYVGLFMGIFAVLIFLFLGSVESFSTKSQPCHYSKGKTCKPALANAIFSTIAFVLGAVTSLVSGFLGMKIATYANARTTLEARKGVGKAFITAFRSGAVMGFLLAASGLFVLYIAINLFGIYYGDDWEGLYEAITGYGLGGSSMALFGRVGGGIYTKAADVGADLVGKVERNIPEDDPRNPAVIADNFGDNVGDIAGMGSDLFGSYAESSCAALVVASISSFGINHEFTPMLYPLLISSVGIIACLITTLFATDFFEIKAVDEIEPALKKQLIISTAVMTVGIALVSWLGLPYTFTIFNFGVQKTVYNWQLFLCVAVGLWAGLVIGFVTEYYTSNAYSPVQDVADSCRTGAATNVIFGLALGYKSVIIPIFAIAFSIFLSFSLAAMYGVAVAALGMLSTIATGLAIDAYGPISDNAGGIAEMAGMSHRIRERTDALDAAGNTTAAIGKGFAIGSAALVSLALFGAFVSRAEISTVDVLTPKVFIGLIVGAMLPYWFSAMTMKSVGSAALKMVEEVRRQFNTIPGLMEASSSNGFRGRMEDGWVVYFCRGRALDICHREVSVYPYGALHPFLFRLYCVAVLLNLSAVVSPSCWV

SEQ ID NO: 1191 - protein, 313 aa, Zea mays
MSFRSIVRDVRDGFGSLSRRGFEVKFLGHRRGRSHGAVHELRDPAPVIQSSCWANLPPELLRDVIERLEASEATWPNRKSVVSCAAVCRTWREICKEIVKNPEFSGKITFPVSLKQPGPRDVTIQCFIKRDKSTQTYYLYLCLSTAVLVESGKFLLCAKRTSRPTCTEYTIFMNSENLSRSSKMYIGKLRSNLLGTKFAIYDTQPPCNAAEPGKTSRRFYSRKVSPKVSSSTYNIAQVSHELNVLGTRGPRRMNCVMHSIPTSCLEAGGSVPSQLDSILARSTDESFGSISFSKSSVVDRSMRFSSSRSPTSQ

SEQ ID NO: 1192 - protein, 306 aa, Arabidopsis thaliana
MEVPVINRIRDFEVGINSINDPSFLSRSVAVSGIGKLHQAYGFWKWGALIIAFLAYFTNFVSKLNSLVVRLRKIDVSVSSPTLFDDYDSDSDVSCSSTVSSDDEKDEEDEADDEDEDVDSIFNRRRVNGGFRVRGSDYYDDDDDQGDNGNCTWMGRRYSGSFGDLFSWPDLGGIGSSGVVKLWDHLDIDGDDHENVVATFLKNYNSTSSPFFWAAEKKGVDAVKVKACDPRAGFRMPALLAEWRQPGRLLGNIIGVDTGGVEKVYVRDDVSGEIAVGDLRKFNGVLTDLTECEAETWWDADVLISG

SEQ ID NO: 1193 - protein, 222 aa, Arabidopsis thaliana
MASILARRSLNTLRARHLVLSGQALQGSHLSRLQSRGISYGSNKDDEEAEQLSKEISKDWNTVFERSINTLFLTEMVRGLSLTLKYFFDPKVTINYPFEKGPLSPRFRGEHALRRYPTGEERCIACKLCEAVCPAQAITIEAEEREDGSRRTTRYDIDMTKCIYCGFCQEACPVDAIVEGPNFEFATETHEELLYDKEKLLENGDRWETEIAENLRSESLYR

SEQ ID NO: 1194 - protein, 85 aa, Arabidopsis thaliana
MANKALIHLLVIFFLALSHIFFFPSHASRLGSLMEKPKIVRPQQDTLMDVKKEVEERMVMELNDYPGSGANNRHLPRQRGCVVDC

SEQ ID NO: 1195 - protein, 172 aa, Zea mays
MGQAWGNLQDKLQGRRWKEHQVRKITDKVFDRLTEDAQKREKEALRFEEVYIAVLCVYNDINKYLPGPHHDPPSKEKLKAMMDEYDVNLDGLLDREEFAEFIRKLTADSLCTISVKLLITLVAAPALAMATKRATEGVPGVGKVVRKMPNALYASAITLGVLLAQKSAEGVE

SEQ ID NO: 1196 - protein, 456 aa, Arabidopsis thaliana
MAAARRLRTLQSQPENKVCVDCSQKNPQWASISYGIFMCLECSGKHRGLGVHISFVRSVTMDSWSEIQIKKMDAGGNERLNNFLAQYGISKETDIISKYNSNAASVYRDRIQALAEGRQWRDPPIVKESVGGGLMNKKPPLSQGGGRDSGNGGWDNWDNDDSFRSTDMRRNQSAGDFRSSGGRGAPAKSKSSEDIYSRSQLEASAANKESFFAKRMAENESKPEGLPPSQGGKYVGFGSSPGPAPRSNQQSGGGDVFSVMSEGFGRLSLVAASAANVVQTGTMEFTSKVKEGGLDQTVSETVNVVASKTTEIGQRTWGIMKGVMAIASQKVEEFTKEEASTWNQQNKTEGNGYYQNSGIGNKTANSSFGGSQSSSSGHNNSYRNSNSWDDWGEENNSKKEAAPKVSTSNDDDDGGWAGWDDNDAKDDDFYYQPASDKKSVGHNGKSDTAWTGGGFL

SEQ ID NO: 1197 - protein, 286 aa, Arabidopsis thaliana
MQLKVPEHQVAGHIAKDGKPGPLVDDKGRFFKPLQGDSRGEIEVKFYESFSSNTEVPEHIHRYFPVYHGTQAVEGSDGAAMMVLENLLAEYTKPSVMDVKMGSRTWYPDASEEYIQKCLKKDTGTTTVSSGFRISGFEVYDHKESSFWKPERKLLRGLDVDGARLTLRKFVSSNSLSDTGSKPDSAFASSVYGGSHGILTQLLELKTWFENQTLYHFNSCSILMVYENESILKGNDDDARPQVKLVDFAHVLDGNGVIDHNFLGGLCSFINFIREILQSPDESADS

SEQ ID NO: 1198 - protein, 237 aa, Arabidopsis thaliana
MNEEMSGESPENNKHVKKPTMPEKIDYVFKVVVIGDSAVGKTQLLSRFTHNEFCYDSKSTIGVEFQTRTITLRGKLVKAQIWDTAGQERYRAVTSAYYRGALGAMVVYDITKRLSFDHVARWVEELRAHADDSAVIMLVGNKADLSVGKRAVPTEDAVEFAETQRLFFSEVSALSGGNVDEAFFRLLEEIFSRVVVSRKAMESDGGATVKLDGSRIDVISGSDLETSNIKEQASCSC

SEQ ID NO: 1199 - protein, 217 aa, Zea mays
MASAPTPPPLLPVTNPASGSSPAAAGGSDAPIATPAFRLFLSRISDSARRSLSDRRPWGELLDRSAFSKPDSLSDATSRLRRNLAYFRVNYAAVVAFALGASLLAHPFSLLILLGLLAAWCFLYLFRPSDQPVVLFGRTFSDRETLLGLVGASFILLFFTSVASLIISGLLVGGALVAAHGAFRVPEDLFLDEPNAPPGSSAAQGLLSFLGGPGSGV

SEQ ID NO: 1200 - protein, 160 aa, Oryza sativa
MAVLVARQGRELQRYTSAGGRIVVGCIPYRVRSGGEMEVLVITSQKGHGMMFPKGGWELDESMDEAARREALEEAGVRGDTETSLGCWYYKSRRYDTTYEGFMFPLRVTDELLQWPEMSSRKRTWATVQQAMDGCQHGWMREALERLVSRHATNKLQSAL

SEQ ID NO: 1201 - protein, 211 aa, Oryza sativa
  misc_feature (183)..(183): Xaa can be any naturally occurring amino acid
  unsure (1)..(211): unsure at all Xaa locations
MCDLVARTGRHQQRYEDGRRLVAGCIPFRYRTSNDETSDDEPKKIVEVLMINSQSGPGLLFPKGGWENDETVEQAAAREAVEEAGVRGDIVQFLGFYDFKSKTHQDACCPEGMCRAAVFALHVKEELDSWPEQSTRRRTWLTVPEATSQCRYQWMQEALLTGFSDWHDNWSKGGGGDTNYDSXLVAEGIHRSSGFVYLLLTLPRLQLCRMQ

SEQ ID NO: 1202 - protein, 114 aa, Arabidopsis thaliana
MPSTQSLTVAAKTLRNRIFSRSGSTSAGPSRWATPGHEERPKGYFMNRTPPAPGQSRKWEDWELPCYITSFLTIVILGVGLNAKPDLSIETWAHQKALERLEMEKLATAGDSSD

SEQ ID NO: 1203 - protein, 86 aa, Arabidopsis thaliana
MAKTLNSICFTTLLLVLLFISAEIPTAEANCDTYLGEVTVYYPCRERDCEAQCYEHYPHSCKGECEHHDHVVHHDNEEEHCHCYGR

SEQ ID NO: 1204 - protein, 78 aa, Arabidopsis thaliana
MLDTLIGGIVGGIAGAIIGTVDGFARGIGICPDSYQSCTRTDCEEHKKKLPTNLSRNGGAAAVKAKENGRRRRQKDRE

SEQ ID NO: 1205 - protein, 355 aa, Arabidopsis thaliana
MVRASSSKKGGSKGGDKDDAESKQRKRLKTLALDNQLLSDSPAKSHSSLKPSKQVLKHHGTDIIRKSQRKNRFLFSFPGLLAPISAATIGDLDRLSTKNPVLYLNFPQGRMKLFGTILYPKNRYLTLQFSRGGKNVLCDDYFDNMIVFSESWWIGTKEENPEEARLDFPKELAQAENTEFDFQGGAGGAASVKKLASPEIGSQPTETDSPEVDNEDVLSEDGEFLDDKIQVTPPVQLTPPVQVTPVRQSQRNSGKKFNFAETSSEASSGESEGNTSDEDEKPLLEPESSTRSREESQDGNGITASASKLPEELPAKREKLKSKDSKLVQATLSNLFKKAEEKTAGTSKAKSSSKA

SEQ ID NO: 1206 - protein, 564 aa, Xanthomonas campestris pv. campestris
MCSIFGIFGLQPGDDLQALRRQALECSQRQRHRGPDWSGVYVDAGAILVHERLAIVDPAGGSQPLLSEDGSLALAVNGEIYNHRELKAELLQPYAFQTGSDCEVINALYREDAPASYLNRLNGIFAFALWDKAAGRVIIARDPIGVVPLYWGHDREGRLRVASELKSLVDDCADAAQFPPGHWYDSATGALSRYYERSWREYSEVENVQVPLQELREAFERAVHRQLMTDVPYGVLLSGGLDSSLVAAVAARYARHRIEENDTTEAWWPRLHSFAIGLTGSPDLAAAEVAAAALGTVHHGFEYSFEEGLDALPEVIRHIETYDVTTIRASTPMFLLARRIKAMGVKMVLSGEGSDEIFGGYLYFHKAPNAREFHEELVRKLDALNNYDCLRANKSMMAWGVEPRVPFLDREFLDVAMRMDARFKMIDKTSTGATRIEKGILREAFAGYLPESILWRQKEQFSDGVGYGWIDGLKAHAAAHVSDRELAAADRRFPVNPPQTKEAYFYRSLFEQFFPSQAAAETVPGGKSIACSSPTAIAWDASFAAMADPSGRAIAGVHAQALAS

SEQ ID NO: 1207 - protein, 401 aa, Zea mays
MSYQGSSRGSTIGIVLGTVGGLMGLLIIWAVFIICNGRRKSHLREIFVDVSGEDDRRIAFGQLKRFAWRELQLATDNFSEKNVLGQGGFGKVYKGALPDGTKIAVKRLTDYESPGGEAAFLREVELISVAVHRNLLRLIGFCTTQTERLLVYPFMQNLSVAYRLREFKPGEPILDWSARKRVAIGTARGLEYLHEHCNPKIIHRDVKAANVLLDEGFEPVVGDFGLAKLVDVQKTSVTTQVRGTMGHIAPEYLSTGKSSERTDVFGYGIMLLELVTGQRAIDFSRLEEEDDVLLLDHVKKLQREGHLDAIVDRNLNSCYNGQEVEMMIQIALLCTQASPEDRPSMSEVVRMLEGEGLAERWEEWQHVEVTRRQDYERMQQRFDWGEDSIYNQDAIELSAGR

SEQ ID NO: 1208 - protein, 324 aa, Zea mays
MYALRCTCTAPPVCPHPSALAYLFPLPPVIIATKPNQTRAQEELPRKLRGGARKQAHEGEPGMGRSPCCEKAHTNKGAWTKEEDQRLIAYIRAHGEGSWRSLPKAAGLLRCGKSCRLRWMNYLRPDLKRGNFTGDDDELIIKLHALLGNKWSLIAGQLPGRTDNEIKNYWNTHIKRKLLSRGIDPQTHRPLSGGAGSALTTTSSTAGFPSPAPASRSRPTPTPPPTVVVPPNAIFVRPAPSEDGHSSSGASTDAPRCPDLNLDLDLSVGPPPKTPAATQQQRRRTTICLCYHLGVRGGEACSCETASSLAGFRFLQPLEEGQYI

SEQ ID NO: 1209 - protein, 193 aa, Oryza sativa
  misc_feature (59)..(59): Xaa can be any naturally occurring amino acid
  misc_feature (89)..(89): Xaa can be any naturally occurring amino acid
  unsure (1)..(193): unsure at all Xaa locations
MASFLQAGTSLMHHLLPTLQRKANCGSTFHALSVTSRLRCPSSATIFRKSIALTPEMLXPVVRRQYRERHGCPFQSSTLTSSQEKETFXPSSSWPTPSNNSDPYFEGPPQYMMNNRTYQDPAPDPLLSQFICSMAQTDTNSDNTNTEIAVSAVSHDQRLSQRVTLTDDASKLELKERLQRIEFVKEIIMSTIL

SEQ ID NO: 1210 - protein, 80 aa, Zea mays
MALSRRMAAPVLVLLLLLVATELGTTKVAEARHCLSQSHRFKGLCMSSNNCANVCQTENFPGGECKAEGATRKCFCKKIC

SEQ ID NO: 1211 - protein, 350 aa, Glycine max
MAVAASDADDILIRQVVPDVGEAEEEDNLLNAEHHFASFKAKFAKTYATKEEHDHRFGVFKSNLRRARLHAKLDPSAVHGVTKFSDLTPAEFRRQFLGLKPLRFPAHAQKAPILPTKDLPKDFDWRDKGAVTNVKDQGACGSCWSFSTTGALEGAHYLATGELVSLSEQQLVDCDHVCDPEEYGACDSGCNGGLMNNAFEYILQSGGVQKEKDYPYTGRDGTCKFDKTKVAATVSNYSVVSLDEEQIAANLVKNGPLAVAINAVFMQTYVGGVSCPYICGKHLDHGVLLVGYGEGAYAPIRFKNKPYWIIKNSWGESWGENGYYKICRGRNVCGVDSMVSTVAAIYPSSH

SEQ ID NO: 1212 - protein, 255 aa, Zea mays
MAKLMNKLVDSFEHDEILDVGCVRAVLAELVLTFLFVFTGVSAAMAAGSDGKPGDAMPMATLAAVAIAHALAAGVLVTAGFHVSGGHLNPAVTVGLMVRGHITKLRAVLYVAAQLLASSAACVLLRFLSGGMVTPVHALGRGISPMQGLVMEVILTFSLLFVTYAMILDPRSQVRAIGPLLTGLIVGANSLAGGNFTGASMNPARSFGPALATGDWTNHWVYWIGPLLGGPLAGFVYESLFLVQKMHEPLLNGEI

SEQ ID NO: 1213 - protein, 234 aa, Oryza sativa
MAMASALTNCWAISRSSQRGSKNNSSDGSFMVPARNHNRINRKHLLLREKDASTGWQITKAATENSTNAVHTPMKTKWWEKNMKSCNMKNIESQDDFDKQLLLASDKLTVVHFFSPSCGACKALHPKVCQLAGMHPELQFLMVNSNEQKEMCRRLNVHVLPMFRFYRGAEGRICSFSCTISTIYKIKDALKRHGVQLENLGPDKGLEKSELQNSDIDASYNMDGGVGAVVPNNE

SEQ ID NO: 1214 - protein, 388 aa, Arabidopsis thaliana
MSWWWAGAIGAAKKKLDEDEPSQSFESVALIIGVTGIVGNSLAEILPLSDTPGGPWKVYGVARRPRPTWNADHPIDYIQCDVSDAEDTRSKLSPLTDVTHVFYVTWTNRESESENCEANGSMLRNVLQAIIPYAPNLRHVCLQTGTKHYLGPFTNVDGPRHDPPFTEDMPRLQIQNFYYTQEDILFEEIKKIETVTWSIHRPNMIFGFSPYSLMNIVGTLCVYAAICKHEGSPLLFPGSKKAWEGFMTASDADLIAEQQIWAAVDPYAKNEAFNCNNADIFKWKHLWKILAEQFGIEEYGFEEGKNLGLVEMMKGKERVWEEMVKENQLQEKKLEEVGVWWFADVILGVEGMIDSMNKSKEYGFLGFRNSNNSFISWIDKYKAFKIVP

SEQ ID NO: 1215 - protein, 517 aa, Arabidopsis thaliana
MGVVSISSSASRSPLGLGNDLLTHRSSLKKPSIVAFKADDSSNSALIIPPREQVLIPAEKHNEKKREVTRRKPCKTPKKPLSLEHNSAPSCSLGVDYNEAAARLESIYKLSPATTTLVEDDVEDGGSKAKVSRRRKRKESGEEKKVVVRNNVKKEKRMSLDKRIALKRNVQEKPVVASVDKKVTKRQQEEEKIERLVRDYSASNDIVSLDWKKMKIPPVLSSTEHAWLFKLMQPMKALLEVKDVLQKSLGREPREAEIAGEINMTAGEVKKKIEIGRAARNKLIKHNLRLVLFVMNKYFHEFTNGPKFQDLCQAGMRGLITAIDRFEPKRKFRLSTYGLFWIRHAIIRSMTTSNFTRVPFGLESVRVEIYKAKTELWFEMGRPPTEDEVVERLKITPERYREVLRAAKPVLSLNSKHSVTQEEFINGITDVDGVGANNSRQPALLRLALDDVLDSLKPKESLVIRQRYGLDGKGDRTLGEIAGNLNISREMVRKHEVKALMKLKHQARVDYLRQYIV

SEQ ID NO: 1216 - protein, 502 aa, Arabidopsis thaliana
MATAAVIGLNTGKRLLSSSFYHSDVTEKFLSVNDHCSSQYHIASTKSGITAKKASNYSPSFPSSNRHTQSAKALKENVDVASTEKPWLPNGTDKELEEECYDDDDLISHSVEAILLLQKSMLEKSWNLSFEKAVSSEYPGKGTIRKKKIPVITCSGISARQRRIGAKKKTNMTHVKAVSDVSSGKQVRGYVKGVISEDVLSHAEVVRLSKKIKSGLRLDDHKSRLQDRLGCEPSDEQLAVSLKISRAELQAWLMECHLAREKLAMSNVRLVMSIAQRYDNLGAEMSDLVQGGLIGLLRGIEKFDSSKGFRISTYVYWWIRQGVSRALVDNSRTLRLPTHLHERLGLIRNAKLRLQEKGITPSIDRIAESLNMSQKKVRNATEAVSKVFSLDRDAFPSLNGLPGETHHSYIADTRLENNPWHGYDDLALKEEVSKLISATLGEREKEIIRLYYGLDKECLTWEDISKRIGLSRERVRQVGLVALEKLKHAARKRKMEAMILKN

SEQ ID NO: 1217 - protein, 604 aa, Oryza sativa
MGSTPTYCSYQTNGVGALKQSPHMQFQQSYNYGVRFLKRDTLSVRINKHMAKRIATSTGICTKPRRSHMPIVCSAGMTIIFIATECHPWCKTGGLGDVLGGLPPALAAMGHRVMTIVPRYDQYKDAWDTNVLVEVNIGDRTETVRFFHCYKRGVDRVFVDHPMFLEKVWGKTGPKLYGPTTGDDYRDNQLRFCLLCLAALEAPRVLNLNNSEYFSGPYGENVVFVANDWHTGVLPCYLKSIYQAKGMYVNAKVAFCIHNIAYQGRFAREDFELLNLPDSFLPSFDFIDGHFKPVVGRKINWMKAGITECDLVMTVSPHYVKELASGPDKGVELDGILRTKPLETGIVNGMDVYEWNPATDQYISVKYDATTVTEARALNKEMLQAEVGLPVDSSIPLIVFVGRLEEQKGSDILIAAIPEFVEGNVQIIVLGTGKKKMEEELILLEVKYPNNARGIAKFNVPLAHMMFAGADFIIVPSRFEPCGLIQLQGMRYGVVPICSSTGGLVDTVKEGVTGFHMGLFNVECETVDPVDVTAVASTVKRALKQYNTPAFQEMVQNCMAQDLSWKGPAKKWEEVLLGLGVEGSQPGIEGEELAPLAKENVATP

SEQ ID NO: 1218 - protein, 475 aa, Oryza sativa
MAIASRIQKRVLASFAAAAAAKLPEAAVAAAGGAAEAVEEVASSVQEQVQAQGAQVLEFGDTERLFAGERSTSLVRTLAVLQALSVGPLVDVATAALRSPAVAGSAAGRAAARATAYQHFCAGETAEEAAAAVRRLWRGGMGGILDYGIEDAEDGPACDRNAAGFLAAIDVAAALPPGSASVCIKITALCPVALLEKASDLLRWQQKHPATKLPWKVHGFPVLCVSSPLYLTAAEPPALEAEEERELEMAHGRLLAIGERCAEYDIPLLVDAEYATVQPAIDYFTFAGALAFNGGGRPIVHGTVQAYLRDARDRLEAMARAAQGERVCLALKLVRGAYLAREARLAASLGVPSPVHRSIQDTHDCYNGCAAFLLDRVRRGAAAVTLATHNVESGQLAAARALELGIGGGGDRGLQFAQLMGMADGLSLGLRNAGFQVSKYLPYGPVEQIIPYLIRRAEENRGLLSSSSFDRQLLR

SEQ ID NO: 1219 - protein, 469 aa, Schizosaccharomyces pombe
MDKNDYLHFERNPSLFPKSTLDKVQKTKKYIEHYYKVAVDHAVERNQRRINLEQRLATERGSEERKNRQLRASGEKESQFLRFRRTRLSLEDFSTIKVIGKGAFGEVRLVQKLDTGKIYAMKSLLKTEMFKRDQLAHVKAERDLLVESDSPWVVSLYYAFQDSLYLYLIMEFLPGGDLMTMLINYDTFSEDVTRFYMAECVLAIADVHRMGYIHRDIKPDNILIDRDGHIKLSDFGLSTGFYKQDQSASYMKPRTGNTVKRGQMVDAIWLTMSSKDKMATWKKNRRVMAYSTVGTPDYIAPEIFLQQGYGQDCDWWSLGAIMFECLIGWPPFCSENSHETYRKIINWRETLTFPNDIHLSIEARDLMDRLMTDSEHRLGRGGAIEIMQHPFFTGIDWDHIRETAAPFIPNLKSITDTHYFPVDELEQVPEQPVTQQPASVDPQTLEQTNLAFLGYTYKKFNYLTMKGAL

SEQ ID NO: 1220 - protein, 706 aa, Neurospora crassa
MAHDNREPREVKNHLLFEVATEVAHRVGGIYSVLKSKAPVTTAEYGDRYTLIGPLNHQSAAVEVEELEPSNPELKATIQAMRDRGIGILYGRWLIEGAPRVLLFDTKTAYGYMNEWKTDLWNVASIPSPDNDEETNEAIVFGYLVAWFLGEFVCHEKRKAVIAHFHEWLAGVALPLTKKRQIDVTTIFTTHATLLGRYLCAGSVDFYNNLQWFDVDAEAGKRGIYHRYCIERAAAHSCDVFTTVSHITAYESEHLLKRKPDGVLPNGLNVTKFSAMHEFQNLHQQNKEKIHDFVRGHFYGHYDFEPENTLYFFTAGRYEFRNKGVDMFIESLARLNHRLKTAGSKTTVVAFIIMPAQTTSLTVEALKGQAVIKSLRDTVDVIERGIGRRIFERSVKWHEGDPLPEEKELITSQDRVLLRRRLFAMKRHTLPPIVTHNMLNDHEDPILNQIRRVQLFNHPSDRVKIVFHPEFLSSANPVLPLDYDDFVRGTHLGVFASYYEPWGYTPAECTVMGVPSITTNLSGFGCYMEELIENSSDYGIYIVDRRSKGVDDSVNQLTQYMFEFTQKSRRQRINQRNRTERLSDLLDWKRMGMEYVKARQLALRRAYPTSFNGEEEEDFIPGVEQKISRPFSVPGSPRDRTGMMTPGDFASLQESHEGLSTEDYVAWKLPEEEDPEEYPFPLTLKQRTGPGSPLDSIQGLQLNGTR

SEQ ID NO: 1221 - protein, 284 aa, Glycine max
MERSTPVRKPHTSTADLLTWPETPISHSPTHPSSAVRSHQPSDGIRKVVFGGQVTDEEVESLNKRKPCSDYKMKEITGSGIFVANGEDDALEDGSANPNKTGVRMYQQAISGISHISFGEEENVSPKKPTSLPEVAKQRELSGTLESEDSILKKQLSDAKCKELSGHDIFAPPPEIKPRPITPRILELKGSIDIGERHADGDQGDTNSAGKTAKKIYDKKFAELSGNDIFKGDAPPSSADKSLSGAKLREMSGSNIFADGKVEARDYLGGVRKPPGGESSIALV

SEQ ID NO: 1222 - protein, 358 aa, Oryza sativa
MSAFVGKYADELIKTAKYIATPGKGILAADESTGTIGKRLASINVENVEPNRQALRELLFTTPGAFQYLSGVILFEETLYQSTAAGTPFVDVLKAGGVVPGIKVDKGTVDIAGTNGETTTQGLDSLGARCAKYYEAGARFAKWRAVLKIGAAGEPSELAVKQNAEGLARYALICQENGLVPIVEPEILTDGAHDIKTCAAVTERVLAAVYKSLNDHKVLLEGTLLKPNMVTPGSDSPKVGAEVIGEYTVAALRRTVPPAVPGIVFLSGGQSEEEASQNLNAMNKLEVLKPWTLTFSFGRALQQSTIKKWGGKKENVAAAQAAFLARCKANSEATLGKYGGAAGDAATSESLYVKGYTY

SEQ ID NO: 1223 - protein, 336 aa, Zea mays
MPGGSSGPDGEVDAGFAKLQGEDFEYYMQTYSIMLGRNSKKSTVDVDLSSLGGGMNISRHHARIFYDFQRRRFALDVIGKNGCLVEGVLHLPGNPPVKLDSQDLLQIGDKKFYFLLPTRSIFASAAAARHAPIIPQQLPPPPYAHARAGRPRLSEFHDRSFEGDYGREVDEIGNGISETAMRGKLVKRNKKSSGDLDIYGGHRINVEAIGTLGEDSRSEIRSRGDRDIDNQQALQAEEKDVVSSVATVLSDLCGPGEWMPMAKLHNELLEQFGNVWHPSRVRKYLTQDDWSPTETKGRPWFGLLALLRKYPEHFVINTRSKGRMTSEFVSLVSLLS

SEQ ID NO: 1224 - protein, 143 aa, Arabidopsis thaliana
MNAENNQTTTTHSKVISHVFCTGTAKLGSVGPPIGLVDIGVSEVAYIFRVSLPGIEKNQDKIKCEIQREGRVCIQGVIPEIAIPSDTGCLYRMQVQQLCPPGPFSITFNLPGQVDPRLFSPNFRSDGIFEVVVVKLGVRIPTS

SEQ ID NO: 1225 - protein, 119 aa, Arabidopsis thaliana
MANSSFKLEHPLERRQIESSRIREKYPDRIPVIVERAERSDVPNIDKKKYLVPADLTVGQFVYVVRKRIKLSAEKAIFVFVKNTLPPTAAMMSAIYDENKDEDGFLYMTYSGENTFGLV

SEQ ID NO: 1226 - protein, 729 aa, Arabidopsis thaliana
MRIFSTFVFHRRQQIFNLRQFQTTTILRNPISIAPIQIPMDATEQSLRQSLSEKSSSVEAQGNAVRALKASRAAKPEIDAAIEQLNKLKLEKSTVEKELQSIISSSGNGSLNREAFRKAVVNTLERRLFYIPSFKIYSGVAGLFDYGPPGCAIKSNVLSFWRQHFILEENMLEVDCPCVTPEVVLKASGHVDKFTDLMVKDEKTGTCYRADHLLKDYCTEKLEKDLTISAEKAAELKDVLAVMEDFSPEQLGAKIREYGITAPDTKNPLSDPYPFNLMFQTSIGPSGLIPGYMRPETAQGIFVNFKDLYYYNGKKLPFAAAQIGQAFRNEISPRQGLLRVREFTLAEIEHFVDPENKSHPKFSDVAKLEFLMFPREEQMSGQSAKKLCLGEAVAKGTVNNETLGYFIGRVYLFLTRLGIDKERLRFRQHLANEMAHYAADCWDAEIESSYGWIECVGIADRSAYDLRAHSDKSGTPLVAEEKFAEPKEVEKLVITPVKKELGLAFKGNQKNVVESLEAMNEEEAMEMKATLESKGEVEFYVCTLKKSVNIKKNMVSISKEKKKEHQRVFTPSVIEPSFGIGRIIYCLYEHCFSTRPSKAGDEQLNLFRFPPLVAPIKCTVFPLVQNQQFEEVAKVISKELASVGISHKIDITGTSIGKRYARTDELGVPFAITVDSDTSVTIRERDSKDQVRVTLKEAASVVSSVSEGKMTWQDVWATFPHHSSAAADE

SEQ ID NO: 1227 - protein, 185 aa, Arabidopsis thaliana
MGLIPQPQESIQESHYYTHKLFLTANYVLLGASSSCIFLTLSLRLIPSLCGFFLILLHATTIAAAVSGCAAASYGKNRWYAAHMIATVLTAIFQGSVSVLIFTNTSNFLESLNSYVREKEASMILKLAGGLCVVIFCLEWIVLVLAFFLKYYAYVDGDNNGVAMKRTGKVQSEETLKNSPWAFQV

SEQ ID NO: 1228 - protein, 138 aa, Arabidopsis thaliana
MAGLQRSTISFRRQGSSGIVWDDRLIAELSQQAANDRKGETLQQDEQAKLITSEVQDQTTKPIAGEGLKPIRTDGGMERSRSNGGGAIRHHRNTGRVSPAVDPPSPRLSAFGCCSAFGKKQPGKKVNQRKRPAKRRSR

SEQ ID NO: 1229 - protein, 399 aa, Oryza sativa
MDNALASAAAIADQRQKIEQYRHILSSVLSFSPPDISQAKRFLDHMVSDEVPLVVSRQLLQTFAQELGRLEPEAQKEVAHYALTQIQPRVVSFEEQVVVIREKLAELYESEQQWSKAAQMLSGIDLDSGIRMLDDTNKLSKCVQIARLYLEDDDSVNAEAFINKASFLVTNSHQELLNLQYKVCYARILDLKRRFLEAALRYYDISQIEQRQIGDEEIDENALEQALSAAVTCTILAGAGPQRSRVLATLYKDERCSKLKIYPILQKVFLERILRKPEIEAFAEELRPHQKALLPDKSTVLDRAMIEHNLLSASKLYTNISFDELGALLGIDPRKAEKIASRMIYEDRMRGSIDQVEAVIHFEDDTEELQQWDQQIAGLCQALNDILDSMSSKGMAIPV

SEQ ID NO: 1230 - protein, 242 aa, Zea mays
  misc_feature (222)..(222): Xaa can be any naturally occurring amino acid
  unsure (1)..(242): unsure at all Xaa locations
MLAVFSGEVVEVPAELVAAGSRTPSPKTKASELVARFLGTSCPAAVSVRLADLGHLAYSHANQALLRPRSFAAKDEVFCLFEGVLDNLGRLSQQYGLSKGANEVLLVIEAYKALRDRAPYPASLMLAQLAGAYAFVLFDASTNSLLVASGGDVPLFWGVTADGCVAFSDDIDVLKGSCGKSLAPFPQGCFYSNALGGLKCYENPKNKVTAVPANEEEICGAXPSRWKGLRCSQRCIRTQRYS

SEQ ID NO: 1231 - protein, 433 aa, Arabidopsis thaliana
MRRRRCDLQPKRTRMCDLQPKRTSMCDLPPKLVGEKILTRIPITSLRAVRSTCKLWNALTKDRVLGKAAAQFLGFMTMDSKVCSVRFHLRRSKEEEEDTMDLSIKQVDLLNQVEISRVYHCDGLLLCVAKDNSRVVVWNPYLGQTRWIRPRTESNIGDSYALGYDINRNHKILRMVQTRNVSVYRYEIYDLRSNSWRVLEVTPNGEMDPNHPLYGVSVKGNTYFFAHEDSSSGEIDEDGDIIDLEDFLLCFDFTTETFGLRLPLPFHSTIDATVTLSCVRDQQLAVLYHNEGLHSDDRFTTVEFWVTTSIEPNSVSWSKFLTVDMRPLALTGVRFDNDMGATFFIDEDEKVAVVFDLDGYLSTESARYHTAFISGKDGFFKPVTLGVAPNVGEPCPRTGHIPTTYRPPLVCSSTYLPSLVQVNQQRKRKERHV

SEQ ID NO: 1232 - protein, 538 aa, Zea mays
MGAYSVASPLCTWLVAACMSVTCNGERSLRSPSSLAFAPSKRSRSNKLVKRRGSNGQDSFGLVSAFCGSGIHFDSLISSLEPCEEFYRSLSFVSDPKKRRADKVMAVAVQPAKQVEEKKMTATKQRRVVVTGMGVVTPLGHEPDVFYNNLLEGVSGISEIENFDCKEYPTRIAGEIKSFSTDGWVAPKLSKRMDKFMLYMLTAGKKALADAGISEEILCELDKTKCGVLIGSAMGGMKVFNDAIEALRVSYKKMNPFCVPFATTNMGSAMLAMDLGWMGPNYSISTACATSNFCILNAANHIIRGEADLMLCGGSDAAIIPIGLGGFVACRALSERNSDPTKASRPWDSDRDGFVMGEGAGVLLLEELEHAKQRGAKIYAEFLGGSFTCDAYHLTEPHPEGTGVSLCIENALVESGVAREDVNYINAHATSTPAGDVKEYQALINSFGNNPKLRVNSTKSMIGHLLGASGAVEAVAAIQAIRTGWVHPNINLENPDRSVDTKFLVGSKKERLDVKVALSNSFGFGGHNSSILFGRYEQ

SEQ ID NO: 1233 - protein, 542 aa, Zea mays
MNTVALLSLAPQLLIKPSLTCFSRKGVGRYGGIKVYAVLRDDGAEFAKNNNLEALFHVDDPGPRVPIKKGRFLDVNEALEVVRFDIQYCDWRARHDLLTIMVLHNKVVEVLNPLAREFKSIGTLRKELAELQQELAKAHNQVHLSETRVSSALDKLAHMETLVNDRLLPPDGASSTSTAQPTSLVPSTSSTARVRAKKPPRRGLNVSGPVKPYNPSLKNFWYPVAFSSDLKDDTMVPIACFEEQWVIFRGKDGRPGCVQNTCAHRACPLHLGSVNEGRIQCPYHGWEYSTDGKCEKMPSTKMLNVRIQSLPCFEQEGMVWIWPGDDPPKATIPSLLPPSGFTVHAEIVMELPVEHGLLLDNLLDLAHAPFTHTSTFAKGWSVPSLVKFLTPASGLQGYWDPYPIDMEFRPPCMVLSTIGISKPGKLEGKSTQQCSTHLHQLHVCLPSSRNKTRLLYRMSLDFAPWLKHVPLMHLLWSHFAEKVLNEDLRLVLGQQERMINGANVWNWPVSYDKLGVRYRLWRDTVERGSERLPFSNQAESGS

SEQ ID NO: 1234 - protein, 338 aa, Zea mays
MALRNGVGGGGACPAAVVLVAAAVAALLGAGVAAAATKFDDVVQPSWANDHVVYDGDLLKLRLDSNSGGGFVSRTKFLYGKASADLKLVPGDSAGVVTAFYLSSAGDKHNEFDFEFLGNVTGEPYLVQTNLYIDGVGNREQRIDLWFDPTADFHTYAVLWNPSQVVFMVDDTPIRVYENATLHQGHGHGHHRHGGAAAEANGTNTTTTTLAAAPAPFPGPQPMAVYSSIWNADDWATQGGRVKTDWSHAPFEATFREVRVDGCAWAGNATDGDAAEARRCSESSWGKEGRYWWKEKEMSELSVHQSHQLVWARAHHLVYDYCVDTDRFPVQPPECAGR

SEQ ID NO: 1235 - protein, 347 aa, Zea mays
  misc_feature (69)..(69): Xaa can be any naturally occurring amino acid
  misc_feature (83)..(83): Xaa can be any naturally occurring amino acid
  unsure (1)..(347): unsure at all Xaa locations
MAFAPKTSSSSSLSSALQAAQSPPLLLRRMSSTATPRRRYDAAVVVTTTTTARAAAAAVTVPAAPPQAXRRRRCRQSKRRHPXERRSRPVSDTMAALMAKGKTAFIPYITAGDPDLATTAEALRLLDGCGADVIELGVPCSDPYIDGPIIQASVARALASGTTMDAVLEMLREVTPELSCPVVLLSYYKPIMSRSLAEMKEAGVHGLIVPDLPYVAAHSLWSEAKNNNLELVLLTTPAIPEDRMKEITKASEGFVYLVSVNGVTGPRANVNPRVESLIQEVKKVTNKPVAVGFGISKPEHVKQIAQWGADGVIIGSAMVRQLGEAASPKQGLRRLEEYARGMKNALP

SEQ ID NO: 1236 - protein, 334 aa, Zea mays
MAFLNMEQQTWAFTFGILGNIISLMVFLSPLPTFYRVYRKKSTEGFQSTPYVVTLFSCMLWIFYALLKSGAELLVTINGVGCVIEAAYLAAYLVYAPKAARALTAKMLLGLNVGVFGLAALATMVVSSAGLRVRVLGWICVSVALSVFAAPLSIMRQVVRTKSVEFMPISLSFFLVLSAVIWFAYGALKRDVFVAFPNVLGFVFGVAQMALYMAYRNKEPAAVTVEVTVEEAKLPEHAKEVVVVAEARASCGAEVHPIDIDIEATPTPVEEVHEPQVVVVVDVDVEPVTCAGAAEAAAGAGADASGVADGGVHGPMAPPEQLAIKPDMAISVEA

SEQ ID NO: 1237 - protein, 252 aa, Zea mays
MATAAAAAAAAMEEPDVVNGRDVVSWVASGVVLWSTAFLLVRALFPKRSYDFCNRAVSTMHAVAAVCLACLSVDDWSCPVCPLAAASSRRQMKALAVTLAYMVYDAACCHLNGDTRLDNAVHHLVSIVGIGAGLAYQRCGTEMVASMLVTEMSSPLLHLREMLKELGVRDTELNLLVDVLFAATFSAARMGVGPYLTYVTVTADNPILIKAMATGLQLVSAYWFLRILRMVRYKLAGKKKPTPAKLAAAAAN

SEQ ID NO: 1238 - protein, 172 aa, Zea mays
MSLLENTFSGFLQGAGADTAARAVFAEGSLFCPFLFGNFFDPADPFPLWEFESDVLLAALRRGNARTTVDWAETDCEYYLRADVPGGRRCDVEVSGDAMKVIDISGLWRAPAADGRDWRCGRWWEHGFVRRVELPEDAEWRKVEAHFDDGEGALEIKVPKTADDDDAHHATA

SEQ ID NO: 1239 - protein, 214 aa, Zea mays
MAMMSGMDGGSNVVKVAAVVDAENPAVGPPPCAVDSDDLSQRANWLRAAVLGANDGLVSTASLMLGVGAVKADARAMVISGFAGLLAGACSMAIGEFVSVCSQRDVELARLDRGGGDDEKAALPSPVQAAAASALAFSVGALLPLLAAGFIADYRLRIGVVAAVATATLAAFGCVGAVLGRAPVARSCARVVGGGWVAMAVTFGLMRLFKASGI

SEQ ID NO: 1240 - protein, 262 aa, Zea mays
MPDQTSAAAAGGAAFDRCLLALYLISPLTVLALRFISAPYGKLSRPGWGPVLPAPLAWFLMESPTLWLPPLVLLRWPPPPLSGPLAALPAALYAFHYVHRTLVHPLRLARLRRAPAPVPLLIAACALGFNILNAYLQARSFALHAGRQASPFRCLAGLALFAWGMRTNIAADKELLRLKEAGGGYKIPRGGWFDLVTSPNYFGETVEWLGFAVVAWTPAAWAFFLYTCANLGPRARDHRRWYVQKFRGEYPASRKAFIPYIY

SEQ ID NO: 1241 - protein, 306 aa, Glycine max
MELETIYPPCFMPNSNWFVQESHSTEWTREDNKKFESALAIYDNDTPDRWFKVAAMIPGKTVFDVIKQYRELEEDVSEIEAGRVPIPGYLASSFTFELVDNHNYDGCRRRLAPVRGSDQERKKGVPWTEDEHRRFLMGLLKYGKGDWRNISRNFVVTKTPTQVASHAQKYYIRQKVSGGKDKRRPSIHDITTVNLTETSASDKNKPQLFNASPVLAPQQKLNSISKVQLGWTSSHYNDGSFMVFNPNSDALFVSSSPDVTSMALKMQGQDLYDCALHEAYAKVKVPGFSMAPRDFNNEAVFGIHAL

SEQ ID NO: 1242 - protein, 576 aa, Arabidopsis thaliana
MAASFSVPSMIMEEEGRFEAEVAEVQTWWSSERFKLTRRPYTARDVVALRGHLKQGYASNEMAKKLWRTLKSHQANGTASRTFGALDPVQVTMMAKHLDTIYVSGWQCSSTHTSTNEPGPDLADYPYDTVPNKVEHLFFAQQYHDRKQREARMSMSREERTKTPFVDYLKPIIADGDTGFGGTTATVKLCKLFVERGAAGVHIEDQSSVTKKCGHMAGKVLVAVSEHINRLVAARLQFDVMGTETVLVARTDAVAATLIQSNIDARDHQFILGATNPSLRGKSLSSLLAEGMTVGKNGPALQSIEDQWLGSAGLMTFSEAVVQAIKRMNLNENEKNQRLSEWLTHARYENCLSNEQGRVLAAKLGVTDLFWDWDLPRTREGFYRFQGSVAAAVVRGWAFAQIADIIWMETASPDLNECTQFAEGIKSKTPEVMLAYNLSPSFNWDASGMTDQQMVEFIPRIARLGYCWQFITLAGFHADALVVDTFAKDYARRGMLAYVERIQREERTHGVDTLAHQKWSGANYYDRYLKTVQGGISSTAAMGKGVTEEQFKESWTRPGADGMGEGTSLVVAKSRM

SEQ ID NO: 1243 - protein, 270 aa, Zea mays
MSLLSKLRLVTVDVTGTLIAYKGHLGDYYCMAAKSAGMPCPDYNRMHEGFKLAYTEMARQYPCFGFAAKMPNIEWWRTCVKNSFVKAGYDYDEETFEKVFRRIYSAFGSSAPYSAFPDSQPFLRWAREKGLTVGIVSNAEYRYKDVILPALGLNQSSEWDFGVFSGVVGVEKPDPRIYKIALEMAGNVAPEEALHIGDSMRKDYTPARSIGMHALLLDRFKTADAESWRQSGATVLPDLVATQEWLTKDQNDEQEETVAARVLKRMSEKL

SEQ ID NO: 1244 - protein, 184 aa, Glycine max
MDFYFGNSPPYPNNYAHNSLNMALSSPEIALSDYLMLDDYVDHQDSRSSQSTESSEKATFNDATHGFSTGATSKNNNINCKNGINENKGGVGPRIAFRTKSELEIMDDGYKWRKYGKKSVKSSPNLRNYYKCSSGGCSVKKRVERDRDDYSYVITTYEGVHNHESPFTTYYSPISFVHSDTTFK

SEQ ID NO: 1245 - protein, 518 aa, Zea mays
MEYERIEKPFPVQGGGFSPKRLRAMLLGVDKRRKGQDGAAEEDEDGGGGGDYGALPKAHARSGAGDGGGATCEEYKDVDVVSTTSEFSSSLETAGGHRPRDAHPVATGSRTRVPPEEDSCDSESVASNFEFHKERRAAAAASVVPPFSKPAPSKWDDAQKWIASPTANCPGRGGAAPAPKKTEKPGSGIGRLPLPATKVVVEATEEIDTKRMDPSQEKREIGWQKAARWAPPDPCPEVEPCPTKTTLLAVETTVAAASAAAVNFNRHDASTTLQSAATCIPPPTTVRSVSMRDMGTEMTPIASQEPSRTGTPVRATSPNCSQPTTPRRTLGGPSAVGSFISHGGECSSSELSEQELQTKTRREIMLLGTQLGKTSIAAWASKKEEEKDASLSLKPVPMDQSTQNITAIRAAAWEEAEKAKYLARFKREEIKIQAWEDHQKAQIEAEMRKIEVEVERMRARAQDKLMTKLASARHSADEKRATAELKRNRAAARTAEQAEHIRRTGRVPPSFGCWNWCS

SEQ ID NO: 1246 - protein, 410 aa, Zea mays
MAEAATSSSSSGSFAPSRLHDAGVVRESLPYSVLAAPPPPPLPPVQVQVAGSGGGGGGKISPAVLFIIVILALVFFISGLLHLLVRVLLKKQHRRGGRRGTASAAAPRTGVEAGGVDVALQRQLQQLFHLHDSGLDQAFIDALPVFAYRDIVVGGGGDGDKEPFDCAVCLCEFDGEDRLRLLPLCGHAFHLNCIDTWLLSNSTCPLCRGVLFVPGLMGDGNPMFDFEERLEEGRLSEDCDVGFGLPGLKASGLAQTPVVEKKVFPVRLGKFKNVGTQGAVEGGNANASVLSRDEGESSSSSLDGRRCFSMGTYQYVLGTSELRVALQPGRIRNGTGGAMMGRPPGLSSINADIMEGKKICTRNKGESFSVSKIWQWSHIKGKLPAGSDECSDAGSLPWMKRGGAADTSNL

SEQ ID NO: 1247 - protein, 243 aa, Glycine max
MKPKTCELCHQLASLYCPSDSAFLCFHCDAAVHAANFLVARHLRRLLCSKCNRFAAIHISGAISRHLSSTCTSCSLEIPSADSDSLPSSSTCVSSSESCSTNQIKAEKKRRRRRRSFSSSSVTDDASPAAKKRRRNGGSVAEVFEKWSREIGLGLGVNGNRVASNALSVCLGKWRSLPFRVAAATSFWLGLRFCGDRGLATCQNLARLEAISGVPAKLILGAHANLARVFTHRRELQEGWGES

SEQ ID NO: 1248 - protein, 336 aa, Zea mays
MAVKGKNTDVVEELLMADVSILNVRDKKGNTALHIATRKWRPQMVQLLLSYESLEVNAINSQNETAMDLADKVPYGESKTEIIEWLTEAGAKNARNVGKIDEASELRRTVSDIKHNVQAQLSENAKTNKRVTGIRKELQKLHREAIQNTINSVTLVATLIASIAFVAIFNLPGQYFQDVNSGGDIGEAEIAKLTGFRVFCLLNATALFISLAVVVVQITLVAWETGAQKQVIKIVNKLMWTACLSTGVAFISLAYVVVGPQHAWMAFTASAIGGPIMIGTFLFLAYLLLRPRFKFGEDRQRRIKRASGSKSFSWSIHDGFSDLEAFSDHEKRIYAL

SEQ ID NO: 1249 - protein, 268 aa, Glycine max
MASPASNPQSAETKKSRGRQRVDIKKMSNEANLQVTFSKRRSGLFKKASELCTLCGAEVALVVFSPGQKVFSFGHPSVDGVIERYLTGVAPPEADNMNYIDVHRMAKVVDLNAQLTHIKDQLEAERKRAKELGGIQKEAETHLWWARPVADITDINNLLKLKKAFQQLKQDVSGLAGMALFQSVANGNPGHQFFAGASSSAVPNVVLQSQPLPVAQVFPPAVPQMMFPPPIFENYMVNPNGFDDMGMGGGGFGGAGPSSAGGGGGGFF

SEQ ID NO: 1250 - protein, 842 aa, Oryza sativa
MEEGDPQPSISLARTPSEGAAAAVDLDLLEQLLSADNAWLEVAANTSRSPNFFATPSNCLTDASVATTTPANSWWIQPSGASTSVRERFDQALAYIRETQSDADVLVQLWVPVKGNDGQLVLTTSGQPFTLDQRSNSLIQFREVSTKYQFSADVASGSSPGLPGRVFIGRLPEWSPDVRYFTSYEYPRINHAQYLDVHGTMGLPVFERGNYSCLGVIELIMTKQKLNFTSELNTICSALQAVNLTSTEVSSIPRAKLNSASYKDALPEILEVLRAACITHKLPLAQTWVTCAQQGKRGSRHSDENYKYCISTIDAACYVNEPRMQSFHEACSEHHLLRGQGVAGKAFTTNQPCFLPDIGSSTKLEYPLSHHAKIFNLKGAVAIRLRCTRTGIADFVLEFFLPTDCEVLEEQKAVLDSLSGTMRSVCQTLRVVTDKEMEDEAMREMNELNSFSPRGKNKVEELSFGDNTRGDREEASWTTLVGTSQKGSDLAELHTHGMLSHGGHGSSQAGDQTSKEGSKVKRRTKTEKTVSLQVLRQYFAGSLKDAAKSLGVCPTTLKRICRQHGINRWPSRKIKKVDHSLRKLQQIIDSVHGAETAFQLNTLYKDLTNTSVSSDNNLSGSVTVPLANQNNLDFEMHQHHRLSSNIPSTSLSHSSCSQSSDSSPSCSGGATKHSPQVGADQVRSGCLPQHSPVQTLQTEAASINEHFSGQEAPIDLLQDVAEKANGEQHMSQSPSSPKQTANVGMRVKVTFGSEKVRFRLKPECDFQELKQEISKRLSIADMNSLIVKYLDDDSEWVLMTCDADLHECFHVYKLADIQTIKISVHLAASPTTRITIGHTGFS

SEQ ID NO: 1251 - protein, 359 aa, Glycine max
MGSSTNGGVPPGFRFHPTDEELLHYYLKKKVSFQKFDMDVIREVDLNKMEPWDLQERCRIGSTPQNEWYFFSHKDRKYPTGSRTNRATNAGFWKATGRDKCIRNSFKKIGMRKTLVFYKGRAPHGQKTDWIMHEYRLEDGNDPQGSANEDGWVVCRVFKKKNLFKIENEGGSTHKPDHQINNSSNTNARSYRENHYLLHQQQNPRNSSGLELDKPELALHYPPPHLQNPPYSLFQSQPLLQTQKPMVYDYSYTSDTPIMAKQLMTNPRDCESGSDGLRYQVSESGMEVGSCEPNQEMGTGRGEGINEWGVLDRLVTSHLAGNEDSSKGVRFEEANPQSVHQINQLSLRGEMDFWAYGKQ

SEQ ID NO: 1252 - protein, 302 aa, Glycine max
MINMATMEDMSNMSGEITLPGFRFHPTEEELLDFYLKNMVVGKKLRYDVIGFLNIYQHDPWDLPGLAKVGEREWYFFVPRDKKHGSGGRPNRTTEKGFWKATGSDRKIVTLSDPKRIIGLRKTLVFYQGRAPRGCKTDWVMNEYRLPDNCKLPKEIVLCKIYRKATSLKVLEQRAALEEEREKKQMVDNSPASPPSSTDTMSFSSPQEEQNVPLPLLQHVLKKESETTEDMVVSKQEKTTNQLTLKDTKSTCGTSLQMPFGKEKLPDLQLPMLSDWTQDTFWAQLNSPWLQNFTPTNILNFY

SEQ ID NO: 1253 - protein, 446 aa, Glycine max
MMSLSVSPSLGSPYQMKCEQRGLVLIHLLLAGANFVATGDLQNANLTLEQISQHASLDGDTMQRIASYFSEALADRILKTWPGIHRALNSSRITMVSDEILVQKLFFELLPFLKFSYILTNQAIVEAMEGEKMVHIVDLYGAGPAQWISLLQVLSARPEGPPHLRITGVHHKKEVLDQMAHKLTEEAEKLDIPFQFNPVLSKLENLDFNKLRVKTGEALAISSIMQLHSLLALDEDASRRKSPLLSKNSNAIHLQKGLLMNHNTLGDLLDGYSPSPDSASSSPAASSSALMNSESFLNALWGLSPKVMVVTEQDFNHNCLTMMERLAEALFSYAAYFDCLESTVSRASMDRLKLEKMLFGEEIKNIIACEGCERKERHEKMDRWIQRLDLSGFANVPISYYGMLQGRRFLQTYGCEGYKMREECGRVMICWQERSLFSITAWRPRK

SEQ ID NO: 1254 - protein, 239 aa, Glycine max
MVQSKKFRGVRQRHWGSWVSEIRHPLLKRRVWLGTFETAEEAARAYDQAAILMSGRNAKTNFPITQTPEGDPKSTTSEDTPSTTSKDLEEILHAKLRKCGKVPSPSMTCLRLDPENSHIGVWQKRAGRRSDSNWVMTVQLGKKSVNVNNNDTHHQADSSSSSSLSSSLPSSEHHHIESPSLAVTGNLHHQEVVRGEIDEEERIALQMIEELLNDRNCPSPSFNNNIQERDGADHDHFFL

SEQ ID NO: 1255 - protein, 338 aa, Zea mays
MGLDVGGIGMGLDLGLDLGLFAARSAGGMAAAAKGAPAEIESCIRSLEEERRKIEVFRRELPLCVRLLADVIDELKDEAAKRGGDAEAKADDGDKRKWMSTAQLWLDSDAKSDESDKEQLSEITSPEPKLLGGAPMPIRAVAAVPPLPPPFFRREDSSAGSGLSLVPPAAKPPIPPMSASDNASGRFCATMPPSGSGANLHSQAQQQARKARRCWSPELHRLFVAALHQLGGPQVATPKQIREVMKVDGLTNDEVKSHLQKYRLHNRRSPGVVAPVSQSVMLAGGLWAPPHQEQSSSQSGSPQGPLQFSGSGVAATVGGDSSSSDEDDKSEGYSRKYV

SEQ ID NO: 1256 - protein, 225 aa, Glycine max
MNNPSSPSPCAAFADFYEQWFEELQSLMQQLRGEGRKEEVMEKVMWHHQNYYVAKSAAAEKDPLNVFLSPWATTLERSLHWITGWRPTTAFHLIYTESSLMFESHIIDILQGLRTGDLGDLSPSQFRRVSDIQCDTVKEENAITEELSEWQDSVSEMMGPGANINDKIGRLVCIIKKADDLRLRTLRSVVGLLSPQQAIEFLIASAELLVGIRGWGLNHDRPRGR

SEQ ID NO: 1257 - protein, 261 aa, Zea mays
TSLYKKAGSCRTMRVCEKVESKGRTTYNEVADELVAEFSDPNINIDSPDPDNSSAQQYDEKNIRRRVYDALNVLMAMEIISKDKKEIQWRGLPKTSMNDIEELKTEVNGLKGRIDKKNAYLQDLQDQYACLQNLVRRNEQLYGSGDAPSGGVALPFILVQTRPHATVEVEISEDMQHVHFDFNSTPFELQDDSFVLKAMALSGEETDCTQAPGANGGECSSTRNNYWHHHQQPQPPGPRVVRVPNSPPIPGILKGRVKHEH

SEQ ID NO: 1258 - protein, 615 aa, Zea mays
MALSASRVQQAEELLQRPAERQLMRSQLAAAARSINWSYALFWSISDTQPGVLTWTDGFYNGEVKTRKISNSVELTSDHLVMQRSDQLRELYEALLSGEGDRRAAPARPAGSLSPEDLGDTEWYYVVSMTYAFRPGQGLPGRSFASDEHVWLCNAHLAGSKAFPRALLAKSASIQSILCIPVMGGVLELGTTDTVPEAPDLVSRATAAFWEPQCPTYSEEPSSSPSGRANETGEAAADDGTFAFEELDHNNGMDIEAMTAAGGHGQEEELRLREAEALSDDASLEHITKEIEEFYSLCDEMDLQALPLPLEDGWTVDASNFEVPCSSPQPAPPPVDRATANVAADASRAPVYGSRATSFMAWTRSSQQSSCSDDAAPAAVVPAIEEPQRLLKKVVAGGGAWESCGGATGAAQEMSGTGTKNHVMSERKRREKLNEMFLVLKSLLPSIHRVNKASILAETIAYLKELQRRVQELESSREPASRPSETTTRLITRPSRGNNESVRKEVCAGSKRKSPELGRDDVERPPVLIMDAGTSNVTVTVSDKDVLLEVQCRWEELLMTRVFDAIKSLHLDVLSVQASAPDGFMGLKIRAQFAGSGAVVPWMISEALRKAIGKR

SEQ ID NO: 1259 - protein, 315 aa, Zea mays
MPTAPSESNKEPRPEECVNELGIKQPVQHVASEEQEGVQDDAKADANVMNVSFGKGKSEDSFGTINGTNSGDKIESPSGLAERTLTQPTTKGCSKQRGRSSNGRGNRTKKIEEGNASGLIAVAPESEDDDDAPFIDGNQAEGGALWDIFRREDVSKLHDYLMKHADEFRHCNFEPVKQVTHPIHDQCFYLTIEHKRKLKEEYGVEPWTFEQKLGEAVFIPAGCPHQVRNLKSCIKVALDFVSPENVRECIRLTEGFRLLPKWHKVNEDKLEVKKIALHAFNQAIKDITDESSNSNERMKPNGYTWSRAHKILMCW

SEQ ID NO: 1260 - protein, 331 aa, Zea mays
MDLSGTQGELPMATMHAGGSPYLGLHHGHPQQHNHGANGRHMSPPDVVAEEAKNRQLAVVPVGTGGGGGAGVRYRECLKNHAAAIGGSATDGCGEFMPAGEEGSLDALRCSACGCHRNFHRKEPPGGDGRQLYGHHHHHPLSPLAAVHPHHHRGLLVAALPPAPTRMVMPLSAAMHHHQQPPQQHHSSASADSDDAHVPGVRGGEVQQQQQAPARKRFRTKFTAEQKARMLGFAEDAGWRLQKLDEAAVQRFCQEVGVKRRVLKVWMHNNKHTLARRGHAGLPGDPELLGPHDGQLGMPLPEPAAEPAVAAAAAAGLGVTDQAMSFGTGRH

SEQ ID NO: 1261 - protein, 333 aa, Zea mays
MALEAVVFPKEHLAGTAKARSASSLACGFRTEEVEDNGGVVLQGEAGAATTWEYWDAALCPCSTAPAGAVEECWDVRHRLSASPPPPAPSAAVAAPSSGHGKAAAAARRRRRQRPKAVKNTEEVESQRRNHIAVERNRRRQMNEYLSVLRSALPPSYPQRGDQASIVAGAINFVKELEHLLQSLEAQKRRRQGCTEPPAPAPFAGLFTFPQYSTAATGVVAGSGDGAGCGAAGARRGVADIEVAVAESHASVKVVTPRRPRQLLRMVVALQCLGLTVLHLNVTTTADQLVLYSLSLKMEDECRLSSVDDIAAAVNDILAKISDERASRHLVAA

SEQ ID NO: 1262 - protein, 158 aa, Glycine max
MNNNMLGMKRRRDDNEGSLDLAKCLMLFSCPIESNKTQQKSFGSVEFECKTCNRKFSSFQALGGHRASHKRQKLEGEELKEQAKSLSLWNKPKMHECSICGLEFSLGQALGGHMRKHRASLNEGFPIIPSIDQVIAKIPVLKRSNSTRVMCLDLELHL

SEQ ID NO: 1263 - protein, 287 aa, Zea mays
MAQLPPKIPTVAPAWPEFGGGHQQQRSPSVGTFLAAAPMQPSWVDEFLDFSAAKRGAHRRSVSDSVAFLEPEPGPGDGNAGAHDFDRLDDDQLLSMFSDDLQPPPPQPQTQAAPAPVASSSSPSDHNSINDEKTDRGDAEEAQSKCHGAAAATAVDPKRVKRILANRQSAQRSRVRKLQYISELERSVTSLQTEVSALSPRVAFLDHQRSLLTLGNSHLRQRIAALAQDKIFKDAHQEALRKEIERLRQIYQQQSLKSGREPDAAPSVRDDKDMIGSEGTAAPGPPS

SEQ ID NO: 1264 - protein, 227 aa, Glycine max
MEAVCGSGSSVWVTSSLTRSPKITLPLFRASYQHLTAFPSQSLLFSYHPSRYANARTLRARTSSKPIFLPHLIASLEQVDQTYIMVKPDGVQRGLVGEIISRFEKKGFKLTGLKLFQCSKELAEEHYKDLKQKSFFPKLIDYITSGPVVCMAWEGVGVVASARKLIGATDPLQAEPGTIRGDLAVQTGRNVVHGSDSPENGKREIALWFKEGEVCDWTPVQSPWLRE

SEQ ID NO: 1265 - protein, 162 aa, Glycine max
MSDAPASPCGGGGGGSHESGEHSPRSNFREQDRFLPIANISRIMKKALPPNGKIAKDAKETVQECVSEFISFVTSEASDKCQREKRKTINGDDLLWAMTTLGFEEYIDPLKVYLAAYREIEGDSKGSAKGGDASAKRDVYQSPNGQVAHQGSFSQGVNYTNS

SEQ ID NO: 1266 - protein, 355 aa, Zea mays
MVSAVLRTILVTGGAGYIGSHTVLQLLQQGFRVVVVDNLDNASEAALARVAELAGHDGANLVFHKVDLRDRHALVDIFSSHRFEAVIHFAGLKAVGESVHKPLLYYDNNLVGTITLLEVMAANGCKKLVFSSSATVYGWPKEVPCTEEFPLCATNPYGRTKLVIEDICRDVHRSDPDWKIILLRYFNPVGAHPSGYIGEDPCGVPNNLMPYVQQVAVGRLPHLTVYGTDYSTKDGTGVRDYIHVVDLADGHIAALRKLYEDSDKIGCEVYNLGTGKGTSVLEMVAAFEKASGKKIPLVFAGRRPGDAEIVYAATAKAEKELKWKAKYGIEEMCRDLWNWASKNPYGYAGSRDNSK

SEQ ID NO: 1267 - protein, 354 aa, Oryza sativa
MVSALLRTILVTGGAGYIGSHTVLQLLQLGFRVVVLDNLDNASELAILRVRELAGHNANNLDFRKVDLRDKQALDQIFSSQRFEAVIHFAGLKAVGESVQKPLLYYDNNLIGTITLLQVMAAHGCTKLVFSSSATVYGWPKEVPCTEESPLCAMNPYGRTKLVIEDMCRDLHASDPNWKIILLRYFNPVGAHPSGYIGEDPCGIPNNLMPFVQQVAVGRRPALTVYGTDYNTKDGTGVRDYIHVVDLADGHIAALRKLYEDSDRIGCEVYNLGTGKGTSVLEMVAAFEKASGKKIPLVFAGRRPGDAEIVYAQTAKAEKELKWKAKYGVEEMCRDLWNWASKNPYGYGSPDSSN

SEQ ID NO: 1268 - protein, 345 aa, Glycine max
MGVPEKDPLSQLSLPPGFRFYPTDEELLVQYLCRKVAGHHFSLPIIAEIDLYKFDPWVLPSKAIFGEKEWYFFSPRDRKYPNGSRPNRVAGSGYWKATGTDKIITTEGRKVGIKKALVFYIGKAPKGTKTNWIMHEYRLLDSSRKNTGTKLDDWVLCRIYKKNSSAQKAVQNGVVPSNEHTQYSNGSSSSSSSQLDDVLESLPAIDERCFPMPRVNTLQQQQHEEKVNVQNLGEGGLLDWTNPSVLNSVVDFVSGNNNHNQLVQDQTQGMVNYNACNDLYVPTLCHVGTSVPQKMEEEVQSGVRNQRVQNNSWFLQNDFTQGFQNSVDTSGFKYPVQPVGFGFRN

SEQ ID NO: 1269 - protein, 143 aa, Oryza sativa
MPVPLAPYPTPPVPFTPPNGAQSQLVCSGCRNLLMYPAGATSVCCAVCSTVTAVPAPGTEMAQLVCGGCHTLLMYIRGATSVQCSCCHTVNLAMEANQVAHVNCGNCRMLLMYQYGARSVKCAVCNFVTSVGASPGTDQKPSS

SEQ ID NO: 1270 - protein, 162 aa, Triticum aestivum
MSAAEGAVVFSEEKEALVLKSWAIMKKDSANLGLRFFLKIFEIAPSARQMFPFLRDSDVPLETNPKLKTHAVSVFVMTCEAAAQLRKAGKITVRETTLKRLGGTHLKYGVADGHFEVTRFALLETIKEALPADMWGPEMRNAWGEAYDQLVAAIKQEMKPSE

SEQ ID NO: 1271 - protein, 160 aa, Arabidopsis thaliana
MESEGKIVFTEEQEALVVKSWSVMKKNSAELGLKLFIKIFEIAPTTKKMFSFLRDSPIPAEQNPKLKPHAMSVFVMCCESAVQLRKTGKVTVRETTLKRLGASHSKYGVVDEHFEVAKYALLETIKEAVPEMWSPEMKVAWGQAYDHLVAAIKAEMNLSN

SEQ ID NO: 1272 - protein, 372 aa, Zea mays
MVKVIQGRPAEMGFRMPAEWEPHEQCWMGWPERPDNWRENAGPAQEVFARTAIAISKFEPVTLCASAKQYPKVHELMEHQTNIRVVEMSMNDSWFRDMGPTFVTCKGDSGIAEQTIAGIDWQFNAWGGIYDDWSLDSDVAKKIVEIERIPRFPQKIILEGGSIHVDGEGTCITTEECLLNPNRNPNMTKLEIENELKDFLGVSKVIWIPRGLYGDEDTNGHVDNMCCFIKPGVILLSWTDDEKDYQYERSVEALSVLSQSVDAKGRQLQVVKIHVPGPLYMTEEEAQGVVSSGHSVPGPAGTRLAASYVNFYIANGGIIAPSFGDRWDEEAYAVLQKAFPDHEVVMVEGGREIALGGGNIHCITQQQPVRPS

SEQ ID NO: 1273 - protein, 747 aa, Glycine max
MSVDGDSKELKELNQRLRDGKKIAGGEHGLCEEVKCNGIAEEVKVEQGGTVESSSVQQHIPQPQGAIICWERFLHIRSLKVLLVEIDDSTRHVVTALLRNCSYEVIEAANGLQAWKILEDLTNHIDLVLTEVAMPGLSGIGLLYKIMGHKTRKNIPVVMMSSHDSMGLVFKCLSKGAVDFLVKPIRKNELKNLWQHVWRRCHSSSGSGSESGTQTQKSIKSKSLEKSDNNSGSNDEDDNESIGLNNVDGSDNGSGTQSSWTKRAVEVDSHKPVSQWDQIAECPDSTCAQVVHSNAEMGGNKVVPLAAKDCAEQNEQLVKTAGSQHSNAPDVGPSKFSEQINRGQLDLNCENQSSKLRCKGLSLSDAITSTCDSQMHSGEFEALNKKPKSSDIENKGTNNDEELPSLELSLKRLRGVEDADITIQDDRNVLRRSDQSAFSRYNAASNTKKSPTGCVGSNSPYNNSLEVTKKDSSRDIQSHSCGNPPNQNSNGASNNIDMGSTTNNAYAKSAVMSEPAGASTTKCLYQTSAFQPVKNSLVCTSQQVVLNNTEDMSATILAPPKLDRHKDSAALDFHLHCENHNCIADNMKHQLPPDHDAESIKKMATAAPHCGSSNVEEVLVEGNVGNHSINRSVSGSNNGSNGQNGSSTAVNAGGTNTESNNGLTGNSGSGDASGSGSANRVDQNKTSQREVALTKFRQKRKERRERCFHKKVRYQSRKRLAEQRPRFRGQFVRQTSNENASEATTDS

SEQ ID NO: 1274 - protein, 461 aa, Zea mays
MQSLLLPTAAVAPVAAPCGRRNLPGRLSVRASATAVAAPRRETDPKKRVVITGMGLVSVFGNDVDAYYDRLLVGESGIGLIDRFDASKFPTRFAGQIRGFSSEGYIDGKNDRRLDDCLRYCIVSGKKALEASGIAHGSKPMEKIDKTRAGVLVGTGMGGLTVFSDGVQNLIEKGYRKITPFFIPYAITNMGSALLGMDIGFMGPNYSISTACATSNYCFYAAANHIRRGEADIMIAGGTEAAIIPIGVGGFVACRALSQRNDDPKTASRPWDKDRDGFVMGEGAGVLVMESLEHAMKRDAPIIAEYLGGAVNCDAYHMTDPRSDGLGVSSCIKQSLKDAGVAPEEVNYINAHATSTLAGDLAEVNAIKQVFKDPSGIKINATKSMIGHCLGAAGGLEAIATIKAITTGWVHPSINQFNPEEAVEFDTVPNVKKQHEVNVGISNSFGFGGHNSVVVFAPFKP

SEQ ID NO: 1275 - protein, 360 aa, Zea mays
MEFKNCGSSSQPRPAVVVGEEAALARQGSVYSLTFDEFQSALGGAATGGGGGGSIPKDFGSMNMDELLRSIWTAEETQAMASASGAGAGAGMPPTSLQRQGSSLTLPRTLSTKTVDEVWRNLVRDEPLQGADGGGHQQHHRQSTLGEMTLEEFLVRAGVVRENPAPAPPAPPPMIPPRPVPVAPKSSAFFGNLPGADADTAAAAAALGFAPVGMGDLAQIPPRAAGMGGGAMAVQAAVNQLDSGGKGYSDLSSPTEPLPFSFEGMIRGRRHGGGVEKVVERRQRRMIKNRESAARSRARKQAYTMELEAEVQKLKEQNQELERKQAEIMEMQKNELPEMLKDPFGRKKRLCLRRTLTGPW

SEQ ID NO: 1276 - protein, 417 aa, Zea mays
AVAVVTMFVIEDKGGAIALMLASLLFLGTWPAVLTLLERRGRLPQHTYLDYSITNLLAAVLIALTFGQLGDSRRGMPNFFTQLGQDNWPSVLFAMAGGVVLSVGNLSTQYAWAYVGLSVTEVISSSMVVVIGTTLNYFLDNRINRAEILFPGVACFLVAVILGSAVHSSNAADNEQKLGASTNAYKLGTSGTVEPSKQAVDRDAPKDLEESGASGIRQPDKAEAGTAEYLIELEERRSIKVFGSNTFIGLGIVFFAGVCFSLFSPAFNLATNDQWHTLRDGVPHLVVYTAFFYFSISCFVVGVGLNVLFLYRPMAGVPRSSFGAYLRDWDGRQWALLAGLLCGFGNGFQFMGGQAAGYAAADAVQALPLVSTFWGVLLFGEYRKSSRKTYVLLGFMLFMFVAAVAVLMASSGHRSTE

SEQ ID NO: 1277 - protein, 303 aa, Zea mays
AVAVVTMAFTSSLAPFFPPSGTFRAHPARRLRADAPGRFVASCLPPPDVVVTREQGKNARLISALEKHNVHPLELPLIKHVEGPDTDRLSDVLRNDKFDWIIVTSPEAAAMFLQGWKTAGSPKVRVAVVGEGTARVFHEVSESDDQSLELAFSPSKALGKVLASELPRSNENSCKVLYPASAKAGHEIEDVLSERGFDVTRLNTYTTVPVEDVDPLTLNLAISAPVVAVASPSALRAWLNLISKSDNWNNSVACIGETTASAAKKLGLKSIYYPTTPGLEGWVESILEALRVHRTASKEAPKR

SEQ ID NO: 1278 - protein, 209 aa, Zea mays
AVAVVTMVMAMPMMVYLHPHVVADSRIYWQPVKLPVGNGKVNNMLVFDTMTESFQQLLSPVEGPFLELFQMNSGALGLYHCRSGKVDLWVLQDHGSWSWSMNHRIKLDVMFFSLLPVLDPEGDVLVLSKRGETGILWQHLHHISGVNGSLLALYQWSAYLKLSRHRLKESLVHHDFFSMEGNEGGVDEKPLFDGLSTVALLRDDNSEPH

SEQ ID NO: 1279 - protein, 114 aa, Zea mays
AVAVVTMLPIYRELIAAGIRIWVFSGDADSVVPLTATRYSIDALFLPTITNWYPWYDDEEVGGWCQVYEGLTLVTVRGAGHEVPLHRPRQGLKLFEHFLRGEPMPRPVDSVQSF

SEQ ID NO: 1280 - protein, 307 aa, Zea mays
MGGQIEVVKCSLLGSVLSNLLLVLGTSLFCGGVVNLGSDQPYDRTQADVSTGLLILGVLCQSLPLLLRYAVGAGEHSVAAPTTVLDLSRACSVVMLLAYVAYLFFQLKTHAQLFEPQEVDDGCEAEEDEQAVIGFASGLFWLAFNTVLIAILSEYVVGTIEPTSKSWGLSVSFISIILLPIVGNAAEHAGAIIFALKNKLDITLGVALGSATQISMFVVPLSVIVAWIAGIQMDLDFKLIETGSLFVSVIVTAFTLQDGSSHYLKGILLLLCYIVIGACFFVTRQPASNNNGAGLSLPTGTLSAQAA

SEQ ID NO: 1281 - protein, 237 aa, Zea mays
AVAVVTMAGAEVGEDKYRSFIHGEGERDTVWRYGAPPNYDVVNKLFEEERTQVWPEGSLEEKVQRLLKSWEMELVHKARPEDQKTVNSEKYSASTNGMSALTRAEVMAIGGYNNFLRTKLPPEHRIYDPDSETVESAMATFTTAFPRGFAIEVLDVYSGPPRIAFKFRHWGYMEGPFKGHPPHGQRVELFGVCIFHVDEDMKVDKSEYFYERGNFLAGFLSAPAPDGSGGCPVMRGN

SEQ ID NO: 1282 - protein, 177 aa, Zea mays
WRRAATTSCRLSSPATSRGSPAPPSGTTSCSGTRRTRTTCCGWCCRPCTARGGWGWGSPRTASWWTPAPWWGGSARRGSRTSSRSRWGARPPPRWSRTRASSSPATTTSPPCSCSRPRSTSPSSSASPSRSGARTCSSPSAPPSPSTTASPSTRIRPPSYSISPQAAHQARHPSRKV

SEQ ID NO: 1283 - protein, 318 aa, Zea mays
AVAVVTMEKSRVLVVGGTGYIGRRLVRASLAQGHPTLVLLRPEIGLDIDKLQMLLSFKAQGARLVEASLEDHAGLVAAVAQADVVVSAMSGAHIRSHNLSLQHKLVEAIKEAGNIKRFIPSEFGMDPSKMGHALEPGRVTFDEKMDLRRAIEDANIPHTYVSANCFAAYFCPNLCQMRTLLPPKEKVHVYGDGNVKAIFCDEDDVATYTIKSVDDPRALNKTLYIRPPENILTQNDVISKWEKLSGNVLEKIHIPADEFLASMKGTDLANQAGVGHYYHIFYEGCLTNFEIGDDGADATLLYPEVQYTRMDEYMKRYL

SEQ ID NO: 1284 - protein, 88 aa, Zea mays
EYRWVLEAHVEDAAAADGGAASFPETVAAAAAAGGGCLLLAVVRRAAVLGRWRVRRRWRDVRRRRRAVGLLARRWVARLVAHGNDSDC

SEQ ID NO: 1285 - protein, 212 aa, Zea mays
AVAVVTMSQAIGYKNAHIFVSLVSIWNFLGRVGGGYFSEIIVRERTYPRHIALAVAQIVMAAGHFLFAMAWPGTMYIASLLVGLGYGAHWAIVPAAVSELFGVKHFGAMYNFLILANPAGSLIFSELIVSNLYEHEAEKQASQHQMSALLSPRLLRDTGFLADDALKCEGPACFFFSSLIMSVFCAVAAGLSLLVVQRTRQVYPRLYSSVRT

SEQ ID NO: 1286 - protein, 183 aa, Zea mays
ASTAGFYCRCCWCWYTTSSASAGERSCWCGSGGRRSRAPAAGPPRGGAGSAGSWGRAPAGCPRAPAATRRRTPPSCTDPPRCSARKERVCVVSGGELGDKIAFSVPGTRAVVVGTSLRRKGGGPRMRSAPRGWTWTSCCWALRGRGAQSTGSASRQPPPPLPEADSTDSRLMDLEGMVTTATA

SEQ ID NO: 1287 - protein, 454 aa, Zea mays
AVAVVTMVMKEAAEEHDGRRDVTVTVEPALPVQQHRLPLSNLDLLLPPLDVSLFFCYLHPAPTAIALKEALAKTLVAYYPLAGEVVANGDGEPELLCSGRGVDFTETAAAGVELREVRLGAVDEGVEKLVPVKKTGVTMAVKLSKFTCGGAVVGCTFDHRVCDAYSFNMFLVAWAAAARGSSAPPPPDPCFRRSLVAPRDTPHRRAPSTDALINRLFSPRSAAPPPPPAAAGSVNRIYRIAAEDIAALKASAGPGRTKMEAFTALLWQLCARAASPRQSQCCMGVVVDGRTRMFPDGAMKAYFGNVLTIPYGVIGSEDLRCMALADVADDVHRWVAEAATGDHFRGLVDWVEALRPKPAAARAYLGGTGGNEAMACIVSSGMSFPVGKADFGTGLPAFASYHFPWPAGAGYVMPMPSARGNGDWVVYVHVAPEVAKVMEESTVFQALVNSYAFE

SEQ ID NO: 1288 - protein, 162 aa, Zea mays
EYRWVLVVAAVDELVVDCEVAGLEALAVGVDGLERRVVVQVQAAVAALVHDPHRDGRPRRSVSHQKTLPARGLAGGAGGPAEGRPAVLHAPRQRLAGVPRRAVRAHGVEVPVVLLRVVEVVGGAHAGGLLRRGHGRRRAQQHRSQRQLIADCHPRHGNDSDC

SEQ ID NO: 1289 - protein, 275 aa, Zea mays
AVAVVTMYMDQKEVVDALSHHSKIEPCITELVWRQLEHQNPLFFKAYYMRLMLKTQIMVFNKLLQDQFEVINKEFSSGIPSMSLPNGSNSNLLKQNSCFLPETAPGSAMPDGIMHNGSSRGIINGTPSGDQLLNASKDLHGLHNGIDASTSLQSDQNAAAVLYGVDNETSATIKTESCYSSNADFAFCGNTFLESCQSIGDASGGGSFSSSELNGQPLNDSILDMESSSFSFLNQMPQSFIFPDLADDFNQSAEITPFLTPETNFSDSTGGDHTG

SEQ ID NO: 1290 - protein, 497 aa, Zea mays
AVAVVTMEVVSCSHSCSALHQTPASTWRLRGSALGLGLGHARPSRTRRYTVACVGTTSGASNPGGSGKVHAAQGFHVSDVDAALQGIPSMKAGEAERVMIQGLPEGPDSSPISTGFWEWKPKLTVYYERSGMKNSKAPAVLFLPGFGVGTFHFEKQLRDLGRDHRVWTMDFLGQGMSLPGEDPAPSSIASEDAFWGFGQDSQPWAEELVYSVDLWQNQVQHFIEEVIREPVYIVGNSLGGFVALYFAASSPHLVKGVTLLNATPFWGFFPNPATSPRLSKIFPWAGTFPLPSFVRKITEAVWQKISDPKSIQDILKQVYADHSTNVDKVFSRIVEITQHPAAAASFASIMFAPRGQISFQEAISRCQDQGIPISLMYGREDPWIRPIWGLKVKQQVPEAPYYEISPAGHCPHDEVPEVINYLLRGWLKNLESEGSVDLPFLEERSYAERGVSRELEFVREGSRKSVSVRLYGTKISLWSQLSSFLNTRVPKSRIVLR

SEQ ID NO: 1291 - protein, 179 aa, Zea mays
AATDKSTICTQRRPDRERATAAAQPTGAGRARTNPRRSVRGATRWRSGTWRRGRTPSAPSAPAAPGPSPPSSPPRTASAAPHPAPAPGPPGSRPSPTTPAAAPTTWLPPPTPRQRGPPRCPRRRGARPWTPPGGRGTRRRMLRTVPSPLDWICLVAPLFACTCRVAFRLLWWLEPSGTR

SEQ ID NO: 1292 - protein, 508 aa, Zea mays
AVAVVTMYKEPKDQETITGPVAWSPQAVHADVDLDNHNEPINPPIDGTQSMFGEVPGREKGKSKSVSFALSDVSGIASPIDTNSEMGNIGDSCSDKLTDENLSNSSRHIAEKHSITKDQYSNEQDHEREPLDHAVQQQPKSDVGERASSMKRRCRKKVQKVGTPNHTVDDYFGEDCVEPSLAEEDNDTGDHYTTGNKHKARKKSRGGVEESQQQKAQKNKSKVSSRGRKRTLKDESTEKPEKKLTHRIRQRIPKEVKALLETPREQIKPMKLCASHLRLLQEARERVDPKGIPSGPSSNTRNFQLDDMDDLGYRDEEARFFDNDITEEHVQNATKLNYHSYMNKPARGKWSKSDTDLFYEGLRQFGIDFAMIQQLFPDKTRHQVRQKFKSEERKNPLLVHDAIVHRSGDNLYFKKVIKQLNIEDVVLPDIKSTQKQDGASSERGPGNENVLDDLNEEENSSNWLNEEHDVQMADVEEEHGEQMDDVEEERDLGNDGGDDDLGDVFDWY

SEQ ID NO: 1293 - protein, 76 aa, Zea mays
RRRWRPGPAPCRRRPSRRTRCTPGRPSSTPPPAPPAARSRGTSASPPTAGPPGPARTAPASRPPATSARWLPGGGG

SEQ ID NO: 1294 - protein, 177 aa, Zea mays
MGRGKIEIKRIENTTSRQVTFCKRRNGLLKKAYELSILCDAEIALIVFSTRGRLYEYSSNSVRSTIERYKKASASTSGTAPVTDVNSLQYFQQEAAKLRQQIQTLQNSNRHLMGESTGNMTAKELKGLESRLERGIGRIRSKKHELLLAEIEYMQKREADLHNENMFLRAKVAEAER

SEQ ID NO: 1295 - protein, 72 aa, Zea mays
MGRGKIEIKRIENTTSRQVTFCKRRNGLLKKAYELSILCDAEIALIVFSTRGRLYEYSSNSVRSTIERYKKA

SEQ ID NO: 1296 - protein, 72 aa, Oryza sativa
MGRGKIEIKRIENTTNRQVTFCKRRNGLLKKAYELSVLCDAEVALIVFSSRGRLYEYANNSVKSTVERYKKA

SEQ ID NO: 1297 - protein, 663 aa, Synechocystis sp. PCC 6803
MGTSVSNPTAILQTMQGFLRKWWSEFNLQTRLMAAATLVVSLLMSGLTFWAVNTIQEDAQLVDTRFGRDVGLLLAANVAPMIADKNLTEVARFSSRFYENTSNIRYMIYADPSGKIFFGIPYSEETVQNSLTLERRIELPQIDPHNFDQPFVRQHHTPNGDVTDVFIPLQYQGKFLGVLAIGINPNPAAVNSSNLTRDVTIAVFISIWVMVILGAVFNALTITQPIKELLLGVKNIAAGNFKQRITLPFGGELGELIVNFNEMAERLERYEAQNIEELTAEKAKLDTLVSTIADGAMLVDTNLQLLLVNPTARRLFAWENKPIIGENLLENLPPEITAQLTQPLRELAADQGSLLFSPGHGPQEEEQDKTYAPEEFRISLTQPFPRTIRLMLTQVLDQNRENLRGIVMTVQDITREVELNEAKSQFISNVSHELRTPLFNIKSFIETLSEFGEDLSEVERKEFLETANHETDRLSRLVNDVLDLSKLESSKIYQLDAVDLYQLIEQSLRSYQLNAKDKQLQLEKILDPDLPFALGNYDLLLQVMTNLIGNSFKFTKAGGKIIVRAYPLHRSNLRAEDGPGLVRVEISDTGIGIDPEDQAAIFGRFYRVENRVHTLEGTGLGLSIVKNIIAKHQSQIHLVSEVGVGTTFWFDLAVYQSMLMVVG

SEQ ID NO: 1298 - protein, 492 aa, Triticum aestivum
MDPYKHRPTSGANSGYWTTNSGAPVWNNNNALTVGQRGPILLEDYHLIEKLAQFDRERIPERVVHARGASAKGFFEVTHDVSQLTCADFLRAPGVQTPVIVRFSTVVHERGSPETLRDPRGFAVKFYTREGNFDLVGNNMPVFFIRDGMKFPDMVHAFKPSPKTNMQENWRIVDFFSHHPESLHMFTFLFDDVGIPLNYRHMDGFGVNTYTLISRDGKAHLVKFHWKPTCGVKCLLDDEAVTVGGTCHTHATKDLTDSIAAGNYPEWKLFIQTIDADHEDKFDFDPLDVTKTWPEDIIPLQPVGRMVLNKNIDNFFAENEQLAFCPAITVPGIHYSDDKLLQTRIFSYADTQRHRLGPNYLMLPVNAPKCAHHNNHHDGLMNFMHRDEEVNYFPSRFDPTRHAEQYPIPPRVLSGCREKCIIEKENNFKQAGERYRSFDPARQDRFLQRWVDALTDARVTHEIQGIWVSYWSQCDTSLGQKLASRLKIKPSM

SEQ ID NO: 1299 - protein, 121 aa, Glycine max
MAFSSTLLLLLVAMFVFSAVAQSPASSPEFAAAPPKTATPSPSSSMSPPAAAPSPSSSVVSSPPSPPTSVPASSPSPSISPSSISSPPSDAPAPSENAAVSNGFAAVGSVVVGLVAAASIM

SEQ ID NO: 1300 - protein, 520 aa, Oryza sativa
MLMATVSPARREPTPQAVRASPMPSAAAALVRRGGGGSGGTVLGKYELGRVLGQGSFAKVYQARHLETDECVAIKVLDKEKAVKGGMVHLVKREINVLRRVRHPNIVQLFEVMASKTKIYFVMEYVRGGELFSRVSKGRLREDTARRYFQQLVSAVDFCHARGVFHRDLKPENLLVDENGDLKVSDFGLAAGPDQFDPDGLLHTFCGTPAYVAPEVLRRRGYDGAKADIWSCGVILFALMAGYLPFHDHNIMVLYRKIYNGEFRCPRWFSKDFTRLITRLLDANPKTRITVPEIIESDWFKKGYKPVKFYIEDDKLYNLSDDVLNLEPADPVPPPLGLAPPVPPPPQGDDPDGSGSESDSSVVSCPATLSTGESQRVRGSLPRPASLNAFDIISFSKGFNLSGLFEERGNEIRFVSGEPMSDIVKKLEEIAKVKSFTVRRKDWRVSIEGTREGVKGPLTIGAEIFELTPSLVVVEVKRKAGDNEEYEDFCNMELKPGMQHLVHQMLPAPNGTPVSEKVER

SEQ ID NO: 1301 - protein, 236 aa, Oryza sativa
  misc_feature (184)..(184): Xaa can be any naturally occurring amino acid
  misc_feature (219)..(219): Xaa can be any naturally occurring amino acid
  unsure (1)..(236): unsure at all Xaa locations
MGRGKIAIKRIDNTMNRQVTFSKRRGGLMKKARELAILCDADVGLIVFSCTGRLYDFSSSSMKSIIERYQEAGEEHCRLLNPMSEAKFWQREVTTLRQQVQNLHHNNRQLLGEEISNFTVRDLQLLQNQVEMSLHSIRNKKDQLLAEEILKLNEKGSLVQKENSELRKKFNIAHQRNIELHKKXTLEKARQVSKLPEAQRIPENRVHPVIHVCVLTLNXVKKKLKMNSSRPSFLVQ

SEQ ID NO: 1302 - protein, 531 aa, Glycine max
MAGGGAPAKADEPQPHPPKDQLPNISYCITSPPPWPEAILLGFQHFLVMLGTTVLIPTALVPQMGGGNNEKARVIETLLFVAGINTLLQTMFGTRLPAVIGGSYTFVPTTISIILAGRFSDEPDPIEKFKRIMRSIQGALIVASTLQIVLGFSGLWRNVARFLSPLSSVPLVSLVGFGLYELGFPGVAKCVEIGLPQLILLVFVSQYVPHVLHSGKHIFDRFAVLFTIVIVWIYAHLLTVGGAYNDAPHKTQISCRTDRAGLIDSAPWIRIPYPFQWGAPSFDAGEAFAMMMASFVALVESSGAFIAVYRYASATPLPPSILSRGIGWQGVGILLSGLFGTVNGSSVSVENAGLLALTRVGSRRVVQISAGFMIFFSILGKFGAVFASIPPPIIAALYCLFFAYVGAGGLSFLQFCNLNSFRTKFILGFSIFVGLSVPQYFNEYTAINGYGPVHTGARWFNDIINVPFQSKPFVAGVVAYFLDNTLFKREAAIRKDRGKHWWDKYKSFKGDTRSEEFYSLPFNLNKYFPSV

SEQ ID NO: 1303 - protein, 441 aa, Zea mays
  misc_feature (1)..(187): Xaa can be any naturally occurring amino acid
  misc_feature (259)..(441): Xaa can be any naturally occurring amino acid
  unsure (1)..(441): unsure at all Xaa locations
XXXXXXXXXXXXXXXXXXXXXXXXXXXXXXXXXXXXXXXXXXXXXXXXXXXXXXXXXXXXXXXXXXXXXXXXXXXXXXXXXXXXXXXXXXXXXXXXXXXXXXXXXXXXXXXXXXXXXXXXXXXXXXXXXXXXXXXXXXXXXXXXXXXXXXXXXXXXXXXXXXXXXXXXXXXXXXXXXXXXXXXXXXXCTRKLGLELRDEDVDGVDDARDVSQDGEQQADPELNPDAVAEEDADRRQQDGQQDLHERLRPHGPAGACFFXXXXXXXXXXXXXXXXXXXXXXXXXXXXXXXXXXXXXXXXXXXXXXXXXXXXXXXXXXXXXXXXXXXXXXXXXXXXXXXXXXXXXXXXXXXXXXXXXXXXXXXXXXXXXXXXXXXXXXXXXXXXXXXXXXXXXXXXXXXXXXXXXXXXXXXXXXXXXXXXXXXXXXXXXXXXXXXXXXXXXXX

SEQ ID NO: 1304 - protein, 387 aa, Zea mays
  misc_feature (1)..(126): Xaa can be any naturally occurring amino acid
  misc_feature (253)..(387): Xaa can be any naturally occurring amino acid
  unsure (1)..(387): unsure at all Xaa locations
XXXXXXXXXXXXXXXXXXXXXXXXXXXXXXXXXXXXXXXXXXXXXXXXXXXXXXXXXXXXXXXXXXXXXXXXXXXXXXXXXXXXXXXXXXXXXXXXXXXXXXXXXXXXXXXXXXXXXXXXXXXXXXKSRLLQDHGAYSPLRHPPRTPRKPLASPCQWRRRQHDDVHRVHGSGANAVCAPDTGALACGAPRVPVHRPGPPLAVLLLRRRARIRGGAATGPFAPAPQQPRGAPGCAGRDVPAPHVARDPAFLYKXXXXXXXXXXXXXXXXXXXXXXXXXXXXXXXXXXXXXXXXXXXXXXXXXXXXXXXXXXXXXXXXXXXXXXXXXXXXXXXXXXXXXXXXXXXXXXXXXXXXXXXXXXXXXXXXXXXXXXXXXXXXXXXXXXXXXXX

SEQ ID NO: 1305 - protein, 475 aa, Oryza sativa
MAGGFRVLHLVRPFLAFLPEVQSADRKIPFREKVIYTVISLFIFLVCSQLPLYGIHSTTGADPFYWMRVILASNRGTVMELGITPIVTSGMVMQLLVGSKIIEVDNSVREDRALLNGAQKLLGILIAIGEAVAYVLSGMYGSVSQLGTGNAILIILQLFFAGIIVICLDELLQKGYGLGSGISLFIATNICENIIWKAFSPTTINSGRGAEFEGAVIALFHLLITRTDKVRALREAFYRQNLPNVTNLLATVLVFLIVIYFQGFRVVLPVRSKNARGQQGSYPIKLFYTSNMPIILHSALITNLYFISQLLYRRYSGNFLVNLLGKWKESEYSGHSVPVGGLAYYVTAPSSLADVLANPFHALFYVVFMLSACALFSKTWIEVSGSSAKDVAKQLKEQQMVMPGHRESNLQKELNRYIPTAAAFGGVCIGALTVLADFMGAIGSGTGILLAVTIIYQYFETFEKERATELGFFGF

SEQ ID NO: 1306 - protein, 150 aa, Oryza sativa
MSLVRRSNVFDPFSLDLWDPFDSVFRSVVPATSDNDTAAFANARIDWKETPESHVFKADLPGVKKEEVKVEVEEGNVLVISGQRSKEKEDKNDKWHRVERSSGQFMRRFRLPENAKVDQVKAGMENGVLTVTVPKAEVKKPEVKAIEISG

SEQ ID NO: 1307 - protein, 81 aa, Oryza sativa
MEASRKVFSAMLLMVLLLAATGEMGGPVMVAEARTCESQSHRFKGPCARKANCASVCNTEGFPDGYCHGVRRRCMCTKPCP

SEQ ID NO: 1308 - protein, 132 aa, Oryza sativa
MAAETVVLKVGMSCQGCAGAVRRVLTKMEGVETFDIDMEQQKVTVKGNVKPEDVFQTVSKTGKKTSFWEAAEAASDSAAAAAPAPAPATAEAEAEAEAAPPTTTAAEAPAIAAAAAPPAPAAPEAAPAKADA

SEQ ID NO: 1309 - protein, 466 aa, Escherichia coli
MDQKLLTDFRSELLDSRFGAKAISTIAESKRFPLHEMRDDVAFQIINDELYLDGNARQNLATFCQTWDDENVHKLMDLSINKNWIDKEEYPQSAAIDLRCVNMVADLWHAPAPKNGQAVGTNTIGSSEACMLGGMAMKWRWRKRMEAAGKPTDKPNLVCGPVQICWHKFARYWDVELREIPMRPGQLFMDPKRMIEACDENTIGVVPTFGVTYTGNYEFPQPLHDALDKFQADTGIDIDMHIDAASGGFLAPFVAPDIVWDFRLPRVKSISASGHKFGLAPLGCGWVIWRDEEALPQELVFNVDYLGGQIGTFAINFSRPAGQVIAQYYEFLRLGREGYTKVQNASYQVAAYLADEIAKLGPYEFICTGRPDEGIPAVCFKLKDGEDPGYTLYDLSERLRLRGWQVPAFTLGGEATDIVVMRIMCRRGFEMDFAELLLEDYKASLKYLSDHPKLQGIAQQNSFKHT

SEQ ID NO: 1310 - protein, 467 aa, Synechocystis sp. PCC 6803
MVHKKIDLNQLSEAESLLTPTYAARGLANSVSKYEMPETEMLPAIAYNLIHDELGLDGNSRLNLATFVTTWMEPEARQLMADTFDKNMIDKDEYPQTAEIELRCVNILSRLWNAPASAEATGCSTIGSSEAAMLGGMAMKWKWRQRRQAAGKPGDRPNLVMGINVQVCWEKFCRYWEVEPRFVPMEGDRYHISPEEAVKLIDENTIGVIGILGSTFDGSYEPIEALNDALETLNQRTGWQVPLHIDAASGGFIAPFLDPDLRWDFRLPWVKSINTSGHKYGLVYPGVGWIIWRDKEELPEELIFHCNYLGGDLPNFALNFSRPGNQVVAQYYNFLRLGKEGYRKIQQTCRDTALYLSGKIAQLGPFELLTDGGDIPVFAWRLKDEVLANTCYTLYDMADKLRERGWLVPAYRMPKNREDLVVQRIVVKEGFSRDMADLLLADMERAIAYFASQPDHKPKQEGSHFSH

SEQ ID NO: 1311 - protein, 432 aa, Zea mays
MGFGMGNNNNGASSSSSRLDPAAPLLPRHGSSGGREGGGLSSQPKTFANVFIAVVGAGVLGLPYTFSRTGWAAGSLLLFSVAALTFYCMMLLVACRRRLADEHPKIASFGDLGDAVFGAHGRFAVDVMLVLSQFSFCVGYLIFISNTMAHLYPITAAASSSSALLSPKALVIWAMLPFQLGLNSIKTLTLLAPLSIFADVVDLGAMGVVLGQDVAAWLAKPVPVVAFGGAGALLYGLGVSVYAFEGIGMVLPLEAEAANKSKFGVTLGLSMAFIAVMYGLFGVMGYVAFGDATRDIITTNLGAGWLSAAVQLGLCINLFFTMPVMMNPVYEVAERLLHGKRYCWWLRWLLVVVVGLAAMYVPNFTDFLALVGSSVCVLLGFVLPASFHLKVFGAEMEWPGVLSDVLLVVIGLALAVFGTYTSLLQIFQSSSA

SEQ ID NO: 1312 - protein, 473 aa, Zea mays
MAGAAAAAVASGVSARPAAPMRASAGRRARLSVVRAAISLEKGEKAYTVQKSEEIFNAAKELMPGGVNSPVRAFKSVGGQPVVFDSVKGSRMWDVDGNEYIDYVGSWGPAIIGHADDKVNAALIETLKKGTSFGAPCLLENVLAEMVISAVPSIEMVRFVNSGTEACMGALRLVRAFTGREKIIKFEGCYHGHADSFLVKAGSGVATLGLPDSPGVPKGATYETLTAPYNDVEAVKKLFEDNAGEIAAVFLEPVVGNAGFIPPQPGFLNALRDLTKQDGALLVFDEVMTGFRLSYGGAQEYFGITPDVTTLGKIIGGGLPVGAYGGRRDIMEMVAPAGPMYQAGTLSGNPLAMTAGIHTLKRLTEPGTYEYLDKITGELVRGILDVGAKAGHDMCGGHIRGMFGFFFTGGPVHNFGDAKKSDTEKFGRFYRGMLEEGVYFAPSQFEAGFTSLAHTSQDIEKTVEAAEKVLKRI

SEQ ID NO: 1313 - protein, 566 aa, Glycine max
MSCLLPHFNCHLDTFRTHPYALPTHPSKTRLNLCFQPQCVLSATSPSTLLSLEKKLALDAPSDPNTSWPYIAAVAPPSPHLKANFKSTLSAESLLTNEEAVIAAAASEALALAKAAVKVAKDAVLLVKKKPPAEAEYKSHVSSKSDDLLLKWFHQMEAEDGVAEESMGAGAEIMEGVDISPSEEESDLEPSHEELECLQERLSDNIAVRSRRLTERKAKRVRAAEKATTNFASLKPGSSSRRKRVSMQEVDYSDPLRYLRTTTSASRLLTPTEEIKLSAGIQDLLKLEKIQEDLAERFGDQPTFAQWAAVAGVDQKTLRKRLNYGIFCKDKMIKSNIRLVISIAKNYQGSGMNLQDLVQEGCRGLVKGAEKFDGTKGFKFSTYAHWWIKQAVRKSLSDQSRTIRLPFHMVEATYRVKEARKQLYSENGRQPDDEEVAEATGLSMKRLNAVLMTPKAPRSLEQKIGINQNLKPSEVISDPDAETAEEQLLKQFMKKDLEEALDSLNARERQVVRWRFGMDDGRTKTLQEIGEMLGVSRERIRQIESSAFKKLKNKKRTNHLQQYLVS

SEQ ID NO: 1314 - protein, 436 aa, Arabidopsis thaliana
MNSKNRINNVGEDVDIEIPDTAHQISSDSWFQAAFVLTTSINSAYVLGYSGTVMVPLGWIGGVVGLILATAISLYANTLVAKLHEFGGKRHIRYRDLAGFIYGRKAYCLTWVLQYVNFFMINCGFIILAGSALKAVYVLFRDDHAMKLPHFIAIAGLICAVFAIGIPHLSALGIWLAVSTILSLIYIVVAIVLSVKDGVKAPSRDYEIQGSPLSKLFTITGAAATLVFVFNTGMLPEIQATVKQPVVKNMMKALYFQFTVGVLPMFAVVFIGYWAYGSSTSPYLLNNVNGPLWVKALANISAILQSVISLHIFASPTYEYMDTKFGIKGNPLALKNLLFRIMARGGYIAVSTLLSALLPFLGDFMSLTGAVSTFPLTFILANHMYYKAKNNKLSTLQKLWHWLNVVFFSLMSVAAAIAALRLIAIDSKNFHVFADL

SEQ ID NO: 1315 - protein, 400 aa, Streptomyces coelicolor
MVLGIVLAGGEGKRLMPLTADRAKPAVTFGGTYRLVDFVLSNLVNGDILRICVLTQYKSHSLDRHITTTWRMSSLLGNYVTPVPAQQRLGPRWFLGSADAILQSLNLVHDEQPEYVAVFGADHVYRMDPRQMLAQHIESGAGVTVAGIRVPRAESPSFGVITPGSDGQTVTGFLEKPADPPGLADDPGCVFASMGNYVFTTKALVEALHRDAEDPDSVHDMGGSILPQLTDRGEAALYDFSANHVPGETTRDQGYWRDVGTLDAYYDAHMDLIAERPAFNLYNRDWPVYTHSTQLSPARFNAGGIASESIISAGCLIRGQVTRSVLSPGVVVDPGAVVQGSVLHDNVHIGRGAVVRGAVLDKNVQVPPGATIGVNPQRDGELYTVSKGGVIALGKGQRVP

SEQ ID NO: 1316 - protein, 816 aa, Oryza sativa
MGEAAGDRVLSRLHSVRERIGDSLSAHPNELVAVFTRLVNLGKGMLQAHQIIAEYNNAISEADREKLKDGAFEDVLRSAQEGIVISPWVALAIRPRPGVWEYVRVNVSELAVELLTVPEYLQFKEQLVEEGTNNNFVLELDFEPFNASFPRPSLSKSIGNGVQFLNRHLSSKLFHDKESMYPLLNFLRAHNYKGMTMMLNDRIRSLSALQGALRKAEEHLSGLSADTPYSEFHHRFQELGLEKGWGDCAKRSQETIHLLLDLLEAPDPSTLEKFLGTIPMVFNVVIMSPHGYFAQANVLGYPDTGGQVVYILDQVRAMENEMLLRIKQQGLNITPRILIVTRLLPDATGTTCGQRLEKVLGTEHTHILRVPFRTENGIVRKWISRFEVWPYLETFTDDVAHEIAGELQANPDLIIGNYSDGNLVACLLAHKMGVTHCTIAHALEKTKYPNSDLYWKKFEDHYHFSCQFTTDLIAMNHADFIITSTFQEIAGNKDTVGQYESHMAFTMPGLYRVVHGIDVFDPKFNIVSPGADMSIYFPYSESRKRLTSLHPEIEELLYSEVDNNEHKFMLKDRNKPIIFSMARLDRVKNLTGLVELYGRNPRLQELVNLVVVCGDHGNPSKDKEEQAEFKKMFDLIEQYNLNGHIRWISAQMNRVRNGELYRYICDTKGAFVQPAFYEAFGLTVVESMTCGLPTFATAYGGPAEIIVNGVSGFHIDPYQGDKASALLVEFFEKCQEDPSHWTKISQGGLQRIEEKYTWKLYSERLMTLTGVYGFWKYVSNLERRETRRYLEMLYALKYRTMASTVPLAVEGEPSNK

SEQ ID NO: 1317 - protein, 290 aa, Saccharomyces cerevisiae
MEKLLQWSIANSQGDKEAMARAGQPDPKLLQQLFGGGGPDDPTLMKESMAVIMNPEVDLETKLVAFDNFEMLIENLDNANNIENLKLWEPLLDVLVQTKDEELRAAALSIIGTAVQNNLDSQNNFMKYDNGLRSLIEIASDKTKPLDVRTKAFYALSNLIRNHKDISEKFFKLNGLDCIAPVLSDNTAKPKLKMRAIALLTAYLSSVKIDENIISVLRKDGVIESTIECLSDESNLNIIDRVLSFLSHLISSGIKFNEQELHKLNEGYKHIEPLKDRLNEDDYLAVKYVL

SEQ ID NO: 1318 - protein, 523 aa, Saccharomyces cerevisiae
MDPFHNGNKRSSISFGSSQRQPYNKNNYLSGTNGPSSAAQDQGRGPSPFGMSGNTTNGGNSKRNSGCDLSATYYASRSPMYSPLDFSPPVFSPNHSQLQQARGYAANIPVVSNLMNPSMASVCEYQSHYPLFGLDWSADDYVCLGSYKEDSRNKLQVLHSNDLLSWESVVDADVVYPVSKIQWVPSQLYPRKLATCSDSLRIWSVSPEERQFQEQINLSLCKYNRQHPANPAAADDMKVIGTFPPITSFDWNTVDTNLIISSSIDTTCIVWDLQSSHYVKTQLIAHDSEVFDVRFLTKSTQLFASCGGDGSVRVFDLRSLAHSTIIYEPPSSSVSGATAGTITPSSKGSDALLRLEPSPYDPNVLATFAADSNKIIILDMRNPESPILNLQGHGSSVNGIKWHPTKRNVLLSCGDDCQVLYWDLNSSFMEINAAGSKSPSIHGTSLEDPDGDTEMTDGGAGSGLNEDPLSLNNNSKQVCKTLETPNMMYANKTQEINNIAWRPQRGDWFGCVSGKKFQNVRVL

SEQ ID NO: 1319 - protein, 221 aa, Saccharomyces cerevisiae
MSATESSSIFTLSHNSNLQDILAANAKWASQMNNIQPTLFPDHNAKGQSPHTLFIGCSDSRYNENCLGVLPGEVFTWKNVANICHSEDLTLKATLEFAIICLKVNKVIICGHTDCGGIKTCLTNQREALPKVNCSHLYKYLDDIDTMYHEESQNLIHLKTQREKSHYLSHCNVKRQFNRIIENPTVQTAVQNGELQVYGLLYNVEDGLLQTVSTYTKVTPK

SEQ ID NO: 1320 - protein, 350 aa, Saccharomyces cerevisiae
MVVNNPNNWHWVDKNCIGWAKEYFKQKLVGVEAGSVKDKKYAKIKSVSSIEGDCEVNQRKGKVISLFDLKITVLIEGHVDSKDGSALPFEGSINVPEVAFDSEASSYQFDISIFKETSELSEAKPLIRSELLPKLRQIFQQFGKDLLATHGNDIQVPESQVKSNYTRGNQKSSFTEIKDSASKPKKNALPSSTSTSAPVSSTNKVPQNGSGNSTSIYLEPTFNVPSSELYETFLDKQRILAWTRSAQFFNSGPKLETKEKFELFGGNVISELVSCEKDKKLVFHWKLKDWSAPFNSTIEMTFHESQEFHETKLQVKWTGIPVGEEDRVRANFEEYYVRSIKLTFGFGAVL

SEQ ID NO: 1321 - protein, 308 aa, Arabidopsis thaliana
MAPGGSALKEVMESNSTGMDYEVKTAKVEVNNNKPTKPGSAGIGKYGIHSNNGVYELLECPVCTNLMYPPIHQCPNGHTLCSNCKLRVQNTCPTCRYELGNIRCLALEKVAESLEVPCRYQNLGCHDIFPYYSKLKHEQHCRFRPYTCPYAGSECSVTGDIPTLVVHLKDDHKVDMHDGCTFNHRYVKSNPHEVENATWMLTVFNCFGRQFCLHFEAFQLGMAPVYMAFLRFMGDENEAKKFSYSLEVGAHGRKLTWQGIPRSIRDSHRKVRDSQDGLIIPRNLALYFSGGDRQELKLRVTGRIWKEE

SEQ ID NO: 1322 - protein, 229 aa, Glycine max
METNNQQQQQQGAQAQSGPYPVAGAGGSAGAGAGAPPPFQHLLQQQQQQLQMFWSYQRQEIEHVNDFKNHQLPLARIKKIMKADEDVRMISAEAPILFAKACELFILELTIRSWLHAEENKRRTLQKNDIAAAITRTDIFDFLVDIVPRDEIKDDAALVGATASGVPYYYPPIGQPAGMMIGRPAVDPATGVYVQPPSQAWQSVWQSAAEDASYGTGGAGAQRSLDGQS

SEQ ID NO: 1323 - protein, 120 aa, Oryza sativa
MARSSFKLEHPLERRQAEANRIREKYPDRIPVIVEKAERSDIPDIDKKKYLVPADLTVGQFVYVVRKRIKLSAEKAIFIFVKNTLPPTAALMSAIYEENKDEDGFLYMTYSGENTFGLFV

SEQ ID NO: 1324 - protein, 188 aa, Glycine max
MGMATITMGGNHNSSITPRHYNTHKVFLFCNYILLGAASSCIFLTLSLRLIPSLCGFFFILLQVFTIAGAVSGCAAVGTNRWYSAHMVATVLTAIFQGSVSVLVFTRTGDFLGQLKSYVREEDGAVILKLAGGLTILIFCLEWVVLTLAFFLKYYACVEGNSGAVVPVRSGKVQQDEDLKDWPWPFQV

SEQ ID NO: 1325 - protein, 427 aa, Glycine max
MSLSVPKLARPLPLHHHSSYGSLTMSFHTFTPFLGSTHKLRFISPIKLNAPRFNSSVVSVSDLFKNNKPKSTTNLLITKEEGLQLYEDMVLGRSFEDMCAQMYYRGKMFGFVHLYNGQEAVSTGFINFLKKEDCVVSTYRDHVHALSKGVPARAVMSELFGKATGCSRGQGGSMHMFSKEHNLIGGFAFIAEGIPVATGAAFSSKYRREVLKEADCDHVTLAFFGDGTCNNGQFYECLNMAALWKLPIVFVVENNLWAIGMSHLRATSDPQIWKKGPAFGMPGVHVDGMDVLKVREVAKEAIERARRGEGPTLVECETYRFRGHSLADPDELRDPAEKAHYAGRDPISALKKYMIENKLASEQELKTIDKKIEEVVEDAVEFADESPHPPRSQLLENVFADPKGFGIGPDGKYRCEDPKFTEGTAHV

SEQ ID NO: 1326 - protein, 634 aa, Zea mays
MDGCDCIEPLWPTDDLLVKYQYISDFFIALAYFSIPLELIYFVKKSSFFPYRWVLIQFGAFIVLCGATHLINLWTFTTHTKTVAMVMTIAKVSTAVVSCATALMLVHIIPDLLSVKTRELFLKNKAEELDREMGLIRTQEETGRHVRMLTHEIRSTLDRHMILKTTLVELGRTLGLEECALWMPSRSGSSLQLSHTLHHQITVGSSVPINLPVINQVFSSNRAIIIPHTSPLARIRPLTGRYVPPEVAAVRVPLLHLSNFQINDWPELSAKSFAIMVLMLPSDSARKWHVHELELVEVVADQVAVALSHAAILEESMRARDLLMEQNVALDLARREAEMAIRARNDFLAVMNHEMRTPMNAIIALSSLLLETELTPEQRLMVETVLKSSNLLATLINDVLDLSKLEDGSLELEIKAFNLHAVFKEVMGFIKPIASIKRLSVSVMLAPDLPLCAIGDEKRLMQTILNISGNAVKFTKEGHITLVASIVKADSLREFRTPEFHPTASDDHFYLKVQVKDTGCGIGPQDLPHVFTKFAHPQSGGNRGFNGSGLGLAICKRFVSLMGGHIWIDSEGTGRGCTATFVVKLGVCDNTNTYQQQLIPLVWPSSADSDLRAPKPLPDGRGSTPLKSRYQRSV

SEQ ID NO: 1327 - protein, 429 aa, Zea mays
MTGTVSKLAAPRPAAPPLRPASLRTAALAFAPSARRVRVSVAGRARSPIIAMASAKEGNGAPTKRTALHDLYELQGLSPWYDNLCRPVTDLLPIIASGVRGVTSNPTIFQKAISSSSAYDDQFKQLISAGKDAESAYWELVIKDIQDACKLFEPIYDETDGADGYVSVEVSPRLANDTQGTVEAAKWLHKVVNRPNVYIKIPATAECVPSIQEVIANGISVNVTLIFSIARYEAVIDAYLDGLEASGLSDLSRVTSVASFFVSRVDTLIDKMLDKIGTPEALALRGKAAVAQAKLANRLYQKKFSGPRWEALAKKGAKKQRLLWASTGVKNPAYPDTLYVDSLIGPDTVNTMPDQALQAFIDHGTVSRTVDANVSEAEGVYSALEKLGIDWEEVGKQLELEGVDSFKKSFDSLLVSLQEKGNSLKMASV

SEQ ID NO: 1328 - protein, 83 aa, Zea mays
MESASKKVAAGVLALLLLQLMVAPTTARLLQQADTSPVLGLDIMAREFGHPDGAIPCGESCVFIPCATSVFGCRCENKVCVHD

SEQ ID NO: 1329 - protein, 518 aa, Glycine max
MPAVNSKVYYFPQGHAEHACGPVNFRTCPKVPPFVPCRVTAVKYRADPETDEVYAKLKLIPLNANDVDYDRDVVGGAETQDKPASFAKTLTQSDANNGGGFSVPRYCAETIFPRLDYSVDPPVQNILAKDVHGETWKFRHIYRGTPRRHLLTTGWSTFVNHKKLVAGDSIVFLRAENGDLCVGIRRAKKGICGGLETSSGWNPAGGNCHIPYGGFSPFFREDDNRISRNGNSNGLNPSVSMMGKGKVRPEAVSEASNLAANKKPFEVVYYPRASTPEFCVKASLVEAALQIRWCSGIRFKMAFETEDSSRISWFMGTISSAQVADPLNWPNSPWRLLQVTWDEPDLLQNVRRVSPWLVELVSNMPAIHFSPFSPPRKKLRLPQQPDFPLDGQIPLSTFPSNLLGPSNTNQFGCLLESTPAGMQGARHAHYGLSLSDLHLSKLQSGLFSTGFPSLDHAATPMRVSNSITLQKPNLSENVSCLLTMANSTQSSKKLDVGKTPSLVLFGQKILTEQQISPK

SEQ ID NO: 1330 - protein, 403 aa, Oryza sativa
MSFRSLIQEMRDEFGSISRHSLRSRSHRGGGGAPRVAAVGPAEAAAMQQSCWAQLPPELLREVLVRIEESEVWWPSRRDVVACAGVCRSWRGITKEIVRVPEASGKLTFPISLKQPGPRDGTLKCFIRRNRTTQTYYLYIGLTEALADDGKFLLAARKCRKPTCTDYLISLDMSDMSKGSNTYIGKLRSNFLGTKFTVYDAHPPYDGAVVSKSRSARVVGLNQVSPRVPAGNYPVSHISYELNVLGARGPRRMNCIMDSIPTSAVQEGGKAPTQTEFPLSGLDSFPSISFFRSKSARIDSATSQLSTQKEEKLVLKNKSPRWHEQLQCWCLNFRGRVTVASVKNFQLVASDENGPTNQEQDKVILQFGKIGKDLFTMDYRYPISAFQSFAICLSSFDTKIACE

SEQ ID NO: 1331 - protein, 141 aa, Oryza sativa
MEDDKSKEGKSSSSYRGVRKRPWGKFAAEIRDPERGGARVWLGTFDTAEEAARAYDRAAFAMKGATAMLNFPGDHHHGAASRMTSTGSSSSSFTTPPPANSSAAAGRGGSDRTTDKVELECLDDKVLEDLLAETNYRDKNY

SEQ ID NO: 1332 - protein, 511 aa, Glycine max
MEAPSPTKPNDPTKPSNTSTTLSLEAGPAQASPLRKMFAVASIAAGIQFGWALQLSLLTPYVQLLGVPHAAASFIWLCGPISGLVVQPIVGYYSDHCTSRFGRRRPFILGGALAVAVAVFLIGYAADIGYAAGDDISKTTRPRAVGVFVIGFWILDVANNMLQGPCRAFLADLAAGDQRKTRIANGFFSFFMAVGNVLGYAAGSYKGLHKMFPFTETKACDVFCANLKSCFFFSILLLLFLATVALLYVKDKQVEARALDDATQPSCFFQLFGALKELKRPMWMLMLVTAVNWVGWFPYFLFDTDWMGREVYGGQVGEDAYANGVRVGSLGLMVNAVVLGFMSLAVEPLGKMVGGVKRLWAIVNFILAIGFGMTVVITKVAEHQRKMNPAAVGHPSEGVVVGSMVFFGVLGVPLAITFSVPFALASIYCSASGAGQGLSLGVLNLAIVVPQMVVSTLSGPWDALFGGGNLPAFMVGAAAAALSAIMAIVLLPTPKPADEAKASSMMAGGFH

SEQ ID NO: 1333 - protein, 511 aa, Glycine max; identical to SEQ ID NO: 1332

SEQ ID NO: 1334 - protein, 663 aa, Synechocystis sp. PCC 6803
MGTSVSNPTAILQTMQGFLRKWWSEFNLQTRLMAAATLVVSLLMSGLTFWAVNTIQEDAQLVDTRFGRDVGLLLAANVAPMIADKNLTEVARFSSRFYENTSNIRYMIYADPSGKIFFGIPYSEETVQNSLTLERRIELPQIDPHNFDQPFVRQHHTPNGDVTDVFIPLQYQGKFLGVLAIGINPNPAAVNSSNLTRDVTIAVFISIWVMVILGAVFNALTITQPIKELLLGVKNIAAGNFKQRITLPFGGELGELIVNFNEMAERLERYEAQNIEELTAEKAKLDTLVSTIADGAMLVDTNLQLLLVNPTARRLFAWENKPIIGENLLENLPPEITAQLTQPLRELAADQGSLLFSPGHGPQEEEQDKTYAPEEFRISLTQPFPRTIRLMLTQVLDQNRENLRGIVMTVQDITREVELNEAKSQFISNVSHELRTPLFNIKSFIETLSEFGEDLSEVERKEFLETANHETDRLSRLVNDVLDLSKLESSKIYQLDAVDLYQLIEQSLRSYQLNAKDKQLQLEKILDPDLPFALGNYDLLLQVMTNLIGNSFKFTKAGGKIIVRAYPLHRSNLRAEDGPGLVRVEISDTGIGIDPEDQAAIFERFYRVENRVHTLEGTGLGLSIVKNIIAKHQSQIHLVSEVGVGTTFWFDLAVYQSMLMVVG

SEQ ID NO: 1335 - protein, 112 aa, Zea mays
AVAVVTMMKKKISMPAHLMFDGQDDKLFEHFSMVAQRLGVYTARDYADILEFLVDRWKVADLTGLSGEGNKAQDYLCTLASRIRRLDERAQSRAKKAGTLPFSWVYGREVQL

SEQ ID NO: 1336 - protein, 54 aa, Zea mays
MEKAQNEVAKARRKAEEKRASAEAKRGTKVARVLELANFMRAVGRAPSTKRSFF

SEQ ID NO: 1337 - protein, 103 aa, Zea mays
EYRWVLLHQQNYKPHQQKDQLAEAERPSRRDRPVGARRSRRVVAGSRAGAEHDHDPVALARDPGAGELAVVEEPVVLRLGVVGEDDGGGEARHARRHGNDSDC

SEQ ID NO: 1338 - protein, 136 aa, Zea mays
AVAVVTMQRVMQNNAAVFRTQETLEEGCELISKTWESFHDVKLSDQSLIWNSDLIETLELENLLINACITMYSAEARKESRGAHAREDFTTRDDEKWMKHSLGYWENEKVRLAYRPVHMNTLDDEVESFPPKARVY

SEQ ID NO: 1339 - protein, 256 aa, Arabidopsis thaliana
MEGITHPIPRTVEEVFSDFRGRRAGLIKALTNDMVKFYQTCDPEKENLCLYGLPNETWEVNLPVEEVPPELPEPALGINFARDGMQEKDWVSLVAVHSDSWLLSVAFYFGARFGFGKNERKRLFQMINELPTIFEVVSGNAKQSKDLSVNNNNSKSKPSGVKSRQSESLSKVAKMSSPPPKEEEEEEDESEDESEDDEQGAVCGACGDNYGTDEFWICCDACEKWFHGKCVKITPAKAEHIKHYKCPTCSNKRARP

SEQ ID NO: 1340 - protein, 428 aa, synthetic construct
MASMISSSAVTTVSRASRGQSAAVAPFGGLKSMTGFPVKKVNTDITSITSNGGRVKCMPGRLLRSRTYRNWRSAEELISEIKRESEIGRLPKSVAYAMEGLFHYYRNAVLSSGISHADEIVLSNMSVMLDFVLLDIEDPFVFPPFHKAIREPADYYSFGQDYIRPLVDFGNSYVGNIAIFQEMEEKLKQGDNIILMSNHQSEADPAVIALLLEKTNSLIAENLIYIAGDRVITDPLCKPFSMGRNLLCVYSKKHMYDDPELVDLKKRANTRSLKELVLLLRGGSKIIWIAPSGGRHRPHAVTGEWYPAPFDASSVDNMRRLIQHSDVPGHLFPLALLCHDIMPPPSQVEIEIGEKRVIAFNGAGLSVAPEISFEEIAATHKNPEEVREAYSKALFDSVAMQYNVLKTAISGKQGLGASTADVSLSQPW

SEQ ID NO: 1341 - protein, 160 aa, Arabidopsis thaliana
MACSDSTNTSTVQEINAAYYQQESAKLRQQIQTIQNSNRNLMGDSLSSLSVKELKQVENRLEKAISRIRSKKHELLLVEIENAQKREIELDNENIYLRTKVAEVERYQQHHHQMVSGSEINAIEALASRNYFAHSIMTAGSGSGNGGSYSDPDKKILHHG

SEQ ID NO: 1342 - protein, 650 aa, Nostoc sp. PCC 7120
MLALLKTIREAIANWWSEFTLQTKLLAAATLVVSLVMSGLTFWAVNTIQQDAQVNDTRFGRDLGLLLAANVAPLVADHNLTEVAQFSQRFYSSTSSVRYMLYADETGKIFFGIPFWEPEVENSLSIERRIQLPEEYPGDGEKPMVRQHMSPDGIVTDVFIPLIVDKKYLGVLAIGINPNQTAVISTNFTRDVTIAVFITIWVMVILAGVVNALTITKPIKELLVGVKQIAAGNFKQRIDLPLGGELGELILNFNEMAERLERYEEQNIEELTAEKAKLETLVSTIADGAVLIDNNMQVILVNPTARHIFGWEGADDVVGSNVLHHLPPAVQMEITRPLYEMAAGECDSAEFRLTLNQPSNRTIRILLTTVLNLQRESIKGIAITVQDITREVELNEAKSQLISNVSHELRTPLFNIKSFIETLHDYGEDLSLEERQEFLQTVNHETDRLTRLVNDVLDLSKLESGRSYSFDGVDLAQAIEQTLRTYQLNARDKGIELIQDVAPGLPLVLGNYDLLLQVLANLVGNALKFTTSGGKIAIRTYVLNTKSNSPNQPAQVRIEVSDTGIGIAQEDQQAIFDRFFRVENRVHTLEGTGLGLSIVRNIVERHRSRVNLVSEVGVGTTFWFDLILFEDEAPKKMVESGEEKAAMPTS

SEQ ID NO: 1343 - protein, 402 aa, Synechocystis sp. PCC 6803
MTAPTPSSHSVPIQEFTASRQASFFDGLKQPRFSGQLILSSATGEKWSFYLYMGRIMYATGGIHSVRRWRRQIASYLPPIAANLASVQTDLASIDPQDLQICWEYQLLCHWVAQQKVTREQAARLIRATVVEVLFDITQSMEVACDLRQDNLLSTRLVLIDADQMIAESQQLWSKWQGAKIADRSPNAAPIIRQAEQLQQRTTPQVYQTLKQLLDGNQSLRDLSVRMKRDVLSVTTSLLPYLQLGLVELIKIPDLPPPIAPPVRGVVAQPDVPSGPLIACVDDSPLICQTMEKILTTANYRFVGINDPLRAIAILLARKPDLIFLDLVMPNANGYEICGQLRKLSIFKSTPIVILTGNDGIVDRVRAKMVGSTDFLSKPVNPDMVLQTIKKHLHDQASLPAE

SEQ ID NO: 1344 - protein, 322 aa, Saccharomyces cerevisiae
MKPTQDSQEKVSIEQQLAVESIRKFLNSKTSYDVLPVSYRLIVLDTSLLVKKSLNVLLQNSIVSAPLWDSKTSRFAGLLTTTDFINVIQYYFSNPDKFELVDKLQLDGLKDIERALGVDQLDTASIHPSRPLFEACLKMLESRSGRIPLIDQDEETHREIVVSVLTQYRILKFVALNCRETHFLKIPIGDLNIITQDNMKSCQMTTPVIDVIQMLTQGRVSSVPIIDENGYLINVYEAYDVLGLIKGGIYNDLSLSVGEALMRRSDDFEGVYTCTKNDKLSTIMDNIRKARVHRFFVVDDVGRLVGVLTLSDILKYILLGSN

SEQ ID NO: 1345 - protein, 415 aa, Saccharomyces cerevisiae
MGTTTSHPAQKKQTTKKCRAPIMSDVREKPSNAQGCEPQEMDAVSKKVTELSLNKCSDSQDAGQPSREGSITKKKSTLLLRDEDEPTMPKLSVMETAVDTDSGSSSTSDDEEGDIIAQTTEPKQDASPDDDRSGHSSPREEGQQQIRAKEASGGPSEIKSSLMVPVEIRWQQGGSKVYVTGSFTKWRKMIGLIPDSDNNGSFHVKLRLLPGTHRFRFIVDNELRVSDFLPTATDQMGNFVNYIEVRQPEKNPTNEKIRSKEADSMRPPTSDRSSIALQIGKDPDDFGDGYTRFHEDLSPRPPLEYTTDIPAVFTDPSVMERYYYTLDRQQSNTDTSWLTPPQLPPQLENVILNKYYATQDQFNENNSGALPIPNHVVLNHLVTSSIKHNTLCVASIVRYKQKYVTQILYTPIESS

SEQ ID NO: 1346 - protein, 174 aa, Arabidopsis thaliana
MAQPQTDVFSLHNYLNSSILQSPYPSNFPISTPFPTNGQNPYLLYGFQSPTDNPQSMSLSSNNSTSDEAEEQQTNNNIINERKQRRMISNRESARRSRMRKQRHLDELWSQVMWLRIENHQLLDKLNNLSESHDKVLQENAQLKEETFELKQVISDMQIQSPFSCFRDDIIPIE

SEQ ID NO: 1347 - protein, 324 aa, Arabidopsis thaliana
MDNIMQSSMPPGFRFHPTEEELVGYYLDRKINSMKSALDVIVEIDLYKMEPWDIQARCKLGYEEQNEWYFFSHKDRKYPTGTRTNRATAAGFWKATGRDKAVLSKNSVIGMRKTLVYYKGRAPNGRKSDWIMHEYRLQNSELAPVQEEGWVVCRAFRKPIPNQRPLGYEPWQNQLYHVESSNNYSSSVTMNTSHHIGASSSSHNLNQMLMSNNHYNPNNTSSSMHQYGNIELPQLDSPSLSPSLGTNKDQNESFEQEEEKSFNCVDWRTLDTLLETQVIHPHNPNILMFETQSYNPAPSFPSMHQSYNEVEANIHHSLGCFPDS

SEQ ID NO: 1348 - protein, 269 aa, Arabidopsis thaliana
MAHYPNNRTEFVGAPAPTRYQKEQLSPEQELSVIVSALQHVISGENETAPCQGFSSDSTVISAGMPRLDSDTCQVCRIEGCLGCNYFFAPNQRIEKNHQQEEEITSSSNRRRESSPVAKKAEGGGKIRKRKNKKNGYRGVRQRPWGKFAAEIRDPKRATRVWLGTFETAEDAARAYDRAAIGFRGPRAKLNFPFVDYTSSVSSPVAADDIGAKASASASVSATDSVEAEQWNGGGGDCNMEEWMNMMMMMDFGNGDSSDSGNTIADMFQ

SEQ ID NO: 1349 - protein, 313 aa, Arabidopsis thaliana
MAKRSRGSSDSLSGFLPIRHSTTDKQISPRPTTTGFLYSGAGDYSQMFDALEDDGSLEDLGGVGHASSTAAEKKRRLGVEQVKALEKNFEIDNKLEPERKVKLAQELGLQPRQVAIWFQNRRARWKTKQLERDYGVLKSNFDALKRNRDSLQRDNDSLLGQIKELKAKLNVEGVKGIEENGALKAVEANQSVMANNEVLELSHRSPSPPPHIPTDAPTSELAFEMFSIFPRTENFRDDPADSSDSSAVLNEEYSPNTVEAAGAVAATTVEMSTVGCFSQFVKMEEHEDLFSGEEACKLFADNEQWYCSDQWNS

SEQ ID NO: 1350 - protein, 270 aa, Arabidopsis thaliana
MALEAMNTPTSSFTRIETKEDLMNDAVFIEPWLKRKRSKRQRSHSPSSSSSSPPRSRPKSQNQDLTEEEYLALCLLMLAKDQPSQTRFHQQSQSLTPPPESKNLPYKCNVCEKAFPSYQALGGHKASHRIKPPTVISTTADDSTAPTISIVAGEKHPIAASGKIHECSICHKVFPTGQALGGHKRCHYEGNLGGGGGGGSKSISHSGSVSSTVSEERSHRGFIDLNLPALPELSLHHNPIVDEEILSPLTGKKPLLLTDHDQVIKKEDYL

SEQ ID NO: 1351 - protein, 262 aa, Arabidopsis thaliana
MGSIRGNIEEPISQSLTRQNSLYSLKLHEVQTHLGSSGKPLGSMNLDELLKTVLPPAEEGLVRQGSLTLPRDLSKKTVDEVWRDIQQDKNGNGTSTTTTHKQPTLGEITLEDLLLRAGVVTETVVPQENVVNIASNGQWVEYHHQPQQQQGFMTYPVCEMQDMVMMGGLSDTPQAPGRKRVAGEIVEKTVERRQKRMIKNRESAARSRARKQAYTHELEIKVSRLEEENEKLRRLKEVEKILPSEPPPDPKWKLRRTNSASL

SEQ ID NO: 1352 - protein, 507 aa, Saccharomyces cerevisiae
MTMTHQQDLKGVFTAKDLDFKPAGKITKKDLNTGVTKAEYAVRGAIPTRADELKEELKKNPEVLPFDDIINANIGNPQQLDQKPLTFTRQVLAILEYPEILRVGHNELASLNLFSRDALERAERLLNDIGGSIGAYSHSQGVPGIRQTVADFITRRDGGEPATPEDIYLTTGASSAATSLLSLLCKDSQTGLLIPIPQYPLYTASASLFNAQVLPYYLDEESNWSTNSDEIEKVVQDALKKQIRPSVLIVINPGNPTGAVLSEETIARICLIAAKYGITIISDEVYQENIFNDVKFHSMKKVLRKLQHLYPGKFDNVQLASLHSISKGFMDECGQRGGYMEIIGFSQEIRDALFKLMSISICSVVTGQAVVDLMVKPPQPGDESYEQDHDERLKIFHEMRTRANLLYETFKELEGIECQKPQGAMYLFPRLVLPKKALCESERLGIEPDEFYCTSLLESTGICTVPGSGFGQRPGTYHVRTTFLAPGTKWIQDWKEFHQDFFSKYRN

SEQ ID NO: 1353 - protein, 395 aa, Saccharomyces cerevisiae
MLRTQAARLICNSRVITAKRTFALATRAAAYSRPAARFVKPMITTRGLKQINFGGTVETVYERADWPREKLLDYFKNDTFALIGYGSQGYGQGLNLRDNGLNVIIGVRKDGASWKAAIEDGWVPGKNLFTVEDAIKRGSYVMNLLSDAAQSETWPAIKPLLTKGKTLYFSHGFSPVFKDLTHVEPPKDLDVILVAPKGSGRTVRSLFKEGRGINSSYAVWNDVTGKAHEKAQALAVAIGSGYVYQTTFEREVNSDLYGERGCLMGGIHGMFLAQYDVLRENGHSPSEAFNETVEEATQSLYPLIGKYGMDYMYDACSTTARRGALDWYPIFKNALKPVFQDLYESTKNGTETKRSLEFNSQPDYREKLEKELDTIRNMEIWKVGKEVRKLRPENQ

SEQ ID NO: 1354 - protein, 129 aa, Zea mays
MHGRWLQTVNIKVKMDCEGCERRVKSAVKSMRGVTSVTVNAKQSKCTVTGYVEPAKVLERVKATGKNAEMWPYVPYTLTTYPYVGGAYDKKAPAGFVRSAPQAMADPSAPEVKYMSMFSDENVNACTIM

SEQ ID NO: 1355 - protein, 87 aa, Zea mays
MASRWVRPEVYPLFAAMGVAVGICGFQLFRNITGNPEVRVNKAGRAAGVLENHEEGRRYAMHGLRSFVHDKTPEIMPAINKFFTDPK

SEQ ID NO: 1356 - protein, 445 aa, Arabidopsis thaliana
MKGASGAVKKKPQVLNEAGEADTAVETVGESRKISGDGGFGSDDGGGGGGGGSGESILREIGDDRPTEDGDEEEEEDEDEDDGGDEEDEEGEGEGGQEERPKLDEGFYEIEAIRRKRVRKGKVQYLIKWRGWPETANTWEPLENLQSIADVIDAFEGSLKPGKPGRKRKRKYAGPHSQMKKKQRLTSTSHDATEKSDSSTSLNNSSLPDIPDPLDLSGSSLLNRDVEAKNAYVSNQVEANSGSVGMARQVRLIDNEKEYDPTLNELRGPVNNSNGAGCSQGGGIGSEGDNVRPNGLLKVYPKELDKNSRFIGAKRRKSGSVKRFKQDGSTSNNHTAPTDQNLTPDLTTLDSFGRIARMGNEYPGVMENCNLSQKTKIEELDITKILKPMSFTASVSDNVQEVLVTFLALRSDGKEALVDNRFLKAHNPHLLIEFYEQHLKYNRTP

SEQ ID NO: 1357 - protein, 240 aa, Synechocystis sp. PCC 6803
MSVNLASQLREGTKKSHSMAENVGFVKCFLKGVVEKNSYRKLVGNLYFVYSAMEEEMAKFKDHPILSHIYFPELNRKQSLEQDLQFYYGSNWRQEVKISAAGQAYVDRVRQVAATAPELLVAHSYTRYLGDLSGGQILKKIAQNAMNLHDGGTAFYEFADIDDEKAFKNTYRQAMNDLPIDQATAERIVDEANDAFAMNMKMFNELEGNLIKAIGIMVFNSLTRRRSQGSTEVGLATSEG

SEQ ID NO: 1358 - protein, 237 aa, Nostoc sp. PCC 7120
MSSNLAVKLRAGTQKAHTAAENVGFMKCFLKGVVDRESFAKFLSNLYFVYSELEAAIQSHANNPAIAPIYFPELNRLASLEKDMVFYYGSEWRSLIAPSASAQAYIKHIRELSATAPALLIGHTYTRYMGDLSGGQMLQKIAQSTLKLSGYEGTSFYNFEQIPDKKAFKDQYRQALDSVPVDDATADRIVAEANSAFQFNMQMATDLEGNLIKALGQVVFNSLTSTLNPGSTEAAAS

SEQ ID NO: 1359 - protein, 281 aa, Oryza sativa
MYTGIQTRRIPVHVLPLPMSPPLELDYIGLSPPPPPPSSSSAAAARADDVDLKGTELRLGLPGSESPDRRPAAIAAAAATATTLELLPAKGAKRVFPDEAALTPPTAAAGKGKAAREGEEVGAEEEDKKVAAPPQPAAKAQVVGWPPIRSYRKNTMATNQIKSNKEDVDAKQGQGFLYVKVSMDGAPYLRKVDLKTYKNYKDMSLGLEKMFIGFSTGKEGAENQKDGEYVLTYEDKDGDWMLVGDVPWEMFTDSCRRLRIMKGSDAIGLAPRAGEKSKNRN

SEQ ID NO: 1360 - protein, 323 aa, Arabidopsis thaliana
MTMALASSKAFSSIFNTLSPINQSKFVLACSGSNHVDVIDRRRRIMIFGSSLALTSSLLGSNQQRLPMESAIALEQFKEKEEELEEEEERNVNLFQKTSPSVVYIEAIELPKTSSGDILTDEENGKIEGTGSGFVWDKLGHIVTNYHVIAKLATDQFGLQRCKVSLVDAKGTRFSKEGKIVGLDPDNDLAVLKIETEGRELNPVVLGTSNDLRVGQSCFAIGNPYGYENTLTIGVVSGLGREIPSPNGKSISEAIQTDADINSGNSGGPLLDSYGHTIGVNTATFTRKGSGMSSGVNFAIPIDTVVRTVPYLIVYGTAYRDRF

SEQ ID NO: 1361 - protein, 124 aa, Arabidopsis thaliana
MQMLRNLSTRTRSRRGGYERVSDDSTFSLLGAKLRRSTSVPYYAPSIRLGGDFPVILEKLPRQKPTKTVVTSKLSHPIFSLFDGYRRHNKKKATAKPEFSRYHEYLKESGMWDLRSNSPVIYFK

SEQ ID NO: 1362 - protein, 162 aa, Arabidopsis thaliana
MGQVFNKLRGKEWRHKQVQAICDRVFDRFKMQTGRANLTFEELYIAVLLVYNDINKRLPGPHFDPPSKDLVNSIMTDCDINLDGELDREEFVKFIEQITAETFNVVSQGLIIALIVAPTVAIATKKATEGVPGVGKVVQKLPTSIYASLVTLAVMWVNSDSS

SEQ ID NO: 1363 - protein, 173 aa, Arabidopsis thaliana
MANQGAKKRKEENAKHMAKLRRIIIASNAVYFVVRMLIFYSSFTWKHWIGLVITSLAYAFPYKQLDQMAKPSVTDDGELIDGGFDMTTGGICGYLHDVIYITCFVQLASIITGKFWYTYLVIPAFGVYKASGLIRGFMSQGSEGGVEDEKSRKKREKMERKASRGQVVKTRTR

SEQ ID NO: 1364 - protein, 563 aa, Saccharomyces cerevisiae
MRLRTAIATLCLTAFTSATSNNSYIATDQTQNAFNDTHFCKVDRNDHVSPSCNVTFNELNAINENIRDDLSALLKSDFFKYFRLDLYKQCSFWDANDGLCLNRACSVDVVEDWDTLPEYWQPEILGSFNNDTMKEADDSDDECKFLDQLCQTSKKPVDIEDTINYCDVNDFNGKNAVLIDLTANPERFTGYGGKQAGQIWSTIYQDNCFTIGETGESLAKDAFYRLVSGFHASIGTHLSKEYLNTKTGKWEPNLDLFMARIGNFPDRVTNMYFNYAVVAKALWKIQPYLPEFSFCDLVNKEIKNKMDNVISQLDTKIFNEDLVFANDLSLTLKDEFRSRFKNVTKIMDCVQCDRCRLWGKIQTTGYATALKILFEINDADEFTKQHIVGKLTKYELIALLQTFGRLSESIESVNMFEKMYGKRLNGSENRLSSFFQNNFFNILKEAGKSIRYTIENINSTKEGKKKTNNSQSHVFDDLKMPKAEIVPRPSNGTVNKWKKAWNTEVNNVLEAFRFIYRSYLDLPRNIWELSLMKVYKFWNKFIGVADYVSEETREPISYKLDIQ

SEQ ID NO: 1365 - protein, 182 aa, Arabidopsis thaliana
MGVEKMVCLASRTGRQFQRYNKGRRQVVGCVPYRFKLSNDGKISDEVEVLVISSQKGHALMFPKGGWELDESVEEAASRECLEEAGVLGNVEHQLGKWDFLSKSRGTYYEGLMFPMLVTEQLELWPEQHVRQRIWMNVTEAREACRDWWMKEALDVLVERLSSPMNQPKEEKTMSISIETMC

SEQ ID NO: 1366 - protein, 77 aa, Arabidopsis thaliana
MAKAMELWVGEMKKMSEKINTRNPLMQRKNSTSVVSKQQQGSEEERGLINQKIREKNEAVTMSELTVCLLMDRFVPW

SEQ ID NO: 1367 - protein, 938 aa, Oryza sativa
MTTNTKRAYKLQEFVAHSSNVNCLKIGRKTSRVLVTGGDDHKVNLWAIGKPNSILSLSGHTSAVESVNFDSTEVFVAAGAASGTIKLWDLEEAKIVRTLTGHRSNCMSVDFHPFGEFFASGSLDTNLKIWDIRRKGCIHTYKGHTRGVNAIRFTPDGRWVVSGGEDNVVKLWDLTAGKLLHDFKCHEGQIQCIDFHPHEFLLATGSSDKTVKFWDLETFELIGSTGPETTGVRSMTFNPDGRSLLCGLHESLKVFSWEPIRCHDTVDVGWSRLSDLNVHEGKLLGCSFNQSCVGIWVVDLTRLEPYATGTSTKLNGHSELKSSSSSTMPLQNDSGSRANIGRLSVLQNSENNIKSSTGRLSVSQNSDSALKETKSTTSSGLVPVTPQRAGNGSSTKTVGNSTFASSGTNLKRGSLKSNNSSSLQNFSKIDVVPVIIPRTSSGPELATDSRSDAADVGPVLSKSGRRIEIANDSRKESSDVAAAVVPRTNSRTEMASDSAPVVGPRANLRMEVSADSAPIVPKSGRRLESSVESRKESTDVASAAAPKTSSRMEVAPDSAPLLSKAGRRVESATDSRKESADVAPVVPRTTSRMEMAPDSRREISAGRMSPFRVQSRYSELRKLNNAKADADKVDAGSKNSETDDFTCQIYLPRRNGVVQSGISEETREDAKPGVIDRMGFPSSAEPNTHRSENYVSRMRKPRDNCYIEVSRAGRTRPTASNWESRDQSPGNEEPTTSNSSSMAPTGRLYSSRGSSQAAETPTIASDEDVLSVLMEQHELFLSSTRSRLTKLQIVHQMWQRNDIRGIIAAMEKMSDHAVSADVASVLMEKSETITLDLCTVILPVLTDLLESKTDRHLGVSLELLVKLVRTFGSVIHSTVSAGPSSVGVDLQAEQRRERCNLCFIELEKVKNKLPFLSRRKGAVANTAQELSLVFQEVM

SEQ ID NO: 1368 - protein, 524 aa, Oryza sativa
MAEVKPEEISYPPMEQLQGFEYCIDSNPPWGEAIILGFQHYILALGTAVMIPAVLVPMMGGSDGDRVRVVQTLLFVTGINTLLQSLFGTRLPTVIGGSYAFVVPIMAIIQDSSLAAIPDDHERFLQTMRAIQGALIVSSSIQIILGYSQLWGIFSRFFSPLGMAPVVALLGFGLFERGFPVVGRCVEVGLPMLILFVVLSQYLKNVQIRDIPILERFSLFICIALVWAYAQILTAGGAYKHSPEVTQINCRTDRANLISSAPWIKIPFPLQWGAPTFSAGQSFGMVSAVLVSLVESTASYKAAARLASATPPPAHILSRGIGWQGIGILLDGLFGTGTGSTVSVENVGLLGSTRIGSRRVIQISAGFMIFFSMLGKFGALFASIPFTIFAAVYCVLFGLVAAVGLSFLQFTNMNSMRNLFIVGVSIFLGLSVPEYFFRYSMAAQRGPAHTKAGWFNDYINTIFSSPPTVGLIVAVFLDNTLEVKNAAKDRGMPWWVPFRSFKGDARSEEFYSLPFNLNRFFPPS

SEQ ID NO: 1369 - protein, 426 aa, Nostoc sp. PCC 7120
MPTLPLEGASPAHICPFDQACSYLEAAAKELRLDQGALEILSHPRKVVTVSIPVRLDNGDIRVLAGHRVQHSDILGPYKGGTRYHPAVTLREVSALAMLMTWKCALLGIPYGGAKGGIAIDPEHYSVGELERITRRYTSELIKDIGPSVDIPAPDVGTSAREMAWMMDTYSMNVGHAVPGVVTGKPISIGGSRGREMATGRGVMIIVREALADMGRTLEGVKVVIQGFGNVGGAAAELLYQAGAKILAVSTGAGGLFASDGLDIPALKAYAAENHRSIVGFPQAVPISNAELLTLPCDVLIPAALENQITEENVDQIQAQIVAEAANGPVTLEANRVLEGRGVTVLPDILANAGGVVVSYLEWVQGLSYLFWDEERVNREMEHLMVQAYHQVIKQSQMRQVPLRLAAYTLGVGRVAQALSDRGLYP

SEQ ID NO: 1370 - protein, 429 aa, Nostoc punctiforme PCC 73102
MISKSLLPLEPASPAHICPFDQACSYLEAAAKELNLNQGLLEILSHPRKVVTVSIPVKLDDGEIQVLAGHRVQHSDVLGPYKGGIRYHPAVTLREVSALAMLMTWKCALLGIPYGGGKGGIPIDPKRYSVGELERISRRYISELLKDIGPSVDIPAPDMGTSAREMAWMMDTYSVNVGHAVPGVVTGKPLSIGGSLGREMATGRGTMIIVREALADRGKSLVGVRVAIQGFGNVGGAAAELLHQAGAKIIAVSTGAGGIFSEAGLDIPALKIYAAENRKSIVGFPQSVPISNADLLTLPCDVLIPAALENQITGENVNQVQAQIVAEAANGPVTLEANLALEARGVTVLPDILANAGGVVVSYLEWVQGLSYVFWDEERVNREMEHLMVQAYRKVIQQSNKRQISLRLAAYTLGVGRVAQALTDRGLYP

SEQ ID NO: 1371 - protein, 464 aa, Streptomyces coelicolor
MRPVPAVPERAPVTTRSETQSTLDHLLTEIELRNPAQPEFHQAAHEVLETLAPVVAARPEYAEPGLIERLVEPERQVMFRVPWQDDQGRVRVNRGFRVEFNSALGPYKGGLRFHPSVNLGVIKFLGFEQIFKNALTGLGIGGGKGGSDFDPHGRSDAEVMRFCQSFMTELYRHIGEHTDVPAGDIGVGGREIGYLFGQYRRITNRWESGVLTGKGQGWGGSLIRPEATGYGNVLFAAAMLRERGEDLEGQTAVVSGSGNVAIYTIEKLTALGANAVTCSDSSGYVVDEKGIDLDLLKQIKEVERGRVDAYAERRGASARFVPGGSVWDVPADLALPSATQNELDENAAATLVRNGVKAVSEGANMPTTPEAVHLLQKAGVAFGPGKAANAGGVAVSALEMAQNHARTSWTAARVEEELADIMTSIHTTCHETAERYDAPGDYVTGANIAGFERVADAMLAQGVI

SEQ ID NO: 1372 - protein, 640 aa, Oryza sativa
MDELNLLRQHQHQHQHHLVVRGLGEEIDLEIGPGDDPSFPGAALVGVTPGAHDPADDHKSLLIPCSQPVAEGQPQPTPPQVEEHDGLLRLPGQTKKKKKVVKKWREEWADTYKWAYVAVHDNTSRIFCTVCKEYGRKHRRNPYGNEGSRNMQMSALEEHNNSLLHKEALRLQTASKENAQPPEIERPVYVKALSKTAASILESILKKDPHEAEFIQSIQEVVHSLEPVLVKNSQHVQILERLLEPERCFIFRVPWVDDRGEAHVNRGFRVQFSQALGPCRGGLRFHPSMTLSVAKFLAFEQTLKNALSQYKLGGAAGGSDFDPKGKSESEIMRFCQSFMDELYRYLGPDQDFPAEDVGVGPREMGYLFGQYRRLSGHFQGNFTGPKIFWSGSSFRTEATGYGLVFFARVVLADMNKELKGLRCVISGSGKIAMHVLEKLLSCEAIPVTVSDSKGYLLDTEGFDYMKYSVLRNIKAQQRSLKEYLKSYPNAKYIDDAKPWSEKCDVAFPCASQNEIDQAEALAIINSGCRVLIECSNMPCTAQAVDILRTAKVVVAPAKATAAGGVAVGELELNPEFSLMQWSVEDFENKIQDAVKQTYDRSIKAAQDYGIMKENPESLVHGANICAFLNIAQAMTDQGCV

SEQ ID NO: 1373 - protein, 615 aa, Bacillus halodurans
MCGITGWVDWRRNLQNETETIKQMAETQTHRGPDDLNVWTEKHAALGHSRLIVVDPEGGCQPMMRERNGKRYTIVYNGELYNTEDLRKELIVKGYQFQGHSDTEVLLVSYIEWGYQCVEKFNGIFAFAIWNDKDQSLFMARDRLGVKPLFYTVRHGFLLFATEIKALLAHPEIEPVLTEEGLSEVLGLGPSRSPGNGVFDDIQELRPAHLLTYDRNGAKVSRYWRLKSMAHSEDAMETAAHLRDLLEDTVERQLFADVPVGMFLSGGVDSSALTAIAALIYEREGKGLIRTYSIDYDENDKYFKANDFQPNADGPWVEKVSTTFRTNHHNAVISIEELANQLKRAVELRDLPGMADVDSSLYWFCKQIKKDVTVGLSGECADEIFGGYPWFHKPEVMNFNGFPWMRSADERQELLHERWRQKLNLPKYVHDRYKETIAETPRFEEDTPEEARRREISYLNMVWFMTTLLDRKDRMSMGASLEVRVPFSDHRIVEYAWNIPWEIKQFGGREKGILRKALEGILPDEVLYRKKSPYPKTHHPKYTKMVQQEMERILGQSDSPLFDVVNRKKLKELTETGGKALTTPYFGQLMTGPQLLAHFIQMEHWLKHYNIKLIG

SEQ ID NO: 1374 - protein, 640 aa, Corynebacterium glutamicum
MCGLLGILTANGNAEAFVPALERALPCMRHRGPDDAGTWHDADAAFGFNRLSIIDIAHSHQPLRWGPADEPDRYAMTFNGEIYNYVELRKELSDLGYAFNTSGDGEPIVVGFHHWGESVVEHLRGMFGIAIWDTKEKSLFLARDQFGIKPLFYATTEHGTVFSSEKKTILEMAEEMNLDLGLDKRTIEHYVDLQYVPEPDTLHAQISRLESGCTATVRPGGKLEQKRYFKPQFPVQKVVKGKEQDLFDRIAQVLEDSVEKHMRADVTVGSFLSGGIDSTAIAALAKRHNPDLLTFTTGFEREGYSEVDVAAESAAAIGAEHIVKIVSPEEYANAIPKIMWYLDDPVADPSLVPLYFVAAEARKHVKVVLSGEGADELFGGYTIYKEPLSLAPFEKIPSPLRKGLGKLSKVLPDGMKGKSLLERGSMTMEERYYGNARSFNFEQMQRVIPWAKREWDHREVTAPIYAQSRNFDPVARMQHLDLFTWMRGDILVKADKINMANSLELRVPFLDKEVFKVAETIPYDLKIANGTTKYALRRALEQIVPPHVLHRKKLGFPVPMRHWLAGDELFGWAQDTIKESGTEDIFNKQAVLDMLNEHRDGVSDHSRRLWTVLSFMVWHGIFVENRIDPQIEDRSYPVEL

SEQ ID NO: 1375 - protein, 326 aa, Oryza sativa
MRPILMKGHERPLTFLRYNRDGDLLFSCAKDHTPNVWFADNGDRLGTYRGHNGAVWSCDVSRDSTRLITGSADQTAKLWDVQTGRELFTFRFDAPARSVEFAIGDGLAVITTDNFMENVPTAQVKRIAEDPDDQSEESLLVITGIKGRINRAVWGPLNRTIITAGEDATIRIWDTETGQCLKESDKEQGHQKTITSLSKSADWSHFLTGSLDKSAKLWDTRTLTLIKTYVTERPVNAVDISPLLDHVVIGGGQDAMNVTMTDRRAGKFEAKFFHKILQEEIGGVKGHFGPINALAFNPDGRSFSSGGEDGYVRLHHFDSDYFNIKI

SEQ ID NO: 1376 - protein, 539 aa, Arabidopsis thaliana
MASILNQTQELQESSKVLGHLRCENFFLFPGENTLSDGLRGVLYFLGLAYCFIGLSAITARFFKSMENVVKHSRKVVTIDPITKAEVITYKKVWNFTIADISLLAFGTSFPQISLATIDAIRNMGERYAGGLGPGTLVGSAAFDLFPIHAVCVVVPKAGELKKISDLGVWLVELVWSFWAYIWLYIILEVWSPNVITLVEALLTVLQYGLLLVHAYAQDKRWPYLSLPMSRGDRPEEWVPEEIDTSKDDNDNDVHDVYSDAAQDAVESGSRNIVDIFSIHSANNDTGITYHTVADTPPDSATKKGKAKNSTVFDIWKHQFVDAITLETSESKKVDSIYLRIAKSFWHLLLAPWKLLFAFVPPCNIAHGWIAFICSLLFISGVAFVVTRFTDLISCVTGINPYVIAFTALASGTSWPDLVASKIAAERQLTADSAIANITCSNSVNIYVGIGVPWLINTVYNYFAYREPLYIENAKGLSFSLLIFFATSVGCIVVLVLRRLIIGAELGGPRLWAWLTSAYFMMLWVVFVVLSSLKVSGVI

SEQ ID NO: 1377 - protein, 500 aa, Zea mays
MGRKPDAVAKSYHSGGGGAAASSPRAARKASPSPVFLGTALFVLGFVSLFTGHVVTDADWARIRSRWRPKQHRNYEPIDIWESKYSSMYYGCSERSASFRSAVPENSSTGYLLIATSGGLNQQRIGITDAVVVAWILNATLVVPELDHHSFWKDDSDFSDIFDVEWFISHLSKDVTIVKRIPYEVMLSMDKLPWTMRAPRKSVPEFYIDEVLPILMRRRALQLTKFDYRLTSDLDEDLQKLRCRVNFHALKFTSSIHAMGQKLVQKLRLMNTRYVAIHLRFEPDMLAFSGCYYGGGEKERKELGEIRKRWDTLPELSAEDERSRGKCPLTPHEVGLMLRALGFGNDTLLYVASGEIYGGDSTLQPLRGLFPNFYTKEKLAGDDLNPFLPFSSRLAAIDFIVCDESDVFVTNNNGNMAKVLAGRRRYMGHKRTIRPNAKKLNVLFQTRNQLSWDTFSRKVQRVQRGLMGEPDDIRPKQDDFHEFPSSCICSRKPGNISATT

SEQ ID NO: 1378 - protein, 512 aa, Saccharomyces cerevisiae
MICDKCSLVRSFFVGRPRDITSLYKKAGSCRTMSSNRVLDLFKPFESFLPEVIAPERKVPYNQKLIWTGVSLLIFLILGQIPLYGIVSSETSDPLYWLRAMLASNRGTLLELGVSPIITSSMIFQFLQGTQLLQIRPESKQDRELFQIAQKVCAIILILGQALVVVMTGNYGAPSDLGLPICLLLIFQLMFASLIVMLLDELLSKGYGLGSGISLFTATNIAEQIFWRAFAPTTVNSGRGKEFEGAVIAFFHLLAVRKDKKRALVEAFYRTNLPNMFQVLMTVAIFLFVLYLQGFRYELPIRSTKVRGQIGIYPIKLFYTSNTPIMLQSALTSNIFLISQILFQKYPTNPLIRLIGVWGIRPGTQGPQMALSGLAYYIQPLMSLSEALLDPIKTIVYITFVLGSCAVFSKTWIEISGTSPRDIAKQFKDQGMVINGKRETSIYRELKKIIPTAAAFGGATIGALSVGSDLLGTLGSGASILMATTTIYGYYEAAAKEGGFTKNLVPGFSDLM

SEQ ID NO: 1379 - protein, 701 aa, Zea mays
MAGREERYVRFHDWKSEQSVSVISDRVVSEKGHNIFGLLKDRTAGAFSFLGNSSHSEALNKLGLGEKSKTKVLDPQGPFLQRWNKIFVISCLFAVFVDPLFLYVPVIDGGNNCLYLDKKLETTASILRFFTDIFYLLHILFQFRTGFIAPSSRVFGRGALVKDTFAIAKRYLSTLFLVDFLAVLPLPQVFVLVVLPKLQGPEVMKAKIVLLVIIICQYVPRLLRIIPLYLQITRSAGILTETAWAGAAFNLIIYMLASHGFGALWYILSIQREDTCWRQACINQTGCDPTSLYCGYHSLANNSFLQNACPTNSTANPDPIFGIFLPALQNVSQSTSFFEKLFYCFWWGLQNLSSLGQNMKTSTNTLENLFAVFVSTSGLVLFALLIGNVQTYLQSASVRIEEMRVKRRDTEQWMAHRLLPENLKDRIMRHEQYRWQETRGVDEEGLLKNLPKDLRREIKRHLCLSLLMKVPMFENMDEQLLDAMCDRLKPMLYTEGSCIIREGDPVNEMLFIMRGTLESTTTNGGQTGFFNSNVLKGGDFCGEELLTWALDPTSASNLPGSTRTVKTLSEVEAFALRADDLKFVATQFRRLHSKQLQHTFRFYSQQWRTWAACFIQAAWHRYCRKKLEEALYEKEKRLQAAIVSDGTTSLSLGAALYASRFAGNMMRILRRNATRKARLQERVPARLLQKPAEPNFFAEDS

SEQ ID NO: 1380 - protein, 80 aa, Agrobacterium tumefaciens
MPVKARFETKLWLYTLTVQLSQTGKPIIVDVIRILIAIILPPVGVFLQVGLGLQFWLNILLTLCGYVPGIIHAIWVILRR

SEQ ID NO: 1381 - protein, 52 aa, Nostoc sp. PCC 7120
MDLVRLLCAIFFPPLGVFLQVGIGKDFWINILLTLLGYIPGIVHAVWVIARK

SEQ ID NO: 1382 - protein, 182 aa, Zea mays
MMTEVEWRLNKYVPTEEEYMTNASLTFALGPIVLPALYFVGPKIPESIVKDPEYDELFKLMSTCGRLLNDVQSFEREYKEGKLNIVSLLVLHGGSMSISDARRKLQKPIDTCRRDLLRLVLREESVVPRPCKELFWKMCKVCYFFYSRTDGFRSPVERAKEVNAVINEPLKLQENHTHMSVL

SEQ ID NO: 1383 - protein, 517 aa, Zea mays
MICDKCSLVRSFFVGRPRDITSLYKKAGSCRTMEKIRAAGLLKTQGLIAGQWVDAYDGKTIEVQNPATGEVLANVSFMGSRETSDAIASAHSTFYSWSKLTASERGKALRKWYDLIISHKEELALLMTLEQGKPMKEALGEVNYGASFIEYFAEEAKRIYGDIIPPTLSDRRLLVLKQPVGVVGAITPWNFPLAMITRKVGPALACGCTVVVKPSELTPLTSLAAADLALQAGIPAGALNVVMGNAPEIGDALLQSTQVRKITFTGSTAVGKKLMAESANTVKKVSLELGGNAPCIVFDDADIDVAVKGSLAAKFRNSGQTCVCANRILVQEGIYEKFASAFIKAVQSLKVGNGLEESTSQGPLINEAAVQKVEKFINDATSKGANVMLGGRRHSLGMSFYEPTVVGNVSNDMLLFREEVFGPVAPLIPFKTEEEAVHMANDTNAGLAAYIFTKSIPRSWRVSESLEYGLVGVNEGIISTEVAPFGGVKQSGLGREGSKYGVDEYLELKYICMGNLG

SEQ ID NO: 1384 - protein, 482 aa, Zea mays
MGKRKRSSCQQDNHNDSLASKIMRTRIPDLPEDIWSHVHSLMPMRDAGRAACLSRAFLRSWRRHPNLIFNKDTIGMKKNLYGENFHHKISRILRNHSGISLKAFKLDYSGMCGFDGTSYLDSWLQAALNPGIEEVTLWLFHTRRIYEFPCSLLSDGVRNSLRYLKLRCCALRPTVELAPMRSLTSLHLSFVSIKWDGLKRLLSNSLALEELELVCCDKIVCLKIPSALQRLNSLNIYGCSPLKVLESKAPNLSSLSLLHFGGRLVFSRVKTLQMKKLITESTVYDARTRLPSIMPNLETLVINSFDWVVDAPMLPTKFLCLKHLTVRLSSGTTITQAFDYFSLVSFLDASPSLETFILNVSGKGMIHESISAHPQLRHTPEHHHGHLRSVKICGFSSEKSLFELTRYILENAVSLKFLTLDTFYGDRCGQGKCTSCLPTPDVFMDVSKAISGIKTYIENKVPSTVKLTVLEPCSRCHVRRVI

SEQ ID NO: 1385 - protein, 588 aa, Arabidopsis thaliana
MSYDEHTSSSFTYISQMGVWWIVLVVAVLTHTASAAVREYHWEVEYKYWSPDCKEGAVMTVNGEFPGPTIKAFAGDTIVVNLTNKLTTEGLVIHWHGIRQFGSPWADGAAGVTQCAINPGETFTYNFTVEKPGTHFYHGHYGMQRSAGLYGSLIVDVAKGKSERLRYDGEFNLLLSDWWHEAIPSQELGLSSKPMRWIGEAQSILINGRGQFNCSLAAQFSNNTSLPMCTFKEGDQCAPQILHVEPNKTYRIRLSSTTALASLNLAVQGHKLVVVEADGNYITPFTTDDIDIYSGESYSVLLTTDQDPSQNYYISVGVRGRKPNTTQALTILNYVTAPASKLPSSPPPVTPRWDDFERSKNFSKKIFSAMGSPSPPKKYRKRLILLNTQNLIDGYTKWAINNVSLVTPATPYLGSVKYNLKLGFNRKSPPRSYRMDYDIMNPPPFPNTTTGNGIYVFPFNVTVDVIIQNANVLKGIVSEIHPWHLHGHDFWVLGYGDGKFKPGIDEKTYNLKNPPLRNTAILYPYGWTAIRFVTDNPGVWFFHCHIEPHLHMGMGVVFAEGLNRIGKVPDEALGCGLTKQFLMNRNRN

SEQ ID NO: 1386 - protein, 157 aa, Zea mays
MSPARSSSSNVFDPLSLDFWPSSADPFGVVRPLAEQCPVLTNVRVDWKETPEAHVFRADLPGVRKEAAKVEVEDGNVLVISGERAREEEEKEEAGKDEAWRWRLVERSSGRFQRRFRLPRGARLDQVHASMENGVLTVTVPKEEAKKPQVRAVEISG

SEQ ID NO: 1387 - protein, 281 aa, Zea mays
MAAAQVVAKGSVVSPCGNRAVPGLLGRRRDAVAAQMTPSAVRIGGSWRKNAFPGVRLALGTRRSRPASRSFSASPVQMNMNLAIGKSMRWWEKGLQPNMREIESAQDLVDSLTNAGERLVVVDFFSPGCGGCRALHPKICQFAERNPDVLFLQVNYEEHKSMCYSLRVHVLPFFRFYRGAQGRLCSFSCTNATIKKFKDALAKHKPDRCTFGPTRGLDESELLALAANKELQFTYTREPELTPMGDTPGEVIAPEPAKLPAATKPLVKLGSEERSLVSPGR

SEQ ID NO: 1388 - protein, 323 aa, Nostoc sp. PCC 7120
MMADVITDSVPVTVLTGYLGAGKTTLLNHILTYEHGKKVAVIVNEFGEVGIDNQLVIDADEEIFEMNNGCICCTVRGDLIRIISNLMKRRDKFDHLVIETTGLADPAPVIQTFFVDEDMQSQLSLDAVVTLVDAKHIWQHWDADEAQEQIAFADVILLNKTDLVTPSELDELEKRIRSMNAIAKIYRTRNSELAMDALLGVKAFDLDRALEIDPNFLGEDAHEHDDTVFSVALVQEGELDGEKLNAWISELLRTQGTDIFRMKGILNIAGEDNRFVFQGVHMIFDGRPDRLWKPNEKRKNELVFIGRNLDEAQLKQDFLACFA

SEQ ID NO: 1389 - protein, 131 aa, Zea mays
MPETGQAAERDEQQQSRGIALMQGICAVVYRKADNTPCPIKQGLYLGSVGAAFNKDALKSLNITHILIVAKSLDPVFPAEFNYKKIEVLDIPDTDLLKHSDECFGFIDEAISSGGNVLVHCFAGRSRRSIK

SEQ ID NO: 1390 - protein, 171 aa, Glycine max
  misc_feature (154)..(154): Xaa can be any naturally occurring amino acid
  unsure (1)..(171): unsure at all Xaa locations
MEGGRSSASNGNCEVRYRGIRRRPWGKFAAEIRDPTRKGTRIWLGTFDTAEQAARAYDAAAFHFRGHRAILNFPNEYQSHNPNSSLPMPLIVPPPSYSSSFTSNYSGDDNNHLVRPGEIMQGGDLDDTFELEYLDNKLLEELLQMQDNRHFYKXNITQANQLGSTAMYGMK

SEQ ID NO: 1391 - protein, 51 aa, Zea mays
MPSHETFRIKKKLAKKMRQNRPIPYWIRMRTDNTIRYNAKRRHWRRTKLGF

SEQ ID NO: 1392 - protein, 140 aa, Brassica napus
MKSSSTLLTSLNQRQPSSSPTRKPPKQKRKATTTTNDNKPIKVRYISNPMRVETCPSKFRELVQELTGQDAELPPDPTTYAAADPQQEEINPEPLEEVVSEYYSPLDEEVFSAPQMSAGLSAFFSSGFYNVNALGSIGSL

SEQ ID NO: 1393 - protein, 238 aa, Glycine max
MGRGKIPIRRIENSTNRQVTFCKRRNGLLKKTRELSILCDAEVGVIVFSSTGKLYEYSNTSMETIIERFNKQNNNHHRLMDATSAIKGEAASLRQQLQHLQENHRQLMGEELSGLGINQLKHLENQLQMSLNNVRNKKDHIFSDEIKELQQKGSLIRRQNEELHKKIDLIHNENAELKKVIEARHKEEERAALKPPCAIKNRYDTLDPNSLQQRQSQPQPSEPSAEVMIMGYSLKLKM

SEQ ID NO: 1394 - protein, 415 aa, Zea mays
MAGSEQRVVAVIMVGGPTKGTRFRPLSLNVPKPLFPIAGQPMVHHPISACSRIPHLAQIYLIGFYEEREFALYVSSISHELRIPVRYLREDKPHGSAGGLYSFRDYIMEDSPSHIVLLNCDVCSSFPLPDMLEAHKKYGGMGTLLVNKVSAESANQFGELVADPETNELLHYTEKPETFVSDLINCGVYIFTPDILSAIEDVLKQKKDRANLRRVSSIEALHSATKALPPDFVRLDQDILSPRAGKKELYTYQTLDFWEQIKTPGMSLRCSGLYLSQFRHTSPHLLASGDGKRTATIVGDVYIYPSAKVHPTSKIGPNVSISANARVGAGARLINCIILDDVEIMENAVVIHSIVGWKSSIGKWSRVQGEGDHNAKLGITILGEAVDVEDEVVVVNSIVLPNKTLNVSVQEEIIL

SEQ ID NO: 1395 - protein, 519 aa, Oryza sativa
MLGEAASPWSLAGAGAAVALLWLCAWTLQWAWWTPRRLERALRAQGLRGTRYRLFIGDVAENGRLNREAASRPLPLGSHDVVPRVMPFFCNVLKEHGKLSFVWTGPKPFVIIRDPDLAREILSNKSGNFAKQTTAGIAKFVVGGVVTYEGEKWAKHRRILNPAFHQEKIKRMLPVFLACCTKMITRWVNSMSSEGISELDVWDEFQNLTGDVISRTAFGSSYQEGWRIFQLQEEQAKRVLKAFQRIFIPGYWYLPIENNRRIREIDQEIRTILRGIIVKRDKAVRNGEGSNDDLLGLLVESNMRQSNEKEDVGMSIEDMIEECKLFYAAGSETTSMLLTWTLILLSMHPEWQEQAREEVMHHFGRTTPDHDGLSRLKIVTMILHEVLRLYPPVVFLQRTTHKEIELGGIKYPEGVNFTLPVLSIHHDPSIWGQDAIKFNPERFANGVSKATKFQTAFFSFAWGPRICLGQSFAILEAKMALATILQSFSFELSPSYTHAPHTVLTLQPQYGSPIKLKKL

SEQ ID NO: 1396 - protein, 497 aa, Oryza sativa
MSSAGHAVDQQRKSTTMKAHFVLVPMMAQGHMIPMTGMARLLAEHGAQVSFVTTPVNAARMAGFVTAVEAAGLAVQLVKLPFPATEFGLPDGCENLDMIQSRDLSRNFMEACGALREPLTARLRQLCPPPSCIISDMVQWWTGEIARELGIPRLTFDGFCTFASLARYIIFRDKLLDNVADEEIVTFSGFPMLLELPKARCPGSLCVPGMEQIRDKMYEEELQSDGNVMNSFQELETLYIESFEQITGKKVWTIGPMCLCDRDSNMMAARGNKASVDEAKCLQWLDSKKPGSVIFVSFGSLASTAPQQLVELGLGLEASKEPFIWVIKAGNKFPEVEEWLADGFEERVKDRGMIIRGWAPQVMILWHQAIGGFMTHCGWNSTIEGICAGVPMITWPHFAEQFLNEKFVVNLLKIGLEIGVKGVAQWGSEHKEVRVTRNAVETAVSTLMNDGEAAQEMRMRAKDLGVKARRALEEGGSSYDNISLLIQEMGNKQNASG

SEQ ID NO: 1397 - protein, 681 aa, Synechocystis sp. PCC 6803
MSPAPMPVTTAEQDRDVVVIDAVVEEVRPPRLPKSHLEDLGPVSDMFPESWEYHPDLIMEFYRKRPLQVLGRLINILFPLLRFILGIWWEKLRGKDPTVSRAKAIQLRELLTNLGPTYIKVGQALSTRPDLVPPVFLDELTTLQDQLPSFPNEVAYRFIEEELGAPAEEIYAELSPEPIAAASLGQVYKGKLKTGEAVAVKVQRPDLVRRITLDIYIMRSLSLWARRSVKRLRSDLVAITDELASRVFEEMNYYQEAINGEKFAQLYGSLPEIYVPSIYWQYTGRRVLTMEWVEGIKLTNIKAIQAQGIDATHLVEVGVQCSLRQLLEHGFFHADPHPGNLLAMADGRLAYLDFGMMSTIQPYQRYGLIEAVVHLVNRDFDSLAKDYVKLDFLKPDTDLKPIIPALGQVFGNALGASVAELNFKSITDQMSAMMYEFPFRVPAYYALIIRSMVTLEGIAIGIDPNFKVLSKAYPYIAKRLLTDQSEELRTSLKELLFKEGSFRWNRLENLLRNAKNSPGFDFDYVLNEATEFLLSDRGQFIRDRLVAELVNSIDQLGRNTWQQVSHNIQERISFLGDLGNGNGKAHQTKTIKVVPQPAIAQQEETWQHLQNLWQILKETPGFDPLKFVPVLSQIIVNPTSRRMGQQVAEGLLQKAIARVIRQWALALESQPNPAIKIRNAA

SEQ ID NO: 1398 - protein, 670 aa, Nostoc sp. PCC 7120
MALFMTVKTLPPNSRPIEGELQLKDTQALVVRSSRPVSSERPQVVVTANLEPETIVYDPVAVAEHYRHRPLQVLRRIFAVLGPTFSFAFGLWWDIKRGVVVKNDRRRAIELKELLTQLGPAYIKIGQALSTRPDLVPPVYLEELTRLQDQLPPFPNEIAYQFIQEELGQPPQEVYAELSAQPIAAASLGQVYKGKLKTGEEVAVKVQRPDLRERITIDLYILRGLAAWIQKKVKRVRSDLVGILDELGDRIFEEMDYIHEGENAERFFQLYGHMQDVYVPRIYWEYTNRRVLTMEWINGTKLTQTEEISSQGIDARYLIEVGVQCSLRQLLEHGFFHADPHPGNLLATPDGKLAYLDFGMMSEIKPPQRYGLIEAIVHVVNRDFEGLAKDYVKLDFLSPETDLTPIIPAFGKVFANAQGASVAEFNIKSITDELSELMYEYPFRVPPYYALIIRSLVTLEGIAIYIDPNFKVLSEAYPYVAKRLLTDPAPELRISLRDLLFKDGRFRWNRLENLLRNARKNQDYDLNLVVNQGVDFLSSERGSFIRDKLVDEFLNGINALSKNVLHNFTYLLRERVGITAINETPAATVEQQQTLEHVKNILNILQETRGFDPAQFAPQVAQLAFNPGVQRLGQQVANQLFQKATVRLIRELLTAEEVKSSEIEYPTRKV

SEQ ID NO: 1399 - protein, 181 aa, Brassica napus
MDEYNETVKNQIQALVRVIKVARAYTEDNVPSLIQEGLYLGSVAAACNKNLLKSYNVTHILTVASSLRPAHPDDFLYKVVRVVDKEDTNLEVYFDECFDFIDEAKKLGGSVLVHCFVGKSRSVTVVVAYLMKKHGMTLAQALQHVQSIRPVASPNAGFIKQLQDLEKSLQGKQERIAQSQV

SEQ ID NO: 1400 - protein, 271 aa, Glycine max
MRKRERENPCGVCGHYHKYEEGEVCSICGHRIPVGSEKTSIQVSAFPSVVLPEFLYLGSYDNASRSELLKTQGISRILNTVPSCQNLYKNSFTYHCLPDDKTLPFDEAIQFLEQCEKDKERVLVHCMSGKSRSPAIVIAYLMKFKGWRLAQSYQWVKERRPSVELTQGVYQQLQEFEQKIYGPIDSGSSVPPGFLPTAPSISFGFPKINDPAQLPSFSTAGTPSIFARAPLDIAPTEFTFGAGQTQKNVAGNPYNANPANPNGTDIQMDGS

SEQ ID NO: 1401 - protein, 386 aa, Zea mays
MYKCSNEYAREDAGTSDSPLCSVEPQGDSNDTDVPRHLRKPSRTLSRESLDQSSPCRDSFITRHFKGNGDSSRGLRLTMKLRDFNKYAKIDSELSKEIEQWNDMLRTEVVKLCQDNNFQTGFFEGTDNSTVVDAYELKVRLEHILERISLISDAASTERPSQITDYLYIGGALAARSTHTLKHLGITHILCLCANEIGQSESQKPDLFEYRNFSINDDDNADIGDLFQDGSDFISYVDHLRGKVLVHCFEGKSRSATVVLAYLMLRKNCTLLEAWNMLKKVHRRAHPNDGFAKILLDLDKKLHGKISMEWQHKRPAMKVCPICGKNAGLSSSSLKLHLQKAHKKISSGSVDSAMTLEIQKALEAIKAGWGGSDSPVHKSQSHIEGF

SEQ ID NO: 1402 - protein, 560 aa, Saccharomyces cerevisiae
MQAPNIYPFSQTQPQALPGFTYGPPQLVFDHSAPRVDPLHSTVTINSPLPLQHYNGPNAHINSANNNYAYYYHHPNNNDNNNHSNNTIKNNNINSVLPAVNIQISNNSHYRNTHQIPSAPQRLVSIIPDPHMPPNISHFQLNNIHPQMHAPVATDIHFQQVPVYNKTNNGIGTDNINNDKPVNSNQNEVLDNIDERSCHEINRVVSFSKHFENNELTTTANDLNIQSTMDELAKLKSLSNSTHFRQSIATQNFHSLQNHITTIENRLASLLTDRQQEQQQLKQQESEKESSSPFSNKIKLPSLQELTDSISTQHLPTFYDNKRHASDTDLKSSTLHGPLYHRHAFLSTSSSSPSPTAGSAPLQKLQVPRQDDPNDKKMNISSSPFNSITYIPNTTLSPMVQTQLKNLTTSNLNTKKKNNRGRPRAIQRQPTLTTSSHFINNSNPGAAAVSTTTPAANSDEKNPNAKKIIEFCFHCGETETPEWRKGPYGTRTLCNACGLFYRKVTKKFGSKSSNLLLRYRRSIDLANDRRIPDFITIPNRFIHDMDNDQTLDSEYNTILQ

SEQ ID NO: 1403 - protein, 316 aa, Zea mays
MAVAEEERSGRDPPATCFRSRRRRCPCPSPSPAWTPPSGARGAAISATVAIRRAGGPSGSPSPRRRRRRGRFPQRQRPIIRPRRAVPVLVTSACPCARPRPPVHTLPRLVRKKPLKRGRPPPPPRTVPAAAPPLAPAVYLVKKKKKSASARKPWRPPKSAKQCLHCGSSSTPQWREGPLGRSTLCNACGVRYRQGRLLPEYRPLASPTFEPSEHANKHSQVMQLHRQRKSQGQHHPLPAEHPRAMDVLQFPQRWQVKEEYPPTPLHQPLPHPVVDGSLASGELRVGDMVDAAADAGHGGGGGKGSSSRPSFLVQSG

SEQ ID NO: 1404 - protein, 667 aa, Saccharomyces cerevisiae
MSLVPYEEGSLILDDPNSKSVVVVNPTSGTLSFFQQDNSNNDSELNEDQTASLSALDFPSGIHQYKSPIASYVCPQCGTEINPDIINRRQLHRRASAGVESESSRLSIPENTVPLGFEFANSSFSRRYFQSLERNHRHYALQNDSNNKQGQFSKNKYFIPDDLFIPGYFRKFFKILSLLGNGARGSVYKVVHTIGNTELGVFALKKIPIGNDMEWFNKCIREVKALSSLTHKSANLITYNHVWLEMDSSVGFVRSIDGSQSDSQEEVPCIFILQQYCSGGNLEDCILRKVFNRFSDTESPEERKKKFRTRKKNHGKSGEVGLSTEQLVSIIRDIARGLHELHSIGLIHRDLKPSNCLLLTPFKSDNENDNVYDREHNSDEFFPSIVIGDLGESQLEGESRLGTGCTGTLEFTAPDLIIQGRPVSSSTLPSRSSHTYNEYTFASDMYSLGMICYFIVFGELPFEPQLDIVDLKVRIKNFRFDTEGMIEKHQAMKLKPIDRRIFHLMDALLQPNNDARPTAKTVEETLDEMLINSKPGKKFWKENVDSTLNFSTISEVNENTNSFTDDYIDGDNVTLSLPAPEENLSTVSTQNLQKYSALNRTIQVCYKLVSMILTIIIFKCTKTGSWLSYMSLILLGMVFKSPADERGKHARALVLLAFIAACKKYIY

SEQ ID NO: 1405 - protein, 557 aa, Saccharomyces cerevisiae
MPQRIELTSEPVRKPRSTESSLLRKIQRACRSTLPEPDLGLNLDVADYINSKQGATPREAVLAIEKLVNNGDTQAAVFALSLLDVLVKNCGYSIHLQISRKEFLNDLVKRFPEQPPLRYSKVQQMILEAIEEWYQTICKHASYKDDLQYINDMHKLLKYKGYTFPKVGSENLAVLRPNDQLRTPSELQEEQERAQAAKLEELLRSGKPDDLKEANKLMKIMAGFKDDTKVAVKQAINNELNKLKRKADLFNEMLTSADEPDLENEAIQELYGDLKSAQPKFKKLIEEERDDDALVSNLSKFNDLVIQLLKRYKSIKGMKEEELNVPDTNEPAKELNLIDFDDDTTANTPSVTSPSKSLQPFDDLLGDFNKVSLSSPKSPQENDTVVDILGDAHSKSSGIDLLDFDSQPGESKTALSAYSNSIVLPNGLLNSSSNSKEITAQSQRHILNQSDHLRIDYELTRESMTKLRLVIFYSNISSDPITNFALLVASPKGTTLSLQPQSGNMLQSNSRDGIKQIASVEGISVNLGKPIKLKWKANYCTKGDSKEESGTTSLPTI

SEQ ID NO: 1406 - protein, 894 aa, Saccharomyces cerevisiae [sequence omitted]

SEQ ID NO: 1407 - protein, 373 aa, Saccharomyces cerevisiae
MTIDGDVHEISPFFQVRQTKWGGRACFSNGNIPKGTTVLQVSNFTGTSISYEFRKEVCHNCFAYANAKTMKYKLNYDYLRDLVCNAHYQINPKKFLGAGLWFCSEHCRTSYLQIPNIIELIECYEILLHHFPSMLKRYNYTSEQEEKLNSILISENVIQSSWDEIESKWIPRINNMKSAKRINQLPPTCEDEYCCIRFVCESLFNLKYMDPQCITYRAFNMLQSNELSKISKFPVLLHFQKLVFQTLYILLPSHLHRMLSIPLLRHILGTEYGNAFGLWQEGEASDSREYFGYWVFPEASYFNHSCNPNITKYRKGNSMLFTMNRDIKKDEQICIDYSGVLDLPTVKRRAFLADSWFFDCACERCKSELQSVH

SEQ ID NO: 1408 - protein, 392 aa, Zea mays
MAAEGEASMYYTTDDALSLVGFGRFQTLVLAYSGLGWIAEAFEIMLLSFVGPAVEADWGISGAEQGLISSAVFAGMLIGFIAGGLIADRYGRRTGFLFTAVVTAVFGLLSAFSPNYASLLTLRFVVGLGLGAGHVLSTWFIEFVPAAKRGTWMVVFHACWTVGTILEALLAWAIMPVLGWRWLLALSSAPCFVLLIFFPLTPESPRYLCSRGRTMDATVILERIARMNKGTLPPGVLIFRPEKHVDNNLGTSETALLIAEDNTGIEEDTSSKSSGIVAFQALWSYDLIRSTFLLWFIYLANYFTYYGVILLTSELSNGKRRCASVRTHLMQPNSGNLYRDVLVTSLAALPCTVSEHRCWDHFFSWSDWQHSFTSCYCWLVRELPSKRSCVRG

SEQ ID NO: 1409 - protein, 502 aa, Saccharomyces cerevisiae
MLCSVIQRQTREVSNTMSLDSYYLGFDLSTQQLKCLAINQDLKIVHSETVEFEKDLPHYHTKKGVYIHGDTIECPVAMWLEALDLVLSKYREAKFPLNKVMAVSGSCQQHGSVYWSSQAESLLEQLNKKPEKDLLHYVSSVAFARQTAPNWQDHSTAKQCQEFEECIGGPEKMAQLTGSRAHFRFTGPQILKIAQLEPEAYEKTKTISLVSNFLTSILVGHLVELEEADACGMNLYDIRERKFSDELLHLIDSSSKDKTIRQKLMRAPMKNLIAGTICKYFIEKYGFNTNCKVSPMTGDNLATICSLPLRKNDVLVSLGTSTTVLLVTDKYHPSPNYHLFIHPTLPNHYMGMICYCNGSLARERIRDELNKERENNYEKTNDWTLFNQAVLDDSESSENELGVYFPLGEIVPSVKAINKRVIFNPKTGMIEREVAKFKDKRHDAKNIVESQALSCRVRISPLLSDSNASSQQRLNEDTIVKFDYDESPLRDYLNKRQKGLFL

SEQ ID NO: 1410 - protein, 349 aa, Saccharomyces cerevisiae
MSPLNVGIVGTGIFARDRHLPSYQEFPDKFKVIAAFNRHKAKALDFAKVADIPENKVYDNLDEILNDPHVDYIDALLPAQFNADIVEKAVKAGKPVILEKPIAANLDQAKEIVKIAESTPLPVGVAENWLYLPCIKIAKEQIEKIGPVVAFTHNSTGPFVTQNKYLTTTWRQKPEHIGGFLSDGGVHQLALVISLLGEFGSVSALTRQVRERSGADDIVFATVQLKNKEVIGSFTYGSAFGATEKSVFLKVYGKNGTVTVDLSDKKDPVVKVKLGGSAEDNGDEQIFKVDNDESFGVNAEFLNFHEAVSKKDKSLYLGTPRTAFHHLACVDAFLKSSAKNGDYVKIEQP

SEQ ID NO: 1411 - protein, 681 aa, Saccharomyces cerevisiae
MAQFSDIDKLAVSTLRLLSVDQVESAQSGHPGAPLGLAPVAHVIFKQLRCNPNNEHWINRDRFVLSNGHSCALLYSMLHLLGYDYSIEDLRQFRQVNSRTPGHPEFHSAGVEITSGPLGQGISNAVGMAIAQANFAATYNEDGFPISDSYTFAIVGDGCLQEGVSSETSSLAGHLQLGNLITFYDSNSISIDGKTSYSFDEDVLKRYEAYGWEVMEVDKGDDDMESISSALEKAKLSKDKPTIIKVTTTIGFGSLQQGTAGVHGSALKADDVKQLKKRWGFDPNKSFVVPQEVYDYYKKTVVEPGQKLNEEWDRMFEEYKTKFPEKGKELQRRLNGELPEGWEKHLPKFTPDDDALATRKTSQQVLTNMVQVLPELIGGSADLTPSNLTRWEGAVDFQPPITQLGNYAGRYIRYGVREHGMGAIMNGISAFGANYKPYGGTFLNFVSYAAGAVRLAALSGNPVIWVATHDSIGLGEDGPTHQPIETLAHLRAIPNMHVWRPADGNETSAAYYSAIKSGRTPSVVALSRQNLPQLEHSSFEKALKGGYVIHDVENPDIILVSTGSEVSISIDAAKKLYDTKKIKARVVSLPDFYTFDRQSEEYRFSVLPDGVPIMSFEVLATSSWGKYAHQSFGLDEFGRSGKGPEIYKLFDFTADGVASRAEKTINYYKGKQLLSPMGRAF

SEQ ID NO: 1412 - protein, 381 aa, Saccharomyces cerevisiae
MQIFVKTLTGKTITLEVESSDTIDNVKSKIQDKEGIPPDQQRLIFAGKQLEDGRTLSDYNIQKESTLHLVLRLRGGMQIFVKTLTGKTITLEVESSDTIDNVKSKIQDKEGIPPDQQRLIFAGKQLEDGRTLSDYNIQKESTLHLVLRLRGGMQIFVKTLTGKTITLEVESSDTIDNVKSKIQDKEGIPPDQQRLIFAGKQLEDGRTLSDYNIQKESTLHLVLRLRGGMQIFVKTLTGKTITLEVESSDTIDNVKSKIQDKEGIPPDQQRLIFAGKQLEDGRTLSDYNIQKESTLHLVLRLRGGMQIFVKTLTGKTITLEVESSDTIDNVKSKIQDKEGIPPDQQRLIFAGKQLEDGRTLSDYNIQKESTLHLVLRLRGGN

SEQ ID NO: 1413 - protein, 337 aa, Saccharomyces cerevisiae
MLAELSHRELIKLAQKRCIPPLLPKFHKGQSGGRVCIIGGCEDYTGAPYFSANATALMGCDLTHVICEYNAGTVIKSYTPNLMVHPYLRMSNTKLDVDMDEQRKKINSLLDRIHVVVIGPGLGRDPLMLKSIKDIIRYILEKHEGKIPLVIDADGLFLVTQDSEVKEMLKSYPKGRVILTPNVVEFKRLCDAIGKKGDSHSEMGSLIAQELNCIVVEKGQSDKIFSPDSEKDMLTNSEEGSNKRVGGQGDTLTGAISCMLAFSRAMYDFKICEQEEKGESSNDKPLKNWVDYAMLSCYAGCTITRECSRLGFKAKGRAMQTTDLNDRVGEVFAKLFG

SEQ ID NO: 1414 - protein, 197 aa, Saccharomyces cerevisiae
MKLLHLYEASLKRRPKTTNAIMTGALFGIGDVSAQLLFPTSKVNKGYDYKRTARAVIYGSLIFSFIGDKWYKILNNKIYMRNRPQYHWSNMVLRVAVDQLAFAPLGLPFYFTCMSIMEGRSFDVAKLKIKEQWWPTLLTNWAVWPLFQAINFSVVPLQHRLLAVNVVAIFWNTYLSYKNSKVMEKDKVPVHYPPVVE

SEQ ID NO: 1415 - protein, 366 aa, Saccharomyces cerevisiae
MSEKSASNNKAEFKRQSSPFREIISADHPIYKPAKGRYWLYVALPCPWAQRTLITRALKGLAPIIGCSVAHWHLDDKGWRFLEEGDGKTNERHWFDIAGGISSVNLNTSTPVANIPNNAHRLLVDGTDEPHYGYKRLSDFYFKTKPDYKGRFTVPVLWDLETCTIVNNESSDIIGIMNSAAFDEFVGEEYRQVRLVPRSLEAQITEFNSWVYDKINNGVYKAGFAECAEVYEREVTSLFQYLDKLENLLDKKYTDLEAEYGKNNKDKILDRYFAIGDTLTEADVRLYPTIVRFDVVYHQHFKCNLATIRDDYSRIHTWLKNIYWRHEAFQRTTDFTHIKLGYTRSQPRVNPIGITPLGPKPDIRPP

SEQ ID NO: 1416 - protein, 246 aa, Saccharomyces cerevisiae
MSTLKVVSSKLAAEIDKELMGPQIGFTLQQLMELAGFSVAQAVCRQFPLRGKTETEKGKHVFVIAGPGNNGGDGLVCARHLKLFGYNPVVFYPKRSERTEFYKQLVHQLNFFKVPVLSQDEGNWLEYLKPEKTLCIVDAIFGFSFKPPMREPFKGIVEELCKVQNIIPIVSVDVPTGWDVDKGPISQPSINPAVLVSLTVPKPCSSHIRENQTTHYVGGRFIPRDFANKFGFEPFGYESTDQILKL

SEQ ID NO: 1417 - protein, 350 aa, Saccharomyces cerevisiae
MSKKPIVLKLGKDAFGDQAWGELEKIADVITIPESTTREQFLREVKDPQNKLSQVQVITRTARSVKNTGRFDEELALALPSSVVAVCHTGAGYDQIDVEPFKKRHIQVANVPDLVSNATADTHVFLLLGALRNFGIGNRRLIEGNWPEAGPACGSPFGYDPEGKTVGILGLGRIGRCILERLKPFGFENFIYHNRHQLPSEEEHGCEYVGFEEFLKRSDIVSVNVPLNHNTHHLINAETIEKMKDGVVIVNTARGAVIDEQAMTDALRSGKIRSAGLDVFEYEPKISKELLSMSQVLGLPHMGTHSVETRKKMEELVVENAKNVILTGKVLTIVPELQNEDWPNESKPLV

SEQ ID NO: 1418 - protein, 537 aa, Saccharomyces cerevisiae
MQLISILSLLSSLMCSLTVLGSSASSYVKFPVQKLADIINICTQDVSTVFKRNEVLNTTVINGIGVYVVKMEIGTPPQTLYLQLDTGSSDMIVNNADIAYCKSMSDGSDYASTDNYELTATFNGLPSTTISSEAYNTLCSYWGTFDASNSSTFENNATFFNNTYGDGTYYAGTYGTDVVSFENITLNDFTFGVSNDTIGNPSGILGISLPIAEFTDGIEYALALNRTPFIYDNFPMELKNQGKINKIAYSLFLNGPDAHFGSILFGAVDKSKYTGQLYTLPMLQAFNTLGSNPGMIITAQSVAILDSESGNKTVSDIQFPVMLDSGTTFSYLPTEIAEAIGKSFDGEYSSDDQGYIFDCSKVNDTLLSVDFGGFNISANISNFVTSAKDRCVLNVKQSESTYMLGDAFLVDAYVVYDLENYEISIAQASFNNQEEDIEVISDTVPGATPAPGYFSTWVYKPGSPIGTGDFINVSWTSYSEFSQYKSLLATAAQSDDASSFSSSGGSSESTTKKQNAGYKYRSSFSFSLLSFISYFLL

SEQ ID NO: 1419 - protein, 495 aa, Glycine max
MASSKTTNPTTTTTQLEPLPPPQQRHPPPPHHQLQQHHHHHHHHQQIHDHHQISFGMMQSSSSFSSIPGNYLRSKDSGAYDLGELDQAFFLYLDGQADPSSVQDQRQNSSSGMRPPTLNIFPSKPMHVEPSSSKAKANIELVSPQTSGSKRPSEPSMELANPRNETASAPQPPKPVKRESNRKGPTSSSEHEGPKTPDPKTLRRLAQNREAARKSRLRKKAYVQQLESSRIRLNQLEQELQRARTQGMFLGGGALLGGEQGLPVTMNTISTEAAMFDVEYARWQEEHHRIVCELRAAVQEHLPENELRLFVDNCLAHYDQVMNLKSLVAKTDVFHLVSGTWKTPAERCFMWIGGFRPSELIKIIVRQIEPLTEQQILGICGLQQSTQEAEEALSQGLEALNQSLSDTITSDSLSYPPNMANYMGQMAVAMNKLSTLEGFVRQADNQRHQTIHRLHQILTTRQAARCFLAIAEYFHRLRALSSLWLARPRQENSQY

SEQ ID NO: 1420 - protein, 474 aa, Arabidopsis thaliana
MVSSQRPVPNKIQKQQYLSISPSNSVLKDDVELEFSDVFGPLPEEANDIAYDEPAVVYSRSHSLVGPCSLDSHSLKLTKLTLLETEDSIDLVECLEGESLKENDDFSGNDDSDNEKALEGDLVKVSGVVGIDDFEVMKVVGKGAFGKVYQVRKKETSEIYAMKVMRKDHIMEKNHAEYMKAERDILTKIDHPFIVQLKYSFQTKYRLYLVLDFINGGHLFFQLYHQGLFREDLARVYTAEIVSAVSHLHEKGIMHRDLKPENILMDTDGHVMLTDFGLAKEFEENTRSNSMCGTTEYMAPEIVRGKGHDKAADWWSVGILLYEMLTGKPPFLGSKGKIQQKIVKDKIKLPQFLSNEAHAILKGLLQKEPERRLGSGLSGAEEIKQHKWFKGINWKKLEAREVMPSFKPEVSGRQCIANFDKCWTDMSVLDSPASSPSSDPKANPFTNFTYVRPPPSFLHQSTTTLSSDYKDDDK

SEQ ID NO: 1421 - protein, 480 aa, Arabidopsis thaliana
MVSSQCSVANKNQTGKPFQKHLSLSISPPKSVLGDNLELEFSDVFGPMPEANSEEACDVAYDEPAVVYSRSHSLVGPSLVVSHSLKMNKLTLRETEDSVDLVECVEGESIKENDEFSGNDDTDSEKSPEEVSGVVGIEDFEVLKVVGQGAFGKVYQVRKKDTSEIYAMKVMRKDKIVEKNHAEYMKAERDILTKIDHPFIVQLKYSFQTKYRLYLVLDFINGGHLFFQLYHQGLFREDLARVYTAEIVSAVSHLHEKGIMHRDLKPENILMDVDGHVMLTDFGLAKEFEENTRSNSMCGTTEYMAPEIVRGKGHDKAADWWSVGILLYEMLTGKPPFLGSKGKIQQKIVKDKIKLPQFLSNEAHALLKGLLQKEPERRLGSGPSGAEEIKKHKWFKAINWKKLEAREVQPSFKPAVSGRQCIANFDKCWTDMSVLDSPASSPNSDAKANPFTNFTYVRPPHSFLHRTTSNLSSDYKDDDK

SEQ ID NO: 1422 - protein, 491 aa, Glycine max
MVSSQFSAFTLAGYKPSQTQLLFPAKLVDTVNTEHIELDFSDVFGPVTLDLNNIDSTTSEPMEEVNELVYDDPPVIYTRSHSLVGPSTCVSQSLKLGKLTIHETEDSLELVEHVNGEAIKDIKESSFVEESLKDEDGNLMKIHRVSIDDFEILKVVGQGAFAKVYQVRKKGTSEIYAMKVMRKDKIMEKNHAEYMKAERDIWTKIEHPFVVQLRYSFQTKYRLYLVLDFVNGGHLFFQLYHQGLFREDLARIYTAEIVSAVSHLHANGIMHRDLKPENILLDADGHVMLTDFGLAKQFEESTRSNSMCGTLEYMAPEIILGKGHDKAADWWSVGVLLFEMLTGKPPFCGGNRDKIQQKIVKDKIKLPAFLSSEAHSLLKGLLQKEQARRLGCGPRGVEEIKSHKWFKPINWRKLEAREIQPSFRPEVAGVHCVANFEKRWTDMPVVDSPAASPNGGNPFKDFSYVRPAASFLQRNNPAYANSSSDYKDDDK

SEQ ID NO: 1423 - protein, 492 aa, Zea mays
MVSSEITSVTAARAQGPKLFRGKILLPGGPPDVVPSENVEFDFSDVFGPSAVQTHTEVSILTPDSPAPVAESNDEVYNDPDVIVKRSHSLVGPSSLVSQSLPFSKLTLHKTESSLELSECPSKGKQINQGSLSDDEFDDVKKENEGVGLDDFEVLKLVGQGAFGKVYQVRKKGTSEIYAMKVMRKDKIVEKNHAEYMKAERDILTKVDHPFVVQLRYSFQTKYRLYLVLDFINGGHLFFQLYHQGLFREELARIYTAEIVSAVAHLHANGIMHRDLKPENILLDADGHAMLTDFGVAKEFDENTRSNSMCGTVEYMAPEIVQGRGHDKAADWWSVGVLLFEMLTGKPPFVGGNRDKIQQKIVKEKIKLPTYLSSEVHSMLKGLLHKEAGRRLGSGPGGSDEIKNHKWFKSVNWKRLEARQIEPSFRPNVAGKTCIANFDECWTNMPVLDSPVASPVAANSNFVGFSYVRPAPFLQKPSPLGNSSSDYKDDDK

SEQ ID NO: 1424 - protein, 316 aa, Clostridium acetobutylicum
MNNVLCIGELLIDFICSDIDTTLSKGENFKKKAGGAPANVTAAISKLGGSASFLGKVGNDPFGHFLKETLDEVKVDTSMLIMDNNSSTTLAFVSLQANGERDFVFNRGADGLLRYDEINLDKVYSNKIIHFGSATALLGGEMTDTYLKIMEEAKKRGIIISFDPNYRDNLWENRTEEFIAISRKCIELADFVKLSDEELKIISGEKNIKNGVKLLASNNKVIAVTLGKEGTMISNGEEVEIIESIKIKSIDSTGAGDAFVGAFLYKLSEALEARDILSDFNKIKENVRFANKVGAIVCTKLGAISSLPSLSEVEGD

SEQ ID NO: 1425 - protein, 316 aa, Clostridium acetobutylicum; identical to SEQ ID NO: 1424

SEQ ID NO: 1426 - protein, 494 aa, Arabidopsis thaliana
METKTLIFSILVVVLSLIYLIGKLKRKPNLPPSPAWSLPVIGHLRLLKPPIHRTFLSLSQSLNNAPIFSLRLGNRLVFVNSSHSIAEECFTKNDVVLANRPNFILAKHVAYDYTTMIAASYGDHWRNLRRIGSVEIFSNHRLNSFLSIRKDEIRRLVFRLSRNFSQEFVKVDMKSMLSDLTFNNIIRMVAGKRYYGDGVEDDPEAKRVRQLIADVVACAGAGNAVDYLPVLRLVSDYETRVKKLAGRLDEFLQGLVDEKRDAKEKGNTMIDHLLTLQESQPDYFTDRIIKGNMLALILAGTDTSAVTLEWALSNVLNHSEVLNKARDEIDRKIGLDRLMDESDISNLPYLQNIVSETLRLYPAAPMLLPHVASEDCKVAGYDMPRGTILLTNVWAIHRDPQLWDDPMSFKPERFEKEGEAQKLMPFGLGRRACPGSGLAHRLINLTLGSLIQCLEWEKIGEEVDMSEGKGVTMPKAKPLEAMCRARPSVVKIFN

SEQ ID NO: 1427 - protein, 451 aa, Arabidopsis thaliana
MDEKPAGRRVMLVAVPAQGHISPIMQLAKTLHLKGFSITIAQTKFNYFSPSDDFTDFQFVTIPESLPESDFEDLGPIEFLHKLNKECQVSFKDCLGQLLLQQGNEIACVVYDEFMYFAEAAAKEFKLPNVIFSTTSATAFVCRSAFDKLYANSILTPLKEPKGQQNELVPEFHPLRCKDFPVSHWASLESMMELYRNTVDKRTASSVIINTASCLESSSLSRLQQQLQIPVYPIGPLHLVASASTSLLEENKSCIEWLNKQKKNSVIFVSLGSLALMEINEVIETALGLDSSKQQFLWVIRPGSVRGSEWIENLPKEFSKIISGRGYIVKWAPQKEVLSHPVVGGFWSHCGWNSTLESIGEGVPMICKPFSSDQMVNARYLECVWKIGIQVEGDLDRGAVERAVRRLMVEEEGEGMRKRAISLKEQLRASVISGGSSHNSLEEFVHYMRTL

SEQ ID NO: 1428 - protein, 329 aa, Arabidopsis thaliana
MATNIGMMDSAYFVGRSEILAWINSTLQLNLSKVEEACSGAVHCQLMDSVHPGTVPMHKVNFDAKSEYEMIQNYKVLQDVFNKLKITKHIEVSKLVKGRPLDNLEFMQWMKKYCDSVNGGQHNYHALERREASKGGKEATKRAAATQQSGKSSSSSAPPRPSSSNGTRKHEPQSNNTGTHHSSTGNHHHSSKPSAKQSKPVPAYDEKITELKLYIDSLEKERDFYFSKLRDVEILCQNPDTEHLPLVGSIKRILYAADGEDVGAAETQTLSPIAEGSEERRNSVTESQKRKLIVNLDVDVAAITTLSPRQRLSDASDVKCSGSSPLLTC

SEQ ID NO: 1429 - protein, 349 aa, Zea mays
MDMDRDSVECLSLPDAAMDVDNVDGHPHHGHLGLPLHPAHLPSSGAGRAFPKVNAGGGVAGPAVAGAAGAAGAGGGPPATSVHELLECPVCTNSMFPPIHQCQNGHTLCSTCKARVHNRCPTCRQELGDIRCLALEKVAESLELPCKYCSLGCPEIFPYYSKIKHEAQCSFRPYNCPYAGSECAVAGDIPFLVAHLRDDHKVDMHSGCTFNHRYVKSNPREVENATWMLTVFHCFGQYFCLHFEAFQLGMAPVYMAFLRFMGDENEARNYTYSLEVGGNGRKMVWEGTPRSIRDSHRKVRDSHDGLIIQRNMALFFSGGDRKELKLRVTGRIWKEQTNPDGACIPNLCS

SEQ ID NO: 1430 - protein, 323 aa, Glycine max
MDLMSVECVSSSDGMDEDEIHANHHHSEFSSTKPRNGGTSNINSVGPNGIAPATSVHELLECPVCTNSMYPPIHQCHNGHTLCSTCKTRVHNRCPTCRQELGDIRCLALEKVAESLELPCKYYSLGCPEIFPYYSKLKHETVCNFRPYSCPYAGSECSVVGDIPFLVAHLRDDHKVDMHTGCTFNHRYVKSNPREVENATWMLTVFHCFGQYFCLHFEAFQLGMAPVYMAFLRFMGDENEARNYSYSLEVGANGRKLIWEGTPRSVRDSHRKVRDSHDGLIIQRNMALFFSGGDRKELKLRVTGRIWKEQNSDAGVCMPNLCS

SEQ ID NO: 1431 - protein, 301 aa, Oryza sativa
MASVTYIDDSGSEVIDPPKTEVLDVTELAGDPVPHSPKPNVVVSSSVRELLECPVCLSAMYPPIHQCSNGHTLCSGCKPRVHNRCPTCRHELGNIRCLALEKVAASLELPCKYQNFGCVGIYPYYCKLKHESQCQYRPYSCPYAGSECTVAGDIPYLVNHLKDDHKVDMHNGCTFNHRYVKSNPHEVENATWMLTVFSCFGQYFCLHFEAFQLGMAPVYIAFLRFMGDDLEAKNYSYSLEVGGTGRKMIWQGVPRSIRDSHRKVRDSYDGLIIQRNMALFFSGGERKELKLRVTGRIWKEQ

SEQ ID NO: 1432 - protein, 309 aa, Glycine max
MAPGSSVFKEVLESHLMSSDYEMGKAKSEAKSNSTSTKSSIGLSGKSGISSNNGVYELLGCPVCKNLMYPPIHQCPNGHTLCSHCKVEVHNICPSCHHDLGNIRCLALEKVAESLELPCRYQSLGCHDIFPYYTKLKHEQNCGFRPYNCPYAGSECSVMGDIPTLVAHLKDDHKVDMHDGCTFNHRYVKANPHEVENATWMLTVFNSFGRHFCLHFEAFQLGSAPVYMAFLRFMGDDNEAKKFSYSLEVGANGRKLIWQGIPRSIRDSHRKVRDSQDGLIIQRNLALYFSGGERQELKLRITGRIWREE

SEQ ID NO: 1433 - protein, 406 aa, Glycine max
MESRVLSRAGTLFSLPHLRKLPREVGAGPSLVAVKAVGSVADGGNLIWGRQLRPELCSPALKKEAVLLRPCLAAASSPAEGSDSAGEAKVAPAGFFEKYPALVTGFFFFTWYFLNVIFNILNKKIYNYFPYPYFVSVIHLFVGVAYCLVSWAVGLPKRAPIDSNLLKLLIPVAVCHALGHVTSNVSFAAVAVSFTHTIKALEPFFNAAASQFILGQSIPITLWLSLAPVVIGVSMASLTELSFNWVGFISAMISNISFTYRSIYSKKAMTDMDSTNIYAYISIIALIVCIPPAVILEGPTLLKHGFNDAIAKVGLVKFVSDLFWVGMFYHLYNQVATNTLERVAPLTHAVGNVLKRVFVIGFSILVFGNKISTQTGIGTAIAIAGVALYSFIKARMEEEKRQAKAA

SEQ ID NO: 1434 - protein, 601 aa, Saccharomyces cerevisiae
MTEDFISSVKRSNEELKERKSNFGFVEYKSKQLTSSSSHNSNSSHHDDDNQHGKRNIFQRCVDSFKSPLDGSFDTSNLKRTLKPRHLIMIAIGGSIGTGLFVGSGKAIAEGGPLGVVIGWAIAGSQIIGTIHGLGEITVRFPVVGAFANYGTRFLDPSISFVVSTIYVLQWFFVLPLEIIAAAMTVQYWNSSIDPVIWVAIFYAVIVSINLFGVRGFGEAEFAFSTIKAITVCGFIILCVVLICGGGPDHEFIGAKYWHDPGCLANGFPGVLSVLVVASYSLGGIEMTCLASGETDPKGLPSAIKQVFWRILFFFLISLTLVGFLVPYTNQNLLGGSSVDNSPFVIAIKLHHIKALPSIVNAVILISVLSVGNSCIFASSRTLCSMAHQGLIPWWFGYIDRAGRPLVGIMANSLFGLLAFLVKSGSMSEVFNWLMAIAGLATCIVWLSINLSHIRFRLAMKAQGKSLDELEFVSAVGIWGSAYSALINCLILIAQFYCSLWPIGGWTSGKERAKIFFQNYLCALIMLFIFIVHKIYYKCQTGKWWGVKALKDIDLETDRKDIDIEIVKQEIAEKKMYLDSRPWYVRQFHFWCSSDYKDDDK

SEQ ID NO: 1435 - protein, 61 aa, Saccharomyces cerevisiae
MFSELINFQNEGHECQCQCGSCKNNEQCQKSCSCPTGCNSDDKCPCGNKSEETKKSCCSGK

SEQ ID NO: 1436 - protein, 409 aa, Corynebacterium glutamicum
MAPVTGLPVTPYSQEASIGASFPAVDPDTKDSAAYGHESGMRERISNAKRVVVKIGSSSLTNDEDGHTVDPNRINTIVNALQARMEAGSDLIVVSSGAVAAGMAPLGLSTRPTELAVKQAAAAVGQVHLMHQWGRSFARYGRPIGQVLLTAADAGKRDRARNAQRTIDKLRILGAVPIVNENDTVATTGVNFGDNDRLAAIVAHLVSADALVLLSDVDGLFDKNPTDPTAKFISEVRDGNDLKGVIAGDGGKVGTGGMASKVSAARLASRSGVPVLLTSAANIGPALEDAQVGTVFHPKDNRLSAWKFWALYAADTAGKIRLDDGAVEAVTSGGKSLLAVGITEIIGDFQQGEIVEILGPAGQIIGRGEVSYDSDTLQSMVGMQTQDLPDGMQRPVVHADYLSNYASRA

SEQ ID NO: 1437 - protein, 358 aa, Arabidopsis thaliana
MSAFVSKYEDELIKTAKYIATPGRGILAADESTETIGKRFAGINVENTESNRQAYRELLFTSPGSYPCLSGVILFEETLYQKTSDGKPFVDLLMENGVIPGIKVDKGLVDLAGTNGETTTQGLDSLGARCQQYYEAGARFAKWRAFFKIGATEPSVLSIQEDARVLARYAIICQENGLVPIVEPEVLTGGSHDIKKCAAVTETVLAAVFKALNYHHVLLEGTLLKPNMVTPGSDSPKVAPELIAEYTVTALRRTVPPAIPGIVFLSGIQREEQATLNLNAMNKLDVLKPWTLTFSFGGALQQSAIKAWAGKPENVAKAQAKFLTRCKANKDATLGKYTGWASGDSAAFENLVVIGYRY

SEQ ID NO: 1438 - protein, 177 aa, Arabidopsis thaliana
MFDKSEWAKVVSIVNQEPVLFSLSVAENIAYGLPNEHVSKDDIIKAAKAANAHDFIISLPQGYDTLVGERGGLLSGGQRQRVAIARSLLKNAPILILDEATSALDAVSERLVQSALNRLMKDRTTLVIAHRLSTVQSANQIAVCSDGKIIELGTHSELVAQKGSYASLVGTQRLAFE

SEQ ID NO: 1439 - protein, 244 aa, Arabidopsis thaliana
MEQPMSPGTKSVDLRECMESLLRFSLRSHLNESVPSFDLDLTRDFCLHLLGEATDSTEKSAVYKLLATALSECLASEGDKNSNLEKYSKLIHGLGYDLINMLKEVNFELHVQEPYFTQLKDGLKTVEGRCAVGDYMRISSGDFLLFNKCLLLEVQDVHRYTSFSEMLKVEGLAKVLPGVESIEEGVQVYRNFYSEEKERMNGVVAIRVAKPANQPSAALAGVLSELKSSGIKSLLDEYTAGVTS

SEQ ID NO: 1440 - protein, 120 aa, Glycine max
MAKSSFKMEHPLERRQAEASRIREKYPERIPVIVERAEKSDVPEIDKKKYLVPADLTVGQFVYVVRKRIKLSPEKAIFIFVKNILPPTAAMMSAIYEENKDEDGFLYMTYSGENTFGLVF

SEQ ID NO: 1441 - protein, 191 aa, Arabidopsis thaliana
MGKKRKSTATSLDEVDRTVYASFRTAANSLSQLYTQSMNHQKLSFQAGERHGLEKLYQWIWRQQEGGSRVTPMDIVNYIQNELECCIDEPPISPRAPPPQPTMHVTNPGLMTTSGTSFPTAVPVVRSEQCENQAKNSVFSNALSSPIRRSLQNYQIPQGGYTSGGTTRSSEVNRGSNSPGSIDSSMDMHAE

SEQ ID NO: 1442 - protein, 125 aa, Brassica napus
MAGLQRSNISFRRQGSSGIVWDDRLIAELNKQANEHKAETDEQEGQEDQTARPTSGGGIEPIRTEGRIERSRSNGGGANRHHRNTGRVSPAVDPPSPRLSAFGCCSAFGKKPVKQRKRPPKRRSR

SEQ ID NO: 1443 - protein, 190 aa, Arabidopsis thaliana
MLLIQTSSRPSFLVQSGTSLYKKAGSCRTMNSVCISSCINDAHDPRVPVRPVRASYVNLYKWPESDAEFVRSVRRGGGLPAARVVDSISCRQMYLRSYTFSREDDESKSEKVSSGTQTSCLGRVKGTASSRRKSKEENGIIIVESTKPRRRGEKRRVSRKNKQEQACSVILRIFRRLLSCAATVDVVDPN

SEQ ID NO: 1444 - protein, 130 aa, Arabidopsis thaliana
MGRLFVVNLEGKIYSCKHCKTHLATYEDIISKSFHCKHGKAYLFNKVANVSIGETEERLMMTGKHTVADIFCVSCGSIVGWKYETAHEKNQKYKEGKSVLERFKISGPDGSNYWVSSHGRHIGGSDADDA

SEQ ID NO: 1445 - protein, 251 aa, Arabidopsis thaliana
MATAVGSGSDVEVGFAKLQGEDFEYYMQSYSIILGRNSKKSTVDVDLSSLGGGMNISRNHARIFYDFTRRRFSLEVLGKNGCFVEGVLHLPGNPNVKLDSQDLLQIGDKEFYFLLPVWSILGGPLGPRHHVLGKATVVPYHNYHSGPGSGSGKNGVRSRELYEYDDEDDDEEEDIRGSGKKTWRDGHEGVYASGEKKREGRSKADREADDQQFLQLMHGSGWSVTDIKGVWKRMASQSSKKIPITRRLGYP

SEQ ID NO: 1446 - protein, 486 aa, Arabidopsis thaliana
MLTMDKEFDSKLTLQGNSSSNGETISRSKSFAFKAPQENFTYHDFELGKIYGVGSYSKVVRAKKKDNGTVYALKIMDKKFITKENKTAYVKLERIVLDQLEHPGIVKLFFTFQDTQSLYMALESCEGGELFDQITRKGRLSEDEARFYSAEVVDALEYIHNMGLIHRDIKPENLLLTLDGHIKIADFGSVKPMQDSQITVLPNAASDDKACTFVGTAAYVPPEVLNSSPATFGNDLWALGCTLYQMLSGTSPFKDASEWLIFQRIIARDIKFPNHFSEAARDLIDRLLDTDPSRRPGAGSEGYDSLKRHPFFKGVDWKNLRSQTPPKLAPDPASQSASPERDGSPWNPTHVGDTSVLQNDGHNGLSESSGSITRLASIDSFDSRWQQFLEPGESVLMISAVKKLQKITSKKVQLILTNKPRLIYVDPSKLVVKGNIIWSDNSNDLNVQVSSPSHFKICTPKKVLSFEDAKQRALQWKKAIETLQNR

SEQ ID NO: 1447 - protein, 639 aa, Zea mays
MDKNYGELYNILGWGEEYFAVNTEGHLSVKPFGRWTEPGQEIDVHSVIVEALATQPNDSTSKSQFPMILRFPDVLKNRIETLHNAFNSAMESTGYTSRYQGVFPIKVNQNKHVVQDMVRFGQQWNYGLEAGSKPELLIAMSCLPVTEAEPKPYLICNGYKDADYIALALSARAMGLNPIIVLEMEEELAIVLDQYRKLQQKLPDDDAVRKKFEPIIGIRAKLLTKLPGHFGSTAGKHGKFGMLADQIYEVAETLGKEGKLHWLQLLHFHIGSMIPTTGKVYDAVSEAAGIYCNLVNEHGAKWLATLDCGGGLGVDYDGTRSGDSDMSVAYGIQEYASAVVQAVRLKCDYNGVAHPVVCTESGRAMASHHSMIILETLSAIPEPQDEDTSEQLLNRIQDLSYKQPRAPVGGATAAVYSHAADLKKHGIEMYKLGKKLGKRVVADANTVYNYHMNLSVFSLLPDFWGIGQLFPMMPVSRLNEEPTLKGTLVDITCDSDGKIENFISRENTLPLHLFEPSLGGYYVAVLVSGAYQEAIAGKHNLFSGPTLVRVNSSTTKDGGFEIERVDLGPAADEIIGSMRYSVEEDIITVIEKKAKGTEEEERVWAWEMVEPLMTKALTTMPYLNEYKVPEPEPEPEPIP

SEQ ID NO: 1448 - protein, 568 aa, Arabidopsis thaliana
MDSHSSHLNAANRSRSSQTPSPSHSASASVTSSLHKRKLAATTAANAAASEDHAPPSSSFPPSSFSADTRDGALTSNDELESISARGADTDSDPDESEDIVVDDDEDEFAPEQDQDSSIRTFTAARLDSSSGVNGSSRNTKLKTESSTVKLESSDGGKDGGSSVVGTGVSGTVGGSSISGLVPKDESVKVLAENFQTSGAYIAREEALKREEQAGRLKFVCYSNDSIDEHMMCLIGLKNIFARQLPNMPKEYIVRLLMDRKHKSVMVLRGNLVVGGITYRPYHSQKFGEIAFCAITADEQVKGYGTRLMNHLKQHARDVDGLTHFLTYADNNAVGYFVKQGFTKEIYLEKDVWHGFIKDYDGGLLMECKIDPKLPYTDLSSMIRQQRKAIDERIRELSNCQNVYPKIEFLKNEAGIPRKIIKVEEIRGLREAGWTPDQWGHTRFKLFNGSADMVTNQKQLNALMRALLKTMQDHADAWPFKEPVDSRDVPDYYDIIKDPIDLKVIAKRVESEQYYVTLDMFVADARRMFNNCRTYNSPDTIYYKCATRLETHFHSKVQAGLQSGAKSQ

SEQ ID NO: 1449 - protein, 484 aa, Zea mays
MVSGGSTKEQQHEMNISFGMMNQHHQPPSSSSSSSMHAAAASFMSGKEASGAYDHLGELDQALFMYLDHGSSHGGGATQQERRQTLNIFPSQPMHVEPSPKGEISLVLSPAPVGSKQPRSPDHHQQAAMEELAGSRRQQEHLHLQHHQPFAAAAEPAAPGMIKDVKPLAKKDHRRGTSTAERDPKTLRRLAQNREPPRKSRLRKKAYIQQLESSRIRLAQLEQELHTARAQGVFFPNSGILADQGVAGKGVPIGGIDGLSSEAAMFDVEYGRWQEEHYRLMYELRAALQQHLPEGELQMYVESCLAHHDEMVGIKEGAIKGDVFHLISGVWRSPAERCFLWLGGFRPSEVIKMLLSHVEPLTEQQIVGVYGLQQSALETEEALSQGLEALYQSLSDTVVSDALSCPSNVSNYMGQMAVAMNKLSTLEGFVRQAENLRQQTLHRLHQVLTTRQMARSLLAVSDYFHRLRTLSSLWVTRPRAPQEQ

SEQ ID NO: 1450 - protein, 572 aa, Zea mays
MASSSSSRLLLLLLPCLALTLLGAADAEVHHHEFVIQETPVKRLCKTHNIITVNGQYPGPTLEVREGDTLIINVVNRAQYNATIHWHGIRQIRTGWADGPEFVTQCPIRPGGSYKYRFTIQGQEGTLWWHAHSSWLRATVYGALIIRPRENKTYPFAKPSREVPVILGEWWDANPIDVIREAQRTGGGPNVSDAFTINGQPGDLYKCSNKETTAIPVKAGETALLRFINAALNHELFVTIAQHKMTVVATDASYTKPFTTSVLMLAPGQTTDVLVTMDQPPTRYYVAARAYVSGQNVAFDNTTTTAVLEYDCGCASDFGPKIQPAFPAALPAFNDTSAATAFAAGIRSPDRVKVHENVDEYLFFTVGLGLFNCKPGQLCAGPNNNTRFAASMNNVSFVFPQTDSLLHAHYYKIPGVFTTDFPAYPPVQFDYTGQNVSQALWQPVPATKLYPLRFGSVVQLVLQDTSIVTPENHPIHIHGYDFFILAEGFGNFDPKKDVEKFNYVDPPQRNTVAVPVNGWAVIQFVADNPGVWLMHCHLDVHITWGLAMAFLVEDGYGELQSLEPPPVDLPMC

SEQ ID NO: 1451 - protein, 110 aa, Zea mays
MGSTAGDAILMKWILHDWSDAHCATLLKNCYDALPENGKVIVVECVLPVNTEATPKAQGVFHVDMIMLAHNPGGKERYEREFRELAKGAGFSGFKATCIYANAWAIEFIK

SEQ ID NO: 1452 - protein, 228 aa, Zea mays
MDGWMDEPCVCVRVFYKLRIPYSAAWSWLRGCGSRRRRMFASLSADQVVPSGSDEGQATEPKPSGSLFRLSNLQIIIIVCLGRRDFAPVAQLTRRRCRGGENTSDPDGVIGVGGVGVGHDPVDGRRLLLAVVPEAGRAGHRRQRGGPLLRRLLGLRRHLAPSPPAPGRRLRRLLRRRRRRRQTRGGRLAVPPHPRPRPPPPPGPGPVGGRRRAPHCGCGQRGGGAGRR

SEQ ID NO: 1453 - protein, 59 aa, Zea mays
MAELRAAVTDLNLYSGSRLWEMVSQWHFFGEQGARVQVCEDINGQRHICIFLTPKRFQL

SEQ ID NO: 1454 - protein, 398 aa, Glycine max
MESQLGLIEKSFNVKYSDGVREALDELPDSFTITDPSISGHPIVYASRGFLKVFGYSKNEVLGKNGRVFQGPKTNRRSVMAIREAIREERGIQVSLLNYRKDGTPFWMLFNMCPVYSEKDGRVVHFLGIQVPILRRRNSLGGGIGRNGGVCYDGGNCREYVYKCCRKEVCSNSIMEMDRALSVDTVSGMDHTEVDAEGPCEASDQEKTKASVAVNNIMSVLANYSELNGRLVSDRRCCQSGTSLLSASLNISFGRIKQSFVLTDAHLPDMPIVYASDAFLKLTGFLRHEVLGRNCRFLSGEDTDRGTQFQIKQCIQNEQPCTVHILNYRKDGISFWNFLHISPIRSASGKVAYFVGIQIEDTNEAREKQGLNPEMRHRSVVAAVKVAVRGWSMGASTS

SEQ ID NO: 1455 - protein, 106 aa, Zea mays
MEEHALLHMQYQPPPPPTSYYSSQYFSLPAMNSGDVLPPAIRRYCKAEQQVVSGQTAASEVSPSRETGLSADPNAEISSAVTPSSSHQFLPEFDDPVLNLADLWKY

SEQ ID NO: 1456 - protein, 481 aa, synthetic construct
MAITNKTMLITYADSLGKNLKELNENIENYFADAVGGVHLLPFFPSTGDRGFAPIDYHEVDSAFGDWDDVKRLGEKYYLMFDFMINHISRQSKYYKDYQEKHEASAYKDLFLNWDKFWPKNRPTQEDVDLIYKRKDRAPKQEIQFADGSVEHLWNTFGEEQIDLDVTKEVTMDFIRSTIENLAANGCDLIRLDAFAYAVKKLDTNDFFVEPEIWTLLDKVRDIAAVSGAEILPEIHEHYTIQFKIADHDYYVYDFALPMVTLYSLYSGKVDRLAKWVKMSPMKQFTTLDTHDGIGVVDVKDILTDEEITYTSNELYKVGANVNRKYSTAEYNNLDIYQINSTYYSALGDDDQKYFLARLIQAFAPGIPQVYYVGFLAGKNDLELLESTKEGRIINRHYYSSEEIAKEVKRPVVKALLNLFTYRIQSAAFDLDGRIEVETPNEENIVIERQNKDGSHIATAEINLQDMTYRVTENDQTISFE

SEQ ID NO: 1457 - protein, 523 aa, synthetic construct
MASSMLSSAAVVTSPAQATMVAPFTGLKSSAAFPVTRKTNKDITSIASNGGRVSCMKRSWQTLTFAHYQPQQWGHSSFLHRLFGSLRAWRASSQLLVWSEALGGFLLAVVYGSAPFVPSSALGLGLAAIAAYWALLSLTDIDLRQATPIHWLVLLYWGVDALATGLSPVRAAALVGLAKLTLYLLVFALAARVLRNPRLRSLLFSVVVITSLFVSVYGLNQWIYGVEELATWVDRNSVADFTSRVYSYLGNPNLLAAYLVPTTAFSAAAIGVWRGWLPKLLAIAATGASSLCLILTYSRGGWLGFVAMIFVWALLGLYWFQPRLPAPWRRWLFPVVLGGLVAVLLVAVLGLEPLRVRVLSIFVGREDSSNNFRINVWLAVLQMIQDRPWLGIGPGNTAFNLVYPLYQQARFTALSAYSVPLEVAVEGGLLGLTAFAWLLLVTAVTAVRQVSRLRRDRNPQAFWLMASLAGLAGMLGHGLFDTVLYRPEASTLWWLCIGAIASFWQPQPSKQLPPEAEHSDEKM

SEQ ID NO: 1458 - protein, 566 aa, Streptomyces coelicolor
MIVNEPVPDTFEDTPAKDRDPDWFKRAVFYEVLVRSFQDSNGDGIGDLKGLTAKLDYLQWLGVDCLWLPPFFKSPLRDGGYDVSDYTAVLPEFGDLADFVEFVDAAHQRGMRVIIDFVMNHTSDQHPWFQESRRNPDGPYGDYYVWADDDKQFQDARIIFVDTEASNWTYDPVRKQYYWHRFFSHQPDLNYENPVVQEEMISALKFWLDLGIDGFRLDAVPYLYQEEGTNCENLPRTHDFLKRVRKEIDAQYPDTVVLAEANQWPEDVVDYFGDYAAGGDECHMAFHFPVMPRIFMAVRRESRYPVSEILAKTPAIPSGCQWGIFLRNHDELTLEMVTDEERDYMYAEYAKDPRMRANIGIRRRLAPLLDNDRNQIELFTALLLSLPGSPILYYGDEIGMGDNIWLGDRDAVRTPMQWTPDRNAGFSSSDPGRLFLPTIMDPVHGYQVTNVEASMASPSSLLHWTRRMIEIRKQNVAFGLGTYTELPSSNPAVLAFLREHEDDLVLCVHNFSRFAQPTELDLSAFDGRHPVELFGGVRFPAVGDLPYLLTLGGHGFYWFRLRKDAA

SEQ ID NO: 1459 - protein, 289 aa, Zea mays
MTYGELGMQAVMPGFGAVMFTPSRRLRRGSGLRYSSRPSFLVQSGTSLYKKAGSCRTMGAREYYDYRRAMYGDITHKAILVDAAGTLLAPTEPMAQVYRTIGQKYGVDYSEDEILMRYRWAYAQPWGRSRLRYVNDGRPFWQYIVSSSTGCSNLEYFEELYQYYTTEKAWHLCDPDAGRVFEALRKAGVKTAVVSNFDTRLRPLLQALKCDRWFDAVAVSAEVAAEKPNPTIFLKACELLRVKPEEVVHIGDDRRNDLWGARDAGCDAWLWGSDVYSFKEVAERIGVEV

SEQ ID NO: 1460 - protein, 216 aa, Nostoc sp. PCC 7120
MERPKVIFVDAVGTLFGVKGSVGKVYSQIAQEFGVEVAPDIVDKAFVESFKASPPPIFPDADTEDIPQREFEWWRKIALNTFESAGVLPQFTDFSSFFGELYIHFGTAEPWVIYPDVVQSLSNWQHIGIELGVLSNFDSRLYSVLQSLGLSHYFSSVTISTQAGAAKPDPKIFAIALEKHNSSPEEAWHIGDSIEEDYQGAKAAGLRGVWINREKG

SEQ ID NO: 1461 - protein, 302 aa, Saccharomyces cerevisiae
MTYPKRIPINAWSEVHRVARPLIITFDAYNTLYATKLPVMEQYCIVGRKYGIKANPSTLTNNFPHVFKKLKEDYPQYGKYSGIKPEQWWSILIRNVFAPNEIPDEMINEILMRFEGFDSYFVYPDLIKFLKDLKSRHPDVILGIVSNTDPIFYKLLKNIGLFETFSGHIYLSYELNLAKPDRAIFQYALDDIISKQPHLLEKYTREEILQHCFHIGDELKNDLEGAEAAGWTGILLDRNDKYGFLSNSISKPMRDEYKLSIDKIDNNSINTWEANTKQTDTLQLSERKYVVSNLEVLEELFP

SEQ ID NO: 1462 - protein, 230 aa, Glycine max
MDLSINERSLVRERQEEEEEEEDERDNGDEPKEGAVEAGTRRPRGRPPGSKNKPKPPIFVTRDSPNSLRSHVMEVAGGADVAESVAQFARRRQRGVCVLSGSGSVANVTLRQPSAPGAVVALHGRFEILSLTGAFLPGPAPPGATGLTVYLAGGQGQVVGGSVVGSLVAAGPVMVIAATFANATYERLPLEEEEDDGGGSVQGGSTLGGSPHGIGSSGGGGGSGGGHLPV

SEQ ID NO: 1463 - protein, 417 aa, Glycine max
MNTILTLRRSMPCSSRPSFLVQSGTSLYKKAGSCRTMFIVRKNGKTSLHNAARYGVHRIVKTLIARDPGIVCIKDKKGQTALHMAVKGQCTSVVEEILLADPSILNERDKKGNTALHMATRKCRSQIVGLLLSYSAVDVNAINKQQETALDLADKLPYGDSALEIKEALAEYGAKHARYVGKEDDAMELKRTVSDIKHEVQSQLIQNETTRRRVSGIAKELKKLHREAVQNTINSVTLVAVLFASIAFLAIFNLPGQYITDEGKEIGKAKIADHVSFQVFCLLNSTSLFISLAVVVVQITLVAWDTRAQKQIVSVVNKLMWAACACTCGAFLAIAFEVVGKKTWMAITITLLGVPVLVGTLASMCYFVFRQHFGIFRSDSQRRIKRASGSKSFSWSYSANISDLDEYNSDIEKIYAL

SEQ ID NO: 1464 - protein, 336 aa, Zea mays
MAAFSSSNGVPPGFRFHPTDEELLLYYLKKKVGFEKFELEVIREVDLNKIEPWELQETCRIGSAPQNEWYFFSHKDRKYPTGSRTNRATTAGLWKATGRDKCIRTSYRKIGMRKTLVFYRGRPPHGQKTDWIMHEYRLEDADDDDAQGGTSEDGWVVCRVFKKKCFFKIGGGEGSTTSSQGADAGGHLATMSPPLGGHHDLAYMHPHPYYHHAASYYSQMQAPGPHATAYSHHVQVQDLLTNHRPTDDDGAGTGYDFSGLPVENQPGGGLDVGSSDGVATDDGGQLAGERRDQTTGTAADHQWQAMDGFSNGGSAEVQQMTGAQRGGEMDLWGYGR

SEQ ID NO: 1465 - protein, 396 aa, Glycine max
MSRRYSSFVLKWVSRDRFLRFGCTITSKQLVVRSSKCSSRPSFLVQSGTSLYKKAGSCRTMAMRGQQDKEIEIPTTTTLGYNLPNRDSSSSSSKLSSPTVGERSSSDHDQQHHQPTHQTRTLIFNETPHHNLYPPPPPPPPALAPHRPTSDPDLSTPIAPTSNPSRTAPPQTTTTTTSTPSIRYRECLRNHAASMGSHVVDGCGEFMASGEEGTPESLRCAACECHRNFHRKEVEGELRPQPQPQPQTHVPNYHSYYTNKHNGHLHYPTPSSSSLHHRLVTPTSLVSPVMMAFGGPAESSSEDLNMFQSNTGGAQLISVQQHAPLLSSSKKRFRTKFSQHQKDRMMEFADKIDWKIHKHNEQEVQQFCSQVGVKRQVFKVWMHNNKQTTSSKKQQM

SEQ ID NO: 1466 - protein, 236 aa, Brassica napus
MASLTSDNEQPPTNSNSSSTDHVRKKKSLFASSPSSSRGNAASVPTRDGDSHPRWRSEKQQRIYSAKLIQALRQVRLSSSSSATTSSPTAQKRGKAVREAADRALAVSARGRTLWSRAILANRIKLKFRKQKRPRQTVIPAVTTVVTTGATSSRGRKRRVSVVGLNKKSLPTVNRKVRSLGRLVPGCKKESVPVILEEATDYIQALEMQVRAMNSLVELLSGYSTPGSDSAPPPIR

SEQ ID NO: 1467 - protein, 336 aa, Glycine max
MEESWTSWLCDMEPDDYSFIGQSDIKVDDVNGCLVSPHDVATALLEKNQQSLFSRESHSSAAESGLERPFKLPKREQLSQKIASSSTPSSYILSFDNMNPPTIKVESASKPGTKVVNLEKALPSKNEPTRPQENKKMGSFARSSHHTQDHIIAERMRREKISQQFIALSALIPDLKKMDKVSLLGEAIRYVKQLKEQVKLLEEQSKRKNEESVMFAKKSQVFLADEDVSDTSSNSCEFGNSDDPSSKANFLSLPEVEARVSKKNVLIRILCEKEKTVLVNIFREIEKLHLSIIYSSALSFGSSVLDTTIVAEMEDEFNMGVKELARNLRVGLMQFM

SEQ ID NO: 1468 - protein, 318 aa, Glycine max
MGGDEEEEEVLGSGQSASTNNSLPPPVDKTILKLNHLDVHADDAGSHASLAGKKKKRGGQRAVGPDKSGRGLRQFSMKVCEKVESRGRTTYNEVADELVAEFSEPSNSELPPDQQQYDEKNIRRRVYDALNVLMAMDIISKDKKEIQWRGLPRTTVNDIEELKTERLGLRNRIEKKTAYLQELEEQFIGLQNLIQRNEQLYSSGNPPSGGVSLPFILVQTRPHATVEVEISEDMQLVHFDFNSTPFELHDDNYVLKAMKFGERPQDDNMTHNLTDGGEVSSMSGLCQPQTPTNLNVSNRPPTSPPLPGILKARVKQEH

SEQ ID NO: 1469 - protein, 150 aa, Glycine max
MAKKAKGSHSASSASASSSSDKLVLRIKSNEGTKRSVRQTNSRKKLKAKQKKNKQKFDAMKPRKPPTAFFYFLEDFRKEFQEQNPDVKSMRDIGKACGEKWKTMTYEEKVQYYDIATKKREEFDNAMAEFNKKMENGEFDETDDESEFDE

SEQ ID NO: 1470 - protein, 493 aa, Zea mays
MVLSHGVGGSDVSVHSTFASRYVRTSLPRYRMPEQSIPKEAAYQIINDELMLDGNPRLNLASFVTTWMEPECDKLIQASVNKNYVDMDEYPVTTELQNRCVNMIAHLFNAPLGDAETAVGVGTVGSSEAIMLAGLAFKRRWQNKMKAAGKPCDKPNIVTGANVQVCWEKFARYFEVELKEVKLSDGYYVMDPQKAVDMVDENTICVAAILGSTLNGEFEDVKLLNDLLTKKNAETGWDTPIHVDAASGGFIAPFLYPELEWDFRLPLVKSINVSGHKYGLVYAGIGWCIWRTKEDLPEELIFHINYLGADQPTFTLNFSKGSSQVIAQYYQLIRLGFEGYKNIMENCQENATVLKQGLEKTGKFNIVSKDNGVPLVAFSLKDSSRHSEFEISDFLRRFGWIVPAYTMPPDAQHVTVLRVVIREDFSRTLAERLVLDIEKVLHELNALPARVPSGDLAALAAAESSEREMEKQRQVISLWKRAVLAKKKTNGVC

SEQ ID NO: 1471 - protein, 159 aa, Brassica napus
MVAISEINPTVEATAANCLMLLSRVGQKGGDQKRVFTCKTCLKEFHSFQALGGHRASHKKPNNNESLSGLVKKAKAPSSHPCPICGVEFPMGQALGGHMRRHRNEIGGGAALVTRALLPEPTMTTLKKSSSGKRVACLDLSLGMVENLNLKLELGRTVC

SEQ ID NO: 1472 - protein, 346 aa, Oryza sativa
MVSGAAHSASTSGGGGGSEGSPTGRAAPGMQGGGSAATPAASASASTPASETTVARRLDGLDIQGDDAPSSQPATSKKKKRGPGTRATGPDKGGRGLRQFSMKVCEKVESKGRTTYNEVADELVAEFADPNNNFASPDPDNPNTPQFDEKNIRRRVYDALNVLMAMDIISKDKKEIQWKGLPRTSMSDVEELKTEIIGLKGRIDKKNAYLQELEDQFVGLQNLAQRNEQLYGSGNAPSGGVALPFILVQTRPHATVEVEISEDMQLVHFDFNSTPFELHDDSFVLKALGFSGKEPDDTQAWVGNGGECSTTPIYHQSPQVARPNGVRLPTSPPIPGILKGRVKHEH

SEQ ID NO: 1473 - protein, 331 aa, Glycine max
MEIITPTATATNATAKSPEPDIETMTRIHQNPNPNPKPVSFSNGVLKRHHVNHRAAVVYKECLKNHVASLGGHALDGCGEFMPSPAATADDPSSIKCAACGCHRNFHRREPEESPISPATHHVLEYRPHHRHHPPPPHRSPNSASPPPISSYPSAPHMLLALSGGAGLSVAPENTAAPAPPHHSRKRFRTKFTQEQKEKMHEFADKVGWKMQRRDEEMVMEFCNEIGVDRGVLKVWMHNNKNTFAKKDNLNGNSIGNVAIVSANGVAPIGAVGSATVRSSVHVHEHEHGGINGNGSGDNNHNPLGSRDVNEYENDSGTNGGGGTNGSSSSS

SEQ ID NO: 1474 - protein, 330 aa, Glycine max
MAQLPPKIPNMTPNWPDFSSLHQKMPSLQTTSSNQNPSWVDEILEFSVARRGASRRSVSDSVTFLEAPLLDHHHCKGGSVVGGGGGNNEFERFDDEQFMSMFSDEASGNNNNNNTMMAHTLSSSNPSTPSDHNSINDEKEMENKEEEEKKQLKNESEDEDKSQCKQEITQLPNNDDSNNTSNANATCSSEKITDPKRVKRILANRQSAQRSRVRKLQYISELERSVTSLQAEVSVLSPRVAFLDHQRLLLNVDNSALKQRIAALAQDKIFKDAHQEALKREIERLRQVYHQQNIKKMDNNAAASPPSQSPSPSPKPRCETHTEKEQLINV

SEQ ID NO: 1475 - protein, 525 aa, Triticum aestivum
MSAIKPPPPDRPPQAARLPSPSSSSSAAAAAKQGGTGSRGLLMGRYELGRVLGKGTFAKVYHARHVQTGESVAIKVLDREKAVRSGLVSHIKREIAVLRRVRHPNIVHLFEVMATKTKIYFVMELVRGGELFSRVSKGRLKEDIARRYFQHLISAVGFCHTRGVFHRDLKPENLLVDEAGNLKVSDFGLSAVAEPFQPEGLLHTFCGTPAYVAPEVLARRGYEGAKADIWSCGVILFVLMAGYLPFHDQNLMAMYRKVYKGEFRCPRWFSKDLTSLIMRFLDTNPSTRITLPEVMESRWFKKGFRPVKFYIEDDQLYNVIDAENDMLDLGLPDPLPQPLPPPPPSPSPQQVDGDDSGSESDASVVSCPATSSFEERHRLRGPLPRPASLNAFDIISFSRGFNLSGLFEEKGDEVRFISGEPMPDIITKLEEIANVKSFAVRKKDWRVSLEGTREGVKGPLTICAEIFELTPSLVVVEVKKKAGDKEEYDDFCNKELKPGMQHLVHQMVPVPNTPTISELAERPSR

SEQ ID NO: 1476 - protein, 289 aa, Zea mays
MVDVDLNKVEPWDLPVAASVGPREWYFFSLKDRKYATGQRTNRATVSGYWKATGKDRPVVAARRGALVGMRKTLVFYQGRAPKGRKTEWVMHEYRMEPAAPLLDHQPSSSNSKDEDWVLCRVICKKKLAAGGRAGGGSSRSLVASNGGRETAPATPPPPPLPPRMDTDATLAQLQAAMHATAGALEQVPCFSSFNNNTTASSRAAAAAAAAAQPCYLPSMATGGSHGTTSYYLDHAMLPPELGGCFDPLHGDKSCSRRCWASSAATRWRRACTCSTRWPPALSSLRPLG

SEQ ID NO: 1477 - protein, 234 aa, Arabidopsis thaliana
MSFAEEFEANLVSLAHVLQKKYALLRDLDKSLQENQRQNEQRCEKEIEDIRRGRAGNITPNTSLTKFSEEALDEQKHSVRIADEKVTLAMQAYDLVDMHVQQLDQYMKKSDEVIRKEKEAAAATLELENNGKAGNAGEGGRGGRKKTRLATAASTAAASTGMTSSNMDLDLPVDPNEPTYCICNQVSFGEMVACDNNACKIEWFHFGCVGLKEQPKGKWYCPECATVKKSRKGR

SEQ ID NO: 1478 - protein, 639 aa, Arabidopsis thaliana
YRRASAVAVVTMDPGIANHTLPEEFEEVVVPEMLEKEVGAKVDVKPTLTTSSPAPSYIELIDPGVHNIEIYAEMYNRPIYRVALFFSLFLIAYAYGLDGNIRYTFQAYATSSYSQHSLLSTVNCIKTVIAAVGQIFFARLSDIFGRFSIMIVSIIFYSMGTIIESQAVNITRFAVGGCFYQLGLTGIILILEVIASDFSNLNWRLLALFIPALPFIINTWISGNVTSAIDANWKWGIGMWAFILPLACIPLGICMLHMRYLARKHAKDRLKPEFEALNKLKWKSFCIDIAFWKLDIIGMLLITVFFGCVLVPFTLAGGLKEEWKTAHIIVPEVIGWVVVLPLYMLWEIKYSRHPLTPWDLIQDRGIFFALLIAFFINFNWYMQGDYMYTVLVVAVHESIKSATRITSLYSFVSVIVGTILGFILIKVRRTKPFIIFGISCWIVSFGLLVHYRGDSGAHSGIIGSLCLLGFGAGSFTYVTQASIQASAKTHARMAVVTSLYLATYNIGSAFGSSVSGAVWTNILPKEISKRISDPTLAAQAYGSPFTFITTYTWGTPERIALVMSYRYVQKILCIIGLVFCFPLLGCAFMLRNHKLTDSIALEGNDHLESKNTFEIEEKEESFLKNKFFTHFTSSKDRKD

SEQ ID NO: 1479 - protein, 513 aa, Zea mays
MANIDMAKILADLDRGAGDARLPKTKLVCTLGPASRSVPMLEKLLRAGMNVARFNFSHGTHQYHQETLDSLRQAMHNTGILCAVMLDTKGPEIRTGFLKDGKPIKLTKGQEITVTTDYDIKGDEKMIAMSYKKLPVDVKPGNVILCADGTISLAVLSCDPDAGTVRCRCENTAMLGERKNCNLPGIVVDLPTLTEKDKEDILGWGVPNDIDMIALSFVRKGSDLVTVRQVLGQHAKRIKLMSKVENQEGVVNFDEILRETDAFMVARGDLGMEIPVEKIFLAQKMMIYKCNIAGKPVVTATQMLESMIKSPRPTRAEATDVANAVLDGTDCVMLSGESAAGAYPEVAVKIMARICIEAESSLDHEAVFKAMIRSAPLPMSPLESLASSAVRTANKAKAALIVVLTRGGTTAKLVAKYRPRVPILSVVVPVLTTDSFDWTISSEGPARHSLIYRGLIPLLAEGSAKATDSESTEVILEAALKSAVQKQLCKPGDAIVALHRIGVASVIKICIVK

SEQ ID NO: 1480 - protein, 379 aa, Zea mays
AVAVVTMDGPKRSQLRVRLRVTARRRGADGDGAGGAAGPGGRKRRMEAPVRNSVAKLQRREIGGRQLAARGGGPAAAVPERFRNMQLQEEFDTYDENAHLFVKLQFLKRRSKIIEIVAAKDIIFALANSGLCAAFDRVTNKRIAFLNLSPDEVIRSLFYNKNNDSLITVSVYAADKFSTLECRTTPIEYIRRNQLDAGFPLFESESLKWPGFVEFDDVNGKVLTYSAQDGIYKVFELKNYSFLYSIPDENVQEIKISPGIMLLIYDRTPSYVPLKILSIEDGKQLKSFKHLLHRNKKIDFIEQFNEKLLVKQENENFQIFDVRSSELIEVSVSKFMTPSAFIFLYENNLFLTFRNRTVAVWDFRGELVTSFEDHLLWHK

SEQ ID NO: 1481 - protein, 127 aa, Zea mays
MPGKHQQHMTATAAAAAAAPKGCVTVRVGLEGEEQRRFAVPLGHLKHPLFGALLEEAEREYGFRHQGALAIPCRVDRFVQLERLIGRDLHGACAHHLVDLDGAAAAAAQHQHQHHLHLPRFVGCFRA

SEQ ID NO: 1482 - protein, 348 aa, Zea mays
AVAVVTMDDPSSASNKHKHKRGRKPKASPPSPDHSSPSPSVAPAPAGRRGRKPRRHEALADVDATRPPSPPRRGEPKPVANGGDVVAVAESGPASWDEVVRVVPCMDAVVKVFCVHTEPNISLPWQRKRQYCSSSSGFIISGHHVLTNAHSVEYLATVLAIGTECDIGVSPIEFGTLPVLQDAVTVVGYPIGGDTISVTSGVVSRIEMLLYVHGSIELLGLQIDAAINSGNSGGPAFNDRGKCVGIAFQSLKHEDAENIGYVIPTPVITHFIEDYKNLENTQAAIEYIHSLSRAQPAHSLNGVGLCPASRSLSTHAATMSSTPQLKAHHVKHPGCHYVKQNRRREELM

SEQ ID NO: 1483 - protein, 823 aa, Hordeum vulgare subsp. vulgare
MGETAGERALSRVHSVRERIGHSLSAHTNELVAVFSRLVNQGKGMLQPHQITAEYNAAIPEAEREKLKNTPFEDLLRGAQEAIVIPPWVALAIRPRPGVWEYVRVNVSELGVEELSVLRYLQFKEQLANGRTDNNFVLELDFGPFNASFPRPSLSKSIGNGVQFLNRHLSSKLFHDKESMYPLLNFLRAHNYKGMAMMLNDRIRSLGTLQGALRKAETHLSGLPADTPYSEFHHRFQELGLEKGWGDCAQRASETIHLLLDLLEAPDPSSLEKFLGTIPMVFNVVILSPHGYFAQANVLGYPDTGGQVVYILDQVRAMENEMLLRIKQQGLDITPKILIVTRMLPDAHGTTCGQRLEKVLGTEHTHILRVPFKTEDGIVRKWISRFEVWPYLEAYTDDVAHEIAGELQANPDLIIGNYSDGNLVACLLAHKLGVTHGTIAHALEKTKYPNSDLYWKKFEDHYHFSCQFTADLIAMNHADFIITSTFQEIAGKKDTVGQYESHMAFTMPGLYRVVHGIDVFDPKFNIVSPGADMSIYFPYTEQQKRLTSLHTEIEELLFSDVENAEHKFVLKDKKKPIIFSMARLDRVKNMTGLVEMYGRNPRLQELVNLVVVCGDHGKVSKDKEEQVEFKKMFDLIEKYNLSGHIRWISAQMNRVRNGELYRYICDMKGAFVQAAFYEAFGLTVIEAMTCGLPTFATAYGGPAEIIVNGVSGYHIDPYQNDKASALLVDFFGKCQEDPSHWNKISQGGLQRIEEKYTWKLYSERLMTLSGVYGFWKYVSNLDRRETRRTLKCSMPSSTAKWLQLSHWLLRARPRANDLSLPEK

SEQ ID NO: 1484 - protein, 616 aa, Pseudomonas fluorescens
MSGKAQQQSRIKELIVLGREQGYLTYAEVNDHLPEDISDPEQVEDIIRMINDMGINVFEAAPDKDSLMLADADTDEAAAEEAAAALAAVETDIGRTTDPVRMYMREMGTVELLTREGEIEIAKRIEEGIREVMGAIAHFPGTVDHILSEYTRVTTEGGRLSDVLSGYIDPDDGIAPPAAEVPPPVGAKTAKADDDTDDDEAEASSDDEEEVESGPDPIIAAQRFGAVSDQMEITRKALKKHGRGNKQAIAELIALAELFMPIKLVPKQFEGLVERVRSALERLRAQERAIMQLCVRDARMPRADFVRQFPGNEVDESWTDALAKGKAKYAEAIGRLQPDIIRCQQKLTALETETGLTIAEIKDINRRMSIGEAKARRAKKEMVEANLRLVISIAKKYTNRGLQFLDLIQEGNIGLMKAVDKFEYRRGYKFSTYATWWIRQAITRSIADQARTIRIPVHMIETINKLNRISRQMLQEMGREPTPEELGERMEMPEDKIRKVLKIAKEPISMETPIGDDEDSHLGDFIEDSTMQSPIDVATVESLKEATRDVLSGLTAREAKVLRMRFGIDMNTDHTLEEVGKQFDVTRERIRQIEAKALRKLRHPTRSEHLRSFLDE

SEQ ID NO: 1485 - protein, 246 aa, Aquifex aeolicus VF5
MKLYSIQIRQTTPEENLKKVINFLEKVEENSLVLLPEMWYSGFDYENLEEHAQKTPEVLEVLKKISKEKSLTLCGTLPEKGTEGILNTAFLIEDGRVIGKRSKIKLFPIFDEDKYFIPGKENKVFETKLGKAGILICFEIRFTDLIMNFWRERPDVVLVPAQWGYARRKHFETLCRARAIELQAYLLASNTWGEYLGTRFAGHSGIYSPWGEVLAFSEKGDTLLAADYDKDYIEEVRRTLPIKPSF

SEQ ID NO: 1486 - protein, 328 aa, Campylobacter jejuni
MKILISGGAGYIGSHTLRQFLKTDHEICVLDNLSKGSKIAIEDLQKIRTFKFFEQDLSDFQGVKALFEREKFDAIVHFAASIEVFESMQNPLKYYMNNTVNTTNLIETCLQTGVNKFIFSSTAATYGEPQTPVVSETSPLAPINPYGRSKLMSEEVLRDASMANPEFKHCILRYFNVAGACMDYTLGQRYPKATLLIKVAAECAAEKRNKLFIFGDDYDTKDGTCIRDFIHVDDISSAHLSALDYLKENESNVFNVGYGHGFSVKEVIEAMKKVSGVDFKVELAPRRAGDPSVLISDASKIRNLTSWQPKYDDLGLICKSAFDWEKQC

SEQ ID NO: 1487 - protein, 201 aa, Shigella flexneri 2a str. 301
MALHDENVVWHSHPVTVQQRELHHGHRGVVLWFTGLSGSGKSTVAGALEEALHKLSVSTYLLDGDNVRHGLCSDLGFSDADRKENIRRVGEVANLMVEAGLVVLTAFISPHRAERQMVRERVGEGRFIEVFVDTPLAICEARDPKGLYKKARAGELRNFTGIDSVYEAPESAEIHLNGEQLVTNLVQQLLDLLRQNDIIRS

SEQ ID NO: 1488 - protein, 216 aa, Glycine max
MEERVGILLLILLGAAWACDTRELAIISELNRKSDVCELCEEYTAEALDYLNDKENQREIIDSLHNICNHILSFKQQCIELVDHYAPRFFLEIASVQPGELCKQIHICQSAKISSEVEGNSCDSCKDTVSALLVKLNDPDTKLEIMEALLKACNSMDKFSKKCKRMVFEYGPLILVKAEKFLKTADICTTLHACPASTAVSNKEASIMEVPLISDS

SEQ ID NO: 1489 - protein, 487 aa, Oryza sativa (japonica cultivar-group)
MLRAAARALTVSSLNPKVLALADHHLGGLVARRAQSMQQELDANPASHPFSEIIYCNHSNPQSQGQQPNKFFREVLALCNHPHLLDRSEASFMFSSDAITRAREIVGFIPGKTTGGYSHCQGIEGLRDAIAAGIASRDGLPSYSEDIFLTDGAAAPVHMMMHLLIRGKKDGILCPIPSHSLYTDSMVLRGATLVPYYLDESRGWSVNISDLKKQLDGARAKGIDVRGLVVVNPGNPTGQVLVEENQCEIVELCKNECLVLLADEVYQENIYTDQKKFNSFKKVARSIGYGEGDISLVSFHSVSNGYYGECGRRGGYMEVTGFSSEVRGEVYKVASLSACSNISGQILMSLVMNPPKVGDESYPSYRAERDSILSSLSCCAEAMVSTFNSMEGMTCNKAEGGISVFPSVRLPPRAIEAAEAMNTEPDVFYALRLLESTGIVVVPGSVFGQVPGTWHFRCTILPQEEKTRQIISRFNVFHEAFMEEFRS

SEQ ID NO: 1490 - protein, 467 aa, Gluconobacter oxydans 621H
MTAENAATTGLHPVDEKLPVWRLGAYGLQHVLAFYSAAVIVPILVAGALHLPRETLIHLIDADLFTCGIASLLQAVGFGPVGVRLPLLQGVTFTAVGPMIAIGSAVGGGTPGLLSIYGSVIVAGFVTLLMARHFAGLVRFFPPVVTGSIILIIGLALLPVAANDIVSGASPSVMQDHVPLRSIWYGLGTLASILVIQRLFRGFIATIAVLIGLVLGTLVAWMLGDANFGDVTSAPLLSITHPFYFGMPTFHPVSILSMVIVMTISMIETIGNVYATGEIVDKPITSEDIARTLRADGIATMLGGVLNSFPYTCFAENVGLVRMTGVKSRWVVAAGAVIMMMLGCLPRLGALVAAVPLPVLGGAALAMFATVAVVGVQTLSRVDFNRQSNVIIVGTSIGLSMLATAQPHISDTFPMWAKIVFGSGITLGSLSAILLHLIFNVKRTIHEAAYATDVPREALIDERIRER

SEQ ID NO: 1491 - protein, 426 aa, Sulfolobus solfataricus P2
MDKGRCTILNSEELWAQAKQLFAGGVNSPVRAAVKPFPFYVERGKGAYIYTVDGKKFIDYVLGYGPLILGHSPESVKRRIVEQLERGWLFGTPSELEIELARKIRSHIPSAQKIRFVNSGTEATMAAIRLARGYTKRSKILKFSGNYHGAHDYALVEAGSAATEYNVATSDGVPMEIMKTVEICEFNDLDCVDKKLRNEDIATVILEPVMGNAGVILPEKDFLFGLRELTKTYNSLLIFDEVITGFRISIGGAQSYYQIYPDITTLGKIIGGGFPIGAVAGKAEIIDNFTPAGKVFNAGTFNANPISMIAGIATIEELEKEYPYIIANQAAKTLVEELERLLKTKHTINHVGSMFQIFFGIDEVRNYSDAKRADKEYYIKFHERLLKEGVFIPPSQYETIFTSAAHKDDVIADTIDKLMKVIGELN

SEQ ID NO: 1492 - protein, 421 aa, Bradyrhizobium sp. BTAi1
MRRVVVTGLGMVSPLGCGVETTWQRILQGKSGARKIETFDVSDLPAKVACQVPRGDGTDGTFNADQWMEPKDQRKVDDFIIFAMAAARQALDDADWHPSTEEDRCATGTLIGSGIGGLSGIADTAILLKERGPRKVSPFFIPGRLINLASGYVSIEHGLKGPNHSVVTACSTGAHAIGDASRLIALGDADVMVAGGTESPICRIGMAGFCAARALSTGFNETPEKASRPYDKDRDGFVMGEGAGIVVLEEYEHAKARGARIYAEVCGYGLSGDAYHITSPSPDGDGGFRSMSAAMKRAGITAADIDYINAHGTSTQVGDEIELGAVERLLGNAASRISMSSTKSSIGHLLGAAGAVEAIFSILAIRDNVAPPTINLENPSVATAIDLVPHSARKREINVALSNSFGFGGTNASVILRRVVG

SEQ ID NO: 1493 - protein, 425 aa, Brucella suis 1330
MDYRRFFEEAIDQLHAEKRYRVFADLERIVGRFPQAIWRNNGTAREITVWCSNDYLGMGHHPDVIKAMCETAGSAGSGAGGTRNISGNNHPLVELESELADLHGKEAGLVFTSGFVSNEASISTIARLLPNCLILSDELNHASMIEGVRHSGAEKKIFRHNDVEHLEQLLKAADRSRAKLIVFESVYSMDGDIAPIEKIADLADKYNAMTYIDEVHAVGMYGAHGGGITERDGLAHRIDIIEGTLAKAFGALGGYITGSRAIIDAVRSYAPGFIFTTSLPPAVAAAATAAIRHLKSSQAERDGQQRQAQRAKDVLSAAGLPVMPSQTHIVPILVGDPELCKKASDRLLEVHGIYIQPINYPTVPRGTERLRITPSPLHDDKLIDGLKDALLEVWNELGIPFAEPSAPQAANSDRIIPLMVSKAGG

SEQ ID NO: 1494 - protein, 318 aa, Glycine max; identical to SEQ ID NO: 1468

SEQ ID NO: 1495 - protein, 268 aa, Vibrio fischeri ES114
MDRYQALFAQLEKKNQGAFVPFVTIGDPNPELSYDIMETLIEAGADALELGIPFSDPLADGPTIQGANIRALDSKTTPAICFELITKIRSKYPDTPIGLLVYANLVFANGIDNFYTKCQQAGVDSVLIADVPTNESQEFRESAIEHGIHPIFIAPPSASPETLETVAKLGGGYTYLLSRAGVTGAETKAGMPVAQLLERLNQYDAPPAILGFGISEPAQVEEAVKAGAAGAISGSATVKLIEQHQANPEALLKALADFTSSMKAATQK

SEQ ID NO: 1496 - protein, 229 aa, Cucumis melo
MSSSKEQSPSPETESSSSSSSDSNKKPKRINSNSSSNSKHAVYRGVRMRNWGKWVSEIREPRKKSRIWLGTFPSPEMAARAHDVAALSIKGNSAILNFPDLVHLLPRPVSLAPRDVQAAAAKAAHMHNLSSNANTNNHNTNSNSSSAFSDELSEIVELPALGTSYDGGVGVGGEFVFVESELESAAWLYQPPWVQSLQEDYDDIDGDGDCGKLGMGFVSNGFKGFLFDY

SEQ ID NO: 1497 - protein, 247 aa, Arachis hypogaea
MGKSYPTVSADYQKAVEKAKKKLRGFIAEKRCAPLMLRLAWHSAGTFDVATKSGGPFGTIKHPSELAHGANAGLDIAVRLLEPIKEQFPTLSYADFYQLAGVVAVEITGGPEIHSTLEERTSLSHPRRSLARCTNDHLRDVFGKAMGLSDQDIVALSGGHTLGAAHKERSGFEGPWTSNPLIFDNSYFKELLSGEKEGLLQLPSDKALLSDPVFRPLVEKYAADEDAFFADYAEAHLKLSELGFADA

SEQ ID NO: 1498 - protein, 402 aa, Triticum aestivum
MDYMNGPGRNHLFVPGPVNIPDQVIRAMSRQNEDYRSPAIPALTKTLLEDVKKIFKTTTGTPFLFPTTGTGAWESALTNTLSPGDRIVSFSLGQFSLLWIDQQQRLGFSVDVVESDWGYGADLGALESKLRTDSQHTIKAICIVHNETATGVTNDLHAVRKLLDAYRHPGAAAWWNGVSSICALDFRMDEWGVDVALTGSQKALSLPTGLGIVCASPKALEAAKTAKSVRVFFDWKDYLKFYKMGTYWPYTPSIQLLYGLRAGLDLLFEEGLDNVIKRHTRLGTATRLAVAAWGLKNCTAKEENFSDTVTAVVVPPYIDSSEIVKHAWKRYNLSLGLGLNKVAGKVFRIGHLGHLNELQLLGCLGGVEMVLKDIGYPVKLGSGVAAAAAYLSNSTPLIPSRI

SEQ ID NO: 1499 - protein, 165 aa, Cucumis melo
MELPVEEDNDDEFSPLNLIRYHLLQDSHSFSTLRDFGFKLEFEDFEYVKPSEEEEEEPPIQSPKRHPERQSPRSSSPDGGRRYRGVRRRPWGKFAAEIRDPSRKGSRVWLGTFDSDVDAARAYDSAAFKIRGRKAKLNFPLDAGKSDPPPGNGRKKKRRETNLNA

SEQ ID NO: 1500 - protein, 389 aa, Salmonella enterica subsp. enterica serovar Typhi Ty2
MTDTTILQNNTHVIKPKKSVALSGVPAGNTALCTVGKSGNDLHYRGYDILDLAEHCEFEEVAHLLIHGKLPTRDELNAYKSKLKALRGLPANVRTVLEALPAASHPMDVMRTGVSALGCTLPEKEGHTVSGARDIADKLLASLSSILLYWYHYSHNGERIQPETDDDSIGGHFLHLLHGEKPTQSWEKAMHISLVLYAEHEFNASTFTSRVIAGTGSDVYSAIIGAIGALRGPKHGGANEVSLEIQQRYETPDEAEADIRKRVENKEVVIGFGHPVYTIADPRHQVIKRVAKQLSEEGGSLKMYHIADRLETVMWETKKMFPNLDWFSAVSYNMMGVPTEMFTPLFVIARVTGWAAHIIEQRQDNKIIRPSANYTGPEDRVFVPIEKRC

SEQ ID NO: 1501 - protein, 86 aa, Arabidopsis thaliana
  misc_feature (65)..(65): Xaa can be any naturally occurring amino acid
  misc_feature (81)..(81): Xaa can be any naturally occurring amino acid
  misc_feature (84)..(85): Xaa can be any naturally occurring amino acid
  unsure (1)..(86): unsure at all Xaa locations
LSPVRVTYKLSGGFLVLEQHTLSFDLSELRGPILLEDYHLLEKLANFDRDRIPDTVVHARGASAXGFFEVTHDITQLTSAXFLXXP

SEQ ID NO: 1502 - protein, 273 aa, Cucumis melo
MCGGAIIADLIPRRDGQRVTASDIWPNSSFFHFNKIRSDQVSTPLKRTPLPASSEASKPKKRQRKNLYRGIRQRPWGKWAAEIRDPRKGIRVWLGTFNTAEEAARAYDREARKIRGKKAKVNFPNEDDAYSIQAPIPQFHPHLYTVPENSEFPYDLNQIGDFTGTHFPVAIEEQSGSGSEDSYSPPKRFGVKEAEDQKPEQKVSVIAAAEEENEVQKLSEELMAYENYMKFYQIPYLDGQSTVTNPAEEQVVGDLWSFDDEDGLHGSVSSSEL

SEQ ID NO: 1503 - protein, 191 aa, Brassica napus
MVAMFQEDNGTSSVASSLLQVFSTMSLTRPTLLPSPSSSPFHSLKDLKPEERGLYLIHLLLTCANHVASGSLQNANAALEQLSLLSSPDGDTMQRVAAYFTEALANRILKSWPGLYKALNATQTRTSNVSEEVHVRRLFFDMFPILKVSYLLTNRAILEAMEGEKMVHVIDLDASEPAQWLALIQAFNSRP

SEQ ID NO: 1504 - protein, 247 aa, Ipomoea nil
MEFQSDQSREMSPQRKMGRGKIEIKRIENTTNRQVTFCKRRNGLLKKAYELSVLCDAEVALIVFSSRGRLYEYANNSVKATIDRYKKACSDSTNTGSISEANTQFYQQEANKLRQQISNLQNQNRNYMGEGLGGFNLRDLKNLESKIEKGISKIRAKKNELLFAEIDYMQKRQEIDLHNNNQYLRAKIIETERAQQQQQQMNLMPGSSSYHELAPPQQFDARNYLQLDGFQSTSSYSKQDHLPLQLV

SEQ ID NO: 1505 - protein, 544 aa, Ustilago maydis 521
MTGSHSVPATGPSHSHHANPPTSAASSSSKTIVIKLGTSSIISEETQLPKIAILSSLVETCHKLRSLGHKVVIVCSGAIGMGRIRMHVNEKPKSLGERQALAALGQLRLIALWDSLFGTVGIDVAQVLLTRNDIADRPRYNNARTTLNTLISAPFNAIPIVNENDTVSVSELRFGDNDTLSAITAGLVDADFLFLCTDVDGLYTGNPRSDPNARRLGVVEDVAAARKAVSVATMGSSFGTGGMQTKLIAAELATAAGVATVIINGEHPENMIKVVAKGIPSIGTESTSLRMDSLASSVSSLASDEKELIGYPPLDSPAHTIFLPKANPLSSRKWSILHALHPAGALIIDEGAFKRIARADSGGRLLPAGVVGVEGNWERMQAIRLVVRRRISKAIPHATGLEQGAPLSNSTPIARSLGQYLLRNDTDSVSGTRTPPVIDSLRKGSVAAASVPSSPSSTAASPADAAAHATTSQSTLTKDGDQDWEWQLIEVGRALANYTSIESERIKGLKSSQISSTLGYADSEYLTDQVALHTLSLPDPYPSQ

SEQ ID NO: 1506 - protein, 244 aa, Ipomoea nil
MEFPNQALEEEESSHRKSGRGKIEIKRIENTTNRQVTFCKRRNGLLKKAYELSVLCDAEVALIVFSTRGRLYEYANNSVRATIDRYKKHHSDSTNTGSVSEANTQFYQQESAKLRRQIREIQTSNKQILGESLGVLNHKELKNLEGKVEKAIGRVRSKKNELLFSEIELMQKREIELQNANMYLRAKISEFERAQQQMNLMPGSEYQETMTTSQTYDAHNFLPLTLLEPNQHYSRHDQTALQLV

SEQ ID NO: 1507 - protein, 291 aa, Corynebacterium glutamicum ATCC 13032
MTFTLNNGLAIPDIGFGVFQTPPDETRNSVNAALEAGYRHIDTAAAYGNEREVGEAIAASGIGRDEITIETKIWVTDYGFEETLHAFDKATGKLGVDTLDILILHQAVPSSFDRTIAAYKALEKLLFDGAVRAIGVSNFMPEHLDKLLLETSIVPALNQIECHPYFQQRDVLARNEQLGILTQAWSPIGGITFYRDGQLPSTLENEVIAGIAAEVGKTPAQVMLRWHLQRRRHAIPKSVTPSRIVENFEIFDFELSDEQLQQIDALNTDLRGGPEPENITMENYYREIPEA

SEQ ID NO: 1508 - protein, 424 aa, Cyanidium caldarium
MALTSLGPLPDSFSSVSSLASAPRVPLFKDELRPFIEDDANDDDEEGGLVAQEQATMKPRRRAKTSTTCAATAYVREICRLDRLTDEEVASLSMATQDYCALMKQREELCAKLGREPTDTEWSTTVGVSEEEVRKRIERGRRARERLVASNLRLVLAIANRYKLRAVVCSAWKSRSKGGMDMPSHEKVRLQRQHNIFLGDLIQEGALGLIRAAEKFDPSKGFKFSTYATWWIRQAIQRCVSEHSRTIRLPNHVTESLRQIYRMRARLQHVLKRPPTDEEVAEACNMTLKRLKKITQHAWETQTLSLEGPPNSEAHSLYKSQQGEAPLSIGSIIEATEETPEEALERNCMREDVECVLRTLPFQEREILRLRYGISDDERPHSTEELSARFQLPVHTIRLIESRALRKLRHPSLAAMLREYVNIL

SEQ ID NO: 1509 - protein, 96 aa, Methylococcus capsulatus str. Bath
MKIRPLHDRVVVIRREEEKTSPGGIVIPDTAKEKPIKGEIVAVGTGKVLDNGQVRPLAVKAGDTVLFGKYSGTEIKIDGTEYLMLREDDIMGVIES

SEQ ID NO: 1510 - protein, 573 aa, Pseudomonas syringae pv. phaseolicola 1448A
MSRRKRRLEKMTKTSRPLYISYAGPSLLEMPLLNKGSAFTPQERVEFNLIGLLPQNVETIEEQVTRVYSQYKQCASDLDKHIYLRSIQDNNETLFFRLLDSHLDEMLPIIYTPTVGQACQEFSKIYRTHRGLFISYPERDRIDDILRSATKDRIKIIVVTDSERILGLGDQGIGGMGIPIGKLSLYTACGGISPAYTLPIVLDVGTNNRELLDDPMYMGWRHERVSGKEYEDFIALFIDAVQRRWPDVLLQFEDFAQSNAMPLLEKYRDELCCFNDDIQGTASVAVGTLLAACKAKNETLGQQKVVFVGAGSAGCGIAEHIIAAMRIEGLSESEARKRIFMVDRFGLLTEGMDNLLDFQKRLAQKTADVSGWTAGTEAFPQLLDVVTNAGATVLIGVSGQRGLFTEQVIRELHKHCAKPLVMPLSNPTSKVEATPEEILRWTDGNALVATGSPFAPVEINGRTVHIAQCNNSYIFPGIGLGVVACKASRITDRMLMAASNALAECSPMVTGQGDAVLPPLKEIQQVSRKIALAVAKEAQAEGLALETSEEALLEAIERNFWLPGYRAYRRRSV

SEQ ID NO: 1511 - protein, 542 aa, Methylococcus capsulatus str. Bath
MAAKEVRFSDDARHRMLAGVNILADAVKQTLGPKGRNVVLEKSFGAPVVTKDGVSVAKEIELKDKFENMGAQMVKEVASKTSDVAGDGTTTATVLAQAIVREGLKSVAAGANPMDIKRGIDQAVGVVVEELKKLSKPCTDSKAIAQVGTISANSDESIGQIIAQAMDTVGKEGVITVEEGSGLQNELDVVEGMQFDRGYLSPYFINKQDTMGVELENPYVLLHDKKISSIRDLLPVLEKTAKAGRSLLIIAEDVDGEALATLVVNNMRGILKVCAVKAPGFGDRRKAMLEDIAILTGGQVISEELGLSLEKVELTDLGQAKKIQINKETTTIVDGAGSADAIKARVEQIRKQIEDTTSDYDREKLQERVAKLAGGVAVIKVGAATEVEMKEKKARVEDALHATRAAVEEGIVPGGGVALIRAQQALKTLEGKNHDQTVGIAILRRAIEEPLRQIVANAGEEPSVVLAKVQEGTGTFGYNAGTAEYGDMIEMGILDPTKVTRSALQNAASVAGLMLTTEAMVAEMPKKEKGGMPAGGGMDDMM

SEQ ID NO: 1512 - protein, 202 aa, Methylococcus capsulatus str. Bath
MGEQPPKGEPKRLSEPRKTACAGLGPTQTGTWPLRWTLFQRPVRDFDGDTAMGWDRKNFRRPTEEEIKERLSEEQYAICRGNGTERPFANPYWDNHREGIYVDIVSGEPLFSSADKFDSGTGWPSFTRPLEPDHIVTLTDHSHLMVRTEVRSRYGDSHLGHVFDDGPAPTGKRYCINSGALRFIPKEELAEAGYEEYLKLFD

SEQ ID NO: 1513 - protein, 229 aa, Triticum aestivum
  misc_feature (217)..(217): Xaa can be any naturally occurring amino acid
  unsure (1)..(229): unsure at all Xaa locations
MKIQCDSCGVAAATVVCCADEAALCARCDVEIHAANKLASKHQRLPLDALGAKLPRCDICQEKAAFIFCVEDRALFCRDCDEPIHVPGTLSGNHQRYLATGIRVGLGPVSACAAGDHGAAHDADHHAPPKVSCEPQPAARAQQVPSPPQFLPQDWAVDELLQFSDYESSDKLHKDSPLAFKELEWFTANMELFHDHAPKGGQATMEVPEFFASQAAXDAAYYRASRVAP

SEQ ID NO: 1514 - protein, 376 aa, Gluconobacter oxydans 621H
MWSSPRFLQRKNPMTSSVPAVTPSRTALVVGATGIVGQNLAARLVAEGWTVHGLARRPRHDVAGVLPVAADLLDPPSLAGALKDLRPSHVFFCSWMRQATEEENCRVNAAMVRNLFAALPEPELLVHAALTTGMKHYLGPFEAYASGEPPVTPFREEVPRLDLRNFYYDQEDALYEAAERHGFSWSVHRPHTVIGYAVGNAMNMGSTLAVYATICRETGRPFVFPGSPVQWDGLTDLTDARQLARQLLWASTSAAGRNEAFNIVNGDLVRWKWLWPRLAVWFGIEAAPYPGHATSLEETLSGDAELWEQIAAKYGLTESRIGRLASAWHTDADLGRPVECVTDMSKSRRAGFLDYQYTPDSFADLFTRLRAERLIP

SEQ ID NO: 1515 - protein, 336 aa, Thermococcus kodakarensis KOD1
MELPILPTSIIGSYPKPRWLLRMYNLRELGRLPEEDFREAVRDASVAVLREHERAGIDIPWDGEMGRSEMTEYFTAKIAGFKFYGPIRVWGNAYFNKAAAVSKLEYREPLVLDEFRWVKENTTREIIKVPITGPYTIAEWSFNEYYSSKEELAFDLAKILNKEFKLLEKEGATFIQIDEPAMLNHPDEVSIAVEAINRAVKGVKVKFGLHVCYSNYYLLADYFDDIKVSQFALEAANRNFRDLDYLKKLTHQELGFGVVDVHNPRVESPEEVAKAIRKVMEYIEPERLYINPDCGLKLLDRRIAYQKLVNMVKGVEIVRRELAREGKTSIPFRREV

SEQ ID NO: 1516 - protein, 637 aa, Nicotiana tabacum
MMESCDCIEALLPNDDLLVKYQYLSDFFIAFAYFSIPLELIYFVHKSACFPYRWVLMQFGAFIVLCGATHFISLWTFFMHSKTVAVVMTIAKILTAAVSCITALMLVHIIPDLLSVKTRELFLKARAEELDKEMGLIIRQEETGRHVRMLTHEIRSTLDRHTILKTTLVELGRTLDLAECALWMPCQGGLNLQLSHNLNNLLPLGSTVPINLPIINEIFSSPGAIQIPHTNALARMRNTAGRYIPPEVVAVRVPLLHLSNFHINDWPELSARSYAVMVLILPMNGLRKWRDHELELVQVVADQVAVALSHAAILEESMRAHDQLMEQNIALDVARQEAEMAIHARNDFLAVMNHEMRTPMHAVIALCSLLLETDLTPEQRVMIETILKSSNLLATLINDVLDLSRLEDGILELENGTFNLHGILREAVNLIKPIASLKKLSITLALALDLPILAVGDAKRLIQTLLNVAGNAVKFTKEGHISIEASVAKPEYARDCHPPEVYPMPSDGQFYLRVQVRDSGCGISPQDIPFVFTKFAETRNTSNRSSGGEGLGLAICRRFIQLMKGNIWIESEGLGKGTTVTFVVKLGVCNHPNALPLLPMAPRGRLNQGSDDLFRYRQFRGDDGGMAVTVQRYQRSL

SEQ ID NO: 1517 - protein, 222 aa, Brassica napus
  misc_feature (213)..(213): Xaa can be any naturally occurring amino acid
  unsure (1)..(222): unsure at all Xaa locations
MGRRPARCYRQIKGKPYPKSRYCRGVPDPKIRIYDVGMKKKGVDEFPFCVHLVSWEKENVSSEALEAARIACNKYMVKSAGKDAFHLRIRVHPFHVLRINKMLSCAGADRLQTGMRGAFGKALGTCARVAIGQVLLSVRCKDNHGAHAQEALRRAKFKFPGRQKIIVSRKWGFTKFNRADYTRLRQSKRIVPDGVNAKFLSNHGRLANRQPGXSAFISATSD

SEQ ID NO: 1518 - protein, 521 aa, Neisseria gonorrhoeae
MKHRTFFSLCAKFGCLLALGACSPKIVDAGTATVPHTLSTLKTADNRPASVYLKKDKPTLIKFWASWCPLCLSELGQAEKWAQDAKFSSANLITVASPGFLHEKKDGEFQKWYAGLNYPKLPVVTDNGGTIAQNLNISVYPSWALIGKDGDVQRIVKGSINEAQALALIRNPNADLGSLKHSFYKPDTQKKDSAIMNTRTIYLAAAASGAWKPISNASTAWLTRYRYANGNTENPSYEDVSYRHTGHAETVKVTYDADKLSLDDILQYYFRVVDPTSLNKQGNDTGTQYRSGVYYTDPAEKAVIAAALKREQQKYQLPLVVENEPLKNFYDAEEYHQDYLIKNPNGYCHIDIRKADEPLPGKTKAAPQGQRLRRGQRIKNRVTPNSNAPDRRAIPSDQNSATEYAFSHEYDHLFKPGIYVDVVSGEPLFSSADKYDSGCGWPSFTRPIDAKSVTEHDDFSFNMRRTEVRSRAADSHLGHVFPDGPRDKGGLRYCINGASLKFIPLEQMDAAGYGALKGEVK

SEQ ID NO: 1519 - protein, 54 aa, Arabidopsis thaliana
MGSETFLEIILAILLPPVGVFLRYGCGVEFWICLLLTILGYIPGIIYAIYVLVG

SEQ ID NO: 1520 - protein, 412 aa, Actinobacillus pleuropneumoniae serovar 1 str. 4074
MQMLTLAQQAKIASIELAQFGNVQKNHALLTIAEQLEQRSAEILAANAKDIEFAKNQGISTAIIDRLLLNESRLQGIANDVRNVAKLADPVGQVIDGGVLNSGLKIERQRVPLGVILTIYEARPNVTIDVASLCLKTGNAVILRGGKETKFTNAVLVEVVQQALETAGLPKLAVQAVTDPDRALLLELLKLDRYIDMVIPRGGAGLHQFCKENSTIPVIVGGIGVCHMFVEKSADQEKALELIANAKTQRPSTCNTLETLLVEKAIAGEFLPKLANRMKALDVTLHTDDLQKTEGIEPLDDARMRQEWLSLDLNVVVIDNLTKAVEHIREYGSQHSEAILTSDYQLARQFVAQVDAAAVYINASTRFTDGGEFGLGAEVAVSTQKLHARGPMGLEALTTYKWVCEGDYLVRK

SEQ ID NO: 1521 - protein, 310 aa, Mannheimia succiniciproducens MBEL55E
MHMTNKIWVLGDAVVDLIPDGDNHYLRCAGGAPANVAVGVARLGVPSAFIGRVGKDPLGEFMRDTLNQENVNTDYMLLDPKQRTSTVVVGLTDGERSFTFMVNPSADQFLQISDLPQFQAGDWLHCCSIALINEPTRSATFTAMKNIRAAGGKVSFDPNLRESLWKSQDEMIDVVMEAVSLADVLKFSEEELTLLTHTDSLEKSFEKITALYPDKLIIVTLGKEGALYHLHGKKEVVAGKALKPVDTTGAGDAFVSGLLAGLSQTENWQQPEQLVTIIRQANASGALATTAKGAMSALPNQQQLAEFLAN

SEQ ID NO: 1522 - protein, 423 aa, Zea mays
  misc_feature (316)..(316): Xaa can be any naturally occurring amino acid
  unsure (1)..(423): unsure at all Xaa locations
MAGGFRVLHLVRPFLAFLPEVQSADRKIPFREKVIYTVISLFIFLVCSQLPLYGIHSTTGADPFYWMRVILASNRGTVMELGITPIVTSGMVMQLLVGSKIIEVDNSVREDRALLNGAQKLLGILIAIGEAVAYVLSGMYGSKGYGLGSGISLFIATNICENIIWKAFSPTTINSGRGAEFEGAVIALFHLLITRTDKVRALREAFYRQNLPNVTNLLATVLVFLIVIYFQGFRVVLPVRSKNARGQQGSYPIKLFYTSNMPIILHSALITNLYFISQLLYRKYSGNFLVNLLGKWKESEYSGHSIPVGGLAYYVXPHQACALFSKTWIEVSGSSAKDVAKQLKEQQMVMPGHRESNLQKELNRYIPTAAAFGGVCIGALTVLADFMGAIGSGTGILLAVTIIYQYFETFEKERATELGFFGF

SEQ ID NO: 1523 - protein, 540 aa, Mannheimia succiniciproducens MBEL55E
MNDNWWKNGVIYQIYPKSFQDTTGSGTGDIQGIIKRLDYLQTLGIDGIWITPMYVSPQIDNGYDIADYRNIDPSYGTMADFEQLIAEAHKRDIRIVMDMVFNHSSTFHQWFKQGEDPNSEYHDYYIWREQPTNWQSKFGGNAWKWSDKAQKYYLHLFAPEQADLNWENPKLRAELYDICRFWAEKGVDGLRLDVVNLISKPEKYEDDFEGDGRRFYTDGPKIHQYLQELNQNALKPFGLMTVGEMSSTKLEHCQRYANLDGSELSMTFNFHHLKVDYPNGEKWTYAKPDYVELKSIFNYWQKGMHGKAWNALFWCNHDQPRIVSRFGDEGELRTLSAKMLAMLLHGMQGTPYIYQGEEIGMTNPNFSSIEEYRDVESLNAYQILQNQGKSAVEILQILAQKSRDNSRTPVQWDASPNAGFTSATPWIGVAKNYPQINVEQALADRDSVFYTYQKLIALRKQLAVLTDGDYSDLLPNHESVWLYQRSTAGERLTVAANLSNQPQFIEIKPQGQVLINNYADITQEDSGICLKPYQALYFLA

SEQ ID NO: 1524 - protein, 252 aa, Arabidopsis thaliana
MSRALFRNVAVDTARLIRRNAAASTDQYGKTGVAQSRPYFRSRQLLERAKETGVSPSPSLGFSSSSSPSRIGFVGWYLGMVKSHPVVTKSVTSSLIYIAADLSSQTIAKTSSESYDLVRTARMGGYGLFVLGPTLHYWFNFMSRLFPKQDLITTFKKMAMGQTIYGPIMTVIFFSLNASLQGERGSVILARLKRDLLPALFNGVMYWPLCDFITFRFFPVHLQPLVSNSFSYVWTIYMTYMANREKPVAIST

SEQ ID NO: 1525 - protein, 78 aa, Brassica napus
MSCCGGNCGCGSGCKCGNGCGGCKMYPDLGFSGESTTTETFVFGVAPAMKNQYEASGEGVAENDACKCGSDCKCDPCT

SEQ ID NO: 1526 - protein, 106 aa, Brassica napus
MATKIGMMDSAYFVWRSEILAWINSTLQLNLSKVEEACSRAVHCQLMDSVHPAAVPMHKVNFDAKSEYHMIQNYNVLHDVFNILKITKHIEVGKLVKGRPLDNLEF

SEQ ID NO: 1527 - protein, 344 aa, Kineococcus radiotolerans SRS30216
MSARVLTLGETMALLTTPASGRLTLGGSLTVGLGGAESNTAIGLARLGVPTAWVSRVGDDAYGRLITRELRAEGVEVLVDVDAVAPTGSMLKELHAGRPRRVRYQRAGSAASRLTPAHVDAVSARITAADVVHLSGITPALGPGPAAAVERAVELARSAGTEVSFDVNHRTALWSAQEAGPVLAGTAARADVLFAGPEEAAMLLTGAGAGTENHPVPTDPDAAAACARRLCELGAGTVVVKLGALGSVAAQGGRVWVAPTHPVDAVDTVGAGDAFVAGFLAARLAGQDVPRSLAQGNAAGGAVCQVPGDWEGAPTRDELADLLERGRSNVGGPRTTRPSMEVQR

SEQ ID NO: 1528 - protein, 161 aa, Trema tomentosa
MSSSEVDKVFTEEQEALVVKSWAVMKKNSAELGLKFFLKIFEIAPSAKNLFSYLKDSPIPLEQNPKLKPHAMTVFVMTCESAVQLRKAGKVTVRESNLKRLGAIHFKNGVVNEHFETRFALLETIKEAVPEMWSPEMKNAWGEAYDQLVAAIKSEMKPSST

SEQ ID NO: 1529 - protein, 222 aa, Glycine max
MAPRDHKTSNAKANGNGNSGVKEVHFRGVRKRPWGRYAAEIRDPGKKSRVWLGTFDTAEEAARAYDAAAREFRGPKAKTNFPLPLENVKNSSPSQSSTVESSSRDRDVAADSSPLDLNLAPAAVASARFPFQHQFPVFTGAVPAANQVLYFDAVLRAGMAGPRGFAFGYNHHPVAASEFHATTSDSDSSSVIDLNHNEGEVKGNGSRIFDLDLNHPPPHEIA

SEQ ID NO: 1530 - protein, 168 aa, Triticum aestivum
MASGKVHTHKAFLLCNYALLGAASSCIFLTLSLRLVPSPCGLLLVFLHALTAVFSAAGCSGSFTAGPANPAPWHTAHTAGAALTAIFQGAVALLAFTRTADFLAELQSYVRDDDGAVILKMVGGLGTAIFVLEWAALALAFSLRLEDEDDDGDDDLRRAKNWADAYHV

SEQ ID NO: 1531 - protein, 424 aa, Cyanidium caldarium
MALTSLGPLPDSFSSFSSLASAPRVPLFKDELRPFIEDDANDDNEEGGLVAQEQETMKPRRRAKTSTTCAATAYVREICRLDRLTDEEVASLSLATQDYCALMKQREELCAKLGREPTDTEWSTTVGVSEEEVRNEIERGRRARARLVASNLRLVLAIANRYKSRAVVRSAWKSRSKGGMDMPSHEKVRLQRQHNIFLGDLIQEGALGLIRAAEKFDPSKGFKFSTYATWWIRQAIQRCVSEHSRTIRLPNHVTESLRQIYRMRARLQHVLKRPPTDEEVAEACNMTLKRLKKITQHAWKTQTLSLEGPPNNEAHSLYKSQQGEAPLSIGSIIEATEETPEEALERNCMREDVECVLRTLPFQEREILRLRYGISDDERPHSTEELSARFQLPVHTIRLIESRALRKLRHPSLAAMLREYVNIL

SEQ ID NO: 1532 - protein, 113 aa, Plasmopara halstedii
RSTGGKAPRKQLATKAARKSAPTAGGVKKPHRYRPGTVALREIRKYQKSTDLLIRKLPFQRLVREIAQDYKTDLRFQSTAILALQEASEAYLVGLFEDTNLCAIHAKRVTIMP

SEQ ID NO: 1533 - protein, 265 aa, Pseudomonas syringae pv. phaseolicola 1448A
MSLSHVVSAVDNRPIFYGGRIVALTQHPDYFHIGADRELQYALQAFWKQDQGVATTDAELRSWLMARYPRQVPHLKRDQRFQPAWAPLLASVAEACEQGRKPALIGPLTLLWLSDVQGDQVDRLDLLEHLLPVYGEIFGRLAARGVEWIQIDEPILALDLLLAWSNAFERAYHILQYSPLKKLIGLYHGDLRPNLGVAALLPVAGLHLDSVTEPELLAPVFDRLPVYKVLSLGECDTHSGWHQESLLEARARFGENLMVADQFAA

SEQ ID NO: 1534 - protein, 213 aa, Populus tremula
MKSTLLAWFTFLLFAFVLSVPSIEASTEPVLDIQGEELKAGTEYIISSIFWGAGGGDVAATNKTCPDDVIQYSLDLLQGLPVTFSPASSEDDVIRVSTDLNIKFSIKKACDHSSVWKIQKSSNSEVQWLVTTGGEEGNPGCDTFTNWFKIEKGAGILGYKLVYCPEDICPSVGLCRDVGIYFESNRGRILSLSDKLSPFLVLFKKVGPLSSSI

SEQ ID NO: 1535 - protein, 438 aa, Magnetospirillum magnetotacticum MS-1
MTNENKTPKESVTLINNSTGKTTEFPLLAGSIGPKVADIRSLYASQDIFTYDPGYMSTGSCKSAITYIDGDAGVLLHRGFAIADLAENCSFLEVAYLILKGELPNAEQKTKFEFDIAHHSMVHEQINFFFRGFRRDSHPMAVLCGVVGAMAAFYHDSIDINDPHHRMVASYRLVAKMPTIVAWAYKYAQGQPFMFPQNKLSYSENFLHMMYATPCEEYKVSPVLARAMDRILILHADHEQNASTSTVRLAGSSGANPFACIAAGIASLWGPAHGGANEAVLQMLHEIGSVERIPEFIKKAKDKDDPFRLMGFGHRVYKNYDPRAKIMQKTCHEVLSELGVHDEPLLKLAMELERIALEDPYFVERKLFPNVDFYSGIIFRAMGIPTQVFTCLFALARTVGWIAQWNEMLTDPDQKIGRPRQLYVGPAQRDFVPLHKRG

SEQ ID NO: 1536 - protein, 420 aa, Ustilago maydis 521
MSSVENTPPTVTAPPGSGGRLSTDSAFSQSRPRRLSMLRFERHKHHGASGNPLPHRRHAFGKPSFSGFQQHFMAGLGELIGTTMFLFLAEGGAKTAQLSVSAAQNETATPLSNETIMFIALSFGMSLLVSAWMFYRITGGLFNPAITIALWWVGVLTSCRALVLFIAQILGGIAGAALVLGLTPTNSISQVTTTLQPGISLAQGFLIEMLLTSILVFSVLMLAVEKHRATYLAPVGIGLTLLAAHLFGVVWTGCGMNPARSFGPAVVAGEFNSDHWIYWIGPLAGGILAVAYFSFLKVLKYNSVVMDQDSDKEITGLKPMHVRIWNLVRHRQNPGALNPESSTHYDKSARQNFDKEETEAFEEREAIRKQMMDKPVFDGHAHEAANGRMSERNNAELMSTSTGSTARLSSGGHQGAILPK

SEQ ID NO: 1537 - protein, 467 aa, Candida tropicalis
MSALRSFQRSSNVAKSTLKNSVRTYATAEPTLKQRLEEILPAKAEEVKQLKKDYGKTVIGEVLLEQAYGGMRGIKGLVWEGSVLDPIEGIRFRGRTIPDIQKELPKAPGGEEPLPEALFWLLLTGEVPTEAQTRALSEEFAARSALPKHVEELIDRSPSHLHPMAQFSIAVTALESESQFAKAYAKGVHKSEYWKYTYEDSIELLAKLPTIAAKIYRNVFHDGKLPAQIDSKLDYGANLASLLGFGENKEFLELMRLYLTIHSDHEGGNVSAHTTHLVGSALSSPFLSLAAGLNGLAGPLHGRANQEVLEWLFKLREELNGDYSKEAIEKYLWDTLNAGRVGPGYGHAVLRKTDPRYTAQREFALKHMPDYELFKLVSNIYEVAPGVFDQHGMTKNPWPNVGSHSGVLLQYYGLTEESFYTVLFGVSRAFGVLPQLILDRGLGMPIERPKSFSTEKYIELVKSIGKN

SEQ ID NO: 1538 - protein, 396 aa, Bacillus clausii KSM-K16
MATTILAEKQEILTALDQRDEELRELALMIHANPELSFKEYKAAEWLSAYLEKEGFQVERGTAGLETAFTAIWEGNPGGPVIGILAEYDALPNLGHACGHNLIGTAAVGAAVALKDAYPELQGTIKVIGTPAEEGGGGKIYMCDHGTFNDLDAAMMVHPKNKTMVLRGGLACMTATFSFYGKESHAASAPEKGISALDALIQSYNAINSLRQFFTDDVRIHGIITKGGDAANIVPGHCEAQFIIRAATTNRLHEIKEKVYEAVRHSSQSVGAKYKIEEGLIYAERNNNHALAELFKQNWEAMGIEVEDPPKQGGIGSSDIGNVGQVTATIHPYIKIGENTNHTFEFTEDTKSEGGMKGMNQAAAGLAMTAYDLCTNPDALKAIRDEFEAWKKTQGR

SEQ ID NO: 1539 - protein, 397 aa, Bacillus clausii KSM-K16
MLKNKSITEEKRNIEEAVDRRDSELRQLALNIHAHPELGYQEYKASNWLSTLLEKEGFAVKRGIAGLDTAFTATWTGKAGGPVIGLLAEYDALPGLGHACGHNLIGTSSVGAALALKDAFPELQATIQVIGTPAEEGLGGKVIMCEHGVFNHLDAAMMCHPKNKTMVIRGGLARVGATFKFYGKESHAASAPEKGVSALDALVGAYNAINSLRQFFSDDVRIHGVITHGGDAANIVPGYSEASFLIRCNTRKELEHVKEKVYTAVRQSAAAVGATSKIEEHLIYAERNTNKTLANLFKENLQLMGIEVSPPPLQGGIGSSDIGNVSQLVPTIHPYIKIGEATNHTHDFTNETKSEGGLKGMNQAAKALAMTAYDLCELPGALQRVKEEFANWQLENV

SEQ ID NO: 1540 - protein, 107 aa, Larrea tridentata
CMKVWPPRGKKKLETLSYLPPLSIESLAKEIEYFIRKGWIPCLEFSIESGFVYRETSRMPGYYDGRYWTMWKLPMFGCTDAVQVLNELEEAKKAYPDAFIRISSAST

SEQ ID NO: 1541 - protein, 838 aa, Oryza sativa
MTTGNGDAPVIKNAHSDIDSTNKTLLKSDALYKYVLDTTVLPREPECMRDLRLITDKHQWGFMQSSADEAQLLGMLLKMAGAKRTIEVGVFTGYSLLATALALPEDGKVVAIDPDRESYEIGRPFLEKAGVAHKVDFREGKGLEKLDELLAEEAAAGREAAFDFAFVDADKPNYVKYHEQLLQLVRVGGHIVYDNTLWAGTVALPPDTPLSDLDRRFSVAIRDLNSRLAADPRIDVCQLAIADGITICRRLVTWQARQAGWGRGVGVDSGMFSNSNRTRPPPTRLTITSPRRVRLCAVSPTLQLQAAVWHDHPSVAGTGAGGVAWEGREKQFTASAGPRNVARPCAPLTVRGPCDKRTVGHPACRDKEFVILPRSPFHETKRTENFRYYDLARFRQPPFNDDFVDSLMPPPAADMENGAVGSPAAEVEAGASPGSSPVIKTKGRGLRRWRRIPREQRKEGSAASAAAGSGSAQLHKRRIPLPGGAPRGKLHEVVLEEEEEESSTASVESRFVPPAKLDPSLGVLLVASSGFSVGAGGADSDHSEDRSSGSRSSTAASAPRRHNDLSPFAADRAGRSSRAARARAAEAQYSLRCSNAVNSRRQSIAGNGIHKVLADHCDHGEETPLMARDYCNVENGSVVVRRLAQGSVDSDADAAQRSVGNNGDLGSGMKSSADPYAESISLLQRTQEALENEIKMFAVISKESNDNFDGNDDDWSGLVDLAEPLEGTSQNVKDPESRPEEASYLGRLFLEKTEAEIKSIILTRAAQTWAPLVDDQIALYNAQKSLSGDYKQLELKLQHTKNRAAIGNGRRAQLRMRSGGTDNSAPLSLIGGGGSGQG

SEQ ID NO: 1542 - protein, 320 aa, Acinetobacter sp. ADP1
MQLTEEQLLAAYKRMRDIREFEDRLHEENNTGDIPGFIHLYSGEEAVAVGVCENLTDQDYITSTHRGHGHCIAKGCDIHDMMLEIFGKDAGLCRGKGGSMHIADLDKGMLGANGIVGGGPPLAIGAALTAKTLKTGGIGLSFTGDGGSNQGLTFEAINMAVVLKLPVIFVFENNGFGEGTAHDYAVGSKDIAGRAAGFGLPAEKVDGTDFFAVYAAAQKAIQRARRGEGPSVIETVTNRFYGHFEGDPGLIRSKDEIDYVKEHKDPIKIFREKVKGQIDEAKLDAIDAVSKANVDDAVAKARAAKYPEVSQLLTDVYVSY

SEQ ID NO: 1543 - protein, 302 aa, Kluyveromyces lactis NRRL Y-1140
MNVARIGIGQLCSSSNLKQNLEVVKSLIKKALDQDVKVLFFPEATDYLSRNAEHSKKLASQTPEFISELQSAICQLTKAAGKPIDISIGIHMPPSEVNTKNGDSRVKNVLLYINSNGEILQKYQKLHLFDVDVPNGPILKESNSVQPGSEIPSIINTPVGKLGSCICYDIRFPELSLKLRSKGAQILCFPSAFTMKTGEAHWELLGRARAIDTQSFVVMPAQQGEHDVYADEKPSDESAVKRISWGHSMIIDPWGRILSAADLTTHDPQLIIADLDIEAQDKIRRDMPLWAQRRRDIFGDFV

SEQ ID NO: 1544 - protein, 535 aa, Sulfolobus solfataricus P2
MPNKYIVVTGGVLSSVGKGTLVASIGMLLKRRGYNVTAVKIDPYINVDAGTMNPYMHGEVFVTEDGAETDLDLGHYERFMDVNMTKYNNITAGKVYFEVIKKEREGKYLGQTVQIIPHVTDQIKDMIRYASKINNAEITLVEIGGTVGDIESLPFLEAVRQLKLEEGEDNVIFVHIALVEYLSVTGELKTKPLQHSVQELRRIGIQPDFIVGRATLPLDDETRRKIALFTNVKVDHIVSSYDVETSYEVPIILESQKLVSKILSRLKLEDRQVDLTDWISFVNNIKGINSKKTINIALVGKYTKLKDSYISIKEAIYHASAYIGVRPKLIWIESTDLESDTKNLNEILGNVNGIIVLPGFGSRGAEGKIKAIKYAREHNIPFLGICFGFQLSIVEFARDVLGLSEANSTEINPNTKDPVITLLDEQKNVTQLGGTMRLGAQKIILKEGTIAYQLYGKKVVYERHRHRYEVNPKYVDILEDAGLVVSGISENGLVEIIELPSNKFFVATQAHPEFKSRPTNPSPIYLGFIRAVASL

SEQ ID NO: 1545 - protein, 452 aa, Bradyrhizobium japonicum USDA 110
MSMISARIERLPFARFHKHLLLMGGLGYMFDAMDAAVLAFILPVLRTAWNLSSVQIGVLGSSTYIGFLFGALLAGTLGDLIGRRAVMMSALALYCAASIVSAMVDTWPSFFAARVVAGMGTGAESAIVAPYLAEFVARRYRGSFTGALAGFFSFGFVAAALLGYFIVPAYENGWRIVLVITAVPVVMLLWWRRALPESPRWLESRGREKEAEALLDTIEAGFARQGHVLPHPVVEAVAPQGATGTLLANFAALLAGRQARITIMTWIMWLAITFSYYSFFVWIPGLLVQNGMSITKSFAYSIAIYCAQIPGYFSAAYFNERIGRQATIATYMVLGGASALGLAFAQSDQQIMAAGIFLSLFMNGTYAGVYAYTAEVFPTPVRTTGAGLASAIGRIGAIVSPILVGYLYPNFGFAGVFGVTTTVLLLGAVTVVLMGVPTRGRSLEEIAAGEVA

SEQ ID NO: 1546 - protein, 452 aa, Arabidopsis thaliana
MEKRVEKRRIVLVPVAAQGHVTPMMQLGKALQSKGFLITVAQRQFNQIGSSLQHFPGFDFVTIPESLPQSESKKLGPAEYLMNLNKTSEASFKECISQLSMQQGNDIACIIYDKLMYFCEAAAKEFKIPSVIFSTSSATIQVCYCVLSELSAEKFLIDMKDPEKQDKVLEGLHPLRYKDLPTSGFGPLEPLLEMCREVVNKRTASAVIINTASCLESLSLSWLQQELGIPVYPLGPLHITASSPGPSLLQEDMSCIEWLNKQKPRSVIYISLGTKAHMETKEMLEMAWGLLNSNQPFLWVIRPGSVAGFEWIELLPEEVIKMVTERGYIAKWAPQIEVLGHPAVGGFWSHCGWNSTLESIVEGVPMICRPLQGEQKLNAMYIESVWKIGIQLEGEVERKGVERAVKRLIIDEEGAAMRERALDLKEKLNASVRSGGSSYNALDELVKFLNTE

SEQ ID NO: 1547 - protein, 212 aa, Streptococcus thermophilus CNRZ1066
MVEAIIFDMDGVLFDTEKYYYDRRASFLGQKGISIDHLPPSFFIGGNTKQVWENILRDDYDKWDVSTLQEEYNTYKQNNPLPYKELIFPDVLRVLNEVKSQGLKIGLASSSVKADIFRALEENRLQGFFDIVLSGEEFKESKPNPEIYLTALKQLNVQASRALIIEDSEKGIAAGVAADVEVWAIRDNQFGMDQSAAKGLLDSLTDVLDLIK

SEQ ID NO: 1548 - protein, 471 aa, Brucella suis 1330
MDGTFDAGFREPTISKANRWGREMVVALKLGWPLIFTNLSQAALTATDVIFIGRLGADTLASALLATSFYHTLMIFSMGLVSAVMPMIAIALGKNRHSVRDVRRTVRQGFWSAIMIVIPLWVVLWHCEEIFLFLGQRPDIAARSTDFMHTLQWALLPYLFYIVLRSFFAAMEKPMWTLLVAALAIGFNALAGWTLIFGHFGFAPMGLHGAGMATTASSTMMFLGLAFITLRHPRFRRYHLFGRFWRPDWPRLIELWRIGLPMALTFVFETSIFYAAVVMMGRIGPTAMAAHAVAIQIASLSFMVPLGFGQVATVRVGRAYGRGDPKAIAYAGWSAYALGVGFMALMGILMVLMPRVFIGIFLNLNDPQNLPVMELAVTFLALAALFQIVDGAQAVAAGMLRGLRDTRIPMLLALFGYWGVGLPLGAVLAFQFGMGGVGIWLGLAAGLGMVAVLMTIRWRRHLAHVSAVAAA

SEQ ID NO: 1549 - protein, 724 aa, Kluyveromyces lactis NRRL Y-1140
MSNSLRRSSASSSSSQGKPGRNGSGNGSYSQINSSLHARVKAFQEQRQLKRSGSIHSNQSQNSVQIEQIVNKPLPPLPPKTMVEEAENSQQLEQQQQQQHNIQIQQTQQQQQRQPILKQQDQHLQHLQHTELLAQSVTENDQHDQQQQQQGGLLLSPKTELPDIEEKKGQFEKQTQEALANLSIQSDGMSSASESSGSASNKQQQDHELNPIRKAPKRPQGVPSCTGSGNAGAPSPIGGVGGSQAAAGTFRPPAAAGGVVMPNQPRLSQGQPHLQKAKQSLSARRGLKLPTGGMSLKMKPTHQQQQLAPQHTHQEFAGAPSNSALPLQGKRSNPGSLINGIQSTSTSLANSSHDTLGTDPKSNPTSNSNSGIGGLFANFSKYVNIKSGSLNFAGKLSLSSKGVDFSNGSSFRIKLDELEFLEELGHGNYGNVSKVLHKPTHIIMAMKEVRLELDESKFRQILMELEVLHNCQSPYIVDFYGAFFIEGAVYMCMEYMDGGSLDKTYDDEQIGGIDEPQLARITSSVIQGLKELKDVHNIIHRDVKPTNILCSASQGTIKLCDFGVSGNLVASLAKTNIGCQSYMAPERIKSLNPDKSTYSVQSDIWSLGLSILEMALGAYPYPPETFDNIFSQLSAIVDGPPPKLPEGKFSADAQNFVSMCLQKIPERRPTYAALLEHPWLKKYENVDVRMSEYITNRLNKKRELLEQTGEGPPKHVPALHMGGL

SEQ ID NO: 1550 - protein, 513 aa, Solanum tuberosum
MIMTAATVVIAAIVVILVAYFVGKVLYTVWWWPKMIEIKLKKEGIHGEPYKLLFGNFKEMMKMSKEAKKQPLLNHDIIPWVNPFLLRLSNTYKKIFVVWYGPTPRVTVTDPKLIREVLNRYNEFHKPEANAFIHLFVSGLGSYNGEKWDTHRKILNPAFHVERLKRMFPAISVCCDEMINRWDKLVSKEGSCELDVTDEFLNLSGDVISRAAFGSNIEEGRSIFLLQKEQCELIFASPFTLFFPSLRFLPTASNRKAKYIHKKVISLIRGIIEKREDAVRRGVSENDDILGLLLKARNEENAAGRGSVSLSTDDVIEECKQFYFAGQDTATALLSWTLVVLSMHPEWQDKARNEVFQVIGKNKPQFDDLNQLKLMNMIFQEVLRLYPAIFLIRGTSKDTQLGDMTIPPGVQVCVPTHLVHRDPQVWGDDALMFNPERFSEGVTKAAKEQLYFPFGWGARMCIGLNFGMLEAKLIFAQILQHFWFELSPSYTHSPQLILVMKPQYGAQIILHKL

SEQ ID NO: 1551 - protein, 495 aa, SYNECHOCOCCUS SP. WH 8102
MGQSSFVILYHRTPFDEAKDAQGNQVWVDQKSPNGIIPTLRNLFRSRNDGTWIAWRHVDHPEEMDVERLEMTNPSPFALCRIPLADEQISSFYHITSKECFWPILHTFPTHFNVNNANWGIFEEVNKRFADAACNEAAEGATVWVHDYNLWLAPGYIRQQRPDLKIAFFHHTPFPGNDVFAILPWREQILESLLCCDVVGFHIPRYTENFARAASTLVGAKRGPKISVDQKFISVGTALSEGTVTSHLDHNGRRIQLLSSPVGTSPDVIQELSWSASVESYGEMIVQDTKKGRKLILSASRVDYTKGNEELLLAFERLLERREDLHGEVVLMLACVAAASGMKIYEETQRSIEEMAGRINGRFSQVDWIPVRFSTRRIPYEEMVAWFCHADVCWITPLRDGLNLVAKEYAAARRHRGGVLVLSEFTGASVVLEGAVLTNPYSNRRMDEAIEAALAMPEHEQRQRMETMSAAVEAYTVQDWAEEQLAGFPEVATIG

SEQ ID NO: 1552 - protein, 552 aa, Glycine max
MALAPPSVFALYIVIDLKIEIYMTISAMCGILAVLGCVDNSQTKRARIIELSRRLRHRGPDWSGIHCYEDCYLAHQRLAIVDPTSGDQPLYNEDKTVIVTYEEHGEEFVNMLDGMFAFILLDTRDKSFIAARDAIGITPLYLGWGHDGSTWFASEMKALSDDCERFISFPPGHIYSSKQGGLRRWYNPPWFSEDIPSTPYDPTLLRETFERAVVKRMMTDVPFGVLLSGGLDSSLVAAVVNRYLAESESARQWGSQLHTFCIGLKGSPDLKAAKEVADYLGTRHHELYFTVQEGIDALEEVIYHIETYDVTTIRASTAMFLMSRKIKALGVKMVLSGEGSDEIFGVFMALMIWQIKALHLYDCLRANKSTAAWGVEARVPFLDKEFINVAMSIDPEWKMIRPDLGRIEKWVLRNAFDDDKNPYLPKHILYRQKEQFSDGVGYSWIDGLKDHANKQVTDATMMAANFIYPENTPTTKEGYLYRTIFEKFFPKNAAKATVPGGPSVACSTAKAVEWDAAWSKNLDPSGRAALGIHDAAYDAVDTKIDEPKNGTL

SEQ ID NO: 1553 - protein, 220 aa, Exiguobacterium sp. 255-15
MAPTIEAVIFDLDGVITDTAEYHYLAWKQLGEELDIPFDREFNETLKGVSRTDSLERILILGGKQDAFTAQEKEALATKKNDHYVTLIQHISEQDLLPGIIAFLDEIRATGLKIGMASASKNALTVVEALGVRHYFDDIVDAATVAQSKPHPEVFLRAAEALGVAPERCIGVEDAAAGITAIHAAGMYAVGVGPETTLHEADYRVDSTDLLSLEQILASR

SEQ ID NO: 1554 - protein, 173 aa, Glycine max
  misc_feature (146)..(147): Xaa can be any naturally occurring amino acid
  unsure (1)..(173): unsure at all Xaa locations
MGSSDMDKTPKEESKTPPATSQEQSSTTGMPTTNPDWSNFQTYSPIPPHGFLASSPQAHPYMWGVQHIMPPYGTPPHPYVAMYPHGGIYAHPSIPPGSYPFSPFAMASPNGIADASGNAPGSIEVGGKPPEMKEKLPIKRSKGSVXXGNLSMWITGKNNEPGKTPGESANGIH

SEQ ID NO: 1555 - protein, 410 aa, Streptococcus thermophilus CNRZ1066
MSTNRVVVTGYGVTSPIGNTPEEFWNSLHDGKIGIKPITKFDASDIPVFNAGEIQDFPFDKYFVKKDTNRMDTYSLYAIYAAMEALENSGLNMEEVNRDRVGVIVSSGIGGLQELEDQIIRMYERGMKRIKPMFIPKALSNMGAGNIALKIGAQGVCKSVTTACASANDAIGEAFREIKFGFHDVVLAGGAEASITKIGIGGFNALTALSTTEDPERSSIPFDKDRNGFVMGEGAGVLVIESLEHAQKRGANILAEIVGYGSNCDAYHMTTPTPDGSGAAKAIKLAINEAGIKPEDVDYVNAHGTSTPANEKGESAAIVSVLGKDVPVSSTKSFTGHLLGAAGAVEAIATIEAIRHSFVPKTAGTKELSDYIEANVVYGEGKEADIEYAISNTFGFGGHNAVLAFKRWEG

SEQ ID NO: 1556 - protein, 160 aa, Ipomoea trifida
MAASSLQLPGSKRLEGKVAIITGAANGIGATTARLFAQHGCKVIIADIDDKNGHSVAEEIGPEYALFIHCDVRIESDVQNAVDTTVSRYGKLDIMFSNAGVAGSRDTSILEASPENINLVFETNVFGAFFCAKHAARVMIPARKGSVIFSASAASEVFGI

SEQ ID NO: 1557 - protein, 159 aa, Triticum aestivum
  misc_feature (126)..(126): Xaa can be any naturally occurring amino acid
  unsure (1)..(159): unsure at all Xaa locations
MAFSEAQEELVLRSWKAMKPDSESIALKFFLRIFEIAPAAKPMFPFLRDAGEDAPLESHPKLKAHAVTVFVMACESATQLRKTGDVKVREATLRRLGATHVRAGVADAHFEVVKTALLDTIEGAVXPEMWTLEMNAAWEEAYDQLAAAIKEEMKLAAAA

SEQ ID NO: 1558 - protein, 576 aa, Triticum aestivum
MRALFAWCALLLACGGVMHCAEAAKARHLKWEVSHMFWSPDCEEKVLIGINGQFPGPTIRAKAGDTIVVELKNGLHTEGVVIHWHGVRQIGTPWADGTAAISQCAINPEETFTYRFVVDKPGTYFYHGHYGMQRAAGLYGSLIVDVADGEEEPFKYDGELNLLLSDWYHESIYNQMVGLSSSPMRWIGEPQSLLINGRGQFNCSLAAAHTPGTKQCTAGGNRHCAPVILPVEPNKTYRLRIASTTSLASLNLAIGKHKLTVVEADGNYVAPFVVDDMDIYSGDSYSVLLTTDQDPSSNYWVSIGVRGRTPKTAPALALLNYRPNRGFKLPAIAPPVTPAWNDTAHSKAFTTQIKARAGTPPPPATSDRRIELLNTQNKLDGHIKWSINNVSLVLPATPYLGSLKLGLKTALAAARPADTFGRAYDVTRPPHNPNTTTGDNVYVLRHNTTVDVVLQNANALQHNVSEVHPWHLHGHDFWVLGYGEGAYRGDAADAARLNLVNPPLRNTAVIFPYGWTALRFVADNPGVWAFHCHIEPHLHMGMGVIFAEAIDRVGKVPKEAVSCGATATALMNGDHL

SEQ ID NO: 1559 - protein, 213 aa, Populus tremula
MKSTLLAWFTFLLFAFVLSVPSIEASTEPVLDIQGEELKAGTEYIISSIFWGAGGGDVAATNKTCPDDVIQYSLDLLQGLPVTFSPASSEDDVIRVSTDLNIKFSIKKACDRSSVWKIQKSSNSEVQWLVTTGGEEGNPGCDTFINWFKIEKGAGILGYKLVYCPEDICPSVGLCRDVGIYFETNRGRILSLSDKLSPFLVVFKKVGPLSSSI

SEQ ID NO: 1560 - protein, 503 aa, Coprinopsis cinerea
AIVNSVDTMTLTNANVSPDGFTRAGILVNGVHGPLIRGGKNDNFELNVVNDLDNPTMLRPTSIHWHGLFQRGTNWADGADGVNQCPISPGHAFLYKFTPAGHAGTFWYHSHFGTQYCDGLRGPMVIYDDNDPHAALYDEDDENTIITLADWYHIPAPSIQGAAQPDATLINGKGRYVGGPAAELSIVNVEQGKKYRMRLISLSCDPNWQFSIDGHELTIIEVDGELTEPHTVDRLQIFTGQRYSFVLDANQPVDNYWIRAQPNKGRNGLAGTFANGVNSAILRYAGAANADPTTSANPNPAQLNEADLHALIDPAAPGIPTPGAADVNLRFQLGFSGGRFTINGTAYESPSVPTLLQIMSGAQSANDLLPAGSVYELPRNQVVELVVPAGVLGGPHPFHLHGHAFSVVRSAGSSTYNFVNPVKRDVVSLGVTGDEVTIRFVTDNPGPWFFHCHIEFHLMNGLAIVFAEDMANTVDANNPPVEWAQLCEIYDDLPPEATSIQTV

SEQ ID NO: 1561 - protein, 355 aa, Mycobacterium bovis AF2122/97
MSNSRRRSLRWSWLLSVLAAVGLGLATAPAQAAPPALSQDRFADFPALPLDPSAMVAQVGPQVVNINTKLGYNNAVGAGTGIVIDPNGVVLTNNHVIAGATDINAFSVGSGQTYGVDVVGYDRTQDVAVLQLRGAGGLPSAAIGGGVAVGEPVVAMGNSGGQGGTPRAVPGRVVALGQTVQASDSLTGAEETLNGLIQFDAAIQPGDSGGPVVNGLGQVVGMNTAASDNFQLSQGGQGFAIPIGQAMAIAGQIRSGGGSPTVHIGPTAFLGLGVVDNNGNGARVQRVVGSAPAASLGISTGDVITAVDGAPINSATAMADALNGHHPGDVISVTWQTKSGGTRTGNVTLAEGPPA

SEQ ID NO: 1562 - protein, 213 aa, Populus tremula
MKSTLLAWFTFLLFAFVLSVPSIEASTEPVLDIQGEELKAGTEYIISSIFWGAGGGDVSATNKTCPDDVIQYSLDLLQGLPVTFSPASSEDDVIRVSTDLNIKFSIKKACDHSSVWKIQKSSNSEVQRLVTTGGEEGNPGCDTFTNWFKIEKGAGILGYKLVYCPEDICPSVGLCRDVGIYFESNRGRILSLSDKLSPFLVLFKKVGPLSSSI

SEQ ID NO: 1563 - protein, 601 aa, Mycobacterium bovis AF2122/97
MNEAEHSVEHPPVQGSHVEGGVVEHPDAKDFGSAAALPADPTWFKHAVFYEVLVRAFFDASADGSGDLRGLIDRLDYLQWLGIDCIWLPPFYDSPLRDGGYDIRDFYKVLPEFGTVDDFVALVDAAHRRGIRIITDLVMNHTSESHPWFQESRRDPDGPYGDYYVWSDTSERYTDARIIFVDTEESNWSFDPVRRQFYWHRFFSHQPDLNYDNPAVQEAMIDVIRFWLGLGIDGFRLDAVPYLFEREGTNCENLPETHAFLKRVRKVVDDEFPGRVLLAEANQWPGDVVEYFGDPNTGGDECHMAFHFPLMPRIFMAVRRESRFPISEIIAQTPPIPDMAQWGIFLRNHDELTLEMVTDEERDYMYAEYAKDPRMKANVGIRRRLAPLLDNDRNQIELFTALLLSLPGSPVLYYGDEIGMGDVIWLGDRDGVRIPMQWTPDRNAGFSTANPGRLYLPPSQDPVYGYQAVNVEAQRDTSTSLLNFTRTMLAVRRRHPAFAVGAFQELGGSNPSVLAYVRQVAGDDGDTVLCVNNLSRFPQPIELDLQQWTNYTPVELTGHVEFPRIGQVPYLLTLPGHGFYWFQLTTHEVGAPPTCGGERRL

SEQ ID NO: 1564 - protein, 235 aa, Lactococcus lactis
  misc_feature (1)..(1): Xaa can be any naturally occurring amino acid
  misc_feature (8)..(8): Xaa can be any naturally occurring amino acid
  misc_feature (39)..(39): Xaa can be any naturally occurring amino acid
  unsure (1)..(235): unsure at all Xaa locations
XLSRLLYXADEPNGLQSTFSGSAWEFDEESGQYFLHLFXKRQPDLNWENPQVHKEVYDMMNFWIDKGIGGFRMDVIDLIGKEIDQEITGNGPKLHEYLHEMNQATFGQKNLLTVGETWGATPEIAELYSDPERQELSMVFQFEHITNAYLDEGEKWDKKEFSVSKLKEILAKWQALEKGWNSTYINLYYYANPSQPLALLFVILLFWGMNKMFNKRSFAAFLMVAFGAAGLPLSH

SEQ ID NO: 1565 - protein, 545 aa, Shigella flexneri 2a str. 301
MTTNYIFVTGGVVSSLGKGIAAASLAAILEARGLNVTIMKLDPYINVDPGTMSPIQHGEVFVTEDGAETDLDLGHYERFIRTKMSRRNNFTTGRIYSDVLRKERRGDYLGATVQVIPHITNAIKERVLEGGEGHDVVLVEIGGTVGDIESLPFLEAIRQMAVEIGREHTLFMHLTLVPYMAASGEVKTKPTQHSVKELLSIGIQPDILICRSDRAVPANERAKIALFCNVPEKAVISLKDVDSIYKIPGLLKSQGLDDYICKRFSLNCPEANLSEWEQVIFEEANPVSEVTIGMVGKYIELPDAYKSVIEALKHGGLKNRVSVNIKLIDSQDVETRGVEILKGLDAILVPGGFGYRGVEGMITTARFARENNIPYLGICLGMQVALIDYARHVANMENANSTEFVPDCKYPVVALITEWRDENGNVEVRSEKSDLGGTMRLGAQQCQLVDDSLVRQLYNAPTIVERHRHRYEVNNMLLKQIEDAGLRVAGRSGDDQLVEIIEVPNHPWFVACQFHPEFTSTPRDGHPLFAGFVKAASEFQKRQAK

SEQ ID NO: 1566 - protein, 356 aa, Hordeum vulgare
MALLTDLLNLDLSGSTEKIIAEYIWIGGSGMDLRSKARHLPGPVTHPSKLPKWNYDGSSTGQAPGEDSEVILYPQAILKDPFREGNNILVMCDCYTPRGEPIPTNKRYNAAKILSNPDVAKEEPWYGIEQEYTLLQKDINWPLGWPVGGFPGPQGPYYCGIGADKSFGRDIVDSHYKACLFGGVNISGINGEVMPGQWEFQVGPTVGISAGDQVWVARYILERITEIAGVVVTFDPKPIPGDWNGAGAHTNYSTESMRNDGGFKVIVDAVEKLKLKHKEHIAAYGEGNERRLTGKHETADINTSSWGVANRGASVRVGRETEQNGKGYFEDRRPASNMDPYVVTSMIAQTTILWKP

SEQ ID NO: 1567 - protein, 481 aa, Xanthomonas campestris pv. campestris str. 8004
MFPGEPMSSVSIDGAPDAGENTRFIILISCVATIGGFLFGFDSGVINGTVDGLKQTFQSSAAETGFEVASMLLGCAIGAFFAGRLVDRWGRRAVLIISAALFLLSAIGAGASHSSGFFIFARVMGGFAVGAASVISPAYIAEVASARYRGRLATMQQIAIISGLFCAFLSNYLLANAAGASTEPLWGGQAAWRWMFWMQAIPSLLFLLLLLVIPESPRYLVVKGRREQALVVLKRLYGNAAAQTKLGEISASMSADQHKPKFSDLISKTTGKIRPIVWIGVGLAVFQQLVGINVVFYYGAVLWQAVGFSEQDALLINVLSGGLSIGACLVTVMLVDKIGRKPLLWIGSAGMAVSLALVTYAFATASLDPNGKLAMSDAMGMLALVAANVYVVFFNASWGPVMWVMLGEMFPNQIRGSGLAIAGAAQWTSNFAITVSFPILLGSIGLAGAYGIYTVAAFISVFFVLKYVYETKGKELEQMEG

SEQ ID NO: 1568 - protein, 468 aa, Acinetobacter sp. ADP1
MSMSDTQFDLVVIGAGPGGYVAAIRAAQLGLKTAIVEATHLGGICLNWGCIPTKALLAGAELAHQFKHASQFGFELGDINFDLSKLVQHSRQVSAQLVQGIEHLLRKNQVSVFYAKARFIAKERLELVDAQQQKQMIRAPHIIVATGAHAASLPQIPVDGDYVWSYKEALQPKQLPKSLLVIGSGAIGSEFASLYQDLGSQVTLLDLARQILPTEDHEVAQYVRKQFEQKGMRILTESTVQHLEVCEGKVHCEIHDPSGVQSLSFDHVLSAVGVKPNTQNLGLEQLGVALTNGFIQTDEWCRTNVVGIYAIGDVAGAPCLAHKASHEAILCVEKIAGIADVHPLNRLQIPGCIFTHPQVASIGLTEQQAKAEGKQIHIGKFPMSANGKAIALGQTAGFVKTIVDVESGELLGAHMVGHEVTEQIQGYAIAQALEATDEHLAQVIFPHPTLSEAMHESILASMQRAIHI

SEQ ID NO: 1569 - protein, 918 aa, Shigella flexneri 2a str. 301
MTNYSLRARMMILILAPTVLIGLLLSIFFVVHRYNDLQRQLEDAGASIIEPLAVSTEYGMSLQNRESIGQLISVLHRRHSDIVRAISVYDENNRLFVTSNFHLDPSSMQLGSNVPFPRQLTVTRDGDIMILRTPIISESYSPDESPSSDAKNSQNMLGYIALELDLKSVRLQQYKEIFISCVMMLFCIGIALIFGWRLMRDVTGPIRNMVNTVDRIRRGQLDSRVEGFMLGELDMLKNGINSMAMSLAAYHEEMQHNIDQATSDLRETLEQMEIQNVELDLAKKRAQEAARIKSEFLANMSHELRTPLNGVIGFTRLTLKTELTPTQRDHLNTIERSANNLLAIINDVLDFSKLEAGKLILESIPFPLRSTLDEVVTLLAHSSHDKGLELTLNIKSDVPDNVIGDPLRLQQIITNLVGNAIKFTENGNIDILVEKRALSNTKVQIEVQIRDTGIGIPERDQSRLFQAFRQADASISRRHGGTGLGLVITQKLVNEMGGDISFHSQPNRGSTFWFHINLDLNPNIIIEGPSIQCLAGKRLAYVEPNSAAAQCTLDILSETPLEVVYSPTFSALPPAHYDMMLLGIAVTFREPLTMQHERLAKAVSMTDFLMLALPCHAQVNAEKLKQDGIGACLLKPLTPTRLLPALTEFCHHKQNTLLPVTDESKLAMTVMAVDDNPANLKLIGALLEDMVQHVELCDSGHQAVERAKQMPFDLILMDIQMPDMDGIRACELIHQLPHQRQTPVIAVTAHAMAGQKEKLLGAGMSDYLAKPIEEERLHNLLLRYKPGSGISSRVVTPEVNEIVVNPNATLDWQLALRQAAGKTDLARDMLQMLLDFLPEVRNKVEEQLAGENPEGLVDLIHKLHGSCGYSGVPRMKNLCQLIEQQLRSGTKEEDLEPELLELLDEMDNVAREASKILG

SEQ ID NO: 1570 - protein, 371 aa, Acinetobacter sp. ADP1
MCKVIQFKGFQQSFKRKITMKAARFYDRGDIRIEDIPEPEVTAGTVGIQVAWCGICGTDLHEFMEGPIFIPPCGHPHPISGESAPITMGHEFSGVVYAVGEGVDDIQVGQHVVVEPYIVADDVPTGPGENYHLSKNMNFIGLGGRGGGLSEKIAVQRRWVHPISENIPLDQAALIEPLSVGHHAYVRSGAKAGDVALVGGAGPIGLLLSAILKAKGLTVIITELSSKRKEKAKESGVADYILDPTQVDVIAEVMKITQDKGADIAFECSSVNKVLDTLVASTKPTGVIVIVSIWSHPATVNVHSVVMKELDIRGTIAYVNDHQETIKLVEQGKINLAPFITQRIKLDDLISQGFETLIHNNESAVKIIVHP

SEQ ID NO: 1571 - protein, 150 aa, Brassica napus
  misc_feature (128)..(128): Xaa can be any naturally occurring amino acid
  unsure (1)..(150): unsure at all Xaa locations
MSFADEFESNLVSLAHVLQKKYALLRDLDKSLQENQRQNEQRCEKEIEDIRRGRTGNVTPNAHFSEEAIDEQKHSVRIADEKLALAMQAYDLVDMHVQQLDQYMKKSNEQMRREKENASASNLENSGXAGKAGEGRRGGRKKTRLATAAS

SEQ ID NO: 1572 - protein, 626 aa, Gluconobacter oxydans 621H
MGDNIVTESFSETHRAAATPIVIVGHVDHGKSTLIGRLLYDTDSLQDGKLAQIVESSRKRGLAVEWSFLLDSLQIERDQGVTVDSTRIPFRLGSREFVIVDAPGHRQFLRNMITGAADAEAAVLVVDAKEGAQEQTRRHAMLLRLIGIRHVIVLLNKSDILGFDEAQIVKVESDVRQLLGRLEIEVEAVVPASARDGDNIASRSERSLWYKGPTLVEALANVPPPASRAALPFRMPVQDVYRFDGIRYVAGRIERGTVRAGDRLSIGAQGQVATVAEVCRWHAPELPVAGAGESIALRLEPDLVPDRGDLLFPADDQAAAPERSARIRTRLFWLRGEPLRVGESFTLRLATAEHDVTVASIDAVVDLEDLTLREGDSVPPDGFAEITLAASHAVLFDPFSPGFGDGRGVLVDRYQRIVGGAPLIGPAELADGEHAIHPTASRVSAARQVQTRGHKSGVFWLTGLPGSGKSTVARAAELALSEQAINATVLDGDTLRAGLCSDLGFSPEDRHENIRRAAHVAKILAESGQVVIVALVSPLQADRAQARQIVGENFHEVFVDTPLETCEKRDPKGLYAAARAGKIPEFTGISAPYEAPVSPELRLPADRPEQEAINTLTAFILRIVQP

SEQ ID NO: 1573 - protein, 878 aa, Lotus corniculatus var. japonicus
MEYGSLLVQQQQQQDCNSAYGSLSNLSSDCGSVTTAEADHHIIEELLVQGCWVEVSGVGVREGELQLQQDESSFVVGKRWWIGPAAAVAGSCNSSVKERLVIAVGYLKDYTRNSNVLIQIWVPLRRGILHDHDYHTNYLLSNNPPPQPEAAADHESVSLGFPMPAAPNSNLYSNVHVRFFRSHEYPRVQAQQYGSLALPVFERGTGTCLGVLEIVITNQTTINYNVSNALDQAVDFRSSQSFIPPAIKVYDELYQAAVNEIIEVMTSVCKTHNLPLALTWAPCIQQGKCGCGVSSENYMWCVSTVDSACFVGDLDILGFQEACSEYHLFRGQGIVGTAFTTSKPCFAIDITAFSKAEYPLAHHANMFGLHAAVAIPLRSVYTGSAADFVLEFFLPKDCHDSEEQKQLLNSLSMVVQQACRSLHVVLVEDEYTLPMPSHTSKEELEEEEITITNNHEQKLFVSPSSHESECSKESSWIAHMMEAQQKGKGVSVSLEYLEEPKEEFKVTTNWDSSTDHDQQAQVFSSDFGQMSSGFKASTVEGGDQESSYTFGSRRSSSGGRKSGEKRRTKAEKTISLQVLRQYFAGSLKDAAKSIGVCPTTLKRICRQHGITRWPSRKIKKVGHSLKKLQLVIDSVQGAEGAIQIGSFYASFPELSSSDFSASCRSDSSKKMHNYPDQNNTLYGHGDHGGVVTSLKSPPSACSQTFAGNQPCTIINNGDVLMTESPPVPEALLSRRDHCEEAELLNNASIQEDTKRFSRPKSQTLPPLSDSSGWNSLETGAFRVKATFADEKIRFSLQPIWGFSDLQLEIARRFNLNDVTNILLKYLDDDGEWVVLACDGDLEECKDIHRSSQSRTIRLSLFQASPLNLANTFRNSSPS

SEQ ID NO: 1574 - protein, 338 aa, Acinetobacter sp. ADP1
MHVKLLIPQTVPTHIISGFLGAGKTTLLQHLLSQKPENEVWAVLMNEFGQIGIDQQLLPQQQGYQVKELLGGCLCCSSQLPLHIALARLLTETQPDRLFIEPTGLGHPAQLVEQLTEPHWQSSLNMRALITVLDGSRLHEEAWVQQNLYEDQLKAAQIVVVSHGDQMSGTDEKALEKLQEEYQAYSQSWFKTANGELALDAIDHPHLVTSRILQPLLMQQKTFVSAQEPIPEIKQLPYHYVESSQGYHVAGWKMPRRWIFDFDSLFELLCNQSNWLRIKAIFNTSQGWMIFNFNPEQFNYKTGQANTDSRIEIITSQLGNWLDFEKQLMACRLDEQNT

SEQ ID NO: 1575 - protein, 576 aa, Zea mays
MPICSCEETIHEFEMLTRDAGRVQKDTLKKILELNADAEYLNKFGLNGRTDVESYKSCIPLCVHSDLEPYIHKIADGDSSPLLTGKPVTSLSLSSGTTQGRPKFLPFTDELLETTLQIFQTSYAFRNREYPIGRGKALQFIYGSKQVVTKGGILATTATTNLYRRARYKEGMKDIQSQCCSPDEVVFGSDFHQSLYCHLLCGLIYSDEVHQVFSTFAHSLVHAFQTFEEVWEDLCADIRDGVLSEKVTVPSVREAVTKILKPNPELADSIYKKCTGLSNWYGVIPALWPNAKYVYGIMTGSMEPYLKKLRHYAGHLPLISADYGASEGWVGANINPTLPPEQVTYAVLPQTGYFEFIPLEVENSASSIHYLESEPVGLTEVEVGKTYEVVITTFGGLYRYRLGDIVKVTGFHNATPELRFICRRSLVLSINIDKNTEQDLQLAVEEAAKLLDAEKLEIVDFTSFVEKSSDPGRYVIFWELSSDASEDVLRGCANCLDLAFVDAGYVGSRKIRAIGPLELRILKRGTFKEILDHFLSLGGAVSQFKTPRFVNPLNVKVLQILSRNTTRSYFSTAYGL

SEQ ID NO: 1576 - protein, 463 aa, Burkholderia cepacia
MNTVDITEIIEKQKPNRKVLALLILSFLIMLCDGYDLQAIAFASPTIIADWGIQKASFGFIFSGGLFGVMVGGFLFGYVADRIGRRPALLWGTLLFGVFTLAAVLATNITQLAVLRFVAGLGIGGITPIAIALNVEYAPKRFRASVVGLVMIGYVVGTSSGGIFAAWLVPTFGWQVLFYIGGLAPLLLLPFLAMSLPESIKYLVLSGQKAEAVARVVNAIDPSIRASSQTRFVLGTAEEGARIAGWKDSVKALFGGQLSKITPALWGAFVCSSVTVFFLASWIPVLTVGTGRSASLAAVGLALFSAGGAFGGIFSSRVIDRFGIGAMASIPLIAAVFVVSVGSFEFSDTGFLSMLCLIGFFVLGGHVGLMGAMGLFYSNANRANGVGWAISIGKFGSIIGPAIAAVLIAANTAISYLFMAAAAPLLMAGMGILVLGRLQKAADHEHRMGADRANDPEARPIDA

SEQ ID NO: 1577 - protein, 304 aa, Agrobacterium tumefaciens
MTRQMILAVGQQGPIARAETREQVVGRLLDMLTNAASRGVNFIVFPELALTTFFPRWHFTDEAELDSFYETEMPGPVVRPLFETAAELGIGFNLGYAELVVEGGVKRRFNTSILVDKSGKIVGKYRKIHLPGHKEYEAYRPFQHLEKRYFEPGDLGFPVYDVDAAKMGMFICNDRRWPETWRVMGLKGAEIICGGYNTPTHNPPVPQHDHLTSFHHLLSMQAGSYQNGAWSAAAGKVGMEEGCMLLGHSCIVAPTGEIVALTTTLEDEVITAALDLDRCRELREHIFNFKAHRQPQHYGLICEF

SEQ ID NO: 1578 - protein, 150 aa, Brassica napus
  misc_feature (42)..(42): Xaa can be any naturally occurring amino acid
  unsure (1)..(150): unsure at all Xaa locations
MAIRLMDLDSPFFNTLHRIMDLTEDAEKNLNAPTRTYVRDAXAMAATPADVKEYPNSYVFVIDMPGLKSGDIKVQVEDDNVLLISGERKREEEKEKEGGKYLRMERRLGKLMRKFTLPENANTDAISAVCLDGVLTVTVNKLPPPQPKKP

SEQ ID NO: 1579 - protein, 390 aa, Glycine max
  misc_feature (163)..(163): Xaa can be any naturally occurring amino acid
  unsure (1)..(390): unsure at all Xaa locations
MARDGSVVPADPQAMAVVKKKTQSSRSWILFDATGQGTLLDMDKYAIMHRVQIHARDLRILDPLLSYPSTILGREKAIVLNLEHIKAIITAEEVLLRDPTDENVIPVVAELQRRLPRLGAGLKQEGDGKEYLGGQNDAEAAEEDESPFEFRALEVALEAICSXAARTSELEMAAYPALDELTSKISSRNLDRVRKLKSAMTRLTARVQKVRDELEQLLDDDDDMADLYLSRKAGSASPVSGSGAANWFAASPTIGSKISRAASLATVRLEENDVEELEMLLEAYFSEIDHTLNKLTTLREYIDDTEDYINIQLDNHRNQLIQLELFLSSGTVCLSFYSLVAAIFGMNIPYTWNENHGYMFKWVVIVSGVFSAVMFLMITAYARKKGLVGS

SEQ ID NO: 1580 - protein, 485 aa, Vigna angularis
MAEEEEGEAGGHHVLLLPGPMQGNVNSMMKLAPSSSASLPHHLSHHRFHPPPPPPFRRHPLSFTNLPQPRDQDHLRCLPDDHPRSDRNALADLYSSMNSHAKPLIRDIILSQTAAKPKITCLIGDGFFGGLTADVADEVGIPVIHFRAISASCFWALFCAPNLFESNELPIRGEEDMDRIIATLPGMENILRCRDLPGFFRGTETNLVDPLKSTVFDCHQTLRARGVILNTFEDLDGPLLTQMRLKFLRVFAVGSLHAHLNYRRVSDAKTTPSTSSFWEEDRSCLTWLDSQPLKSVLYVSFGSITTVTRERLMEFWYGLVNSKKRFLWVIRPDMVAGADNDERVAAELEEGTKERGFIVGWAPQEEVLAHKAIGGFLTHSGWNSTLESLVAGVPMICWPCFADQQINSRFVSEVWKLGLDMKDLCDRDVVEKMVNDLMVHRREEFLKSAQAMATLADKSVSPGGSSYSSLHDLVEFIKSASRKIN

SEQ ID NO: 1581 - protein, 318 aa, Listeria innocua Clip11262
MTASVFVAGKLLPETMEALDKWDVKTYKGKENITESELIKNVTDVEAIICPLSSPITAKVLESAKNLKIVANIGAGFDNIDVKKAQELGIAVTNTPDVSTEATAELTLGLILDVARRISAGDRLCRETPEQFKGWAPTFFLGTELSGKTLGIIGLGRIGQAVAKRAAAFGMKIIYSGHHPKEAAKQWDAEFVSQDELLKRSDVVTIHAAYSPSLKHLLNETTLNTMKSSAFLINAARGPVVEESALINALEKGVIAGAALDVFEFEPKIGAELGKLENVVLTPHIGNATVETRTEMGRMAISNVEAVLAGKQPLHSVY

SEQ ID NO: 1582 - protein, 479 aa, Pseudomonas fluorescens Pf-5
MTAPDRSPPRYKSDLIYGLNDRPHFSAAIFAALQHVLASFVGIISPTLIFGGVLGLESELPYLISMALFVSGLGTFVQARRLGPIGSGLLCVQGTSFSFISVLLSAGFMVKGRGGDTNEILSTIFGICFVAAFIEMFLSQFIGKLRKLITPVVTGTIITLMGLSLIKVAVTDMAGGYGASDLGAASNLGLAALVLLTIVVLNRFNHPMLRLGSIVIGLTLGFVVAWMLGRVDMAAMPEVPLVSVPVPFKYGFSFDLIAFIPLAVIFLISPLEAAGDLTANSMISQQPVKGPLYIKRIKSGLLADGFNSAVAAVFNSLPMVTFAQNNGVIQLTGVASRYVAYFIAGLLVLLGLFPVIGAVLQLMPKPVLGGATLIMFGTVAVAGIKILAEAGLHRRNVLIVAISLGMGLGVAAVPEVLRELPKALHNIFESPITVGAFCAIFLNIFLPEEFLELEEDEFDPEAATLKVMQDPDMSGKANS

SEQ ID NO: 1583 - protein, 184 aa, Zea mays
MISSPSPSPSPSGTPSPKGVSATPRQGSSRWRSGAVRGAYGRRLLDALRATGGGQPRPRAVKAAADSALALTARGQTRWSRAILLAGAVCGGRRRVLVKAGGKVRRRRRRRPTVQARDKAAVAALKGQGKGKDKVQERLRALGCLVPGCRRLPAPALLEEAADYVAALQMQVSAMRALADALAA

SEQ ID NO: 1584 - protein, 158 aa, Triticum aestivum
  misc_feature (12)..(12): Xaa can be any naturally occurring amino acid
  misc_feature (33)..(33): Xaa can be any naturally occurring amino acid
  unsure (1)..(158): unsure at all Xaa locations
TIPFWVFEPGKXLKDSAKEVGLQKAISSLSKSXDWFYFLTGSLDKFFKLWEARTLPLIKTYVTERPVNAVDISPTFDQVVIGGGQDAMNVFMTDRRAGKFEAKFFPKILEEEIGGVKGHFGPINALAFNPDGRSFLSGGEDGYVRLPHFDPEYFNIKM

SEQ ID NO: 1585 - protein, 441 aa, Mycobacterium bovis AF2122/97
MSEVVTAAPAPPVVRLPPAVRGPKLFQGLAFVVSRRRLLGRFVRRYGKAFTANILMYGRVVVVADPQLARQVFTSSPEELGNIQPNLSRMFGSGSVFALDGDDHRRRRRLLAPPFHGKSMKNYETIIEEETLRETANWPQGQAFATLPSMMHITLNAILRAIFGAGGSELDELRRLIPPWVTLGSRLAALPKPKRDYGRLSPWGRLAEWRRQYDTVIDKLIEAERADPNFADRTDVLALMLRSTYDDGSIMSRKDIGDELLTLLAAGHETTAATLGWAFERLSRHPDVLAALVEEVDNGGHELRQAAILEVQRARTVIDFAARRVNPPVYQLGEWVIPRGYSIIINIAQIHGDPDVFPQPDRFDPQRYIGSKPSPFAWIPFGGGTRRCVGAAFANMEMDVVLRTVLRHFTLETTTAAGERSHGRGVAFTPKDGGRVVMRRR

SEQ ID NO: 1586 - protein, 182 aa, Mycobacterium bovis AF2122/97
MTSNQKAILAGGCFWGLQDLIRNQPGVVSTRVGYSGGNIPNATYRNHGTHAEAVEIIFDPTVTDYRTLLEFFFQIHDPTTKDRQGNDRGTSYRSAIFYFDEQQKRIALDTIADVEASGLWPGKVVTEVSPAGDFWEAEPEHQDYLQRYPNGYTCHFVRPGWRLPRRTAESALRASLSPELGT

SEQ ID NO: 1587 - protein, 255 aa, Magnetospirillum magnetotacticum MS-1
MSDAAGHQSGYALFLDFDGTLVEIAPRPDAVQVDPTLVPALERLRDRLGGALAIVTGRPVTVIDAFLKPARFDVAGLHGVERRVDGNLTGGRAEDHPDLRAGVERLHAETARYEAVLIEDKGASVAVHWRLAAPGDAQAAEAIVKAVAHDLGSAYRLQLGKAVGEIVPASATKGHAIRAFSEAAPYAGRRAIFLGDDRTDEIAFASVNEDGGISVRVGEGETVARRRLASPAEVRALIAAWAEGAPIDPETLPPA

SEQ ID NO: 1588 - protein, 74 aa, Glycine max
  misc_feature (33)..(33): Xaa can be any naturally occurring amino acid
  unsure (1)..(74): unsure at all Xaa locations
NCFLLVINASKDRVPNIKFNVVKVLQFFIPILXQFVFESTFCPFLVEPSEDPNVDVRFFASQALQFCYQVKMFS

SEQ ID NO: 1589 - protein, 516 aa, Glycine max
  misc_feature (485)..(485): Xaa can be any naturally occurring amino acid
  unsure (1)..(516): unsure at all Xaa locations
MASACVTLKSNTHLANSEKGFLGERIKGGFNNSALVMNQLAIRSRSHKRVKHGVGVVSAVLTSNNAKESLTLQVPSFLRRRADPKNVISIILGGGPGTQLFPLTKRAATPAVPVGGCYRLIDIPMSNCLNSGINKIFVLTQFNSASLNRHIARTYFGNGINFGDGIVEVLAATQTPGEAGKNWFQGTADAVRQFTWVFENTNVENVLILAGDHLYRMDYMDLVQSHVDRNADITVSCAAVGDSRASDYGLVKVDDRGRIIQFSEKPNGDDLKAMQADTSLLGLSPQDALKSPYIASMGVYVFKTDVLLNLLKWRYPTSNDFGSEIIPAAVRDHDVQSYFFEDYWEDIGTIKSFYDANLALTEESHKFEFYDPKIPIYTSPGFLPPTKIDKCQIVDAIISHGCFLRECTVQHSIVGERSRLDYGVELLDTVMMGADYYQTESEIASLLAEGKVPIGIGRNTKIRNCIIDKNAKIGKDVIIANRFGXEEADRPEDGFYIRSGITIIMEKATIEDGTVI

SEQ ID NO: 1590 - protein, 451 aa, Oryza sativa
MAEPEFEQAYKELASTLESSTLFEKNPEYRKALEVVSVPERVIQFRVVWEDDSGKCQVNKGYRVQFNSALGPYKGGLRLHPTVNLSILKFLGFEQIFKNALTGLNMGGGKGGADFDPKGKSDNEIRKFCVAFMTELSKHIGADTDVPAGDINVGGREIGYMFGQYRRLRNQWEGVLTGKGLNWGGSLIRPEATGYGLVYYVDHMINYASGGKESFKGKKVAISGSGNVAQYAALKVIELGGTVVSLSDSKGSLIATEGKGFTPEDISQIAALKLKRQALTALEGHSYNYIEGARPWKHVGNVDVALPSATQNEVSQDEAEALIAAGCKFIAEGSNMGCTQEAIDAFENHRKSNKGSSIWYAPGKAANAGGVAVSGLEMAQNSQRLSWTNEEVDAKLAKIMKDCFENCLATAKEYITPAEGEFPSLVAGANVAGFKKVAAAMHDQGDWWGTA

SEQ ID NO: 1591 - protein, 470 aa, Rubrivivax gelatinosus PM1
MVSRRNFLGRAGAVTAAVSAAAVSKVAMAALPEPVTQHSPDTMPPLVPERGRPYNPVVTLNGWTLPWRMNNGVKEFHLVAEPVVREMAPGFKAHLWGYNGQSPGPTIEVVEGDRVRVFVTNKLPEHTTVHWHGQRLPNGMDGVGGLTQPAIQPGKTFVYEFVARRPGTFMYHPHADEMVQMAMGMMGFWITHPKQKHPLIDEVDRDFVFLLNAYDIDPGAYTPKVMTMLDFNLWSWNSRVFPGIDTLNVRKNDKVRIRIGNLTMTNHPIHLHGHEFAVTGTDGGPTPKGTRWLEVTTDVAVGQMRQIEFRADEEGDWAFHCHKSHHTMNAMGHGVPTMIGVDHREVVSKITQLVPDYMVMGERGMADMAEMPMPLPDNTVPMMSGAGPFGSVEMGGMFTVLKVRRDQKPGDYGDPGWFDHPAGTVAYEWTGALATPARDRDPGRSAMPARNRPAREIEVQVRKPDRHGPH

SEQ ID NO: 1592 - protein, 168 aa, Enterococcus faecalis
MTKPTEEELKQTLTDLQYAVTQENATERPFSGEYDDFYQDGIYVDIVSGEPLFSSLDKYDAGCGWPSFTKPIEKRGVKEKADFSHGMHRVEVRSQEADSHLGHVFTDGPLQEGGLRYCINAAALRFVPVADLEKEAMANTFLYSNNPHFLDKYDKIVRKKATFDEYLV

SEQ ID NO: 1593 - protein, 375 aa, Shewanella sp. MR-7
MSDAKKLSGAGLRGQSAGETALSTVGVSGSGLTYRGYDVKDLAENATFEEVAHLILYGELPTTAQLEAYKTKLKGMRGLPQALKEVLERIPADAHPMDVMRTGCSMLGNLEAEHSFSEQSQIADRLLAAFPSIICYWYRFSHDGVRIETETNDEQIGAHFLHLLHGKAPSALHAKVMDVSLILYAEHEFNASTFTARVCASTLSDMHSCVTGAIGSLRGPLHGGANEAAMELIQDMKDEADARDVLMGKLERKEKIMGFGHAIYRDSDPRNAIIKEWSEKLAADYGDDRLYRVSVACEALMWEQKKLFCNADFFHASAYHFMGIPTKLFTPIFVCSRVTGWTAHVMEQRSNNRIIRPSADYVGVALRKVVPIAER

SEQ ID NO: 1594 - protein, 322 aa, Asparagus officinalis
IQMGLAENQLSFNLLEDWLEANPDALGLRREGASVFREPALFQDYNGLPAFKNALARFMSEQRGYRAVFDPSNIVLTAGATSANEALMFCLADHGDAFLIPTPYYPGFDRDLKWRTGAEIVPVHCTSANGFRVTRAALDDAYRRAQKSRLRVKGVLITNPSNPLGTTVPRADLEMLVEFVAAKGIHLISDEIYSGTAFAEPGFVSVLEVVAARSPLAADVSGRVHIVYSLSKDLGLPGFRVGAIYSANAGVVSAATKMSSFGLVSSQTQYLLAMLLGDKDFTRRYVAENKKRIKERHDQLVEGPKEIGIGCLESNAGLFCWV

SEQ ID NO: 1595 - protein, 805 aa, Lycopersicon esculentum
MAQRVLTRVHSLRERLDATLDAHRNEILLFLSRIESHGKGILKPHQLLAEFESIQKEDKDKLNDHAFEEVLKSTQEAIVLPPWVALAIRLRPGVWEYVRVNVNALSVEELTVPEFLQFKEELVNGTSSDNFVLELDFEPFTASFPKPTLTKSIGNGVEFLNRHLSAKMFHDKESMTPLLEFLRVHHYNGKSMMLNDRIQNLYTLQKVLRKAEEYLTTLSPETSYSSFEHKFQEIGLERGWGDTAERVLEMICMLLDLLEAPDSCTLEKFLSRIPMVFNVVIPSPHGYFAQENVLGYPDTGGQVVYILDQVPALEREMLKRIKEQGLDIKPRILIVTRLLPDAVGTTCGQRLEKVFGTEHSHILRVPFRTEKGIVRKWISRFEVWPYMETFIEDVGKEITAELQAKPDLIIGNYSEGNLAASLLAHKLGVTQCTIAHALEKTKYPDSDIYLNKFDEKYHFSAQFTADLIAMNHTDFIITSTFQEIAGSKDTVGQYESHMAFTMPGLYRVVHGIDVFDPKFNIVSPGADVNLYFPYSEKEKRLTTFHPEIEDLLFSDVENEEHLCVLKDRNKPIIFTMARLDRVKNLTGLVEWYAKNPRLRELVNLVVVGGDRRKESKDLEEQAEMKKMYELIKTHNLNGQFRWISSQMNRVRNGELYRYIADTRGAFVQPAFYEAFGLTVVEAMSCGLPTFATNQGGPAEIIVHGKSGFQIDPYHGEQAADLLAEFFEKCKVDPSHWEAISKGGLKRIQEKYTWQIYSDRLLTLAAVYGFWKHVSKLDRLEIRRYLEMFYALKFRKLAELVPLAVE

SEQ ID NO: 1596 - protein, 334 aa, Glycine max
  misc_feature (247)..(247): Xaa can be any naturally occurring amino acid
  misc_feature (291)..(291): Xaa can be any naturally occurring amino acid
  unsure (1)..(334): unsure at all Xaa locations
MTLSSPMPPFDSITTDSSTVTTTVHSCNSSSFSGSDPNTVPDIGSRNLSDGHFSDDLEKQYDDIAELEWLSNFVEESFSSEDLHKMQLISGMNAQNNDVSEAREFHYEPTTTRSGSHTPEPTRNSPIFNSEVSVPAKARSKRSRGPPCNWASRLLVLSPTSSSSDNEVVVPSPATAEPCPTPAKKMAKVGPRKKDSSSSDGNGSGGDGRRCLHCATDKTPQWRTGPMGPKTLCNACGVRYKSGRLVXPEYRPAASPTFVLTKHSNSHRKVLELRRQKEMVRSQQHHHQHQXSFYNTTHHNHHHYQHHQNMMFDVSNGDDYLIHQYVGPDFRQLI

SEQ ID NO: 1597 - protein, 249 aa, Coccidioides immitis
ESLAKFVTDKTGVKPKGIKKAGDSVVKMLTDQSFAKEVGGDKHVFVAFTAPWCGHCKTLAPTWEALTEDFMREPDVLIAKVDAEAEQSKATARDQKVTGYPTIKFFPKGSKEGETYSGPRSEDALVNFVNEKCGTHRAVGGGLNAKGGAIEALDDIVARYVSGGAIAEIAKDIKAAAGDLKQKYAQYYVKVATKLSENSGYAAKELARLEKMKSKGSLAPEKLDDLVSRSNILRRFLGKEGKKGAKDEL

SEQ ID NO: 1598 - protein, 488 aa, Agrobacterium tumefaciens
MKNSVQLITYVDRLSGGGFPELRALLDGRLQGLFGGVHALPFFNPIDGADAGFDPTDHTIVDPRLGSWDDVRTLAGSVEIMADLIVNHVSAQSSWFQDFIAKGPDSEFADMFMTFGKVFPRGASEQDLLNIYRPRPGLPFSKATLGDGSQRMLWTTFTPQQIDIDVHSAHGALYLETILDRFAEANVTAIRLDAAGYAIKKAGTSCFMIDETYAFLAKLAEKARDRGMEVLVEIHSYYRDQIEIARKVDRVYDFALPPLILHSLFTGDATALARWLEISPRNAITVLDTHDGIGVIDVGAHGHGRAGLLEPQAIDHLVEEIHRRSEGQSRLATGAAASNLDLYQVNCTYYDALGRSDNDYLIARAIQFFAPGIPQVYYVGLLGGLNDMELLRKTGVGRDINRRFFEDREIDLALESPLVKRLSDLIRFRNTHPAFNGSFEVATDDTGSLVLSWNFDAEFARLVVSFSQGKATITASGCYDFTFSGDVA

SEQ ID NO: 1599 - protein, 464 aa, Vibrio fischeri ES114
MPLHSKNAVRDDLLDDIYSSADLSLSMPKYKMPEQEHDPRHAYQVIHDELMMDGNSRQNLATFCQTWVEDEVHKLMDECIDKNMIDKDEYPQTAELESRCVHMLADLWNSPDAENTLGCSTTGSSEAAMLGGMALKWAWREKMKKLGKPTDKPNMICGPVQVCWHKFARYWDIELREIPMEGDRLIMTPEEVIKRCDENTIGVVPTLGVTFTCQYEPVKAVHEALDKLQEETGLDIPMHIDAASGGFLAPFCDPDLEWDFRLPRVKSINASGHKFGLSPLGVGWVIWRDASALHEDLIFNVNYLGGNMPTFALNFSRPGGQIVAQYYNFLRLGKEGYRKIHQACYDTAVYLSSEIEKLGMFEIIYDGKGGIPAMSWSLKEGVDPGFNLFDLSDRIRSRGWQIAAYAMPPKREDLVIMRILVRHGFSRDQADLLVADLKHCVEFFAKHPISHGSDELESSGFNHG

SEQ ID NO: 1600 - protein, 475 aa, Exiguobacterium sp. 255-15
MKSYQLVVIGGGAAGMTIAAGAASLGAHVALIEKHTHLGGDCLHYGCVPSKALIEAAHDVHVMKQTAAKYNVTLNGEAVYSKTKASVDRARNIIQSHDGTKRFKDLGVDVYIGEASFLSANEVEVAGQLVVGEKFAISTGSQPIIPPIEGLDTIPYLTNETIFEQTERPERLLVIGGGAIGLELSQAYAHLGTEVTVIEGAKSLMPKEDRSMVEVLQRQIEQELTLHLDTTVTSVRKAAKGIEVTVKTGEESRVIETDAVLVAVGRKPRIDALRLDRAGVHVEKGYVQVDGSLRTNQRHIFAVGDTIQSLPFTHVAGLEGKTVVTNALFGLRTKPDYRAVPWVTFTTPELFHLGLTEEEARQKYSDIKVYETGLDEVDRFVINGRTEGHVKLIADKRGKLIGAHAIGEQAGEWMQEVVYAMARKDKVGQLSRVVHPYPIRGAAVQRAADLYWRERLFDGPLPKWLKRYFDWKQGE

SEQ ID NO: 1601 - protein, 586 aa, Securigera parviflora
MCGILAVLGCSDDSQAKRVRVLELSRRLKHRGPDWSGLHQHGDCFLAHQRLAIVDPASGDQPLFNEDQSIIVTVNGEIYNHEELRKQMPNHKFRTGSDCDVIAHLYEEHGENFVDMLDGIFSFVLLDTRDNSFIVARDAIGVTSLYIGWGLDGSVWIASELKGLNDDCEHFETFPPGHLYSSKEREFRRWYNPPWFSESIPSAPYDPLALRQAFEKAVVKRLMTDVPFGVLLSGGLDSSLVASITARHLADTKAAKQWGAKLHSFCVGLEGSPDLKAGKEVADYLGTVHHEFQYTVQDGIDALEDVIYHIETYDVTTIRASTPMFLMSRKIKSLGVKWVISGEGSDEIFGGYLYFHKAPNKEELHKETCRKIKALHKYDCLRANKSTFAWGLEARVPFLDKEFINVAMNIDPENKMIKLDEGRIEKWILRKAFDDEENPYLPKHILYRQKEQFSDGVGYGWIDGLKDHAAKHVTDRMMLNASNIYPFNTPTTKEAYYYRMIFERFYPQNSARLSVPGGASVACSTEKALEWDAEWSKNLDPSGRAALGVHVSAYENQLSSSVSKGVEPEKIIPKMEISPLGVAIQS

SEQ ID NO: 1602 - protein, 400 aa, Pseudomonas syringae pv. syringae
MNDALAQLQSYPFEKLRTLLNGVTPNASLRPIALSIGEPKHPSPAFVKTALAANLDKMSVYPATLGIPELRAAIADWCQQRFDVPKGWLDPARHILPVNGTREALFAFTQTVVRRDSNGLVISPNPFYKIYEGAAILAGATPHYLPCLESHGFNPDFDSVPADIWKRCQLLFLCSPGNPTGALVPLDALKKLISLADEHDFVIAADECYSEIYFDETSPPPGLLTACAELGRSDFKRCVVFHSLSKRSNLPGLRSGFVAGDADILKAFLLYRTYHGCAMPVHSQLASICAWKDEDHVRENRDLYREKFDAVLAILSPVMDVKKPDGSFYLWAKVPMDDAEFCRELFEQTHITVIPGSYLSREVDGVNPGAERIRMALVAPLAECVEAAERIRDFLLQRRL

SEQ ID NO: 1603 - protein, 243 aa, Triticum aestivum
  misc_feature (71)..(71): Xaa can be any naturally occurring amino acid
  misc_feature (130)..(130): Xaa can be any naturally occurring amino acid
  misc_feature (142)..(142): Xaa can be any naturally occurring amino acid
  misc_feature (159)..(159): Xaa can be any naturally occurring amino acid
  misc_feature (164)..(164): Xaa can be any naturally occurring amino acid
  misc_feature (169)..(169): Xaa can be any naturally occurring amino acid
  misc_feature (189)..(189): Xaa can be any naturally occurring amino acid
  misc_feature (194)..(194): Xaa can be any naturally occurring amino acid
  misc_feature (198)..(198): Xaa can be any naturally occurring amino acid
  misc_feature (200)..(200): Xaa can be any naturally occurring amino acid
  misc_feature (204)..(204): Xaa can be any naturally occurring amino acid
  misc_feature (215)..(215): Xaa can be any naturally occurring amino acid
  misc_feature (220)..(220): Xaa can be any naturally occurring amino acid
  misc_feature (226)..(227): Xaa can be any naturally occurring amino acid
  misc_feature (229)..(229): Xaa can be any naturally occurring amino acid
  misc_feature (233)..(233): Xaa can be any naturally occurring amino acid
  misc_feature (238)..(238): Xaa can be any naturally occurring amino acid
  unsure (1)..(243): unsure at all Xaa locations
MPTANVRAAHPIADRRLSTLVRHLLPSSPRTSAATATSADSSLQPFPTMASPSVFAGIAQGPEDPILGVTXVAYNKDPSPVKVNLGVGAYRTEEGKPMVLNVVRRAEQILIQNESRVKEYFPITGIGKFXTKLSAKLIFGAXILLFKEKKGANVQMLNXRNGSXTMGSXFPAKEYQLKQNLIPQANLGXINPKXLNLXGXMVGXYRYNNPATCGXDFKGXLEKLNXXPXGPIXRLNEXAQKPF

SEQ ID NO: 1604 - protein, 450 aa, Streptococcus thermophilus CNRZ1066
MVKEYDYIVIGGGSGGIASANRAAMHGAKVILFEGKEVGGTCVNVGCVPKKVMWYGAQVAETLHRYAGEYGFDVTINNFDFATLKANRQAYIDRIHGSFERGFDSNGVERVYEYARFVDPHTVEVAGELYTAPHILIATGGHPLYPNIPGSEYGITSDGFFELDEVPKRTAVIGAGYIAVEVAGVLNALGSDTHLFVRKDRPLRTFDKDIIDVLVDEMAKSGPTLHMHANATEVVKNADDSLTISFDNEETITVDCLIWAVGRAANTSGFGLEKTGVELTERGNIYSDEFENTSVPGIYALGDVTGKLDLTPVAVKAGRQLSERLFNNKVDAKLDYTDVATVVFSHPAIGAIGLTEEKAIAKYGAENIKVYKSSFTPMYTALGDNRQLSTMKLVTLGEDEKIIGLHGIGYGVDEMIQGFSVAIKMGATKADFDNTVAIHPTGSEEFVTMR

SEQ ID NO: 1605 - protein, 336 aa, Legionella pneumophila str. Lens
MSYEELSNTMEQMLHEGKGILAADESNSTIGKRFASINTENTEENRRDYRLLLATTPDLEQYINGVILFEETFTQTDEHGTPIPELFANKGIIPGIKVDKGLVDLANTEHEKVTQGLDGLTERLLHFKKLGAKFAKWRNVYSISEYTPSLTAIKTGAENLGRYAAACQSVGIVPIVEPEVLMDGNHSIEHCAEVCEMVLHELFHTLFIHQVELEHIILKPSMVTCGKEVTPFSDPEEVADYTISVFRNNVPASVPTINFLSGGQTPQQATANLNAINQIGHQPWLLSFSFGRALQEDCLKEWCGNKANIAKAQEALIKRARLNSMACLGEYQNDME

SEQ ID NO: 1606 - protein, 523 aa, Vigna angularis
GIFADWSHAAPDLAGDFEGGLIVCALEGEFLAGANLIEDVSVLLLQPSDLLHQLVLVEIELQFRLDLVVEQSGVVVVRGSSLRGVVQEPLEELDLVLVGPQPLEQPPQSSSGGGGFFSSIGSRRRRFGSEESPMTMVVAVGVDSGAPPPFEMAEPGTATVTARAVEGEGSFSSSSAAKTSSSSSNSSSSWDSSSSSSMSSSRKRHRVVEMPLIGRRERERERERERESERFGQCRPRKHDLEFTKILEEANASELNSYGVIANSFYELEPVYADHYRNELGRKAWHLGPVCLSNRDNAEKVHRGNEATIDEHECLKWLDTKEPDSVVYVCFGSMTTFPNAQLKEIALGLEASGQPFIWVVKKGSSENLEWLPEGFEERTVDQGKGLIIRGWAPQVMILDHIAVGGFVTHCGWNSAMEGVCAGLPMVTWPMYAEQFYNAKFLTDIVKIGVSVGVQTWIGLMGGKPVKKEVIEKALKRIMVGDEAEEIRNRAKDIAKMAKRAVEEGGSSYSDFNSLIEDLRSRTL

SEQ ID NO: 1607 - protein, 217 aa, Zea diploperennis
IVNGMDVSEWDPSRDKYIAVKYDVSTAVEAKALNKEALQAEVGLPVDRNIPLVAFIGRLEEQKGPDVMAAAIPRLMEMVEDVQIVLLGTGKKKFERMLMSAEEKFPGKVRAVVKFNAALAHHIMAGADVLAVTSRFEPCGLIQLQGMRYGTCNVVEPADVKKVATTLQRAIKVVGTPAYEEMVRNCMIQDLSWKGPAKNWENVLLSLGVAGGEPGVK

SEQ ID NO: 1608 - protein, 304 aa, Triticum aestivum
  misc_feature (175)..(175): Xaa can be any naturally occurring amino acid
  misc_feature (186)..(186): Xaa can be any naturally occurring amino acid
  misc_feature (197)..(197): Xaa can be any naturally occurring amino acid
  misc_feature (212)..(212): Xaa can be any naturally occurring amino acid
  misc_feature (214)..(214): Xaa can be any naturally occurring amino acid
  misc_feature (226)..(226): Xaa can be any naturally occurring amino acid
  misc_feature (236)..(236): Xaa can be any naturally occurring amino acid
  misc_feature (240)..(240): Xaa can be any naturally occurring amino acid
  misc_feature (244)..(244): Xaa can be any naturally occurring amino acid
  misc_feature (249)..(249): Xaa can be any naturally occurring amino acid
  misc_feature (264)..(264): Xaa can be any naturally occurring amino acid
  misc_feature (281)..(281): Xaa can be any naturally occurring amino acid
  unsure (1)..(304): unsure at all Xaa locations
MEQYEKVEKIGEGTYGVVYKARDRATNETIALKKIRLEQEDEGVPSTAIREISLLKEMQHGNIVKLHDVVHSEKRIWLVFEYLDLDLKKFMDSCPEFAKSPALIESYLYQILRGVAYCHSHRVLHRDLKPQNLLIDRRTNALKLADFGLARAFGIPVRTFTHEVVTLWYRAPEIXFLGARQYSTPXVDVWSVGCIFXQEMVNQETTVPWVIXRXDELFKIFRVPGXPNEQTWPSVXPLPXDYKXAFPKXWQAEDLATVVPNLEXLGLGLLSKMLRFEPNKXLRQASLDMLKAWWAMTPWNDNFD

SEQ ID NO: 1609 - protein, 768 aa, Cladosporium fulvum
  misc_feature (149)..(149): Xaa can be any naturally occurring amino acid
  unsure (1)..(768): unsure at all Xaa locations
MVQSSVLGFPRMGRLRDLKKANEAYWGDKLSRDELLAEGKRLRLEHWKIQKDAGVDIIPSNDFAYYDHVLDHIQMFNAIPERYSSAKLHKLDEYFAMGRGHQKDGVDVPSLEMVKWFDSNYHYVKPTLQDNQTFKLSENPKPVAEFLEXKEAGIHRPVLLGPVSFLALGKADRNQTVDPITLLEKLLPVYEELLKKLKQAGAETVQIDEPVLVFDLPSKTRNAFKPAYEKLTALQGKEGPQLVLATYFGDIVHNFDVVDAALTKTYALHVDLVRHPEQLEKGAQHLGSNQILSAGIVDGRNIWKTNFKKAIETLETAVQKVGKDHVIVATSSSLLHTPHTLESEKNLDDEVRDWFSFATQKASEVAILAKAVTDGPDAVKSQLEANAKSMESRRTSKRTNNPEVQKRVSSVQKADYERKNPFEQRIAAQKKHLNLPEFPTTTIGSFPQTKEIRVQRNKFTKGEITEKEYDEFIEAEIRDNIKIQEELGLDVYVHGEPERNDMVQYFGERLDGYVFTTHAWVQSYGSRCVRPPILVGDVSRPKPMTVKESKYAVSQSKKPMKGMLTGPITCLRWSFPRDDVHQSIQAAQLALALRDEVVDLQNAGVAVIQIDEPALREGLPLRSGSEREKYLQWAVDSFKLSAAGVEDATQIHSHFCYSEFQDFFHAIAALDADVLSIENSKSDAKLLKVFIDEKYPRHIGPGVYDIHSPRIPSEQEIKDRIQEMLQYLTPEQLWINPDCGLKTRQWKETKDALAHMVSAAQHFRSQKN

SEQ ID NO: 1610 - protein, 264 aa, Chlorella vulgaris
  misc_feature (189)..(189): Xaa can be any naturally occurring amino acid
  misc_feature (256)..(256): Xaa can be any naturally occurring amino acid
  unsure (1)..(264): unsure at all Xaa locations
LQPVLIRLGWHDAGTYSVEADKEHGWPLCGGTTGSIRFKEEMTHGCNAGLSLAYDLVKHVKDEFPEISWADLFQLASAVSIEACGGPFIPLRLGRKDANTKEDCTPDGRLPAAGAPFPDGAPTAAQHLRNTFYRMGLTDKDIVVLSGAHTVGRARPERRPFGKEHTKYTKNGPGSPGGSSWTVEWLKFXNRYFKDIKEQIDEELLVLPTDAAIFEDEGFRPHAEKYAEDQDAFFKDYVESHLKLSELGAKWEGEPXVLSPSNAA

SEQ ID NO: 1611 - protein, 401 aa, Cucumis melo
MDYVYGPGRNHLFVPGPVNIPEQVLRAMNRNNEDYRSPAVPALTKTLLEDVKKIFKTTSGTPFLFPTTGTGAWESALTNTLSPGDRIVSFLIGQFSLLWIDQQQRLNFKVDVIESEWGEGAKLDVLAAKLAADTDHTIKAVCIVHNETATGVTNDLSLVRRILHEYRHPALFLVDGVSSICALDFRMDDWGVDVALTGSQKALSLPTGIGIVCASPRALEASKTAKSLRVFFDWKDYLKFYNLGTYWPYTPSIQLLYGLRPALDLVFEEGLENVIARHKRLGQATRLAVEAWGLKNCTQKEEWHSDTVTAVVVPPYIDSAEIVRRAWKRYNLSLGLGLNKVAGKVFRIGHLGNLNELQLLGCLAGVEMILKDVGYPVKLGSGVAAASSYLQNNIPLIPSRI

SEQ ID NO: 1612 - protein, 378 aa, Brucella suis 1330
MKLDTYLTRLENLERKGRRRNLALADGLDFSSNDYLGLATHPGIKAAVEAALQRGVPLGATGSRLLRGNHAEHEALEAEAAAHFSAPRMIYFGSGYMANLAALSTLPQPGDLIVYDELIHASAHAGIRAGRAEAVGARHNDAQAFEDRIRAWRENGGRGTPWIVVESIYSMDGDQAPLKALHAIATRYDGVLYIDEAHATGVYGANGGGFAATLGDAENIVTLHTCGKALGGSGALLGAHATLCDYLVNRASGFIFTTAPSPLQAAALREALRILRDQPERRARLFSRISHANERIATALGQPVSGTQIIPIIVSDNERAVRLAAQMQAQGFDIRAIRPPTVPHGTARLRISITLNVGLADIDRMVETLSYATFREAA

SEQ ID NO: 1613 - protein, 366 aa, Xylella fastidiosa 9a5c
MRTSFSDLNKQPTYALLVNVSITTDYSRMLFMRNTTSTLKIAIIGYGSQGRAHALNLRDSGFDIIIGLRPGGPTEAKAQADGFTVQSPDQAAKHADLVAVLTPDMVQKKLYEEVLAPNIKQGACLLFAHGLNVHYGMITPRSDLDVVLVAPKGPGALVRREYEIGRGVPCIYAVHQDLSSHAEQLALTYAGGLGGARANIIKTTFKEETETDLFGEQAVLCGGVSSLVQAGFETLVEAGYQPEIAYYEVLHELKLIVDLFYEGGITRMLEFVSETAQYGDYVSGPRVIDGSTKERMKAVLKDIQDGTFTKHWIAEYQAGLPNYKKYKQADLEHPIEKVGKQLRAKMVWLNSEKTNDTTPPMSSKVV

SEQ ID NO: 1614 - protein, 125 aa, Brassica napus
ENWKDSPSSVLNIYHELIAAGLRIWVFSGDADAVVPVTSTRYSIDALKLHPVSPYGPWYIDGQVGGWTQEYDGLNFVTVRGAGHEVPLHRPKEALALFQAFISGTSLPTPENSIRSDKSELVGDS

SEQ ID NO: 1615 - protein, 658 aa, Anabaena variabilis ATCC 29413
MTNSQPGYSLLSDITKEQSKEIQRLVDYTNVDSLPEIWPIAAKKFGETLALYNPHAKPEVKITYQQLAEKIQLFASGLQALGVQAGDRISLIADNSPRWFIADQGIMTAGAVDAVRSSQAEKEELLYIVAHSGSTALVVEDLKTFNKLQDRLHDLPIQVVVILTDETPPTEQSLKVLNFLQLIEVGTNHAFVPVKRKRDELATLIYTSGTTGKPKGVMLSYSNLLHQVTTFRVVVQPKVGDTALSILPSWHSYERTVEYYLLSQGCTQIYTNLRSVKADLKQYKPNYMVAVPRLWESIYEGVQKQFREQPANKQRLIKFLLGMSEKYIKAQRIAQGTSLDHLHASSLERLIAKVLELAFLPFHVLGQKLVYGKVKEATGGRFKQVISGGGALPKHIDTFFEIIGVQILQGYGLTETSPVTNVRRPWRNFIGTSGQPIPGTEVKIVDPETRQPLPVGQRGLVLLKGPQVMQGYYQNPEATAKAIDPQGWFDSGDLGWVTPDNELVLTGRAKDTIVLSNGENIEPQPIEDACLRSPYIDQIMLVGQDQRSIGALIVPNVEALAKWAESQNLVLSVEDDNLTSSSSQKINLESKMIQGLFRQELNREVQNRPGYRPDDRVGPFKLILEPFSIENGLMTQTLKIRRHVVTERYRDIINAMFA

SEQ ID NO: 1616 - protein, 265 aa, Ralstonia metallidurans CH34
MSRIQKTFAALAAQQKKGLIPFITAGDPAPALTVDLMHALVAGGADVIELGVPFSDPMADGPVIQRASERALAQGVSLTQVLAWVTEFRKTNATTPVVLMGYANPIERMGEETFAKAASAAGVDGVLVVDYPPEECESFAALMRANQMDPIFLLAPTSTDDRIAAVAKVASGYLYYVSLTGVTGSATLDLESVAARLPLIKQHANLPVGVGFGIRDAQTARAIGSVADAVVIGSRLVQLLEDAPREKAVDSLRAFIADIRQALDA

SEQ ID NO: 1617 - protein, 652 aa, Caulobacter crescentus CB15
MSNNSSAETEAPETTGGDGPLLDLTDAGVKKFIKQAKARGYVTMDELNKVLPSEEVSPDAIEDTLAMLSEMGVNVVEAEEDAENAEGGEVATRDENTTVIASDKPAAYDRTDDPVRMYLREMGSVELLSREGEIAIAKRIEAGRDTMIRGLCESALTFEAIMVWREELGTGRILLREVIDLEGTYAAINGVAAQPAAEDDEGPAEPVDDEAGEAKAEGAEGEDEDDFDDGAGPTVSAMEGELREGVMAILDAIASEFEAFRKLQDKLVGSRLKGEDLSDADRKAYEGLSATIIQHLKTLKLNNNRIEALVEQLYAINKRLIGLEGRLLRLADSYGISRGEFLKAYFGSELNPTWSEQVKAMGVRWTKFVENDSQSVTDIRSEIAALATETGVPIDDYRRIVQTVQKGEREARQAKKEMVEANLRLVISIAKKYTNRGLQFLDLIQEGNIGLMKAVDKFEYRRGYKFSTYATWWIRQAITRSIADQARTIRIPVHMIETINKIVRTSRQMLHEIGREPTPEELAEKLAMPLEKVRKVLKIAKEPISLETPIGDEEDSHLGDFIEDKNAILPIDAAIQSNLRETTTRVLASLTPREERVLRMRFGIGMNTDHTLEEVGQQFSVTRERIRQIEAKALRKLKHPSRSRKLRSFLDS

SEQ ID NO: 1618 - protein, 276 aa, Triticum aestivum
  misc_feature (234)..(234): Xaa can be any naturally occurring amino acid
  unsure (1)..(276): unsure at all Xaa locations
HSITSLYKKAGWYRLRNSRDIVDPRVRSPGNLRSKQSQGSLVLLLKMQIFVKTLTGKTITLEVESSDTIDNVKAKIQDKEGIPPDQQRLIFAGKQLEDGRTLADYNIQKESTLHLVLRLRGGMQIFVKTLTGKTITLEVESSDTIDNVKAKIQDKEGIPPDQQRLIFAGKQLEDGRTLADYNIQKESTLHLVLRLRGGMQIFIKTLTGKTITLEVESSDTIDNVKAKIQDKEGXIPPDQQRLIFAGKQLEDGRTLADYNIQKESTLHLVLRLRGGQ

SEQ ID NO: 1619 - protein, 640 aa, Corynebacterium efficiens YS-314
MCGLLGILSANGNAADYVPALQRALPCLHHRGPDEAGTWQDGDLAFGFNRLAIIDIAHSHQPLRWGPEGEPERYAMTFNGEIYNYIELREELTALGYAFETEGDGEPIMVGFHHWGADVVNHLRGMFAIAIWDTVDRSLFLARDQFGIKPLFYATTGVGTVFSSEKKAILEMAEELNLDLSLDRRAIEHYVDLQYVPEPETLHTGIRRLESGCTATIIPGGELVEKRYFTPRFPVKSVPKGREQDLFDRIARVLEDSVEKHMRADVTVGSFLSGGIDSTAIATLAKRHNPNLLTFTTGFEREGYSEVDVAAESAAAIGVEHIVKIVSPEEYANAIPKIMWYLDDPVADPSLVPLYFVAAEARKHVKVVLSGEGADELFGGYTIYREPLSLAPFEKIPTPLRRGLGRLSRVLPEGMKGKSLLERGSMTMEERYYGNARSFNFEQMQRVIPWARREWDHREVTAPIYAQSRDMDPVARMQHLDLFTWMRGDILVKADKINMANSLELRVPFLDKEVFKVAETIPYDLKIANGTTKYALRKAMEQIVPPHVLHRKKLGFPVPMRHWLAGDELFGWAQDTINESQTDEIFNKKAVLEMLNEHRAGVSDHSRRLWTVLAFMVWHGIFVENRIDPQIEQRDYPVEL

SEQ ID NO: 1620 - protein, 554 aa, Shewanella sp. MR-7
MDNAIKTPVEMLAHWANTRGDEIYLRQPIKGQYLDFTWNEVQEKVQQLAGALRHLGLEPGDKIAVLSKNCAEWFITDLALMHGGYISVPIYPTANTDTIRYVLQHSGAKAIFLGKLDHWADQEAGVGGELLRLAMPYETMPAQYQWEQLLKMGNPLIEAPLPELDQTMTLIYTSGSTGQPKGAIQTFASYGWTCQAVVRDLRTNGNDRLLSYLPLAHITERVAIEGSSFYSGSTVAFVESLDSFVADVQRAKPTVFFSVPRLWSLFQKNIIDKIGVGKLNLLLKIPLISSLVKHKIHKGLGLNHCRLLGSGSAPIPPSLIHWYHSIGLDICEAWGMTENCAYSIINYPFDVRKIGTVGKPVQDCQIRQGEDGELLLKSPGLMTAYYQQPEATAAAFDPDGFFHTGDLCAIDADGCVTITGRVKDNFKTAKGKYVAPVPIERKLAQDPHVELICVIGSGLPHPVALVQLSEGATLQAREEVRASLKATLDSVNPHLESHEHVDAIVVVNEPWTIENDVLTPTLKIKRHVLEKAFSERVDGIRGAQVRWEDELAVK

SEQ ID NO: 1621 - protein, 528 aa, Silicibacter sp. TM1040
MVEVVTAQQMRALEQAAIASGAVTGCELMECAGNAVVAAILEHWPEFAGRADGGAAPRPAAVPRDISEKLKRAVVLCGPGNNGGDGFVVARLLKLRGWAVEVFFYGDAAKLPADAKVNYQRWCALGDVHRLDAATLASGTKVQHADLVVDALFGTGLTRPVDLPLGVICEVARNVVAIDVPSGLCSDSGRVIGAAAVQADLTVTFHAQKLGHVLAEGPQHCGTVRVASIGLEGHELPVAAVPTVSFDAPDHADLAKGSGAHKFSYGHALILSGGAGQTGAARLAARGALRIGAGLVTLGVSPAAQMEVAGHVTAVMLRRVEGADGLEAVLQDARINALCLGPGLGHERARALVPVALAAGRATVLDADALSAYSDAPDALFDQLHKNCVLTPHGGEFARLFPDLAQRLAEPATRGPAYSKVDATRDAAARAGCTILFKGADTVIADEAGDCAIHDAAGARAAPWLATAGAGDVLAGFITGLLARGLAAHDGATTGAWLHADCARQFGPGLIAEDLPEQLPHVFRKLGL

SEQ ID NO: 1622 - protein, 55 aa, Oryza sativa (japonica cultivar-group)
MAGTANCIDILIAIILPPLGVFLKFGCGHEFWICLLLTFLGYIPGIIYAIYAITK

SEQ ID NO: 1623 - protein, 304 aa, Zea mays
LTSSFSSLSGSLPEERHYCHTTTPPMLNMMTDLSCGPSSKAAKGGQPAATTGSGGDRQGRGKIEIKRIENTTNRQVTFCKRRNGLLKKAYELSVLCDAEVALVVFSSRGRLYEYANNSVKSTIERYKKANSDTSNSGTVAEVNAQHYQQESSKLRQAIDSLQNANRTIVGDSIHTMGLRELKQMEGKLEKAINKIRARKNELLYAEVEYMQKREMDLQTDNMYLRSKIAENNETGQPPMNMIGLPSTSEYDHMAPFVDSRNFLQVNMQQQPQHYSHLSAATNDPPTRMMKLRIFGQQSMHASTQ

SEQ ID NO: 1624 - protein, 462 aa, Magnaporthe grisea 70-15
MLGVRKCSNVFDTSRYSWSIATYDEVIWPMPVRAPASYPQWVPAKDKDLIEGSVITSAQMASKGMWEVDPETRSKLLAIQKESKNSLCCDCGAPSPQWASPKFGIFICLSCAGVHRGLGVHISFVRSISMDAFKAAEIERMRLGGNERWREFFEKHADTELRGISWDDATIAERYGGEAGDEYKERLSALVDGREYVPGEKKKAAPAENTNRSTAPLGGSADGSKNGGGGGRFRDDPSLGGSRSESPSGGATSGGKTRVDDKYFARLGADNASRSEDLPPSQGGKYAGFGNTPAPAPGGAGGNTALPSMDELQNNPVAALSKGFGWFASTVTKTATTVNNNYIQPTAKQIADSDFAAQARNTAGTVGRAAQQGAKSAQTSFNRFVEGPDSRQYQQVRQAPIDETRKGFWDDFSDIPEQQQKQQPKPSSIGTAAMGKGGSGGAGGPGSASASQTAKKDEWDDW

SEQ ID NO: 1625 - protein, 161 aa, Oryza sativa
  misc_feature (64)..(64): Xaa can be any naturally occurring amino acid
  unsure (1)..(161): unsure at all Xaa locations
MSLIRRSNVFDPFSLDLWDPFDGFPFGSGSRSSGTIFPSFPRGTSSETAAFAGARIDWKETPEXHVFKADVPGLKKEEVKVEVEDGNVLQISGERSKEQEEKTDKWHRVERSSGKFLRRFRLPENTKPEQIKASMENGVLTVTVPKEEPKKPDVKSIQVTG

SEQ ID NO: 1626 - protein, 412 aa, Lactobacillus reuteri
MPGGVNSPVRAFKNVGGDPLFIDHGKDEYIYDIDGNKYIDYVLSWGPLILGHADDHVVAELDKAVAKGTSYGAPTLQETELAKIVNKIMPSIEMIRMVSSGTEATMSAIRLARGYTHRKKIVKFVGNYHGHSDSLLVDAGSGLATFGINTSPGVPDDLAYDTLTVAYNDVAGVKKLFAEHGDEIACAIVEPVAGNMGVIPGTQEFLQTLRNVTNEHGALLIFDEVMSGFRAAYHGVQSLVNITPDLTTLGKVIGGGLPVGAFGGRREIMENITPAGDIYHAGTLSGNPLAMTGGISTLEQLTPDDYVEMDKKVTALTEGIKHAADQYGVPMTVHHVGTMWSYFYNSDPINNFDDVKACDQKLFEKCFWELLAHGVYVAPSQFETNFISTKHTDEDIEKTIAAFDAAFNAATK

SEQ ID NO: 1627 - protein, 402 aa, Triticum aestivum
MQSGMEQTTGVSGHEHVIDIPRDSGPSASASHSVGRENHEELNPVDRPSTRAATSALQPPAAIGPPHAENTSGTRRRDNYGRRHRSPLNSGLWISVEVIVNVSQIVAAIVVLSLSRKEHPQAPLFEWVIGYTVGCFATLPHLYWRYIHRNIVNGENEPAHSLQGSSQNNSTEPTPASVSERRRNAARNAVLANPRINALFDHFKMALDCFFAVWFVVGNVWIFGGRSSAVDAPNLYRLCIVFLTFSCIGYAMPFILCAMICCCLPCIISVMGFREDTNNTRGATSESINTLPTYKFKTKKRRHGSGNEAEGQEGGIVAAGTDKERSLSAEDAVCCICLAKYAHNEELRELPCTHCFHKECVDKWLKINALCPLCKAEIASSSGTSDTRHIDHTVPTQEIEMH

SEQ ID NO: 1628 - protein, 507 aa, Saccharomyces cerevisiae; identical to SEQ ID NO: 1352

SEQ ID NO: 1629 - protein, 395 aa, Bradyrhizobium sp. BTAi1
MTDAVIVSTARTPIGKAYRGALNATGGATLLGHAIGEAVKRAKVDPAEVEDVVMGAALQQGSTGGNIARKALLRAGLPVSVGGTTIDRQCASGLQAIALAARSVIFDGVEIAVGGGGESISLVQNDKMNAFQATDPALLEIKGDVYMPMIDTAEIVSKRYGISREKQDEYALESQRRTAAAQQGGKFNDELAPITTKMAVTDKATGNVSFKDITLSQDEGPRPETTAEGLAGLKAVRGDGFTITAGNASQLSDGASACVIMSDATAAKRGLQPLGIFRGFVAHGCEPDEMGIGPVFAVPRLLKRHGLTVDDIGLWELNEAFAVQVLYCRDKLGIDPDKINVNGGAISVGHPYGMSGARLTGHALIEGRRRKAKYAVVTMCVGGGMGAAGLFEVLQ

SEQ ID NO: 1630 - protein, 244 aa, Arabidopsis thaliana
MEACLRCSRGSYLIEAMRPLSSSLRPSSSVSFSTGKPIKRAYDGLLLDAGGTLLQLSKPVHETYASLGQKYGLKTTPAEIKEGFKRVFSAPWPEKLRYQGDGRPFWKLVVSEATGCSDNDYFEDVYQYYANGEAWHLPEGAYETMSLLKDAGVKMAVVSNFDTRLRKFDAVIVSAEVGYEKPDERIFKSALEQISVDVNRAVHVGDDEGADKGGANAIGIACWLWGEDVQTFSDIQKRILVSEL

SEQ ID NO: 1631 - protein, 289 aa, Arabidopsis lyrata
GKTITLEVESSDTIDNVKAKIQDKEGIPPDQQRLIFAGKQLEDGRTLADYNIQKESTLHLVLRLRGGMQIFVKTLTGKTITLEVESSDTIDNVKAKIQDKEGIPPDQQRLIFAGKQLEDGRTLADYNIQKESTLHLVLRLRGGMQIFVKTLTGKTITLEVESSDTIDNVKAKIQDKEGIPPDQQRLIFAGKQLEDGRTLADYNIQKESTLHLVLRLRGGMQIFVKTLTGKTITLEVESSEIQDKEGIPPDQQRLIFAGKQLEDGRTLADYNIQKESTLHLVLRLRGGSF

SEQ ID NO: 1632 - protein, 476 aa, Glycine max
MGGGFRVLHLVRPFLSFLPEVQTADRKVPFREKVIYTVISLFIFLVCSQLPLYGIHSTTGADPFYWMRVILASNRGTVMELGITPIVTSGLVMQLLAGSKIIEVDNNVREDRALLNGAQKLLGILIAVGEAVAYVLSGMYGSVGQLGVGNAILIIIQLCFAGIIVICLDELLQKGYGLGSGISLFIATNICENIIWKAFSPTTINSGRGAEFEGAVIALFHLLITRTDKVRALREAFYRQNLPNVTNLLATVLIFLIVIYFQGFRVVLPVRSKNARGQQGSYPIKLFYTSNMPIILQSALVSNLYFISQLLHRKYSGNFFVDLLGKWKESEYGGGQSVPVGGIAYYITAPSSLADMAANPFHALFYLVFMLSACALFSKTWIEVSGSSAKDVAKQLKEQQMVMPGHRESNLQKELNRYIPTAAAFGGICIGALTVLADFMGAIGSGTGILLAVTIIYQYFETFEKERASELGFFGF

SEQ ID NO: 1633 - protein, 166 aa, Arabidopsis lyrata
GLFKKSSELCTLCDAEIAIIVFSPSGKVYSFGHPNVNVLLDQFSERVLRHNNTNLDESHTKLHIQMLNESLTEAMAEKEKEQRKKEWLVQNEREIKNVEEWWTNSLKELNLTQLTSMKHALEDLKKEVNERASLFHQSNSNFYVGSSSNAAAPEAVNGGNISTNQG

SEQ ID NO: 1634 - protein, 454 aa, Shewanella sp. MR-4
MRNLLDLDFDFDSAHIWHPYTSMTRALPVFGVHSAQGCELELVDGRKLIDGTSSWWACVHGYGHPAILTAMERQLQQLSHVMFGGITHEPAITLCKKLLAMTCEPLTKVFLCDSGSIAVEVAIKMALQYWQGQDLPLVQKAQKQRILTVKKGYHGDTFAAMSVCDPEGGMHTMFGEAVTKQCFVDAPQTPFGEPLSQDDLAPMQRILREQHQEIAAVIIEPIMQGAGGMRFYSSDYLRGLRALCDEYNVLLILDEIATGFGRTGKLFAYEHADITPDILCLGKALTGGYISLAATLCTDNVAQGISQSPAGVFMHGPTFMGNPLACAAACASLDLINQQEWPAQVAAIEQQMQRELADANDIPSVKEVRVLGAVGVLEMHQAVNTAALQQQFVDLGVWVRPFANLIYIMPPYVITPAQLTQLTRAMKQVAATITPPQAAQTEALANESITISHG

SEQ ID NO: 1635 - protein, 284 aa, Arabidopsis thaliana
MTAVTAAQRSVPAPFLSKTYQLVDDHRTDDVVSWNEEGTAFVVWKTAEFAKDLLPQYFKHNNFSSFIRQLNTYGFRKTVPDKWEFANDYFRRGGEDLLTDIRRRKSVIASTAGKCVVVGSPSESNSGGGDDHGSSSTSSPGSSKNPGSVENMVADLSGENEKLKRENNNLSSELAAAKKQRDELVTFLTGHLKVRPEQIDKMIKGGKFKPVESDEESECEGCDGGGGAEEGVGEGLKLFGVWLKGERKKRDRDEKNYVVSGSRMTEIKNVDFHAPLWKSSKVCN

SEQ ID NO: 1636 - protein, 406 aa, Shewanella sp. MR-4
MSSPLTSKLGSKILARQQALAEQGLLRQRQALSSAAALSEDGPQFGLADRHYLNFSSNDYLGLSRAPELAEALHLGAKQYGVGSGASPLVTGYSEAHLALETKLCQMTGFEAALLFSSGFSANTTLCKTLFDKQDVVLADKLVHASIIDGLRDSGADFKRFLHNATESAERLLAKNAVSALITESVFSMDGDIAPISALSALCRANNAWLIVDDAHGFGVVDAVSAQVESTPASNLIDIQVVTFGKALGCQGAAILGSRQLIEFLVSNAREYIYSTALSPANAALALAAVEYAEVHPELKQKLQSNILLFKQLCQDADIPLLGSDTAIQPLIIGDAAQTLLVAEKLKALGIWVGAIRPPTVPVGSARLRITLSAAHSEAAIRRCVNGIATVLKECALPRVSERPER

SEQ ID NO: 1637 - protein, 464 aa, Synechococcus elongatus PCC 6301
MNLRTIRAELQQFLQLAIPLAAAQVAQAAVGFVDTVMMGRLGPEPLAAGGLASALFQFILATASGVVMAVSPLVAEAQGAGKDYKIAAIARQGLWLSVLLGLPVMLIISQLARLMPVLGQSATTIALARDYWMAVLWGIIPGLGFAMLRGYVAALEQARIILPLVLFGTLVNGLGNYLLGYGQLGFPRLELTGLGLSSALGLWVMFLGLLAYTAWQPKLRRYPFWQDWRRLQPSICRQILQLGWAIAVTVAVEFGLFTIITILMGAIGVEALAAHQTVSQTIILIFMVPLGCSFAVTVRVGWWLGRQDGLGARRAGLVGVGAIALWMLLLAIPLALFPRAIVGIYVDLNNPVNAGLLNLALPMLRVASLALVLDGVQRVAMGALHGLQDTRIPLLLSLLAFWMVGVGSSAMLGFQLGWGSTGLWIGQSLGVAIAGGLFLQRFLKLTQNRTFKQRLQPQPLATHP

SEQ ID NO: 1638 - protein, 212 aa, Actinobacillus actinomycetemcomitans
MIYSQLNHPAHISLSGGSTPKLLFKTLAQSPYAEQINWRNLHFWWGDDRMVSPSDPESNYGEVQKLLFDHIQIPAENIHRIRGENEPHFELKRFQAELSAVISDGVFDWIILGMGADGHTSSLFPHQTNFDDENLAVIAKHPESGQIRISKTAKLIEQAKRITYLVTGEGKAEILKEIQSTPAENLPYPAAKIYAKNGVTEWYLDKDAAKLL

SEQ ID NO: 1639 - protein, 217 aa, Zea diploperennis
IVNGMDVSEWDPSRDKYIAVKYDVSTAVEAKALNKEALQAEVGLPVDRNIPLVAFIGRLEEQKGPDVMAAAIPQLMEMVEDVQIVLLGTGKKKFERMLMSAEEKFPGKVRAVVKFNAALAHHIMAGADVLAVTSRFEPCGLIQLQGMRYGTCNVVEPADVKKVDTTLQRAIKVVGTPAYEEMVRNCMIQDLSWKGPAKNWENVLLSLGVAGGEPGVE

SEQ ID NO: 1640 - protein, 303 aa, Triticum aestivum
  misc_feature (178)..(178): Xaa can be any naturally occurring amino acid
  misc_feature (240)..(240): Xaa can be any naturally occurring amino acid
  misc_feature (252)..(252): Xaa can be any naturally occurring amino acid
  misc_feature (269)..(269): Xaa can be any naturally occurring amino acid
  misc_feature (278)..(278): Xaa can be any naturally occurring amino acid
  misc_feature (286)..(286): Xaa can be any naturally occurring amino acid
  misc_feature (293)..(293): Xaa can be any naturally occurring amino acid
  unsure (1)..(303): unsure at all Xaa locations
MASPSVFAGIAQGPEDPILGVTVAYNKDPSPVKVNLGVGAYRTEEGKPLVLNVVKRAEQMLIHNESRVKEYLPITGLADFNKLSAKLIFGADSPAIQENRVATVQCLSGTGSLRVGGEFLARHYHERTIYIPQPTWGNHPKVFTLAGLTARSYRYYDPATRGLDFQGLLEDLSSAPSXGAIVLLHACAHNPTGVDPTLEQWEQIRQLMRSKALLPFFDSAYQGFASGSLDKDAQSVRMFXVADGGELLMAQXSYAKNMGLYGERVGALXIVCGNADIXLRVKVNLXCNKPSIXPPLHGLHGAT

SEQ ID NO: 1641 - protein, 100 aa, Mycobacterium leprae TN
MAKVKIKPLEDKILVQAGEAETMTPSGLVIPENAKEKPQEGTVVAVGPGRWDEDGAKRIPVDVSEGDIVIYSKYGGTEIKYNGEEYLILSARDVLAVVSK

SEQ ID NO: 1642 - protein, 760 aa, Vibrio harveyi
MTTTTHILGYPRIGEKRELKFAQEKYWRGEIEQTELKQVGATLREKNWATQAEAGLSFATAGDFAWYDHVLTTTLLLGHTPKRHANGFPDLDTLFKVGRGQSQAGCGCSGAAASDMTKWFNTNYHYIVPEFSKDDSFEVSWPQLFEEVNDAIKLGHNVKPVLLGPLSYLYLGKEIEEDFDRLTLLPRLLTAYQAILSKLANQGVEWVQIDEPILSLELEEKWGDAFKLAYQVIRSDVKVLLTTYFDSVSDTLDKIVELPVDGLHIDLSASPEQLDEVVEKLPQGWVLSAGVVNGRNVWRSDLSAQRERLQPVKDKLGDNLWVASSCSLLHSPVDLDLEPALSDEVKSWFAFAKQKVTEVALLGRALDGDHNAILVCDTYSQPIKDRKTAAHVNKPHVQARLNSISASLTERSAPYAERAAHQAEVLGLPLLPTTTIGSFPQTSEIRVQRSAFRSGQLSTDDYHQALKGHIADAVRRQEALDLDVLVHGEAERNDMVEYFAENLAGFQTTKFGWVQSYGSRCVKPAIVVADIEREKPITVEWSTYAQSLTNKQMKGMLTGPVTILCWTFPREDITRKAIADQLALALRDEVSDLQQAGINIIQIDEPAIREGLPLKKRDHKAYLQWAVDAFKIAAASAKPETQIHTHMCYSEFNEIIDSVAALDADVITIETSRSNMELLKAFEDFNYPNEIGPGVYDIHSPNIPSEEWIEELIKKAAEKIPAQRLWVNPDCGLKTRNWSETEAALANLVSAAKKLRAELV

SEQ ID NO: 1643 - protein, 643 aa, Zea mays
MSSAMVERATSDMLIGPDWAMNLEICDILNREPGQAKDVVKSLKKRIAHKNPKVQLLALTLLETMIKNCGDVVHMVVAERDILHEMVKIVKKRHDYHVKEKILTLIDTWQEVFGGARARYPQYYAAYEELLRAGVVFPQRLNGSVPIITPPQTQPLQNYPSSLHISQQEELELPVSDFPALSLTEIQNARGIMDVLSEMLDALDPGNREGLRQDIIADLVDQCRSYKQRVVQLVNSTSNEELLNQGLSLNDDMQRVLAKHDAIDAGLAVRVEKPKSLQSQIGSSSTRKPDTMEETIQRPSASTTATSQSPFGILALPAPPSSSSKAPAIPASSIDLLSGDDYVKPEPANSLALVPVTEYSAADKNVLAFADMFEQNTANNSNHNLPYSFLSSTSNSTISTSQTYHAPVRPVLPQHSAAYPNGARSNAIVPYDQQAQSNSTGDQNGDIPPAPWGTKRSTNPFDDDQLGGMAVQPKGMQPQPVQPSQHGNKFMSAPPMPRGQPGRMQLQQVPGAQLGALQPTQATLNMQYRGMHPSMQMNHGMGMYSQPTFGGYYGMNQTQLYGVHMSGYGYGQQSGGYYIPNAAYAYTSANELAQRMNDLSVQNGDPNGAAANKQSRPEDALFGDLLSIAKMKQNKPAAGKVGG

SEQ ID NO: 1644 - protein, 349 aa, Anabaena variabilis ATCC 29413
MKTKFIAASFITLTLISPLKASAANFTGVYVFGDSLSDTGNTFQLSGGLFDPSNAIPPSPPYEQGRFSNGSIWVDYVGDKLGLTPTPITNLVPTLDFSTPLTTPFPTQGINFAIGGANSGEGNSFGFPLPGVLQQVSAFQALLQVNQQSFDPNALYAVSGGANDYLFPPQFSDPSRPEPYTNISQAVSNLAAIGAKNILVFNLPDLGRIPASGTNGRNPAALTQATQDFNSNLAKNLDEIRKNQQVNIIEIDIYSLVNRVLATPNEFGFENVTNSCLSQFLNCSNNPSTYFFWDDVHPSTDGHKLVAESVLAATTPESSSTIGVLFLGALGAMSSIKRLQRKSIKSAIQ

SEQ ID NO: 1645 - protein, 949 aa, Escherichia coli CFT073
MKYLASFRTTLKASRYMFRALALVLWLLIAFSSVFYIVNALHQRESEIRQEFNLSSDQAQRFIQRTSDVMKELKYIAENRLSAENGVLSPRGRETQTDVPAFEPLFADSDCSAMSNTWRGSLESLAWFMRYWRDNFSAAYDLNRVFLIGSDNLCMANFGLRDMPVERDTALKALHERINKYRNAPQDDSGSNLYWISEGPRPGVGYFYALTPVYLANRLQALLGVEQTIRMENFFLPGTLPMGVTILDENGHTLISLTGPESKIKGDPRWMQERSWFGYTEGFRELVLKKNLPPSSLSIVYSVPVDKVLERIRMLILNAILLNVLAGAALFTLARMYERRIFIPAESDALRLEEHEQFNRKIVASAPVGICILRTADGVNILSNELAHTYLNMLTHEDRQRLTQIICGQQVNFVDVLTSNNTNLQISFVHSRYRNENVAICVLVDVSSRVKMEESLQEMAQAAEQASQSKSMFLATVSHELRTPLYGIIGNLDLLQTKELPKGVDRLVTAMNNSSSLLLKIISDILDFSKIESEQLKIEPREFSPREVMNHITANYLPLVVRKQLGLYCFIEPDVPVALNGDPMRLQQVISNLLSNAIKFTDTGCIVLHVRADGDYLSIRVRDTGVGIPAKEVVRLFDPFFQVGTGVQRNFQGTGLGLAICEKLISMMDGDISVDSEPGMGSQFTVRIPLYGAQYPQKKGVEGLSGKRCWLAVRNASLCQFLETSLQRSGIVVTTYEGQEPTPEDVLITDEVVNKKWQGRAVVTFCRRHIGIPLEKAPGEWVHSVAAPHELPALLARIYLIEMESDDPANALPSTDKAVSDNDDMMILVVDDHPINRRLLADQLGSLGYQCKTANDGVDALNVLNKNHIDIVLSDVNMPNMDGYRLTQRIRQLGLTLPVIGVTANALAEEKQRCLESGMDSCLSKPVTLDVIKQTLTVYAERVRKSRES

SEQ ID NO: 1646 - protein, 220 aa, Oryza sativa (indica cultivar-group)
MASSAPTPPPLLPVTNPAAAGSSPAATAVGSDAPIATPAFRLFLSKLSDSARRSLSDRRPWTELVDRSAFSRPDSLSDATSRLRRNLAYFRVNYAAVVAFALGASLLAHPFSLLVLLGLLAAWCFLYLFRGSDQPIVLFGRTFSDRETLLGLVVASFVAFFFTSVASLIISGLLVGGAIVAVHGACRMPEDLFLDDADAASGNSAAQGLLSFLGAPGSRV

SEQ ID NO: 1647 - protein, 518 aa, Triticum aestivum
  misc_feature (171)..(171): Xaa can be any naturally occurring amino acid
  misc_feature (184)..(184): Xaa can be any naturally occurring amino acid
  misc_feature (229)..(229): Xaa can be any naturally occurring amino acid
  misc_feature (280)..(280): Xaa can be any naturally occurring amino acid
  unsure (1)..(518): unsure at all Xaa locations
MDKAYIAILTIAFLFLIHYVLGNGRRGGKGAAQLPPSPPAIPFLGHLHLLEKPFHAALRRLAARLGPVFSLRLVSRRAVVVSSAECARECFTEHDVTFANRPRFPSQLLVSFDGAALVTSSYGPHWRNLRRVAAVQLLSAHRVACMSGVIAGEVRAMARRLVRAAAASPRXDGGARVQLKRRLXFELSLSVLMETIAQTKATRSEADADTDMSVEAQEFKKVVDELIPXLGAANTWDYLPVLRWFDVFGVRNKILAAVSRRDAFMLRLIDNERRTHASGXGTEGDKKSMIAVLLNLQKTEPEVYADTMITALCANLFGAGTETTSTTTEWAMSLLLNHPAALKKAQAEIDAAVGTSRLVTADDVPRLAYLQCIVSETLRLYPAAPMLLPHESSADCKVGGYNVPSGTMLMVNAYAIHRDPAAWERPLEFVPERFEDGKAEGRFMIPFGMGRRRCPGETLALRTIGMVLATLVQCFDWERVDGAEVDMTEGGGLTIPKVVPLEAVCRPRPAMRDVLQSL

SEQ ID NO: 1648 - protein, 403 aa, Malus x domestica
NTNGIIQMGLAENQLCFDLLESWLAKNPEAAAFKKNGESIFAELALFQDYHGLPAFKKAMVDFMAEIRGNKVTFDPNHLVLTAGATSANETFIFCLADPGEAVLIPTPYYPRFDRDLKWRTGVEIVPIHCTSSNGFQITETALEEAYQEAEKRNLRVKGVLVTNPSNPLGTTMTRNELYLLLSFVEDKGIHLISDEIYSGTAFSSPSFISVMEVLKDRNCDENSEVWQRVHVVYSLSKDLGLPGFRVGAIYSNDDMVVAAATKMSSFGLVSSQTQHLLSAMLSDKKLTKNYIAENHKRLKQRQKKLVSGLQKSGISCLNGNAGLFCWVDMRHLLRSNTFEAEMELWKKIVYEVHLNISPGSSCHCTEPGWFRVCFANLPERTLDLAMQRLKAFVGEYYNVPEV

SEQ ID NO: 1649 - protein, 372 aa, Rubrivivax gelatinosus PM1
MSEVLRGARRIVVKVGSSLVTNEGRGVDAAAIGNWCRQLASLAGQGREVLMVSSGAIAEGMKRLGWNARPKEIHELQAAAAVGQMGLAQMYESKLSEHGIGSAQVLLTHADLADRERYLNARSTLLTLLSLKVIPVINENDTVVNDEIKFGDNDTLGALVANLVDADALVILTDQPGLYSADPRKDPQARFIGEAVAGTPELERMAGGAGSSLGRGGMITKVLAAKRASSSGASTVIAWGREPDVLLRLADGEAIGTLLVARTAKLAARKQWMADHLQMRGTVVIDDGAVAKLRDEGKSLLPIGVVEVQGEFVRGDVIAVRSQVGIEIARGLANYASSEARLIARKPSSQIESLLGYSNEPEMIHRTNLVLA

SEQ ID NO: 1650 - protein, 279 aa, Bacillus cereus G9241
MKNLQSTTTLHNGVEMPWFGLGVFKVEDGPELVEAVKSAIKAGYRSIDTAAIYGNEKAVGEGIRAGIKEAGISREDLFITSKVWNSDQGYETTLAAYEESLKKLELDYLDLYLVHWPVEGKYKDTWRALETLYKEKRVRAIGVSNFQIHHLQDVLADAEMKPMINQVEYHPRLTQKELQAFCKEQGIQMEAWSPLMQGQLLDNETLQEIAHKYGKTTAQIILRWDLQNEVVTIPKSTKEHRIIANADVFNFELTKEDMEKIDALNQNHRVGPDPDNFDF

SEQ ID NO: 1651 - protein, 296 aa, Xanthomonas oryzae pv. oryzae KACC10331
MSDLGRVPPSQGPHYSLTGAKPISQSMVVQHSTPRHADAGENSTQSLQLRAYPAKLAICPHGTRTMRPLHIERHRSDQAGWLRAAVLGANDGILSVAGLLVGVASSGATAADVLATGIAGLVAGAMSMAAGEYVSVQSQADTEHADLALERRELRDHPQTELEELASIYRQRGLDAALARQVAEQLTAHDALGAHARDELGITESLRARPLQAALASAAAFCCGAVLPILAALLAPAGQTAAVTSTVALLGLALTGAVAARTGGASGLRGALRVMFWGAAAMAATAAIGQLFHVQV

SEQ ID NO: 1652 - protein, 194 aa, Triticum aestivum
  misc_feature (47)..(47): Xaa can be any naturally occurring amino acid
  misc_feature (76)..(76): Xaa can be any naturally occurring amino acid
  misc_feature (121)..(121): Xaa can be any naturally occurring amino acid
  misc_feature (131)..(131): Xaa can be any naturally occurring amino acid
  unsure (1)..(194): unsure at all Xaa locations
LSDFRLIQNILLQLYGDHSTYVDKVFSRIFHTTDHPAAAASIASIMXADLRQIFFLEALSTGRKQDIPLSLMCGKXHHRITPYCGIRVLQSVPEPPYYQILPGSHCPHDEVPDVINYLLPXLLKNVDSEGXSLTSHFLNIPAFTNKECHRIWSLSRPDPRDQCTVPLFDSQISMWIQLISFLIRHASTLPLVSR

SEQ ID NO: 1653 - protein, 802 aa, Xylella fastidiosa Ann-1
MHPHSVHSNRSASGAEGQYPGIDNKQDAPLFRSSPPLQVMRTPTMTIVTNLGFPRIGARRELKRALESHWRGETDATQLQHTARELRARHWRLQRDAGVDLPPSNDFSLYDHVLDTAFLFDAIPQRYRGLVDADPLAGYFAMARGRQADNIDLHALEMTKWFDTNYHYLVPELHRDQHFALRGNKPIAEFEEALALGITTRPVLLGPVSFLLLSKTVDGSNRLDLLERLLPVYTQLLRQLQESGAEWVQIDEPTLVLDLDAQTQQAFRKTYATLNQGPRPKLLLTSYFGPLGDNIELALQLPADGLHIDLVRGTEQLDAVLNTLPAGRVLSAGLVNGRNIWRTALDNALTLARYAQGSVDKDHLWLAPSCSLLHVPVDLEQEKNLDADVRNWLAFAKQKLGELRVLADALDNKPEAETALTQTRQALEARRQSPKVHRPDVAQRLAALTPDTIRRNTAYPQRSQAQQHTLNLPAYPTTTIGSFPQTLAVREARAQFKSGKLSESDYEAFLKAETERCVRTQEEIGLDVLVHGEFERNDMVEYFGEQLDGFIFTKLGWVQSYGSRCVKPPIIYGDVVRPAPMTVTWSAYAQSLTDKPMKGMLTGPVTMLQWSFVRDDQERAQTCRQIALALRDEVQDLEKAGIKVIQIDEPAIREGLPLRRGEWADYLNWAVESFRIASSNVHDTTQIHTHMCYSEFNDIIEAVAALDADVISIETSRSRMELLDAFVKFRYPNAIGPGVYDIHSPRVPKEEEMVLLLKKARAVLPSEQLWVNPDCGLKTRGWKETRAALQTMVHAAQRLRAE

SEQ ID NO: 1654 - protein, 1064 aa, Saccharomyces cerevisiae [sequence omitted]

SEQ ID NO: 1655 - protein, 275 aa, Xylella fastidiosa Ann-1
MNRKMFGELISEAIAMFIIIALGESAAAMYILYDPSPYQNAYWGLCICWGLAVTIAIYVTASVSGTHANPAVTLALALYRGFPWEKVLPYWAAQVIGAFIGAMIVYQLYSPVIDYYNHIHQLTRDAGGAAGVFFTSTGMAITPIHALGDEIILTAFLVFGIFAITERFNEAAPTANSGALVIGLLVATIGACMGYLEGWAINPARDLGPRLFAFLAGWGESAFPGKDHYWWIPIIGPLIGGVMGATAFQCLIYPFLPARVHAKQQAAILLNRQHP

SEQ ID NO: 1656 - protein, 336 aa, Aspergillus niger
MAPKVGINGFGRIGRIVFRNAINHGEVDVVAVNDPFIETHYAAYMLKYDSTHGQFKGTIETYEEGLIVNGKKIRFFAERDPAAIPWGTTGADYIVESTGVFTTQEKAAAHLKGGAKKVVISAPSADAPMFVMGVNNTSYTKDINVLSNASCTTNCLAPLAKVINDKFGIVEGLMTTVHSYTATQKVVDAPSSKDWRGGRTAAQNIIPSSTGAAKAVGKVIPTLNGKLTGMAMRVPTSNVSVVDLTCRLEKATSYDEIKKALKDASENELKGILGYTEDDIVSSDLNGDDHSSIFDAKAGIALNSNFVKLVSWYDNEWGYSRRVVDLIAYISKVDAQ

SEQ ID NO: 1657 - protein, 414 aa, Actinobacillus actinomycetemcomitans
MKRVVITGIGAVTAFGKTWQEIKTAFQRKQNAVQAKADWAERYPELEARLGAEIHGYQPPSHWNRKQLRSLGRVSQFAVEAAERALANADLLDENGDILAYLKDGRMGVACGSSTGSTNDIKDAAELLMTGKSDGFNANTYVRMMPHTTTANIGIFFGLTGRIIPTSSACSSGSQGIGYAYESIKYGLIPMMLAGGAEEFCPSEVYVFDSLYAASRNVNNPSKTPRPYDNDRDGLVIGEGAGIFVLEELEHALARGANIIAEVVGYGANSDGAHVTRPQKDTMQRCMELALKDAHLSAQKIGYVNGHGTATEQGDIAETLATEAVFGKVPLSSQKSYLGHTLGACGALESWFSIEMMRDGWFAPTINLDNIDERCGKLDYIQGDGRHIETDYVMNNNFAFGGVNTSLIFKRWQA

SEQ ID NO: 1658 - protein, 768 aa, Kineococcus radiotolerans SRS30216
MLPARLRRGGVPPAGRRRPGGGAGRTGPLRRPAAGPRRGRRGDRRPRPPRGPELRRLRGLAPAERGGPCGAGARGGRRPRRGAGPRGAPVLGRGAGRGRRGQGRGDPPERGDVPALPDPGRRRRPRRGHLVQVLPADPRPRRAGRAVGRLARRHDRLRGLGPLPVHRGAEAAGGGRLRDRLGRDRLRAAGAPRGVDRGPLARGGVGDGGGVDGVGDGGPGRSARPGAHRGGQRRGLRGVRAGGGVGRRRAVPAPPQRGDALRGAAVHRRGAFDVVAGEPDRPGGRTPGGTAARPGPRAPLTRPAPGRRRWWGPVAAGGRHPEVSKGWCGALVLERRLHNMTSVEQSIQNPAVDPSLLRTSVAAPIAPPPRLLMGPGPITVDPRVLRAMSAQLVGQYDPAMTAYMNETQALYRAVFRTTNAATLLVDGTSRAGIEAALVSLIVPGDRVLVPVFGRFGHLLREIAERCGADVHVREVPWGQVFTLEALEDAVREVQPKLVALVQGDTSTTMNQPLEGVGRMCHRHGALLYVDCTASLAGNPFEMDAWEVDVATAGLQKCLGGPSGSAPISLSPRAVAVIEARRSVEAGLRADPASAEDTAPAGLRIRSNYFDLAMILDYWGEERLNHHTEATTMLYGARECARLVLEEGLDATVARHRRHGEAMLAGVRGLGLAVFGDVEHKMHNVVAVEIPSGIDGDAVRAELLHDYGIEIGTSFGPLAGRVWRIGTMGYNARKDAVLVTLAALEQVLRRHGAPVEAGAGTAAAQEVYA

SEQ ID NO: 1659 - protein, 81 aa, Glycine max
SSRKNRRRLRRFIIPGSQALSLLSRDLREAHLQVLLGGGGQRSSDNSSSSATNISADPLLSSFGLGFPTSDAEQHPSRLFP

SEQ ID NO: 1660 - protein, 210 aa, Solanum sogarandinum
MADQYEQNKPSVEETVGANVEATDRGLFDFIGKKEEEKPSHAHEEEAISSEFCEKVKVSEEEEHKEKEKKEEKKLHRSSSSSSSSSDEEEEIGEDGQIIKKKKKKGLKEKIKEKISGDHKEEVKTEDTSVPVEKYEETEEKKGFLEKIKEKLPGGGHKKTEEVAAPPPPPPAAVDHEAEGKEKKGFLDKIKEKLPGYHSKTEEEKEKEKD

SEQ ID NO: 1661 - protein, 602 aa, Oryza sativa
MCGILAVLGAADWSQAKRAHVLSCSRRLKHRGPDWSGLYQCEGNFLAQQRLAIVSPLSGDQPLYNADRTIVVVANGEIYNHKKIRKQFASKHTFSTGSDCEVIIPLYEEYGEDFVDMLDGVFAFVLYDTRTKTYMAARDAIGVNPLYIGRGSDGAVWISSEMKALNEDCVEFEIFPPGHLYSSAAGGLRRWYKPQWFAENVPATPYQPLLLREAFEKAVIKRLMTDVPFGVLLSGGLDSSLVAAVTKRHLIKTEAAEKFGAELHSFVVGLEGSPDLIAAREVADHLGTIHHEFHFTVQDGIDAIEEVIYHDETYDVTTIRASTPMFLMARKIKALGVKMVLSGEGSDELLGGYLYFHFAPNKEEFHKETCRKVKALHQYDCLRANKATSAWGLEVRVPFLDKEFINVAMSMDPEWKMYNADLGRIEKWVMRKAFDDEEHPYLPKHILYRQKEQFSDGVGYNWIDGLKAFTEQQVSDEMMKNAAKVYPHNTPVNKEAYYYRMIFERLFPQESARETVPWGPSIACSTPAAIEWVEQWKASHDPSGRLIASHNSASANHTNHANANANGNSNGKANGNCAMAANGTNGVGLVVANGTANGKMEA

SEQ ID NO: 1662 - protein, 512 aa, Corynebacterium diphtheriae NCTC 13129
MTSPVDPILNKGERTEAAPHTTRAGGQPVASENISITAGPQGANVLNDLHLIEKLAHFNRERVPERNPHAKGHGAFGELHITEDVSQYTKAKLFQKGTVTPMAVRFSTVAGEKGSPDTWRDVHGFALRFYTQDGNYDIVGNNTPTFFLRDAMKFPDFIHSQKRLGSSGLRDADMQWDFWTRTPESAHQVTYLMGDRGTPKTSRHQDGFGSHTYQWINEDGQPVWVKYHFKTRQGWETFTDAEAQEMAGKNADYQREDLYNAIERGDFPIWDVKVQIMPFDEAETYRWNPFDLTKTWSQKDYPLIDVGYFVLNRNPQNFFAQIEQLALDPANLVPGVGLSPDRMLMARAFAYADAQRYRIGPNYQQLPINQPVVPVNTYQHEGPMAYHFNPADAPVHTPNRFGKGAGYLDDGQTSSSGATYGQAQDLYVNPDPHGTDLTRAAYVKHADDDDFMQAGILYREVYDDAAKERFVDNVTNAMAGVSPETEERVYWYWTQVDENLGAKIREAFAAKK

SEQ ID NO: 1663 - protein, 181 aa, Mycobacterium avium subsp. paratuberculosis K-10
MAKFLDAVAGFGVTFASMFKKHVTEEYPEKPGPVAPRYHGRHQLNRYPDGLEKCIGCELCAWACPADAIYVEGADNTEELRYSPGERYGRVYQINYLRCIGCGLCVEACPTRALTMTNDYEMADDNRADLIYEKDRLLAPLLPEMTAPPHPRAPGATDKDYYLGNVTAHGLREAQRAGEPR

SEQ ID NO: 1664 - protein, 433 aa, Ralstonia metallidurans CH34
MTPSDVKATLSFSDGSPSVELPIYKGTVGPDVIDIRKLYGQTGKFTYDPGFMSTASCNSKITYIDGDKGELLYRGYPIEQLAQKCDHLETCYLLLKGELPNAKQKEEFVNSVMNHTMVHEQLQFFLRGFRRDAHPMAVLTGLVGAMSAFYHDAMDIDDPHQREISAIRLIAKMPTLVAMAYKYTMGQPYIYPQNDLSYSGNFMRMMFATPCAPYTVNPVLERALDRIFILHADHEQNASTSTVRLAGSSGTNPFAAIAAGVACLWGPAHGGANEAALKMLEEIGSVDNIGEFIKQVKDKNSGVRLMGFGHRVYKNYDPRAKLMRETCYEVLNELGLHNDPLFKLAMELEKIALEDEYFVSRKLYPNVDFYSGIVQRALGIPTSLFTCIFALARTPGWISQWEEMITDPEYKIGRPRQLFNGAAAREVPDLAKR

SEQ ID NO: 1665 - protein, 437 aa, Catharanthus roseus
MGSCLNFENISNMAQPEGSLGKTPGNFPLARQTSIYSMTFDELQTLGGLGKDFGSMNMEDLLKNIWTAEETQATASTPGPGNVPGGNLQRQGSLTLPRTLSQRTVDDVWKDLLKESGGTNDRIGVGASNFVPRQSTLGEMTLEEFLVRAGVVREEIQPIEKPSNLGAYGGLAPANVNNNSLVIGFQQAAVNDRMLGNQNGGSNNGFSNSSNLLLNGSALRSSQQQQHPQSQPQLQPLFPKQANVAFASSQLGNANVQQMRNGAQLSSSGATASVVGMANASMNSTMMKTGVTPTGVMGMAGLRGVTTSVTGESPGSQLQTDSISKSSVDTSSLSPSPYAFNEGGRGRRSCSSLEKQVERRRRRMIKNRESAARSRARKQAYTLELEAEVAKLKEINEELQRKQAELMEMQKNQMLETMEMPWGGKRRCLRRTLTGPW

SEQ ID NO: 1666 - protein, 233 aa, Corynebacterium diphtheriae NCTC 13129
MHRLRVLVVDDEPQMVQIISYALELEGWEVLSASSAQRGWQLLNEYRCDLVILDVMLPDASGYALCERIRAAGDVAGTPVIMLTALGDTDNRVEGLEAGADDYVAKPFSPKELVLRAQAVVRRSGGVVQPELREIIVGEVSVNPATHAVVIGGRRVDTTATEGKLLQALVSHPNEVVSVKRLLNEVWDTTATQGGRNMVKSTAYRLRKKLENAGLPADSILAVRGQGYVFQYE

SEQ ID NO: 1667 - protein, 592 aa, Ralstonia metallidurans CH34
MVAVKTGLPRRKFDVVIVGAGGAGMRASLQLAEAGLNVAVLSKVFPTRSHTVAAQGGIGASLGNMSEDNWHYHFYDTIKGSDWLGDQDAIEFMCREAPKVVYELEHFGMPFDRNADGTIYQRPFGGHTANYGEKPVQRACAAADRTGHALLHTLYQRNVRAKTHFFVEWMALDLIRDEDGDVLGVTALEMETGEVYILEAKTTLFATGGAGRIYAASTNAFINTGDGLGMAARAGVPLEDMEFWQFHPTGVAGAGVLITEGVRGEGGILRNKDGERFMERYAPTLKDLAPRDFVSRSMDQEIKEGRGCGPNGDYVLLDLTHVGAETIMKRLPSIREIGMKFANVDAIKEPIPVVPTIHYQMGGIPTNFHGQVVVPKNGNPNEVVNGFYAIGECSCVSVHGANRLGTNSLLDLVVFGRAAGNHIVANAMKQKEHKPLPADAADRAMARLAKLQGTTSGEYTQDVANDIRRNMQSHAGVFRTQKLMDEGVERILEVAERANNIHLKDKSKVFNTALVEALEVSNLVEVAKATMISAAARKESRGAHAHSDFPNRDDENWLKHTLFYSEGNRLDYKPVKMQPLTVESVPPKARTF

SEQ ID NO: 1668 - protein, 385 aa, Vibrio vulnificus CMCP6
MTQAFNERIAQALKQRREQGLSRQSEVIFSGNQTVLEHQGKRYLNFSANDYLGLANDQSLVRAWQQGLSLYGCGSGASPLVTGYTPAHSNLAASLCDWLGYESATLFGSGFSANQALLFALLEKGDLLVQDKLNHASLIEAGLLSPATMKRFKHNDLKALDTILNRSDCPSLVVTEGVFSMDGDCSPLAEMHALTQRHSASLMVDDAHGVGVLGEEGRGSCALASVKPDFLVVTFGKAFGLSGAALLTDKSSGDFLAQFARHHVYSTALPPAQAFALTHAVEMIRTQQWRRDKLNELQTLFAEYLGEHDSFVATQTPIKPWLIGETQQAVMVAQRCREQGIWLTAIRPPTVPQNTARLRITLSANHTKEQMHTLAQVLLTVTGEH

SEQ ID NO: 1669 - protein, 466 aa, Rhodospirillum rubrum
MTETSFDVVVLGAGPGGYVAAIRAAQLGLKTAVVEREHLGGICLNWGCIPTKALLRSAEVFRQIRHAGAYGLKVTGAEVDVAAVVKRSRGVAKQLAGGVGHLLKKNKVTVIDGHGRLAGAGKLTVEKDGKTTTLAAKAIILATGGRARTLPGLEADGKLVWTYKNAMIPESLPKRLLVVGSGAIGIEFASFYTDCGSQVTVVEVLERVLPVEDEEISAFAKKSFEKQGMTIKTATTVKALKKSGDEVTATLEKDGKTEEITVDRVIMAVGIAANIEDIGLETVPSIKVERGHVVTDAFCRTGDPGIFAIGDLTAPPWLAHKASHEGVLVAEVIAGKKDLHPLDTMKIPGCTYCHPQVASIGLSEAKAKAKGFTVKVGRFPFVGNGKAIALGEAEGLIKTVFDARTGELLGAHMIGAEVTELIQGFAIAKTLETTEEDLIHTVFAHPTLSEMVHESVLDAYGRAIHF

SEQ ID NO: 1670 - protein, 584 aa, Arabidopsis thaliana
MCGILAVLGCSDDSQAKRVRVLELSRRLRHRGPDWSGLYQNGDNYLAHQRLAVIDPASGDQPLFNEDKTIVVTVNGEIYNHEELRKRLKNHKFRTGSDCEVIAHLYEEYGVDFVDMLDGIFSFVLLDTRDNSFMVARDAIGVTSLYIGWGLDGSVWISSEMKGLNDDCEHFETFPPGHFYSSKLGGFKQWYNPPWFNESVPSTPYEPLAIRRAFENAVIKRLMTDVPFGVLLSGGLDSSLVASITARHLAGTKAAKQWGPQLHSFCVGLEGSPDLKAGKEVAEYLGTVHHEFHFSVQDGIDAIEDVIYHVETYDVTTIRASTPMFLMSRKIKSLGVKMVLSGEGADEIFGGYLYFHKAPNKKEFHQETCRKIKALHKYDCLRANKSTSAFGLEARVPFLDKDFINTAMSLDPESKMIKPEEGRIEKWVLRRAFDDEERPYLPKHILYRQKEQFSDGVGYSWIDGLKDHAAQNVNDKMMSNAGHIFPHNTPNTKEAYYYRMIFERFFPQNSARLTVPGGATVACSTAKAVEWDASWSNNMDPSGRAAIGVHLSAYDGKNVALTIPPLKAIDNMPMMMGQGVVIQS

SEQ ID NO: 1671 - protein, 308 aa, Rhodospirillum rubrum
MLLIRRFEEKAGQLYGMGLIGGFCHLYIGQEAVVVGLQCQAHPGDSIITSYRDHGHMLAAGMDPKGVMAELTGRRGGYSKGKGGSMHMFSKENGFYGGHGIVGAQVPLGTGLAFAHKYRGDGGVCFCYLGDGAANQGQVYESFNMAALWKLPVIYVIENNKYGMGTSVERASATKDLATRGAAYGIPGISVNGMDVLAVKAESEEAVDRVRAGEGPLILEMKTYRYRGHSMSDPAKYRTKEEVSKMRAESDPIDHLRQTIVSDAILDEEALKEIDKEIKSVVSQAAEFAQNSPEPDAAELYTDVLVEA

SEQ ID NO: 1672 - protein, 396 aa, Rubrivivax gelatinosus PM1
MPPDIHDVFGSALAALDTQQLRRHRRVVSALDGAMVQADTQPRLAFAGNDYLGLSQHPALIEAARQGAARYGVGATASPLICGHSPAHEALEQELARFVGLPRALYFYAGYAANAGAIPALVERGDALISDALNHACLIDGARLSRADLTVYPHNDLAALERALVAARGARRRLVVADAVFSMDGDLAPLPEMLALCERHDAWLYVDDAHGFGVLGEGGRGSLSHWRVPTDAMSSRLIYMATLGKAAGVAGAFIAGAPAVIEWLVQKARTFFFATGAPPMIAEALRASLQVIESEGWRRERLLQLRTRLACGLAALPWPAPASQSAIQPLLLGDNGTALRVMAALDAQGIWVPAIRPPTVPDGTARLRISMSAAHTPDDVDRLCAALLAASARPPV

SEQ ID NO: 1673 - protein, 307 aa, Escherichia coli
MSAKVWVLGDAVVDLLPESDGRLLPCPGGAPANVAVGIARLGGTSGFIGRVGDDPFGALMQRTLLTEGVDITYLKQDEWHRTSTVLVDLNDQGERSFTFMVRPSADLFLETTDLPCWRHGEWLHLCSIALSAEPSRTSAFTAMTAIRHAGGFVSFDPNIREDLWQDEHLLRLCLRQALQLADVVKLSEEEWRLISGKTQNDRDICALAKEYEIAMLLVTKGAEGVVVCYRGQVHHFAGMSVNCVDSTGAGDAFVAGLLTGLSSTGLSTDEREMRRIIDLAQRCGALAVTAKGAMTALPCRQELESEK

SEQ ID NO: 1674 - protein, 456 aa, Streptococcus thermophilus CNRZ1066
MKGNIDMTTGKEYVASVFEKVKAQNSHEAEFLQAVEEVFNSLVPVFDKYPKYIEENLLERLVEPERIVSFRVPWVDDKGQVQVNRGFRVQFSSAIGPYKGGLRFHPSVNQSIIKFLGFEQIFKNSLTGQPIGGGKGGSNFDPKGKSDNEIMRFCQSFMTELSKHIGADTDVPAGDIGVGGREIGYLYGQYKRIRNEYTGVLTGKGLNWGGSLARTEATGYGAVYFAEQMLNARGENFNGKTAVVSGAGNVAIYAIEKLQSLGAKAVTCSDSSGFVYDPDGIDVDLLKEIKEVKRERIVKYAEARPNATFTPAGGEKTVWSIKADLAFPCATQNELDETDAETLVANGVLAVSEGANMPSTLGAIDVFLKAGVSFGPAKAANAGGVAVSALEMAQNSGRTSWTFDEVDAKLYDIMKGIYENAAAAAKEFGQEGNLVVGANIAGFLKVADAMSAQGIV

SEQ ID NO: 1675 - protein, 422 aa, Silicibacter sp. TM1040
MRRVVVTGLGLVTPLASGVEETWARLLDGQSGAGPITLFDAEASGVATTYACEVPRGDGSNGTFNPDDWVVKKDQKKIDDFILYGIAAAEMAVKDAGWTPEAEEDRLRTGVMIGSGIGGLSSIADTAVMIKEKGPRRVSPFFIPGALINLISGQVSIRHGFKGPNHSVVTACSTGAHAIGDASRLIKSGDADVMIAGGAEAAICEIGIAGFNACKALSTKYAEDPTKASRPYDADRDGFVMGEGAGIVVLEEYEHAKARGAKIYGEVLGYGLSGDAYHITAPSEDGEGGERSMRAALANAGLSAADVDYINAHGTSTMADTIELGAVERLLGDHAKNATMSSTKSATGHLLGAAGAIEAIFSILAIRDQVAPPTINLDTPAVETPVDLAPNAKRERKIDVALSNSFGFGGTNASVVFGKVSD

SEQ ID NO: 1676 - protein, 452 aa, Arabidopsis thaliana
MEKRVEKRRIVLVPVAAQGHVTPMMQLGKALQSKGFLITVAQRQFNQIGSSLQHFPGFDFVTIPESLPQSESKKLGPAEYLMNLNKTSEASFKECISQLSMQQGNDIACIIYDKLMYFCEAAAKEFKIPSVIFSTSSATIQVCYCVLSELSAEKFLIDMKDPEKQDKVLEGLHPLRYKDLPTSGFGPLEPLLEMCREVVNKRTASAVIINTASCLESLSLSWLQQELGIPVYPLGPLHITASSPGPSLLQEDMSCIEWLNKQKPRSVIYISLGTKAHMETKEMLEMAWGLLNSNQPFLWVIRPGSVAGFEWIELLPEEVIKMVTERGYIAKWAPQIEVLGHPAVGGFWSHCGWNSTLESIVEGVPMICRPLQGEQKLNAMYIESVWKIGIQLEGEVEREGVERAVKRLIIDEEGAAMRERALDLKEKLNASVRSGGSSYNALDELVKFLNTE

SEQ ID NO: 1677 - protein, 290 aa, Oryza sativa; identical to SEQ ID NO: 929

SEQ ID NO: 1678 - protein, 447 aa, Arabidopsis thaliana
MEKNAEKKRIVLVPFPLQGHITPMMQLGQALNLKGFSITVALGDSNRVSSTQHFPGFQFVTIPETIPLSQHEALGVVEFVVTLNKTSETSFKDCIAHLLLQHGNDIACIIYDELMYFSEATAKDLRIPSVIFTTGSATNHVCSCILSKLNAEKFLIDMKDPEVQNMVVENLHPLKYKDLPTSGMGPLERFLEICAEVVNKRTASAVIINTSSCLESSSLSWLKQELSIPVYPLGPLHITTSANFSLLEEDRSCIEWLNKQKLRSVIYISVGSIAHMETKEVLEMAWGLYNSNQPFLWVIRPGTESMPVEVSKIVSERGCIVKWAPQNEVLVHPAVGGFWSHCGWNSTLESIVEGVPMICRPFNGEQKLNAMYIESVWRVGVLLQGEVERGCVERAVKRLIVDDEGVGMRERALVLKEKLNASVRSGGSSYNALDELVHYLEAEYRNT

SEQ ID NO: 1679 - protein, 190 aa, Shewanella sp. MR-4
MPLFDFAYQGFGAGIEEDAAGLRLVAAKVPELLVANSFSKNFGLYNERIGAVTVVAQNADEAVRAFSQVKRTIRANYSNPPAHGALIVSTILSDAALKALWVQELTEMRERIAEMRTLFVQSLKDEGVTQDFSFISRQNGMFSFSGLNKAQVARLKDEFGIYIVGSGRISVAGMTKTNMPVICKAIAQVL

SEQ ID NO: 1680 - protein, 199 aa, Shewanella sp. MR-4
MIFSQVVLAPADPILGLTDTFKADPRQDKVNLGVGIYKDEAGQTPVLQSVKKAEALLLEQEKTKNYLGIEGVQTYNRVVQELLFGEGSTLVTSGRAATAQAPGGTGALRIAAEFLLRNTPSRTVWVSNPTWANHQNIFETAGLTVKEYGYYNASAHDIDFDGMMTDLANAQAGDIVLLHGCCHNPTGIDLTLAQWELGC

SEQ ID NO: 1681 - protein, 429 aa, Mycobacterium leprae TN
MPVTIDPRRHSAALFDLDAVVTDTPLDSTVTLVRQLQGIGVGTAVFSTNRNSQGVLTATGLDHLFPVHVDGLASGKVTILVAAANRLMAQPGRCVVVAVDAAGITAARYGGFALVLGLVIGEDQTGHRDTLRNSGADTVVADLGEVIVRTGDRRMSELPDALQTLGLTDDLTARQPAVFFDFDGTLSDIVDDPDSARPVPGATEALQKLATHCPVAILSGRDLADVIKRIGVPGIWYSGSHGFESTAPDGTHHQNDAAEATIPILEQAATQLRDQLGPIPGVMVEHKRFGVAVHYRNVARDRVNEVAVAVRTAGQRNALRVTTGREVIELRPDIDWDKGKTLHWVIDRLHHAGTQVGSASLMPICLGDDITDEDAFDAVRHTDVGGIPIVVRHTEDGNRATAALFTLDSPMHVSEFTERLARQLSDTQR

SEQ ID NO: 1682 - protein, 387 aa, Geobacter sulfurreducens PCA
MDLEQIKQELVAFVDARRDDFIHVSEELFHNPETGLNEVRSAALLADRLEAEGFRVARGVAGLPTAFRADSGEKGPTVGIIAEMDALPGLGHACGHNVIAAAALGAAIALRRVLPADAARLVVLGTPAEEIGVGKVEMIRHGIFDDVEFAMMVHPSSRRYVIKHYLGLAKIRFVFLGKPAHAAAYPEEGINALDGVIQAFNAVNALRQQLRQDVRVHGIIPEGGVAPNIIPERASAFFYVRADDMAELERVRERVIACARGAATATGCRLEIEEDPRVMAPLKVNYRFSDLYAEQLAYLGLELSESRPDRNKGSSDIGNVSQIMPTIHPHVPIGEGINIHSDAFARATVSAQGKAAVVEGATALALTAAELIARPELREEILCEFRR

SEQ ID NO: 1683 - protein, 516 aa, Arabidopsis thaliana
MSSSSYNTSVIPSSSSSAQPFFITSSGTGDNDFNRKDTFMSMIQQPNSSAPPPKKRRNQPGNPNPDAEVVALSPKTLMATNRFICDVCNKGFQREQNLQLHRRGHNLPWKLKQKSTKEVKRKVYLCPEPTCVHHDPSRALGDLTGIKKHYYRKHGEKKWKCEKCSKRYAVQSDWKAHSKTCGTKEYRCDCGTIFSRRDSYITHRAFCDALIQETARNPTVSFTSMTAASSGVGSGGIYGRLGGGSALSHHHLSDHPNFGFNPLVGYNLNIASSDNRRDFIPQSSNPNFLIQSASSQGMLNTTPNNNNQSFMNQHGLIQFDPVDNINLKSSGTNNSFFNLGFFQENTKNSETSLPSLYSTDVLVHHREENLNAGSNVSATALLQKATQMGSVTSNDPSALFRGLASSSNSSSVIANHFGGGRIMENDNNGNLQGLMNSLAAVNGGGGSGGSIFDVQFGDNGNMSGSDKLTLDFLGVGGMVRNVNRGGGGGGRGSARGGVSLDGEAKFPEQNYPFGRG

SEQ ID NO: 1684 - protein, 327 aa, Ralstonia metallidurans CH34
MAKAPMRVAVTGAAGQIGYSLLFRIANGDMLGKDQPVILQLLDLPQAQAAVKGVVMELEDCAFPLLAGVVITDDPKVAFKDADVALLVGARPRSKGMERKDLLEANAQIFTVQGKALDEVASRDVKVLVVGNPANTNAYIAMKSAPNLKRENFTAMLRLDHNRALSQIAAKTGKPVSSIEKMFVWGNHSPTMYADYRYATVDGKSVKDMINDPVWNNDVFLPTVGKRGAAIIEARGLSSAASAANAAIDHVHDWVLGSNGKVVTMGIPSNGEYGIPNDVMFGYPVTTANGKYEIVKGLEIDAYSQEKINITLKELEEERAGVQHLLG

SEQ ID NO: 1685 - protein, 237 aa, Triticum aestivum
  misc_feature (170)..(170): Xaa can be any naturally occurring amino acid
  unsure (1)..(237): unsure at all Xaa locations
VTLSNKFVQKSRLAPVRNSRDIVDPRVRGRVGKGKMEDNLLEFFPSGKRTSEALSEHFTKEGLTSLVEYNSKKMFEVKLKEIKSTLTTMINEEAEISEVTEVVKQQVKDAKFPDIEVVRMLWDVLMEAVQWSGKNQQQNSNSALRQVNAWAGLMNAFCTSGKLELELIYXVQTQCYEDAKLMKLFPEIIRSLYDQDVLAEDTILLWFRKGSNPKGRQSFVKALEPFVKWLEEAEEEE

SEQ ID NO: 1686 - protein, 726 aa, Thermococcus aggregans
MRRRFGALLLLMFMLNIIASGCLQSPTTQELKLPSGNYPPIYINEKSQNMCPPGKVPVTFRYQPEENVTSVSLRGSFNDWGELPMKNENGTWVRTVCLNPGRYEYKFFVDGEWIKDMSAVDPTADAYVDDGFGGKNAVKIVKGEQGLIIEHDPKNPAYLSIADNRTVIRFKVQPNQIQSAFLVASNGEYKMERQLWWGSGEVWRVEIQEVSPIEYYFKLTTNNGEVLVLNTSKNPFFTFDGINRFPQVEWVSKGIGYQIFPDRFNNGDPSNDALALQTDEFWFNELINERPILSNWSDPISPLHCCHQYFGGDIKGILEKLDYLQELGVTVIYLNPIFLAGSAHGYDVYDHYRLDPQFGSEEDLKILIEEAHKRGIRIIFDFVPNHSGIGHWAFLDVASRGKKSPYWNWYFVQRWPFKLGDGKAYLGWWGLGSLPKLNTANPEVKEYLIGAALHWLDFGFDGIRIDAPQELINAEEFFSELRKAIKEKHPDAYIVGEIWELSPRWVQGNMFDSLMNYALGRDILLAYARGDWNGERTLELLGRYYASYGENVIAMGFNLVSSHDTSRVLTDLGGGNLGDTPKPEAIQRLKLLSTLLYTLPGMPVTFQGDERGLLGDKEHFDSHRYPIQWDTVNEDVLNHYKSLADLRKSVPALTSSKIKFYTSKEGVLAFFRGHDDEVLVIANNVPKDTSIPLPPGKWKQIWPEGEKIFEKEITVPGLEVLVLVKT

SEQ ID NO: 1687 - protein, 220 aa, Bacillus clausii KSM-K16
MEKQTWQLVDSYMTERLRIGDEGLDAALANNRQKGLPAIDVSPTQGKLLTLLARMKGAKRILEIGTLGGYSTICLAQGMSDTGKIVTLEYEPKHAACAKENIAFAGYADQVDIIIGPALESLPILHEQQQSFDFIFIDADKPNNPHYVKWALKLASPGAVLVADNVIRDGEVLNRHSTDPRVQGIRTFVELLEQEERIEATAIQTVGEKGYDGFILGIVH

SEQ ID NO: 1688 - protein, 825 aa, Oryza sativa
MSMSKIKHAAKSLKTFQGIHFDECLDDGGIAEELNKWLIEVSWEVANKVGGIYTVIRSKVPITKKEYGNNYICLGPYNDSFVKTEVEVGESKIEAVRETVNEMRRFGIHVVTGNWLIEGFPEVVLFNIGSAAHRLDGWKGDFFEHARIGIPYYDRESNDALLFGFCVFWFLGTFINQVKRRQKSYVIAHFHEWLTGVGLIMTRLRGYDCALIFTTHATLLGRYLCAGSADFYNHLPYFNLDKEAGDRQIYHRYCIERAAACCAHVFTTVSNITGIESEHLLHKRADVVTPNGLNVQKFAALHEFQNLHAQNKEKLNNFIRGHFYGHYDFDLDKTLYFFIAGRYEYTNKGADMFIEALARLNHMLKSSGSDMTVVAFMIFPTATNNFNVESLRGQSISKMLRDTVQNIQSEIGKRLYEICLKGRLPNADQILQPSDTIELKKCIYASQRSTLPPICTHNVNNDSTDPILNALRRCRLFNDRYDRVKVIFHPEFLRSTSPLLPLDYEEFVRGCHLGVFPSYYEPWGYTPAECTVMGVPNISTNLSGFGGFMEEHVHEPQSYGIYVVDRRFKSGDESCQQLAQYMFDFTRLTRRQRIILRNRTERLSELLDWNTLGIYYYRARQIALTRIHPEYEDELLRFATTSSTPSTPGVSRSSTPAPPEHEEEESDEEAPEQQPIDAKPIFPRAASASHLPLDKQFRASAIAAANAADAAAAKEPNLPDALDDEVRQITLGKENQAQSTSNTKPVDFGLPEHGAFSDAHDGQREDAFGDRKASISTQDDFATPDVLKQTPSAGNTASFEPSSTPHEGPILTSFKDQSNTSSTNN

SEQ ID NO: 1689 - protein, 410 aa, Brucella suis 1330
MSDDVVLSLHVPEPEWRPGDAPDFSHVKIPRAGSVRRPEIDEKPEAMRDMAFSIIRMLNREGEAVGPWAGTLTDEELKDGLRHMMMLRAYDARMMMAQRQGKTSFYMQHLGEEAVSCAFRKALRKGDMNFPTYRQAGLLIADDYPLVTMMNQIFSNEQDPLKGRQLPVMYSSKEHGFFTISGNLATQYTQAVGWAMASAISHDTKIAAAWIGDGSTAESDFHATLVFASTYKAPVVMNIVNNQWAISTFQGIARGGSGTFAARGHGFGIPSLRVDGNDYLAVHAVAKWAVERARRNLGPTIVEYVTYRAGGHSTSDDPSAYRPKAENDAWPLGDPILRLKNHLIKRGVWSEERHKQAEAEVMDIVVSAQREAEAIGTLHDGRKPSMRDMFEDVYAETPPHLIRQRQEAGF

SEQ ID NO: 1690 - protein, 311 aa, Triticum aestivum
SAQLQPTEHRPNPGRQQSTARMLLNPASEAMVLDSIRQHLMEDTAAPAPEARRQRPAYCRSASFGSLVADQWSESLPFRADDSDDMVVYGALRDAFSCGWLPDGSFAAVKPEPLLPSPDSCYVGFLEPETPPATSPGGSEEEAAAAFMGEEAAAAVARGKHYRGVRQRPWGKFAAEIRDPAKNGARVWLGTYDTAEDAAVAYDRAAYRMRGSRALLNFPLRIGSEIAAAHAAAAAAGDKRPSPEPATSDSSSSSSSSGSPKRRKRGEAAAASMAMALVPPSSQLSRPAHAWYPAVPAEQVAMAPCVQQLVS

SEQ ID NO: 1691 - protein, 300 aa, Atriplex nummularia
MSSKAEPPAEVSLSVPPTPEGTPAPLISSRRVDSLSYERSSMPRCNCFPDGPLGFGSGPACFTDFKVPDVTLTRKLVAEFVGTFILIFAATAGPIVNEKYNGAETLIGNAACAGLAVMIIILSTGHISGAHLNPSLTIAFAALRHFPWIQVPAYIAAQVAASILASLALKGVFHPFMAGGVTVPSVGIGQAFALEFLITFNLMFVVTAVATDTRAVGELAGIAVGATVMLNILVAGPSSGASMNPVRTLGPAVAAGNYRAVWIYLVAPTLGALGGAAIYKLVQLQEHEVEPPRPTRSFHR

SEQ ID NO: 1692 - protein, 294 aa, Atriplex nummularia
PPAEVSLSVPPTPEGTPAPLISSRRVDSLSYERSSMPRCNCFSDGPLGFGSGPACYTNFKVPDVTLTRKLLAEFVGTFILIFAATAGPIVNEKYNGAETLIGNAACAGLAVMIIILSTGHISGAHLNPSLTIAFAALRHFPWIQVPAYIAAQVAASILASLALKGVFHPFMAGGVTVPSVGIGQAFALEFLITFNLMFVVTAVATDTRAVGELAGIAVGATVMLNILVAGPSSGASMNPVRTLGPAVAAGNYRAVWIYLVAPTLGALGGAAIYKLVQLQEHEVEPPRPTRSFRR

SEQ ID NO: 1693 - protein, 542 aa, Rhodospirillum rubrum
MTRFIFITGGVVSSLGKGLASAALGALLQARGYKVRLRKLDPYLNVDPGTMSPTQHGEVFVTDDGAETDLDLGHYERFTGVSARRSDNVTTGRIYSDVIARERRGDYLGKTVQVIPHVTDAIKEFATADLTDEDFVLCEIGGTVGDIESLPFLEAIRQLRNEMGAERSLIIHLTLLPYIPSAGELKTKPTQHSVKELLGLGIQPDLLMCRSDRPIPEAERNKISLFCNVRREAVIPALDVDTIYQVPVSYHAQGLDVQVCRHFHLPMNEDLDLTRWQTIVDRVRHPEGEVTIAVVGKYTSLIDSYKSLAEALVHGGIANAVKVKLVWLDSEIFEREDAVHYLEGVNGILVPGGFGERGSEGKIEAARFARERSVPYFGICFGMQMAVIEFARHVAGLPGASSSEFGVPEVPLVGLMTEWVRGNERVARGSGDDLGGTMRLGAYECHLRALSKVREIYGAEVIHERHRHRYEVNVTFKDQLEEKGLAFSGMSPDGVLPEIVELPDHPWFIGVQFHPELKSKPFDPHPLFTSFVQAAITQSRLV

SEQ ID NO: 1694 - protein, 534 aa, uncultured archaeon GZfos9C4
MKYIVVTGGVMSGLGKGITMASIGRILKNRGYKLVPIKIDPYINIDAGTMNPYQHGEVYVLADGAEVDLNLGHYERFTDVELGREHNITTGAVYSAVIDRERRGDYLGQTVQIIPHVTNEIKARIRGVAAKSGADVCLVEVGGTVGDIESMPFLEAVRQMKLEEHENDFLFVHVTLVPSTTMHEQKTKPTQHSVKALRELGLQPDIIVCRSKEALKEDVKAKIAMFCNVKMEAVISAADAEDLYAVPLMLEREGIWTYISEKLQLDQSKVDRAWEKMVERRSSCRGNKFFIAIVGKYAELEDSYLSIKEAINHAATELGYNADTKWIEAEDLEGEKEVGSFFDGVRGILIPGGFGVRGAEGKIKAIEYARVNKIPFLGLCFGFQLAVIEVARDVAKLEDANSAELSETSHPVIDLLEEQKEVVEKGGTMRLGDYEVFIRGDTLAKKVYGKKKIVERHRHRYEVNPSFIDQIEREGVVFSGTDRSGTRMEILEISQDKHPFFLATQFHPEFRSRPNRPSPPFKAFLEACIKSKRK

SEQ ID NO: 1695 - protein, 473 aa, Brassica napus
MSATLTGSGTALGFSCSSKISKRVSSSPSTRCSIKMSVSVDEKKKSFTLQKSEEAFNAAKNLMPGGVNSPVRAFKSVGGQPVLIDSVKGSKMWDIDGNEYIDYVGSWGPAIIGHADDEVLAALAETMKKGTSFGAPCLLENVLAEMVISAVPSIEMVRFVNSGTEACMGVLRLARAFTNKEKFIKFEGCYHGHANAFLVKAGSGVATLGLPDSPGVPKAATSDTLTAPYNDIEAVAKLFEAHKGEISAVILEPVVGNSGFITPTPEFINGLRQLTKDNGALLIFDEVMTGFRLAYGGAQEYFGITPDLTTLGKIIGGGLPVGAYGGRRDIMEMVAPAGPMYQAGTLSGNPLAMTAGIHTLKRLKQPGTYEYLDKITKELTNGILEAGKKTGHPMCGGYISGMFGFFFAEGPVYNFADAKKSDTEKFGKFFRGMLEEGVYFAPSQFEAGFTSLAHTSEDIQFTISAAERVLGRI

SEQ ID NO: 1696 - protein, 559 aa, Sulfolobus tokodaii str. 7
MLSAVEKMSTTATVATTPEGIPVIILKEGSSRTYGKEALRINIAAVKAVEEALKSTYGPRGMDKMLVDSLGDITITNDGATILDKMDLQHPAAKLLVQIAKGQDEETADGTKTAVILAGELVKKAEELLYKEIHPTIIVSGFKKAEEQALKTIEEIAQKVSVNDMDILKKVAMTSLNSKAVAGAREYLADIVAKAVTQVAELRGDRWYVDLDNIQIVKKHGGSINDTQIIYGIVVDKEVVHPGMPKRVENAKIALLDASLEVEKPELDAEIRINDPTQMKKFLEEEENLLKEKVDKIAATGANVVICQKGIDEVAQHYLAKKGILAVRRAKKSDLEKLARATGGRVVSNIDELTPQDLGYAALVEERKVGEDKMVFVEGAKNPKAVSILIRGGLERVVDETERALRDALGTVADVIRDGRAVAGGGAVELEIAKRLRKYAPQIGGKEQLAIEAYASALENLVMILIENGGYDPIDLLVKLRSAHENEANKWYGINVFTGQVEDMWKLGVIEPAVVKMNAIKAATEAATLILRIDDLIAAGKKSESKGGESKSEEKKEED

SEQ ID NO: 1697 - protein, 546 aa, Shewanella sp. MR-4
MTTRYIFVTGGVVSSLGKGIAAASLAAILEARGLNVTIMKLDPYINVDPGTMSPTQHGEVFVTEDGAETDLDLGHYERFIRTKMNRRNNFTTGRIYEEVLRKERRGDYLGATIQVIPHITNAIKEKVIAGGEGHDVAIVEIGGTVGDIESLPFLESIRQLGVELGRDRTLFMHLTLVPFLGAAGEVKTKPTQHSVKELRSIGIAPDVLICRGDRAIPANERAKISLFCNVEERAVISLKDVDSIYKIPALLRSQGLDDLVVKRFGLECREADLSEWENVIYQEANPNGEVVIGMVGKYIELPDAYKSVNEALKHAGLKNRVSVTIKYIDSQTVEAKGDEVLQGLDGILVPGGFGERGVEGKILAAKYARENELPYFGICLGMQVALIEFARNVAGMADAHSTEFNKATPFPVVGLITEWVDEEGNVEQRHEASDLGGTMRLGAQLCHLLEGSKAAQAYKGNTCVERHRHRYEVNNKYRERLEQAGLVFSGLSSDRKLVEMIELKDHPWFVAGQFHPEFTSTPRDGHPLFEGFVAAASAHQKRDLKK

SEQ ID NO: 1698 - protein, 123 aa, Triticum aestivum
VDGLEKKKEELTRASCKPGVLTMKENTAPIVSATCLDDREIMVQVSLVSTMAGVLPMSKCIKVLENEGLRLISSSTSAFQNRTFYSLHLQRTQRTMSKECPAFCEELENALTQKAGLRLHHHQ

SEQ ID NO: 1699 - protein, 463 aa, Pseudomonas putida KT2440
MDKQKQDLISQQDRGAVLHPFTQLKDFASGKAGDPTIIETAKGITITDATGREYIDGFAGLYCMNVGYGRTEVAEAISKQAHKLAYYHTYAAHTTEELARLSDRLVKMAPGKMSKVFYGMSGSDANETQAKLVWYYNNLRGKPNKKKIIARERGYHGCSVVSGSMTGMSFYHDHMDLPIAGILRTGAPHYYWGAEPGETELEFSARRARELEELILREGPDTIGAFIAEPVLGTGGITPPPEGYWAAVQPVLKKYDILLIADEVITGFGRTGAMFGCDKYGIEPDLITVAKGLTSAYAPLSASIVGEKVYKVMEEGADRVGAFSHGYTYSGHPIGVAAANAVLDIVEGENIPAHVDKVGQYFQKSMQETFSSLPIVGEVRGVGMMAAIEFVADPATKKRFDPALKVGARISKAARDRNLIARAMPHGEILGFAPPLVTTEQEVDRIISIAHEAVLSVLDELKV

SEQ ID NO: 1700 - protein, 330 aa, Yersinia pseudotuberculosis IP 32953
MKLAVYSTKQYDRKYLELVNKDFGFELEFFDFLLTPKTAKMAEGCQAVCLFVNDDGCREILTELATIGVKILALRCAGFNNVDLEAAKELGIQVVRVPAYSPEAVAEHTVGMMLSLNRRIHRAYQRTRDANFSLEGLIGFNMHNRTAGIIGTGKIGVATMRILKGFGMRLLAFDPYPSEQALELGAEYVDLKTLYAESDVISLHCPMTPENHHLLNKQSFDQMKDGVMIINTSRGGLIDSTAAIDALKQQKIGSLGMDVYENERDLFFEDKSNDVIQDDVFRRLSSCHNVLFTGHQAFLTEEALTSISVTTLQNIAQLDKGEPCPNIITL

SEQ ID NO: 1701 - protein, 745 aa, Oryza sativa
MGSACEAGTDEPSRDDVKGTGNGILENGHSHKPEEEEWRNGMGEDLPNGHSTPPEPQQTDEQKEHQVQIVRWERFLPVKTLRVLLVENDDSTRQVVSALLRKCCYEVIPAENGLHAWQCLEDLQNHIDLVLTEVVMPRLSGIGLLSKITSHKICKDIPVIMMSSNDSMGTVFKCLSKGAVDFLVKPIRKNELKNLWQHVWRRCHSSSGSGSESGIRTQKCTKPKVDDEYENNSGSNNDNEDDDDNDEDDDDLSVGHNARDGSDNGSGTQSSWTKRAVEIDSPQQMSPDQPSDLPDSTCAQVIHPTSEICSNRWLPTANKRSGKKHKENNDDSMGKYLEIGAPRNSSMEYQSSPREMSVNPTEKQHETLMPQSKTTRETDSRNTQNEPTTQTVDLISSIARSTDDKQVVRINNAPDCSSKVPDGNDKNRDSLIDMTSEELGLKRLKTTGSATEIHDERNILKRSDLSAFTRYHTTVASNQGGAGFGGSCSPQDNSSEALKTDSNCKVKSNSDAAEIKQGSNGSSNNNDMGSSTKNAITKPSSNRGKVISPSAVKATQHTSAFHPVQRQTSPANVVGKDKVDEGIANGVNVGHPVDVQNSFMQHHHHVHYYVHVMTQQQQQPSIERGSSDAQCGSSNVFDPPIEGHAANYSVNGSFSGGHNGNNGQRGPSTAPNVGRPNMETVNGIVDENGAGGGNGSGSGSGNDLYQNGVCYREAALNKFRQKRKVRNFGKKVACFQLHAYQSHES

SEQ ID NO: 1702 - protein, 464 aa, Brucella suis 1330
MSEISCKLLIIGGGPGGYVCGIRAGQLGIDTVLVEKTRLGGTCLNVGCIPSKALIHAADEFHRLTTFAAKSPLGITTQNPAIDFARTLEWKDGIVHRLNSGVAGLLKRSRVRMFQGQARFQDGKTVLVDTDTGRQTIHAENIVIATGSVPVEIQALPFGGNIISSTEALSLEKIPERLAVVGGGYIGLEIGTAFAKLGSRVTVVEATDRILPQYDAELTRPVMARLKTLGVEVLTGTSAKGLSADGKALEIRTQDGAVKAIEADKILVTVGRKPQTDGWGLSEIRLDMDGRFIRIDDRCRTSMRGIYAIGDVTGEPMLTHRAMAQGEMVAEIIAGGKHAWDKRCIPAVCFTDPEIVTVGLSPDEARKAGHNIQTGLFPFQANGRAMTMERDDGIVRVVARADNHVILGIQAVGAGISELSAAFAQAVEMGARLEDIAATIHAHPTLGEGFAEASMKALGHALHV

SEQ ID NO: 1703 - protein, 371 aa, Synechococcus elongatus PCC 6301
MRHFDASQPLRVAVLGTGFGSKVHIPALQHHSETTVQAVYHRQPDRAAAIAVQFGIPNAYSDLDQLLADPAIEAVTIASPPFLHYPMAWAALSAGKSVLLEKPTTLNVEEARALWKLASSQGLTVTLDFEYRFVPAWQYVAELLAEGVIGQPWLVKLDWLMSSRADASRPWNWYALRSQGGGALGALGSHSFDYLAWLFGPARRLQARLFTAIQERPDATTGELKPVDSDDTDLIQLELAEGVPCQISLSSVFRQGRGHWLEVYGDRGTLILGSSNQKDYVHGFQVWFASAGQALQELTVPQRLAFRQEFADGRLAPFLRVVDHWLADLRHGQMTAPSLKEGLYSQLLIDLCWQSQRSGEWQTVPELNRFL

SEQ ID NO: 1704 - protein, 555 aa, Moritella marina
MCSIFGILDIKSDIKPLREQALELSKLLRHRGPDWSGIYTSDNAILVHERLAIVDVNNGAQPLYNEEKTHVLAVNGEIYNHKDLKKTLNVDFEFQTESDCEVILALYKEKGTQFLDDLNGIFAFALYDETEDAYLIGRDHIGIIPLYTGYDEHGNFYVASEMKALVPICTQIEEFPAGHYLWSKDGVVTPYYQRDWKDFDNVAQNGGDKSVVKQGLEDAVKRQLMCDVPYGVLLSGGLDSSVISAITQQYAKRRIEDGGKTEAWWPQLHSFSVGLNGSPDLAAAQKVADHLGTIHHSIEFTVQEGIDALRDVIYHIETYDVTTIRASTPMYLMARKIKAMGIKMVLSGEGADELFGGYLYFHKAPNAKEFHEETVRKVNKLHMFDCLRANKSMAAWGIEARVPFLDKEFVDASMRLNPELKMITGDRIEKNIIREAFEDLLPEEIVWRQKEQFSDGVGYSWIDQLKVHVEEAVTDQMLASAAFKFPINTPDTKEGYYYRAIFEDHFPGDSAAKCVPFGKSVACSTVEALAWDESFQNNADPSGRAAGVHNEAYED

SEQ ID NO: 1705 - protein, 220 aa, Mycobacterium bovis AF2122/97
MGMDQQPNPPDVDAFLDSTLVGDDPALAAALAASDAAELPRIAVSAQQGKFLCLLAGAIQARRVLEIGTLGGFSTIWLARGAGPQGRVVTLEYQPKHAEVARVNLQRAGVADRVEVVVGPALDTLPTLAGGPFDLVFIDADKENNVAYIQWAIRLARRGAVIVVDNVIRGGGILAESDDADAVAARRTLQMMGEHPGLDATAIQTVGRKGWDGFALALVR

SEQ ID NO: 1706 - protein, 469 aa, Arabidopsis thaliana
MSSRSDLKIKRVSLIIFLLSVLVEFCYGGFTSEYVRGSDLPDDMPLDSDVFEVPPGPNSPQQVHVTQGNHEGNGVIISWVTPVKPGSKTVRYWCENKKSRKQAEATVNTYRFFNYTSGYIHHCLIDDLEFDTKYYYEIGSGKWSRRFWFFTPPKSGPDVPYTFGLIGDLGQTYDSNSTLSHYEMNPGKGQAVLFVGDLSYADRYPNHDNNRWDTWGRFVERSVAYQPWIWTAGNHEIDFVPDIGEIEPFKPFMNRYHTPHKASGSISPLWYSIKRASAYIIVMSCYSSYGIYTPQYKWLEKELQGVNRTETPWLIVLVHSPFYSSYVHHYMEGETLRVMYEQWFVKYKVDVVFAGHVHAYERSERVSNIAYNIVNGLCEPISDESAPIYITIGDGGNSEGLLTDMMQPQPKYSAFREASFGHGLLEIKNRTHAYFSWNRNQDGNAVAADSVWLLNRFWRAQKKTWLDAF

SEQ ID NO: 1707 - protein, 360 aa, Ralstonia metallidurans CH34
MTEAATFHLEMTRQIRAPRERVFDAFTDQAALAAWHCPRGMRVLEASADARVGGRYRLVMGSRDGSQHMVGGEYQKIDRANFLAYTWQWEGGELPEGTRTLIEVTLTDKDGGTLLHMRHSGFPDTATRDAHTSGWQSVFNRLSDYVDAEGSAGTVTVYGDGRSTYVRTVRMALAEKGIAYKLDPLTPRDPELLKHNPFGRIPAFTDGPLEFFETRAILSYIEEAFDGPSLISQAGPTARARCEQWISLINCHAYDAMVRRYVLQYVFPSGENGQPDRKTIDAALPDIAKQLDALEHAYGGRDFLAGNTLTMADLFFAPIVEYLGRFPESAAMLESRPNIRRAHAAMRARPSYAATQPNFG

SEQ ID NO: 1708 - protein, 436 aa, Brucella suis 1330
MNITIEETLDQAGTGSFQRGLLGIFGLVWAADAMQVLAVGFTGAAIAKTFGLTVPQALQTGTLFFLGMLVGAALFGRLADKYGRRRILLITVACDALFGLLSAFAPDFGSLLALRFLTGLAVGGTLPVDYAMMAEFLPAKNRGRWLVMLEGFWAVGTVVIAIAAWATSVAGVEDAWRYIFIVTAAPALIGIWLRFRVPESPMHLLKSGRVEEAKAVINLVLSRNGKPELPPGAKLLAPRLVTNERLLSPNLRQRTLTSLAIWFLVSVSYYGIFTWIPAKLASDGFGFVRGYGFLVVVALAQLPGYALAAYGVEAWGRRKTLIGFLFVSAAACALFTVATSSSVVGASILIMSFALLGTWGALYAFTPELYPTALRASGMGAAGAMARLGGLLAPSAMAVVINQSFYTAVAMFAGLLALAGIIAFFINVETRQRALN

SEQ ID NO: 1709 - protein, 532 aa, Acinetobacter sp. ADP1
MTYQSALEHVRAVKNKLGGTWDAIRPEDAARMIVQNRFHTGLDIAKYTAAIMRKDMAEYDADNSSYTQSLGCWHGFIAQQKMIANKKYFGTTNKRYIYLSGWMVAALRSEFGPLPDQSMHEKTAVPKLIAEIYTFLRQADAKELNDLFRALQKAEAAGDSAKVKDIESQIDNFETHVVPIIADIDAGFGNEEATYLLTKQMIEAGACAIQIENQVSDAKQCGHQAGKVTVPHEDFLAKINAVRYAFLELGVDEGVIVARTDSEGADLTQKIPVSKEKGDLASQYISYLDTQEIDIADAQEDEILIKRDGKLHRPTRLASGLYQFREGTQHDRVVLDCVTSLQNGADMIWIETPTPDVAGIAGFVNDIKKQVPNAKLVYNNSPSFNWTLNFRQQAYDRWAAEGKDVSAYDRAKLMSAEYDNTELAADADEKIRTFQADAAREAGVFHHLITLPTYHTAALSTHELAKGYFGEEGMLAYVAGVQRKEIRGGIACVKHQAMAGSDIGDDHKEIFAGEQALKAGDASKNTMNQFAH

SEQ ID NO: 1710 - protein, 139 aa, Pennisetum glaucum
  misc_feature (84)..(84): Xaa can be any naturally occurring amino acid
  unsure (1)..(139): unsure at all Xaa locations
KKHVMSERKRREKLNEMFLVLKSLVPSIHKVDKASILAETIAYLNELQRRVQELESSREPMMLRQSETRKVTRRHDDDEDVGNXSGSKRKASELGSGVEREHPTKDDTSNVTVTISNKEVLLEVQCRWEELMMTSVFDA

SEQ ID NO: 1711 - protein, 139 aa, Pennisetum glaucum
KKHVMSERKRREKLNEMFLVLKSLVPSIHKVDKASILAETIAYLKELQRRVQELESSREPMISRPSETRKVTRRHDDDEDVGNGSGSKRKASELGSGVEREHPTKDDTTNVTVTISNKEVLLEVQCRWEELMMTRVFDA

SEQ ID NO: 1712 - protein, 139 aa, Pennisetum glaucum
KKHVMSERKRREKLNEMFLALKSLVPSIHKVDKASILAETIAYLKELQRRVQELESSREPMISRPSETRKVTRRHDDDEPVTKGSGSKRKGSELGSGVAREHPTKDDTTNVTVTISNKEVLVEVQCRWKELMMTRVFDA

SEQ ID NO: 1713 - protein, 157 aa, Triticum aestivum
MLLIRRSNVFDPFSLDFFDPFDGFPFGSGSNSSGSLIPRTSSDTAAFAGARIDWKETPEAHVFKADVPGLKKEEVKVEVEDGNILQISGERNKEQEEKTDTWHRVERSSGKFLRRFRLPENAKAEQVKASMENGVLTVTVPKEEAQKPEVKSIQISG

SEQ ID NO: 1714 - protein, 145 aa, Pennisetum glaucum
KKHVMSERKRREKLNEMFLVLKSLAPSIHRMDKVSILAQTIAYLKDLQRRVQELEYSREPIISRPSETTKVARRHDDDEAVTRKVCAAGTKRKDSELSSDVEREHPWEISKDGASNVTVTVADKEVLVDVQCRWEELMMTRVFDA

SEQ ID NO: 1715 - protein, 577 aa, Thermus thermophilus HB8
MAHRHEVIVVGAGGAGLTAALYAAKEGADVAVVSKLYPTRSHTGAAQGGIGAALGNVEEDHWEWHMFDTVKGGDYLTDQDAAEVFAKEVIEAVIELEHMGLPFDRLPNGKIAQRRFGGHTKEWGKAPVHRAAHAADRTGHMILQTLYQQCVKHNITFYNEFHVTDVIIEDGVAKGLVALELATGELHLFEAKAIVIASGGFGRIYKVTSNAYTLTGDLQAILYRKGLPLEDMEFYQFHPTGLYPLGILLTEGARGEGGILRNALGERFMERYAPTIKDLAPRDLVSRAMYLEVREGRGCGPKKDHVLLDLTHLPPEIIEKKLPDITEFSRIYLGVDPLKEPVPVMPTAHYAMGGIPTTLWGQVIKDEKNTVVPGLYAAGEAACVSLHGANRLGTNSLGDLVVFGRRAGIHAARFARDADYHELTEEHLGESRERIERIKNSTGKEKVAALRAELQQSMMDNASVFRTGELLKKQVEILKELMDRYKRISIDDKGDAYNTELVEALELGYLLEVSEALVHSALNRTESRGAHAREDYPERDDENWLKHTLAYKVEDGKVCFRYKPVVLGRFEPKPRTY

SEQ ID NO: 1716 - protein, 560 aa, Medicago truncatula
MGLCFSSTKVVSGSNSNTTNNDNRKRNQSTTTDTTVTVTTATTAAQKQTAQRRKGGSNETAQKKNHHQHHRLKEKTGSKHVPCGKRTDFGYEKDFDKRFSLGKLLGHGQFGYTYVGVDKSNGDRVAVKRLEKAKMVLPIAVEDVKREVKILKELTGHENVVQFYNAFDDDSYVYIVMELCEGGELLDRILNKKDSRYTEKDAAVVVRQMLKVAAQCHLHGLVHRDMKPENFLFKSNKEDSALKATDFGLSDFIKPGKRFQDIVGSAYYVAPEVLKRKSGPESDVWSIGVITYILLCGRRPFWDKTEDGIFKEVLRNKPDFRRKPWPTISNAAKDFVKKLLVKDPRARLTAAQALSHPWVREGGEASEIPIDISVLNNMRQFVKYSRLKQFALRALASTLNEGELSDLKDQFDAIDVDKNGAISLEEMRQALAKDLPWKLKESRVLEILQAIDSNTDGLVDFTEFVAATLHVHQLEEHDSDKWQQRSQAAFEKFDIDKDGYITPEELRMHTGMRGSIDPLLEEADIDKDGKISLPEFRRLLRTASIGSRNVTSPTLRHRRI

SEQ ID NO: 1717 - protein, 229 aa, Agrobacterium tumefaciens str. C58
MSGFDLIIFDCDGVLVDSEIIAAQVESRLLTEAGYPISVEEMGERFAGMTWKNILLQVESEASIPLSASLLDKSEKLLDMRLERDVKIIDGVKFALSRLTTPRCICSNSSSHRLDMMLTKVGLKPYFAPHIYSAKDLGADRVKPKPDIFLHGAAQFGVSPDRVVVVEDSVHGIHGARAAGMRVIGFTGASHTYPSHADRLTDAGAETVISRMQDLPAVIAAMAEWEGAF

SEQ ID NO: 1718 - protein, 490 aa, Pseudomonas putida KT2440
MKDLAPSALNKLRRNDLLETRAYIDGRWVTGEGSLDVTDPANDQVIAQVAHCDESWVDLAVEAASRAFDGWRNTLPTQRGAVLRKWAALMRENQEDLAVIMTCEQGKPLSESRGEINYGANFVEWFAAEGERCYGETIPSHLPNSQLVTKLQPIGVTVAITPWNFPSAMITRKAAAALAAGCPMIVKPAPETPLSALALARLAEEAGIPGGVFQVLTGDAPKMSARLLAASAVRAFSFTGSTEVGRILLRQSADTVKKVSLELGGHAPFIVFDDASIAEAVEGCIGAKFATSGQDCLGANRIYVHRNIYGQFVEEFTKATEKLRVGHGLEEGVDIGPMTRVTVANKCREQISNALSLGAKLTCGGIDNHLGSSFVLPTVLADVTDKMDIAFEETFGPVAAILPFDSEDEVVTRANNTEFGLAAYVYTNDLRRACRVSDRLEYGMVALNTPKFTGAPIPFGGWKQSGLGREGSKHGLAEYMELKYVCIGGL

SEQ ID NO: 1719 - protein, 313 aa, Cyanophora paradoxa
NGFGRIGRLVLRAAVEKGTVEVVAVNDPFIFPDAAYAAYMLQYDSTHGAFPGEVGSDGEHLVVNGKKLACFAIRDPAEIPWGSVGVDYVVEASGAFTAADKASLHLTGGAKKVVLSAPGKDVPMFVMGVNHDAHTKDLKVVSNASCTTNCLAPLAKIIDEAFGIEMGLMSTIHALTATQRRWTGRAPKRLARGRGTFQSIVPTSTGAAKAVGNVYPKLNGKLTGMAFRVPVAAGSVVDLTLNLKRATTYEDIKMVVKEASESQQYNGIVGYTEDSVVSIDIVHNSCSSVFDAGAGIMLSPTFVKLVSWYDNEW

SEQ ID NO: 1720 - protein, 1097 aa, Candida albicans
MSTSQPSQQQNPEQVVNDIRQKIEKERKIIQGFNDVKRNTNNPEVIQKWKSKIIESQSMIDYYQETMNKLTRQMQRLNTNSSSRTASRSSVISEYKPSYSNFDLIKYECPSLGNKIQFMLQYLEFKLQVENKYSEANKKLSHLYLMDGDKSSSNAAEGGRAESDQRIQLLEKALKKYQKFSINDHEFDRDYEIMDSTKHSRKLLTGRLTVSITCIRDVDHIATALAKKRETVVVIKVDDLEKARTKPSKNDNWNEEMVIDVDKSHEIELAVMDKQNGIYVPVAVNWFSLFDLAEEIRKKKVAKDQGSSGWLPAANLPQTGGSGAGTGSSMTGGASYGATSPLPAHNDLRPSVSPSSDAKENKVLVSTWLSLEPGGQMLINLNFEKSITNGKQFRGPLGRHGAIRQKKEEVFEKHGHQFVQKQFYNIMSCALCGEFLRYTGYQCQDCKFLCHKKCYQKVVTKCISKSGSDYDAAQLNHRIPHRFEPITNHGTKWCCHCGYILPWGKKNVRKCTECGVMCHAQCTHLVPDFCGMSLQMANEILATIESTKVSPKKAQHQQSHAKPLPPKPPIESKPSMDSEETLHNEPSYKSLRPASVVHQDTNFVSKLPTTVQNKYQEPVELPPQQQNQVVPSTRRRGHGLTDLSFETGYGQQQHQHHRDVPQIVVEDHQHYNSNDNRDVEMEESKDEFDNFDYNNKYTENEILTDVQQDQVRSPFADQIQGVPETSHAKQQNQQVQQVQQQEELGHQRTHSSGKSGKSKRRKRKVGLDDFQFLAVLGKGNFGKVMLAESRHTLKLCAIKVLKKDFIVENDEAESVKSEKRVFLTANKEMHPFLLNLHCCFQTENRIYFVMEYISGGDLMWHIQKNRFTAKRAKFYACEVLLGLKYFHDNGIVYRDLKLDNILLTTKGHIKIGDYGLCKEDMWHKSTTSTFCGTPEFMAPEIVAGKAYDRSVDWWAFGVLLFQMLLCQSPFKGDDEDDIFNAIENDEVKYPINLSRQTVLVLQALLTKDPSQRLGSGPKDAEEIMEHPYFHDVNFDDVLNCRIPAPYIPEVQSEHDYSNFDKEFTSETPRLTPVETVLTSEMQEQFRGFSHISDNATI

SEQ ID NO: 1721 - protein, 399 aa, Photorhabdus luminescens subsp. laumondii TTO1
MFQNVDAYAGDPILSLAEEFKKDPRAEKINLSIGLYYDEQGVTPQLQAVATAEEQLRALSQTASLYLPMEGLESYRLAVQELLFGKDHPVLKQRVVATIQSLGGSGALKIGADFLHRYFPDSEVWCSDPTWENHAAIFAGAGIKVNYYPYFDTQTKGVKFSEMLETFRKLPAKSIIVMHPCCHNPTGSDLTYDQWDQVVQIVKERELLPFLDIAYQGLADGMEKDAYAIRAMATAGLPCLVSNSFSKIFSMYGERVGGLSVICDDEQTKERVLGQLKAGVRRVYSSPPSFGAQVVAKVLTDPALKAQWLTEVEHMRLRILEMRTVLVDALKTALPEKNFEYFLKQRGMFSYTGFSQKQVDRLRQEFAVYLVGNGRVCMAGVNHRNVARIAETFAAVNKS

SEQ ID NO: 1722 - protein, 236 aa, Arabidopsis thaliana
MGRSPCCEKAHTNKGAWTKEEDQRLVDYIRNHGEGCWRSLPKSAGLLRCGKSCRLRWINYLRPDLKRGNFTDDEDQIIIKLHSLLGNKWSLIAGRLPGRTDNEIKNYWNTHIKRKLLSHGIDPQTHRQINESKTVSSQVVVPIQNDAVEYSFSNLAVKPKTENSSDNGASTSGTTTDEDLRQNGECYYSDNSGHIKLNLDLTLGFGSWSGRIVGVGSSADSKPWCDPVMEARLSLL

SEQ ID NO: 1723 - protein, 407 aa, Arabidopsis thaliana
MGDNLMDKVTAFGERLKIGGSEVSNKISAGVSSMSFKVKELFQGPNPTDKIVEDATTENLEEPDWDMNLEICDMINQETINSVELIRGIKKRIMMKQPRIQYLALVLLETCVKNCEKAFSEVAAERVLDEMVKLIDDPQTVVNNRNKALMLIEAWGESTSELRYLPVFEETYKSLKARGIRFPGRDNESLAPIFTPARSTPAPELNADLPQHVHEPAHIQYDVPVRSFTAEQTKEAFDIARNSIELLSTVLSSSPQHDALQDDLTTTLVQQCRQSQTTVQRIIETAGENEALLFEALNVNDELVKTLSKYEEMNKPSAPLTSHEPAMIPVAEEPDDSPIHGREESLVRKSSGVRGGFHGGGGSGDDMMDDLDEMIFGKKNGCDSSTNPDHDPKKEQSSSKNDDLIRF

SEQ ID NO: 1724 - protein, 813 aa, ASPERGILLUS NIDULANS FGSC A4
MDGDISLSQSLGGLRIANPDNVSLDSSDDASTPAATTAQPESTSSTTDTKDEPTEIDQQDSAVSSCPPPADHRMSYQSYHPDVQQQPASHYASPIPSQPQHSAPTSSSRPVSTLYSNGGAPVSAIREGPYRIRTDSAASSASESLARAESRGGSAAYQAGVPIRDNTHSDRSYHTAQMPPNGAAVMRQPSRARAAAAQQLSGSPYGTENGPMSSSDEWQERGAAVTVRQEIDANGKPVARYIKKGVRDFSFGQTLGEGSYSTVVLGTDRQTLKEYAIKILDKRHIIKEKKVKYVNIEKDTLNRLTDHPGVVRLYYTFQDERSLYFVLDLCKGGELLGVLKRMTTFDEECTRFYGAQILDAIDYMHKRGVIHRDLKPENVLLDSQMHIKVTDFGTAKILKGNQASQNSSGIPSLDSDMPEEERASSFVGTAEYVSPELLTDKNACKASDLWAFGCIIYQLLAGRPPFKAANEYLTFQKIVALEYEFPLGFPSVARDLVERLLVLDPTRRLPIEHIKNHEFFEGMTWGPDLWKQKAPRLKAYTPPPREPIKLNGGSDGDSFPPSINTAPSNASSRVMPRLITELPAPSQLDIEWSPVLTKNNERILKLGNLVVVSSAASHSPVSKNGEYEAPKKFSRFFGGSTTKKRQRLVMITSSGRIIMAAAGGDEKKAKMELSLLAPGTHYRTSTDAKGVSCWIVDTREKHFVFEDPKPSSSNAGTTAISAQDWLDTLDRAREMALAQQQNGQYSADDAFRDLSSGFSSPANTLDRAAEAPQESAPQGRATLVKHQGNDSESIKGRKRFSRRHSKNGLAAVF

SEQ ID NO: 1725 - protein, 327 aa, Photorhabdus luminescens subsp. laumondii TTO1
MAKHIEFSSIGGPEVLQYCEFTPRAPADNEVQVENRAIGINYIDTYIRSGLYPPAQLPSGLGTEAAGIVTKVGSAVTTIKVGDRVVYAQSTLGAYSEVHNVAESKVAVLPDTISFEQAAASFLKGLTVYYLLRRTYKIQSGEPFLFHAAAGGVGLIACQWAKALGAKLIGTVGSEEKVQRAKDAGAWQVINYNCENIVERIYEITNGEKVGVVYDSVGKSTWLHSLDCLKRHGLMVSFGNASGPVTGVDLGILNQKGSLFVTRPSIAGYISTREELDEASKELFDLIASGKINVDVPENQKFSLSEAIRAHQILESRTTQGSSLLIP

SEQ ID NO: 1726 - protein, 470 aa, Moritella marina
MKKTKIVCTIGPKTESVEKLTELVNAGMNVMRLNFSHGNFAEHSVRIQNIRQVSENLNKKIAVLLDTKGPEIRTIKLENGDDVMLTAGQSFTFTTDINVVGNKDCVAVTYAGFAKDLNPGAIILVDDGLIEMEVVATTDTEVKCTVLNTGALGENKGVNLPNISVGLPALSEKDKADLAFGCEQEVDFVAASFIRKADDVREIREILFNNGGENIQIISKIENQEGVDNFDEILAESDGIMVARGDLGVEIPVEEVIMAQKMMIKKCNKAGKVVITATQMLDSMISNPRPTRAEAGDVANAVLDGTDAVMLSGETAKGKYPVEAVSIMANICERTDNSMSSDLGANIVAKSMRITEAVCKGAVETTEKLCAPLIVVATRGGKSAKSVRKYFPKANILAITTNEKAAQQLCLTKGVSSCIVEQIDSTDEFYRKGKELALATGLAKEGDIVVMVSGALVPSGTTNTASVHQL

SEQ ID NO: 1727 - protein, 401 aa, Geobacter sulfurreducens PCA
MDKTRIAITGLGIFCAAGKDLASFTDALLHGRCGIGPVDLFDVSPFPSHIGAQVRDYSPLDYFDRADARRLSRTDQFAAVAAAEALGMSGAREHYDPFTVGICVGAGASGMIHGEAWLRDRLAGGKGRPGDLRCILPDRTTTALAERFGLWGYQGSITTACSSSATAIGWGADLIATGQLDACLCGGSDTLSILTYAGFNSLRVVDPEPCSPFSLGRQGISLGEGAAFVVLEREETARSRGARIYGRVLGYALAGEAHHMTAPEPSGSEAARVMRAALDNAGVSAGEIGWVNAHGTGTPLNDVVESKAMKLVFGADVQHVPLVSTKGMTGHCLGAAGSIEIVATVTALGAGIIPRTLNFRGSDPECDLDYCHDGPRESSATVALSNSFAFGGNVTSVVIGR

SEQ ID NO: 1728 - protein, 910 aa, Arabidopsis thaliana
MVTTGNSRYERGNGNREIKTKEGIKWTTEASFELFQRRIWRFLVDIVCLEAYLVPDETDLSFGRYGEFGGFNESDPKETRNVSVAGEGQKSNSTRSAAAERALDPEAALYRELWHACAGPLVTVPRQDDRVFYFPQGHIEQVEASTNQAAEQQMPLYDLPSKLLCRVINVDLKAEADTDEVYAQITLLPEANQDENAIEKEAPLPPPPRFQVHSFCKTLTASDTSTHGGFSVLRRHADECLPPLDMSRQPPTQELVAKDLHANEWRFRHIFRGQPRRHLLQSGWSVFVSSKRLVAGDAFIFLRGENGELRVGVRRAMRQQGNVPSSVISSHSMHLGVLATAWHAISTGTMFTVYYKPRTSPSEFIVPFDQYMESVKNNYSIGMRFKMRFEGEEAPEQRFTGTIVGIEESDPTRWPKSKWRSLKVRWDETSSIPRPDRVSPWKVEPALAPPALSPVPMPRPKRPRSNIAPSSPDSSMLTREGTTKANMDPLPASGLSRVLQGQEYSTLRTKHTESVECDAPENSVVWQSSADDDKVDVVSGSRRYGSENWMSSARHEPTYTDLLSGFGTNIDPSHGQRIPFYDHSSSPSMPAKRILSDSEGKFDYLANQWQMIHSGLSLKLHESPKVPAATDASLQGRCNVKYSEYPVLNGLSTENAGGNWPIRPRALNYYEEVVNAQAQAQAREQVTKQPFTIQEETAKSREGNCRLFGIPLTNNMNGTDSTMSQRNNLNDAAGLTQIASPKVQDLSDQSKGSKSTNDHREQGRPFQTNNPHPKDAQTKTNSSRSCTKVHKQGIALGRSVDLSKFQNYEELVAELDRLFEFNGELMAPKKDWLIVYTDEENDMMLVGDDPWQEFCCMVRKIFIYTKEEVRKMNPGTLSCRSEEEAVVGEGSDAKDAKSASNPSLSSAGNS

SEQ ID NO: 1729 - protein, 506 aa, Pseudomonas fluorescens
MSQDPKKCPVTHLTTEAGAPVVDNQNSMTAGARGPLLAQDLWLNEKLANFVREVIPERRMHAKGSGAFGTFTVTNDITQYTRAKIFSEVGKKTEMFARFSTVAGERGAADAERDIRGFALKFYTEEGNWDLVGNNTPVFFLRDARKFPDLNKAVKRDPFSNKRSATNNWDFWTLLPEAFDQVTIVMSDRGIPAGYRHIDGFGSHTFSFINTQNERFWVKFHMRTQQGIQNLTDAEAADLIAKDRESSQTDLFDAIERGEYPKWKMYVQIMPELEAETVPYHPFDLTKVWPKGDYPLIEVGEFELNRNPENYFQDVEQAAFAPSNLVPGISYSPDRMLQARLVNYADAARYRVGVNHSQVPVNAARCPVNSNRRDGQGRMDGNYGSLPHYEPNSFNQWQEQPQFKEPALKITGDADFWDFREDDNDYFSQPRALFNLMNDEQKQALFNNTAAAMGDALDFIKYRHIRNCYACDPAYGQGVAKALGMTVADAQAARETDPAKGLPSFL

SEQ ID NO: 1730 - protein, 816 aa, Magnaporthe grisea 70-15
MSKPREDAAGKPSVQVQAPPVSLLNNAHASISLSSRRRSSPVAPLQRFDSLNKTANFCTTTVAVISPPPTPHSPRFAHKRETLALPLRLRSNSGLSLHTNSAAFRQYTDYSNLDGSPITPSFFNQDATTFAIDSAFRPRTSGQDAPSGGGGGGGGGGEGLSSNQYRNGRRESMASVLTSSPSKTGSCPVLCVPEFFTKDVIQIVLQSQTTFDRLMWYAERHKSTDGMEYLAKLKEYQQSVNSVTASLSRISTENTSFAATTPLHLPSGISRHLNADVKHITASVLPALENVFRDAKAHIEQRIIRDLYPGFVKNQLSLATEAALATANRGSFQSRFPGLAASFCLTDPLLPDNPIAFASDGFLGLSGCPREEVVGQNCRFLQGGGLQNLGVTRIKSAVSSASAGSAGSSVGSVGEGASHGADGGVETVLNYTRDAHGNLKPFWNLLFVCPLRNSTGKITYYLNAQINISEAVGSDKEVLEILSVRPSEPDSLPPSTSSSSSSSPILGLSHAITAPSPSYTGRFNNTSQESMLAAQQQKQQQQQQTPKRRSTTRGFSFMSFRKNHNSDSKSSRGQSRASTFPEPVSSSYPGPDQLHLPTASPSASSRSTTPNTTASSTLDSASTAATQQQSPDHPGAYARHMVLEYAAGDKASRGSSSSSSSSHRHQLRCAFASPGALAALGLSTLDEVRDRDVFDVLGETGAASKAVRRGILSKVAGGENVSVRLRVGGGGAFSGSHSPAQQQSGYQSCVVGPDQQWSVEAALDRLADWRHAHHSVDDVSRHGREAAFHFTPLKDAAGCVRWVVLIVVPVRVRRAT

SEQ ID NO: 1731 - protein, 365 aa, Pinus sylvestris
QMGLAENQLSIDMLELWLKEHPEASMSLNQDAGTSVFRELALYQDYHGLPTFRKAIANFMESLRGNKVKFDAESIVLTAGATAANELLMFCLADPGDAFLVPTPYYPGFVRDLRWRTGVEIVPVHCDSSNRFQITKSALERAYLEAQNQKLKVRGLIVTNPSNPLGTTLSVKALRNLLAFVQEKKIHLVCDGIYSGSVFSPPRFHSISEILPNDNHICDNVHIVYSLSKDLGLPGFRIGAIYSYNNTAVKTARRMSSFCMVSSQTQHMLSALLSDFKFMNHFISENQKRLRERHRFLVSGLQKAGITCLKSNAGLFCWVDMRHLLPSPDVNGELMLWQSILDEAGLNISPGSSFHCKEPGWFASR

SEQ ID NO: 1732 - protein, 257 aa, Zea mays
GREPHLLSFCSERTHSPVPDLRSPRRSKMQIFVKTLTGKTITLEVESSDTIDNVKAKIQDKEGIPPDQQRLIFAGKQLEDGRTLADYNIQKESTLHLVLRLRGGMQIFVKTLTGKTITLEVESSDTIDNVKAKIQDKEGIPPDQQRLIFAGKQLEDGRTLADYNIQKESTLHLVLRLRGGMQIFVKTLTGKTITLEVESSDTIDNVKAKIQDKEGIPPDQQRLIFAGKQLEDGRTLADYNIQKESTLHLVLRLRGGQ

SEQ ID NO: 1733 - protein, 365 aa, Pinus sylvestris
QMGFAENQVSFDLLEAWLDEHPEASICQEGKTTFRDTAPHQDYHGLPAFRESLARFMELVRGGKVRFDPDRIVLTAGATAANELLMFCLANPGEAFLVPTPYYPGFDRDLRWRTGVEIIPVHCNSSNDFQVTSSALEEAYHEAKQKNIRVKGILVTNPSNPLGTTMERKTLKNLLSFASEKNIHLICDEIYSGSVFLPPRFRKYAEVLQASGRPNDSDRVHIVYSLSKDLGLPGFRVGAIYSYNDTVVTTARRMSSFSLVSSQTQHFLACMLSDEDFTKKYIKENKKRLRKRHRIMVSGLQKVGISCLKSNAGLFCWVNLTQLPPSENIDGEIKLWETILYEMGLNVSPGSSCHCIEPGWFSVCF

SEQ ID NO: 1734 - protein, 216 aa, Silicibacter pomeroyi DSS-3
MKLARPLPNYLVQRYHGWKATTYTENQVWYRRLASEGQRPRAMVISCCDSRVHVTSIFGADQGEFFIHRNVANLVPPYLPDGDHHGTSAAVEYAVTVLKVAHLIVLGHSQCGGVRGCLDMCKGHAPQLEAKESFVGRWMDILKPKYDHVAKIEDEDEQVRQLEKHAVVASLENLMTFPFIASAVEEGSLSLHGLWTDIGEGGLQCYEPGDERFVPV

SEQ ID NO: 1735 - protein, 250 aa, Pseudomonas aeruginosa UCBPP-PA14
MPAETPSPRPDADPPQCALPEARPDRDAGTKLRAAVLGANDGLVSNLCLVMGVAGASMAHSSIVLTGMAGLVSGACSMALGEWLSVTNAREMASKRIAEEERLLRLCPDTETQELIDIFTAKGLSEVSARRVALQLMNDGRGALDTLSREALGIDPTELGGNPWNAAGTSFLLFSLGALVPVAPFLFLDGAAALVASLLFSLLALLFSGAVTARFTGRPLAFSALRQVLVGTLAAAFTYGLGTALGVGLG

SEQ ID NO: 1736 - protein, 102 aa, Triticum aestivum
NTPTTKEAYYYRPVAEKFYPKNAARLTVPGGPSVACSTAKAVEWDTAWSKLLDPSGRAALGVHDAAYKEKAPASVDPAVDDVSCSPAHDVKRLKTAVSAAAV

SEQ ID NO: 1737 - protein, 444 aa, Pseudomonas fluorescens Pf-5
MSEPSRFWHPMLHPNEMKQREPIRIVRGDGCYVYDDKGHQLVDGVAGLWNVNVGHNRKEVKAAITAQLDELEYFQLFDGVSHPRAEELSRVVMNLLEPEDMRRVAFSSGGSDAIESALKLARQYWKLEGQADRTKFISLRQGYHGTHFGGASVNGNTVFRRNYEPLLPGCYHIDTPWLYRNPYSQDPEELGKICADLLEREIQFQSPDTVAAFIAEPIQGAGGVIVPPANYWPLIREVCDKYGVLLIADEVVTGFGRSGSMFGSRLWGVKPDIMCLAKGITSGYIPLGATVVNRRIEEAFEKNANFTGAIMHGYTYSGHPVACAAALACLDIVVKEDLPANAAKMGDYMLDKLLPFVERFDTVGEVRGKGLMLALDLVADKTTREPIDPMSGYANQVAQIARDNGVMVRPVGTKIILSPPLVIQQAQADAIVDALAEGLSKARR

SEQ ID NO: 1738 - protein, 266 aa, Zea mays
  misc_feature (184)..(184): Xaa can be any naturally occurring amino acid
  unsure (1)..(266): unsure at all Xaa locations
MPPAAAALLRCAPAVPFAARSSAVSRSGMARRLVAASAAAGRLAPAYRGLLLDAGGTLLQVARPVAETYASIGRRYGVTKTKKRIMEGFKRAFSAPWPKTLRYQGDGRPFWRIVVAEATDCTDGDYFEEVYQYYAHGDAWRLPTGADAALRELKDAGVKLAVVSNFDTRLRKLLKDLNVSEIPXLFRFDAIVVSSEVGYEKPSPEIFNIALDQIGVEASKAIHVGDDETADMAGANATGLECWLWGKDVTTFSEIQERILTTDDPQ

SEQ ID NO: 1739 - protein, 217 aa, Bacillus cereus ATCC 10987
MYSMEQVVNLAKHRGFVFPGSEIYGGLANTWDYGPLGIELKNNVKKAWWKKFIQESPYNVGLDAAILMNPKTWIASGHVGNFNDPMIDCKKCKARHRADKLIEDALDAKGIEMVVDGLTFDQMADLMKEHEVKCPDCGSEEFTEIRQFNLMFKTFQGVTESSTNEIFLRPETAQGIFVNFKNVQRSMRKKLPFGIGQIGKSFRNEITPGNFTFRTRE

SEQ ID NO: 1740 - protein, 706 aa, Mycobacterium avium subsp. paratuberculosis K-10
MATDHTSGAPDPKQRDLESARFRRDTGYLTTQQGVRVDHTDDALTVGERGPTLLEDFHAREKITHFDHERIPERVVHARGAGAYGYFEPYDDRLAQYTAAKFLTSPGTRTPVFVRFSTVAGSRGSADTVRDVRGFATKFYTEQGNYDLVGNNFPVFFIQDGIKFPDFVHAVKPEPHNEIPQAQSAHDTLWDFVSLQPETLHAIMWLMSDRALPRSYRMMQGFGVHTFRLVNARGEGTFVKFHWKPRLGVHSLIWDECQKIAGKDPDYNRRDLWEAIESRQYPEWELGVQLVAEDDEFSFDFDLLDATKIIPEEQVPVLPVGKMVLNRNPDNFFAETEQVAFHTANVVPGIDFTNDPLLQFRNFSYLDTQLIRLGGPNFAQLPVNRPVAQVRTNQHDGYGQHTIPQGRSSYFKNSIGGGCPALADEDVFRHYTQRVDGQTMRKRAEAFQNHYGQARMFFKSMSPVEAEHIVAAFAFELGKVEMPEIRSAVVAQLARVDDQLAAQVAAKLGLPEPPEEQVDESAPVSPALSQVTDGGDTIASRRIAVLAADGVDVVGTQRFTELMEQRGAVVEVLAPVAGGTLAGGSGGELRVDRSFTTMASVLYDAVVVACGPRSVSTLSDDGYAVHFVTEAYKHLKPIGAYGAGVDLLRKAGIDNRLAEDTDVLNDQAVVTTKAAADELPERFAEEFAAALAQHRCWQRRTDAVPA

SEQ ID NO: 1741 - protein, 394 aa, Silicibacter pomeroyi DSS-3
MFENLKAQPADKILALMQMYKDDPRSDKIDLGVGVYKNAEGVTPVMRAVKAAEKIVWEQQESKSYTGLIGDPAYSDAMIKLILGDAVQRANVGAAATPGGTGACRQAFELIKMASPEARVFVSDPTWPNHISILNYLGMTMVPYRYFDADSRGVDFEGMLVDLGQARAGDVVLLHGCCHNPTGANLNLSQWREVVKLINAKGLVAMIDIAYQGFGDGLEEDAQGTRLVASSVKECLIAASCSKNFGVYRERTGLLMAVSQDSGQTALNQATLAFLNRQNYSFPPDHGARVVTTILNDDALRADWMAELEEIRLSMLGLRQQLADELQRLSGSDRFSFIAQHRGMFSRIGAAPELVEKLRTEFGIYMVGDSRMNIAGLNAQTVPILAKAIIDAGI

SEQ ID NO: 1742 - protein, 134 aa, Phyllostachys acuta
KKHVMSERRRREKLNEMFLILKSLVPSIHKVDKASILAETIAYLKELEQRVEELESNREPSRPSETRGRRRHEIAGISGAKRKASSEPGGRDVERERLWALSMDGPSNVNVTVMDKEVLLEVQCGWKEMLMTRV

SEQ ID NO: 1743 - protein, 132 aa, Nicotiana tabacum
PHVIGDAPAYPGVEHVGGDMFASVPKADAIFMKWICHDWSDEHCLKFLKNCYEALPANGKVIIAECILPEAPDTSLATKNTVHVDIVMLAHNPGGKERTEKEFEALAKGAGFTGFARLVALTTLGSWNSTNN

SEQ ID NO: 1744 - protein, 146 aa, Tripsacum australe
KKHVMSERKRREKLNEMFLVLKSLLPSIHRGEQASILAETIAYLKELQRRVQELGSSREPASGPSETTTRLITRPSRGNNESVRKEVCAGSKRKSPELGRDDVERPPVLTMDAGTSNVTVTVSDKDVLLEVQCRWEELLMTRVFDA

SEQ ID NO: 1745 - protein, 404 aa, Ralstonia metallidurans CH34
MNSPTTRPIMKWAISRRAQQLTSSAIREILKVTERPEVISFAGGLPSPASFPVAAMEAAVARVFADNPQSALQYAATEGFMPLREFVAKRYNVDVERVMITTGSQQALDLIAKVMIDPGSPVLVETPSYLGALQAFSLFEPEFVSIPSDEKGLIPEALTPELTAGARFLYALPNFQNPTGRRLPLERRQELVKRAKELGVLLVEDDPYGELSYSGNQLPSLLSMNPDGVIYMGSFSKILAPGMRLGFVIAPPDLHFKLCQAKQASDLHTPTFTQRIAYETIKDGLLEQHIPTIRELYGKQCAFMLDALKRHMPAGVTWNAPEGGMFIWVELPEGLDSMKILEEAVRRNVAYVPGAPFYAGSPRKNTLRLAFVTVSAERIEQGVSILGEVFREAIAQAAPQARAA

SEQ ID NO: 1746 - protein, 442 aa, Silicibacter pomeroyi DSS-3
MTLIKTLLPAAAVIALPTLGLAQEATADITPPNEEIGYIFTTFMFLVSGFLVMWMAAGFTMLEAGLVRQKNVTMQLTKNIALFSLAALMYYLIGYNLMYPGDGWSIDGVLGAFSPAAMEPVGLADTETDLTYASVGSDFYFQLMFCATTASIVSGTLAERIKLWPFLVFVLVLTGLIYPIQASWKWGGGFLDAAGFLDFAGSTVVHSVGGWAALAGALILGPRLGKYKDGRVIPFMGSNLPLATLGTFILWLGWFGFNGGSQLYMDTAGNVADISRIFANTNTAAAGGAVAALLLTQLLYKKVDLTMVLNGALAGLVSITAEPLTPGLGSATLIGAVGGVIVVFAVPFLDRLKIDDVVGAIPVHLMAGVWGTLAVCLTNGDANLGTQLYAIVVVGLFTFVVSGAVWFILKMVMGIRVSEEEEINGLDMAELGMEAYPEFSKS

SEQ ID NO: 1747 - protein, 513 aa, Candida glabrata CBS138
MEYQPGKRASVSFGSPSHSVHQSYTTSPFSSGVNLATTAEGVPNNTGGSGSGANGEDVFMTNRSPMYSPLDFLHPLYSPNYSQLHQIRAGLNNTLKNMNQGVVCEYGAHFPLYGVDWSIEDYVCIGSYKEDSRNKLQVIHSPDLFKWDNVAECDVIYPVSNIQWMPSAFRSRKIATASDSLRIWSLNTEENKLEEQLNLSLCKFHKQHPNNKAFVGLSQIPTKTSDVNPSVLGEFPPITSFHWNPVDTNILISSSIDTTCIVWDLQSSNYVKTQLIAHDSEVFDVRFLTQSTQLFASCGGDGSVRVFDLRCLAHSTIIYEPPASEPGTGNNSSRSDSTDENSHALLRLEPSPHDPNVLATFAIASNEILILDMRNPDSPLVVLNGHSASINQIKWHPTKKNTLISCSDDCQVLFWDISSYFDQGAVSHTTTPRPAASGASMEVDSEGDYSYDDSASKTSSIKATKPLSKDLDVPTMCYSNKTHEINNIVWRPQRGDWFGCVSGKKFQNVRTPL

SEQ ID NO: 1748 - protein, 146 aa, Sorghum bicolor
KKHVMSERKRREKINEMFLILKSLVPSIHKVDKASILTETIAYLKELQRGVQELESSRELTTPSETTTRTTRPRGISNESARKKLCAGSKRRPSPEVGGDVVNKEHPWVLPKDGTSNVTVTVANTDVLLEVQCRWEELLMTRVFDA

SEQ ID NO: 1749 - protein, 145 aa, Sorghum bicolor
KNHVMSERKRREKLNEMFLILKLLVPSIQKVAKVSLLAETIAYLKELQRKVQELKSSRELLSRPSETTARPTKPCGIGSESVRKKLSAGSKRKSPDFSGDVEKEHPWVLPKDGTSNVTVAVSDRDVLLEVQCRWEELLMTRVFDA

SEQ ID NO: 1750 - protein, 492 aa, Polaromonas sp. JS666
MDMKTSPISLLKDPSLFKTDALINGQWVAGGSRFDVNDPSNGQKLADVANLGSQDAEAAIAAANAAWPAWRSKTGKERHAILMKWYQLLMANQEDLGRIMTAEQGKPFAEAKGEVAYGASFVEWFAEEAKRVNGETLPQFDNNRRLMVIKQPIGVCAAITPWNFPLAMITRKVAPALAAGCPVVIKPAELTPLTALAAAELAVRAGIPAGVLNVLTADSANSIAVGKVFCASDVVRHISFTGSTEVGRILMAQSAPSVKKLSLELGGNAPFIVFDDADIDSAVEGAMASKYRNAGQTCVCANRIYVQDGVYDQFVEKFAAKVKLLKVGNGFEDGVVQGPLIEDSAVDKVQRHVADALAKGGKLQAGGHKLQGQFFEPTVISEATADMLCAREETFGPFAPVFRFKAEQEAIDAANNTEFGLASYFYSRDIGRIYRVAEALEYGMVGINAGVIATEHVPFGGVKQSGLGREGSSHGMEEYVEMKYLCLGDILK

SEQ ID NO: 1751 - protein, 121 aa, Rhodospirillum rubrum
MRHQGTEAAWSSALNGEKRSGAFLCAACQAPLFASDDKYDSGSGWPSFTRPVDKQAVDTSVDHKLIVPRTEVHCSACGGHLGHVFEDGPRPTGLRYCINGVALDFKPEAPQATASHTPTDD

SEQ ID NO: 1752 - protein, 413 aa, Bacillus clausii KSM-K16
MDTYLSAKRTIMTPGPVEVDPRVLQAMSMPILGQFDPAFTNIMNQTMDQLRKLFQTENEWAYPVDGTSRSGIEAVLASLIERGDRVLVPIYGRFGHLLVEICERYGADVHKIECTWGTVFSEEEVINHIHAIKPNIVACVHGETSTGCMQPLAQIGKACREQGCLFVVDAVATIGGTDVLVDEWHIDAAIGGTQKCLSVPAGMAPITYNQRVEEVIARRKKVEQGIATKDDLDEPLRGTVVASNYFDLGMLQDYWSPRRLNHHTEATSMVYALHKGLAILLEEGLPHRFARHAYHEKALIAGLTAMGLELFVSHQHKLPMVTCVCVPVGLDADRVRAFMLHHFGVEIASSFGPLYGKIWRIGTMGYSCRKENILFVLAALEAALLHYGTKIETGKAVQAALSYYEQTEKSAMA

SEQ ID NO: 1753 - protein, 233 aa, Porphyra purpurea
MSTNVVWHEGLITREARAKLLGQKGATVWLSGLSGSGKSTVSVELEQQLFAKKVLSYRLDGDNIRQGLNKNLSFSPADRKENIRRISEVAKLMCDIGVVVTTAFISPYTEDRDMAREIHKAASIPFIEVFVDCPLEVAESRDPKGLYKKARSGEIKNFTGIDAPYEKPPSPEITLDTSKQTIAECAAVILTYLTEKGLISSEPKEEAKPAKELEVAPAAPAAEAEAEKVPAAV

SEQ ID NO: 1754 - protein, 550 aa, Thermus thermophilus HB8
MNGSADAGPRPRKYVFITGGVVSSLGKGILTSSLGALLRARGYRVTAIKIDPYVNVDAGTMRPYEHGEVFVTADGAETDLDIGHYERFLDMDLSRGNNLTTGQVYLSVIQKERRGEYLSQTVQVIPHITDEIKERIRKVAEEQKAEIVVVEVGGTVGDIESLPFLEAIRQFRFDEGEGNTLYLHLTLVPYLETSEEFKTKPTQHSVATLRGVGIQPDILVLRSARPVPEEVRRKVALFTNVRPGHVFSSPTVEHLYEVPLLLEEQGLGRAVERALGLEAVIPNLSFWQEAVRVLKHPERTVKIAIAGKYVKMPDAYLSLLEALRHAGIKNRARVEVKWVDAESLEAADLDEAFRDVSGILVPGGFGVRGIEGKVRAAQYARERKIPYLGICLGLQIAVIEFARNVAGLKGANSTEFDPHTPHPVIDLMPEQLEVEGLGGTMRLGDWPMRIKPGTLLHRLYGKEEVLERHRHRYEVNPLYVDGLERAGLVVSATTPGMRGRGAGLVEAIELKDHPFFLGLQSHPEFKSRPMRPSPPFVGFVEAALAYQERA

SEQ ID NO: 1755 - protein, 278 aa, Bacillus anthracis str. Sterne
MWRDTMSAFLGELIGTALLIVLGGGVCAGVSLKKSFAKDSGWIVITMGWGLAVAVAAYVVGSISGAHLNPALTIGLAFKGAFPWGDVPGYIAAQMIGAIIGAVIVYLHYLPHWKETEDPGTKLGVFATGPAIPNTFANLLSEMIGTFVLVFGILAIGANKFADGLNPFIVGFLIVSIGLSLGGTTGYAINPARDLGPRIAHFFLPIAGKGGSNWKYAWIPVVGPILGGSLAGLFHQVVFEGKQNAALIYVIIATVIVLAISYMTSKKSGSNTNSRKVA

SEQ ID NO: 1756 - protein, 175 aa, uncultured archaeon GZfos9D1
MGKKPARKYTKVTGHAYVRKKYMGGIPGSKIALFDMGNLSMGMDFPVALSLVAKEACQIRHNALEAARIFANRYLVKEVGRNNFYLKIRPYPHHVLRENKIASGAGADRVSSGMRHAFGKAVSSAARVKPGQRILSVGIEAQNFDDAKEALRRASYKLPTPCRFIIDKGEELLGV

SEQ ID NO: 1757 - protein, 430 aa, Zea mays
MTGTVSKLAAPRPAAPPLRPASLRAAAIAFAPSPRRVRVSVAGRARIPSVIAMASAKEGNGAPTKKTSLHDLYELQGLSPWYDNLCRPVTDLLPLIASGVRGVTSNPAIFQKAISSSSAYDDQFKQLISGGKDAESAYWELVIKDIQDACSLFEPIYDETDGADGYVSVEVSPRLANDTQGTVEAAKWLHKVVNRPNVYIKIPATAECVPSIREVIANGISVNVTLIFSIARYEAVIDAYLDGLEASGLSDLSRVTSVASFFVSRVDTLIDKMLEKIGTPEALALRGKAAVAQAKLANRLYQKKFSGPRWEALAKKGAKKQRLLWASTGVKNPAYPDTLYIDSLIGPDTVNTMPDQALHAFIDHGTVSRTVDANVSEAEGVYSALEKLGIDWGEVGKQLELEGVDSFKKSFDSLLVSLQEKGNSLKTATV

SEQ ID NO: 1758 - protein, 399 aa, Candida tropicalis
MMNIDQHHQQLQQQSQAQAQAQAQAQAQAQAQAQAQAQAQAAAAAVAASSQRQVSFNVSDHYQILEIVGEGAYGIVCSAIHKPSNQKVAIKKIEPFERSMLCLRTLRELKLLKHFNHENIISILAIQRPLNFESFNEIYLIQELMETDLHRVIRTQNLTDDHIQYFIYQTLRALKAMHSANVLHRDLKPSNLLLNSNCDLKVCDFGLARSIASQEDNYGFMTEYVATRWYRAPEIMLTFQEYTTAIDVWSVGCILAEMLSGRPLFPGRDYHNQLWLIMEVLGTPNMEDYYNIKSKRAREYIRSLPFCKKIPFQELFSNKPGINPLALDLLEKLLIFNPAKRITVEDALKHPYLQLYHDPNDEPISDKIPEDFFDFDKKKDSLTIEDLKKMLYEEIMKPL

SEQ ID NO: 1759 - protein, 415 aa, Oryza sativa
LISFSPSNLPPLCRFRVSALQLLPNSGPRFARSRPPMVSGVAHRPDDDGGRAASTFQRPPQPAGARPSLATPPPSGGAQSASTSGGSAGSPSSRSEQHVPAAAGMAAGAAAASTPISENTFLRLNDLDIHGDDAPSSQAPTSKKKKRGARAVGPDKGGRGLRQFSMKVCEKVESKGRTTYNEVADELVAEFADPNNSILPPDPDNPNAQQYDEKNIRRRVYDALNVLMAMEIISKDKKEIQWKGLPRTSINDIEDLQTELVGLKSRIEKKNTYLQELQDQFVGMQKLIQRNEQLYGSGNIPSGGVALPFILVQTRPHATVEVEISEDMQLVHFDFNSTPFELHDDSFVLKAMSSCGEEQIDGIHDLISNGGESSSMPNIYRQQVQQPARSTNGTARLPSSPPIPGILKGRVKHEH

SEQ ID NO: 1760 - protein, 343 aa, Triticum aestivum
  misc_feature (49)..(49): Xaa can be any naturally occurring amino acid
  misc_feature (270)..(270): Xaa can be any naturally occurring amino acid
  unsure (1)..(343): unsure at all Xaa locations
HYRTSLYKKAGWHRSGIPGISSTHASGQQQQQPRHARAPLAASPPPPQXPQRASRWCPRQPRTASSSSSSSSSGGSPADLGLLPRRRVSPSSAGRIAGGAPPVRARDSRAECAGGRSSAEHIGVSLEGENRALEMSSTVPKSSNIFWHDCPVGKTDRQNLLKQKGCVVWITGLSGSGKSTLACTLGRELHTRGKLAYVLDGDNLRHGLNKDLGFAAEDRAENIRRVGEVAKLFADAGLVCIASFISPYRRDRESCRALLSDGSFIEVFFXTMSLELCEARDPKGLYKLARAGKIKGFTGIDDPYEAPLNCEIEIKEVDGVCPSPSDMAAQVITYLEDKGFLHE

SEQ ID NO: 1761 - protein, 3982 aa, Bacillus subtilis
MYTSQFQTLVDVIRERSSISDRGIRFIESDKNETVVSYRQLFEEAQGYLGYLQHLGIKPKQEIVFQIQENKSFVVAFWACILGGMIPVPVSIGEDDDHKLKVWRIWNILNHPFLIASEKVLDKIKKYAAEHDLQDFHHQLNEKSDIIQDQTYDYPASFYEPDADELAFIQFSSGSTGDPKGVMLTHHNLIHNTCAIGTALAIHSKDSFLSWMPLTHDMGLIACHLVPFITGINQNLMPTELFIRRPILWMKKAHEHKASILSSPNFGYNYFLKFLKNEPDWDLSHIKVIANGAEPILPELCDEFLKRCAAFNLKRSAILNVYGLAEASVGAAFSKIGKEFVPVYLHRDYLNLGERAVNVSKEDQNCASFVEVGQPIDYCQLRISDETNERVEDGIIGHIQIKGDNVTQGYYNNPESTEKVLTSDGWVKTGDLGFISESGNLVVTGREKDIIFVNGKNIYPHDIERVAIEMEEVDLGRVAACGVYDQKTQSGEIVLFVVYKKSPEKFAPLVKEIKKHLYKRGGWSIKEVLPIRKLPKTTSGKVKRYELARQYEAGNFSTESAAINECLESSPETSGQTPIHEIETELLSIFSEVLNGKKVHLADSYFDMGANSLQLSQIAERIEQKFGRELAVSDLFTYPSITDLAAYLSESRAEIKQDAAAKPSHVTPKDIAIIGMSLNVPGASTKSDFWNLLEKGEHSIREYPESRLKDAADYLKSIQSEFNESQFVKGGYLDEIDRFDYSFFGLAPKTAQFMDPNQRLFLQSAWHAIEDAGYAGGSMNGSRVGVYAGYSKVGYDYERLLSANYPEELHQYIVGNLPSVLASRIAYFLNLKGPAVTVDTACSSSLAAVHMACKSLMSGDCEMALAGGIRTSLLPICIGLDMESSDGYTKTFSKDSDGTGTGEGAAAVLLKPLQDAVRDGDHIYGVIKGSAMNQDGTTAGITAPNPAAQTEVIETAWKDAGIAPETLSFIEAHGTGTKLGDPVEFNGLCKAFEKYTAKKQFCAIGSVKSNIGHLFEAAGIVGLIKSVLMLNHKKNPPLAHFNEPNPLIHFHSSPFYVNQEAAEFTSGDEPLRGGVSSFGFSGTNAHVVLEEYISQSEYAPEDEHGPHLFVLSAHTEKSLYELAQQYRQYVSDDSQASLKSICYTASTGRAHLDHGIAMIVSGKQELSDKLTRLIQGDRNLPGVYIGYKNMKEMLPAHKEELNQQAAALIKQRLRTQDERITWLHRAAELFVQGAVIDWRALYSGETVQKTPLPLYPFERSRCWAEADQLRLNEDEKRGEAALNINQSKAHIESFLKTVISNASGIRAEELDLNAHFIGLGMDSIMLSQVKKAIADEFGVDIPMDRFFDTLTNLQSVIDYLADTVPSSFASAPPQENVPAQEIQVISEAQSESDRREGHQEHMLEKIIASQNQLIQDTLQAQLNSFNLLRNSGHHSDEKEYAKAQEKSIPSVKQGPPTVTAEKKAAQEAKPYVPFQPQNLNDQGHYTARQKQYLEDFIKKYADKTKGSKQYTDNTRFAHANNRNLSSFRSYWKEIVYPIIAERSDGSKMWDIDGNEYIDITMGFGVNLFGHHPSFITQVIDDSTRSSLPPLGPMSDVAGEVADRIRTCTGVERVAFYNSGTEAVMVALRLARAATGRKKVVAFSGSYHGTFDGVLGVAGTKGGAASANPLAPGILQSFMDDLIILHYNNPDSLDVIRSLGDELAAVLVEPVQSRRPDLQPQAFLKELRAITQQSGTALIMDEIITGFRIGLGGAQEWFGIQADLVTYGKIIGGGQPLGVVAGKAEFMNAIDGGTWQYGDDSYPQDEAKRTFVAGTFNTHPLTMRMSLAVLRHLQTEGEHLYEQLNQKTAYLVDELNRCFEQAQVPIRMVRFGSLFRFVSSLDNDLFFYHLNYKGVYVWEGRNCFLSVAHTADDIENIIQAVKDTVEDLRRGGFIPEGPDSPDGGGRKKSGTRELSPEQKQLVMASHYGNEASAALNQSIMLKVKGEMQYTSLKQAVRHIVDRHEALRTVIHPDDEVQQVLERMNIDIPVIDFTGHPHEHREPEIQKWLTEDAKRPFHFHEQKPLFRIHVLTSAHNEHLIVLTFHHIIADGWSIAVFVQELESNYAAIVQGKPISPKEADVSFRQYLDWQQAQIDSGHYEEGVRYWRRHFSEPIQQPILPSTASIRYPNGYEGDRCTVRLGRPLSEALRSLSIQMKNSVFVTMLGAFHLFLHQLTKQSGLVIGIPAAGQSHMKQHDLIGNCVNMIPVKNTSSSESTLSGYLGSMKESVNLAMRHQAVPMTLVARELPHDQVPDMRIIFNLDRPFRKLHFGKAEAEPVAYPVKCTLYDLFLNITDAHQEYVLDFDFNTNVISPEIMKKWGAGFTKLLQKMVEGDSIPLDAMMMFSDEEQHALQALYAEHQKRVSSIGSNTANFTEAYEAPVNETERQLARIWEELFGLERVGRSDRFLALGGNSLQATLMLSKVQKTFHQKVSIGQFFNHQTVKELARFIQNETKVVHLPMKAAEKKAYYPTSPAQQRVYFLHQLEPDQLAQNMFGHISITGKYDEQALISSLQQVMQRHEAFRTYFDIIDGDIVQKLENEVDFNVHVRTMSRDEFDAYSDRFVKPFRLDQAPLVRAELIKIENEQAELLIDMHHIISDGYSVNILTNELLALYHQKPLPDIEFEYKDFAEWQNQRLNDDAMKRQETYWLEQFQDEIPILDLPTDGSKAAERSSEGQRVTCSLQPDVIRSLQDLAQKAETTLYTVLLAAYNVLLHKYTGQEDIVVGTPASGRNHPDIEKIIGIFIQTIGIRTKPHANRTFTDYLEEVKRQTLDAFENQDYPFDRLVEKLNVQRETTGKSLFNTMFVFQNIEFHEIRHNECTFKVKERNPGVSLYDLMLTIEDAGQQIEMHFDYKPGRFTKDTIEQITRHYTAILNSLVEQPEMTLSSVPMLSETERHQLLTECNGTKTPYPHKETVYRWFEMQAEQSPDHEAVIFGNERYTYRQLNERANRLARTLRTKGVQADQFVAIICPHRIELIVGILAVLKAGGAYVPIDPEYPENRIQYMLRDSRAEVVLTQRSLLDQLPYDGDVVLLDEENSYHEEHSNFESDSDAHDLAYMIYTSGSTGNPKGVLIEHQGLADYIWWAKEVYVRGEKTNFPLYSSISFDLTVTSIFTPLVTGNTIIVFDGEDKSAVLSEIMRDSRIDMIKLTPAHLHVIKEMNIAGDTAIRKMIVGGENLSTRLAKSVSEQFKGRLDIFNEYGPTEAVVGCMIYHFDAVRDKREFVPIGTPAANTDIYVADASRNLVPIGVIGEIYISGPGVARGYWNRPDLTEEKFVENPYVPGAKMYKSGDLAKRLKDGNLVYIGRVDEQVKIRGHRIELGEIEAAMHNAEAVQKAAVTVKEEEDGLKQLCAYYVSDKPIAAAQLREQLSSGLPDYMVPSYFVRLEHMPLTSNGKINRKALPAPESSLQQTAEYVPPGNETESKLTDLWKEVLGISHAGIKHNFFDLGGNSIRAAALAARIHKELDVNLSLKDIFKFPTIEQLADKALHMDKNRYVPIPAAKEMPYYPVSSAQRRMYLLSHTEGGELTYNMTGAMKVEGTIDPERLNAAFRKLIARHEALRTSFDLYEGEPAQRIHQNVDFTIERIQASEEEAEDRVLDFIKAFDLAKPPLMRAGLIEIEPARHVLVVDMHHIISDGVSVNILMKDLSRIYEGNEPGPLSIQYKDFAVWQQSDLQKRNIKSQEAYWLDQFHGDIPVLDIPADYERPAIRDYEGESFEFLIPEHLKQRLSQMEEDTGATLYMILLAAYTILLSKYSGQEDIIVGTPSAGRTHLDVEPVVGMFVNTLVIRNHPAGRKTFDAYLNEVKENMLNAYKNQDYPLEELIQHLHLPKDSSRNPLFDTMFVLQNLDHAELIFDSLQLKPYPFHHSVAKFDLTLSIQADRDNYYGLFEYSKKLFKKSRIEVLSNDYLHILSAILEQPSILIEHIGLSGSNEEEENALDSIQLNF

SEQ ID NO: 1762 - protein, 271 aa, Thermus thermophilus
MTTLEAFAKARSEGRAALIPYLTAGFPSREGFLQAVEEVLPYADLLEIGLPYSDPLGDGPVIQRASELALRKGMSVQGALELVREVRALTEKPLFLMTYLNPVLAWGPERFFGLFKQAGATGVILPDLPPDEDPGLVRLAQEIGLETVFLLAPTSTDARIATVVRHATGFSYAVSVTGVTGMRERLPEEVKDLVRRIKARTALPVAVGFGVSGKATAAQAAVADGVVVGSALVRALEEGRSLAPLLQEIRQGLQRLEANPGLKESSKKPLS

SEQ ID NO: 1763 - protein, 792 aa, Geobacter sulfurreducens PCA
MDFTKISALHYRLPSPVRQFIVLLSIIFLIEMLLMAVLPQVTGREVEFKDALVDSMGLVTVAAPFLWAFIVRPLRRTAVAAVFREEVLLRQMVDGVITFGEDGTIRSLNPAAERMFGYRDDEAAGMAIDCLLSADGGYFRFAVQASGGHGTRQLAYELEGIRRDGSRFVADLSVSRIVFEDHRAVIGIVRDITARKRDEQNLLVFKRAIESSVNGITITDATNGENLIIYVNPAFERMTGYAGHEVLGKNPRFLRGDDRDQVELRKLAMALEERREGYFVLRNYRKDGSQFMNELYVAPVRDRDGAVTNYIGIMNDISDQRRYEEQLVYQATHDPLTGLPNRNLLQDRLGQALALESFRRRNPIGVMFLDLDNFKKINDTLGHTVGDMLLKAVANRLRNCVRGGDTVSRLGGDEYILILPNVKEMHDVTTVAKKLLGVFSTPFLLMGHELYITASIGITLFPSDGDTVDALLKNADAAMYHAKEQGKNNYQFYSEEMNTRVFERMALETSLHRAIRQHEFLLCYQPRVDLRTGRISGVEALVRWNHPEMGLVPPARFIPLAEETGLIVPIGEWVLRTACAQNKAWQDAGLPPLRMAVNLSARQFRQENLIQMVADALAETGLDPRWLELELTESLLMERAEQSVSILRSLADMGIDIAVDDFGTGYSSLGYLKRFPITNLKIDQSFIRDIASDPDDAILVRTIITMAHGLGMKTVGEGVESLEQIDFLYRHGCEEVQGYYFSRPLTAEGCEELLREERFLDLRALRDGLPGQRSEERIRALASSADDCRVTA

SEQ ID NO: 1764 - protein, 577 aa, Magnaporthe grisea 70-15
MDKTELGAAGVHPVTSNAAGSQEKVTIQEDNKRGEDWYTRNGLNLRSFQRRDEDSGTGTAELDRTMKGRHLHMIAIGGSIGAGFFVGSGGALGSGGPGSLLINFLIIGVMMFNVVYALGELSIMYPVSGGFYTYSARFIDPSWGFAMGWNYVFQWAIVLPLELTVCGITISYWNDSISVGVWITVFWLAILIINIFGTLGYAEEEFASSAFKLLATCIFLVIAFVLVLGGGPKDGRYNEYWGARLWVDPGPFQNGFRGFCSVFVTAAFAFSGTELVGLAAAEARNPVKEMPGAIKQVFWRITLFYILGLFFVGLLIDARDPNLLGSSSHDVHASPFVLVGKYAGLKGFDHFMNITILVSVLSIGVSAVYGGSRTLTALSQQGYAPKIFSYIDRSGRPLYSVGIILVFGLLAYVNLNAQGEVVFNWLLSLSSLAALFTWGSICLAHIRFRKAWAHNGHTTDEIPFKAIGGVWGSYLGLTLNILVLAAQIFAAIAPPPKAGEEPTFSDAEGFFSAMLALPIVILFWIIGYLWKREGWLKTEQIDVDSGRRELPWDEINAYRAELAAMPAWKRIVHTVFV

SEQ ID NO: 1765 - protein, 295 aa, Nicotiana tabacum
KGGIRYHPEVDLDEVNALAQLMTWKTAVADIPYGGAKGGIGCKPKDLSRSELEPLTRVFTPKIHELIGINTDVPAPDMGTNAQTMAWILDEYSKFHGHSPAIVTGKPIDLGGSLGREAATGRGVVYATEALLAEYGKNIKDLTFAIQGFGNVGAWAAKLIHERGGKVIAVSDITGAVKNPNGLDIPALLNHKEATGKLIDFCGGDVMNSDEVLTHECDVLIPCALGGVLNRENADNVKAKFIIEAANHPTDPEADEILSKKGIVILPDIYANAGGVTVSYFEWVQNIQGFMWDEE

SEQ ID NO: 1766 - protein, 577 aa, Zea mays
  misc_feature (174)..(174): Xaa can be any naturally occurring amino acid
  unsure (1)..(577): unsure at all Xaa locations
WISDIRGALSVGVLTYYLQLWDLISGIELQPEVDDKHIFSIAPNGVYSAKSTYEGLFLGSVTFGHYKRIWKSWALPKCRFFLWLVAHKRCWTTDRLAKRGLNHPEQCLLCDQEEENMDHLLVQCSFSREFWYLLLRKFGLHSLAPQPTANSFLGWWEVVGGAVLGLTKKGLNSXILGAWTLWNHRNKCIFDGCNPSMSLCLRAADEEIRRWKVAGAKDLAHLAAPLVNILTHTDEIKLKAKRIAAVEKKKRCLAHASVSTKEASGGLQRCADYVGMPTAPSESNKEPRPEECVNELGIKQPVQHVASEEQEGVQDDAKADANVMNVSFGKGKSEDSFGTINGTNSGDKIESPSGLAERTLTQPTTKGCSKQRGRSSNGRGNRTKKIEEGNASGLIAVAPESEDDDDAPFIDGNQAEGGALWDIFRREDVSKLHDYLMKHADEFRHCNFEPVKQVTHPIHDQCFYLTIEHKRKLKEEYGVEPWTFEQKLGEAVFIPAGCPHQVRNLKSCIKVALDFVSPENVRECIRLTEGFRLLPKWHKVNEDKLEVKKIALHAFNQAIKDITDESSNSNESKWIRR

SEQ ID NO: 1767 - protein, 295 aa, Nicotiana tabacum
KGGIRYHPEVDPDEVNALAQLMTWKTAVANIPYGGAKGGTGCSPSDLSISELERLTRVFTQKIHDLIGIHTDVPAPDMGTNPQTMAWILDEYSKFHGYSPAVVTGKPIDLGGSLGRGAATGRGVLFAAEALLRDHGKSIAGQRFVVQGFGNVGSWAAQLITEQGGKIVAVSDITGAIKNKNGIDIASLLKHVKENRGVKGFHGADSIDPNSILVEDCDVLIPAALGGVINRDNARDIKAKFIVEAANHPTDPEADEILAKKGVVILPDIYANSGGVTVSYFEWVQNIQGFMWDEE

SEQ ID NO: 1768 - protein, 397 aa, Zea mays
  misc_feature (21)..(21): Xaa can be any naturally occurring amino acid
  unsure (1)..(397): unsure at all Xaa locations
MEAPPVPELMDLDAPPPAGSXAVSDKKKEGEGGDTVTGHIISTTIGGKNGEPKRTISYMAERVVGTGSFGIVFQAKCLETGETFAIKKVLQDRRYKNRELQLMRAMEHPNVICLKHCFFSTTSRDELFLNLVMEFVPETLYRVLKHYSNANQRMPLIYVKLYMYQLFRGLAYIHNVPGVCHRDVKPQNVLVDPLTHQVKLCDFGSAKVLVPGEPNISYICSRYYRAPELIFGATEYTTSIDIWSAGCVLAELLLGQPLFPGESAVDQLVEIIKVLGTPTREEIRCMNPNYTEFRFPQIKAHPWHKIFHKRMPPEAIDLASRLLQYSPSLRCSALDACAHPFFDELRAPNARLPNGRPFPPLFNFKHELANASPDLINRLVPEHIRRQNGVNFGHIGS

SEQ ID NO: 1769 - protein, 184 aa, Arabidopsis thaliana
MQGTSKDNGGRHPLYRGVRQRKNSNKWVSEIREPRKPNRIWLGTFSTPEMAAIAYDVAALALKGSQAELNFPNSVSSLPAPTSMSPADIQAAAASAAAAFGAARDAIVMANNNSQTSGVACMNSSYDNTNMNGFMDEDLVFDMPNVLMNMAEGMLLSPPRPTVFDAAYDADGFPGGDDYLWNFP

SEQ ID NO: 1770 - protein, 309 aa, Yarrowia lipolytica CLIB122
MTSIDFTMNNGKTIPAIGLGTWKSTTEEVAGAVECALTEGGYRHIDTAFNYRNEDAVGLGIKRAMEKGVKREDIFVTTKIWVTYHDRVEENLNMSLERLGLDYVDMLLIHWPVPLNPNGNDPVYPLRPDGSRDIDESGSQPKTWKQMEAVLKTGKTKSIGVSNFSIPYLQELLKEATVVPAVNQVELHPLLPQLELMEFCKKNNIIMTAFSPFGSVGGPLLKNELVLKLADKYETSPGGILTSYHIGNGTVVIPKSVTNSRIIENGKSAVNLSKEDLQALNDLHKTEGIHRTSKPKWGVDLGFPDFDFC

SEQ ID NO: 1771 - protein, 503 aa, Zea mays
  misc_feature (242)..(242): Xaa can be any naturally occurring amino acid
  unsure (1)..(503): unsure at all Xaa locations
MEGAGRDANPLSGYRIGKTLGIGSFGKVKIAEHILTGHKVAIKILNRKKIRSMDMEEKVKREIKILRLFMHPHIIRLYEVIDTPADICVVMEYVKSGELFDYIVEKGRLHEEEARHFFQQIISGVEYCHRNMVAHRDLKPENLLLDSKCNVKIADFGLSNIMRDGHFLKTSCGSPNYAAPEVISGKLYAGPEVDVWSCGVILYALLCGTLPFDDENIPNLFKKIKGGIYTLPSHLSPSARDXFPRMLVVDPMKRITIREIREHVWFKIRLPRYLAVPPPDTAQQVKKVDEETLNDVIKMGWDKNQLIESLQNRKENEATVAYYLLLDNRLRTTSGYLGSEFQESMDSSFSQVIAETPTSATELRQHGFSESPGSGLRQHFAAERKWALGLQSRAHPREIISEVLKALQELNVYWKKIGHYNMKCRWSPGCLESMMHNSDSFSAESAIIETDVFMEKSTPTVKFEIQLYKTRDEKYLLDLQRVSGSHLLFLDLCSAFLTQLRVL

SEQ ID NO: 1772 - protein, 341 aa, Pseudomonas putida KT2440
MLVTKQPVLRRFWYALLPMTALEDGPKPFTLLGEALVLWKRPDGTPVAMRDRCCHRTAKLSKGFVSAEGNIACGYHGWEYDCTGTCVKIPQSPTGAIPPGAAVKAYHCQEKYGYAWVSLDDPLQPIPEFPEDGAPGYRRIFQFYEEWKTSPLRVMENSFDNSHFSFVHKANFGLFDQPQPASYEFRETDYGFEAETRVPIRNPEASFRITGTTEPITQRHLLNRYYLPFSRRFGCMYPDSGIHHIIYNCATPIDDNRLMLVQWLYRNDSEEQCSTQELIDWDAAITAEDRDILEATDPDACVDTRRRVELHMPSDKPGLVIRRQLLGLLEAHGESEVFLSH

SEQ ID NO: 1773 - protein, 586 aa, Bacillus anthracis str. A2012
MLKEAIYHRPKDNYAYAYDEKTIHIRIRTKRDDVQSTTLIYGDPYEWKDGKWISSSTPMKKTGSTALFDYWFISIEPKFKRLRYGFELKNDTDTLIYAERGFFSTTPNDDVGNFFCFPFIHANDVFKAPSWIKDTVWYQIFPERFANGDHTLNPENTLPWGSAEPTPTNFFGGDFAGIIQNLDYLVKLGISGIYFTPIFKAHSNHKYDTIDYMEIDPQFGTKETFKELVQACHTHGIKVMLDAVFNHSGYFFDKFQDVLQNGEQSAYKEWFHIHEFPIRTEPLPNYDTFAFTPYMPKLNTAHPDVKEYLLEVGRYWVREFNIDGWRLDVANEVDHNFWREFRSEIKALNSEVYILGEIWHDALPWLQGDQFDAVMSYPVTNALLSYFANDSIKANEFMKQITESLHSYSMNVNEAAFHLLDSHDTPRILTTCNGDKNKLKLLYVFHLSFIGSPCIYYGDEIGMDGGMDPDCRKCMVWDTEEQDHTLFTHVQTLISLRKQYKAFGGHGTFQFIEANDEYNYISYTKTYEDETIFFVLNPTNSDITASLPLHVTGKKIINIYTNEEFSAEASVLQVTLPPYGFSILKW

SEQ ID NO: 1774 - protein, 816 aa, Zea mays
  misc_feature (645)..(645): Xaa can be any naturally occurring amino acid
  misc_feature (675)..(675): Xaa can be any naturally occurring amino acid
  unsure (1)..(816): unsure at all Xaa locations
VAFSHRNPRRPPAPRLPRRPRFPPPTRDAAAGRVHTTAGMEAAAAAPHLLHCGGFGRVAHLPALHRRGQFPRVRAVATEPKPSTSTSSSSRGRTRSRNDLSDTRFGEVSKEIQRVRKQMEQDEQLATLMRGLRGQNLRDEQFADDNVRLRLVEVESADNNEGLPLVYSPEIISAYWGKRPRAVATRVVQLLSVAGGFISHLVSDLINKKLKENEVARAIELREIVTSLGPAYIKLGQALSIRPDILSPAAMTELQKLCDKVPSFPDDIAMALLEEELGQPWQAIYSELSPSPIAAASLGQVYKGRLKETGELVAVKVQRPFVLETVTIDLFIIRNLGLVLRRFPQVSIDVVGLVDEWAARFFEELDYVNEGENGTYFADVMKEDLPQVVVPKTYHKYTSRKVLTTQWIEGEKLSQSTEDDVGSLVSVGVICYLKQLLDTGFFHADPHPGNMIRTPDGKLAILEFPRVTKLTDDQKYGMIEAIAHLIHRDYDAIVKDFVKLGFIPEGVNSVVAAEVLAKVFDQALEGGGAKNINFQELAADLAQITFDYPFRIPPYFALIIRAIGVLEGIALVGDPEFAIVDEAYPYIAQRLLTDESPRLRSALRYTIYGKTGVFDAERFIDVIQPFEEFYPFNRKTVGGENLKGXMLNLLEWVGQPSTSLVPVFAMAVAQPEQPXVKARAALAFLLSERGTFFREFILDEIVKAIDAISREQLIQIAASFGIGNAAPVFSMVPVRARALLPPITEEDRVILNTVEKVVKFLTSGTATPTVGGDVNVVSVVQKLLPVLPGISSKILPDVLSRLSSRVFARIIRETFL

SEQ ID NO: 1775 - protein, 291 aa, Yarrowia lipolytica CLIB122
MSNSAKAAVVPPAPTAEDIARANAGSKEEPVFQAKNFLSKFRLDGKVAIVTGGARGLGFSMAEGLCSVGLKGIAILDVQQDLGLDAIEKLHKAYGVQAQFYKADVRDEESVNEIIDRVVHDLGSVDVVVNSAGVADLVHAAEYPADKFRRVIDINLNGSFLVTQAAARHMIKQGTGGTVVFIASMSGSIVNWPQPQSAYNASKAAVKHLSKSLAAEWAVHNIRCNSISPGYMDTALNRAYNTLFEEWKDRTPLGRLGDPDELTGACIYLASDASSYVTGSDIIIDGGYTII

SEQ ID NO: 1776 - protein, 558 aa, Bacillus anthracis str. A2012
MEKQWWKESVVYQIYPRSFMDSNGDGIGDLRGIISKLDYLKELGIDVIWLSPVYESPNDDNGYDISDYCKIMNEFGTMEDWDELLHEMHERNMKLMMDLVVNHTSDEHNWFIESRKSKDNKYRDYYIWRPGKEGKEPNNWGAAFSGSAWQYDEMTDEYYLHLFSKKQPDLNWDNEKVRQDVYGMMKFWLEKGIDGFRMDVINFISKEEGLPTVETEEEGYVSGHKHFMNGPNIHKYLHEMNEEVLSHYDIMTVGEMPGVTTEEAKLYTGEERKELQMVFQFEHMDLDSGEGGKWDVKPCSLLTLKENLTKWQKALEHTGWNSLYWNNHDQPRVVSRFGNDGMYRIESAKMLATVLHMMKGTPYIYQGEEIGMTNVRFESIDEYRDIETLNMYKEKVMERGEDIEKVMQSIYIKGRDNARTPMQWDDQNHAGFTTGEPWITVNPNYKEINVKQAIQNKDSIFYYYKKLIELRKNNEIVVYGSYDLILENNPSIFAYVRTYGVEKLLVIANFTAEECIFELPEDISYSEVELLIHNYDVENGPIENIPLRPYEAMVFKLK

SEQ ID NO: 1777 - protein, 575 aa, Arabidopsis thaliana
MLEKVETFDMNRVIDEFDEMTRNAHQVQKQTLKEILLKNQSAIYLQNCGLNGNATDPEEAFKSMVPLVTDVELEPYIKRMVDGDTSPILTGHPVPAISLSSGTSQGRPKFIPFTDELMENTLQLFRTAFAFRNRDFPIDDNGKALQFIFSSKQYISTGGVPVGTATTNVYRNPNFKAGMKSITSPSCSPDEVIFSPDVHQALYCHLLSGILFRDQVQYVFAVFAHGLVHAFRTFEQVWEEIVTDIKDGVLSNRITVPSVRTAMSKLLTPNPELAETIRTKCMSLSNWYGLIPALFPNAKYVYGIMTGSMEPYVPKLRHYAGDLPLVSHDYGSSEGWIAANVTPRLSPEEATFAVIPNLGYFEFLPVSETGEGEEKPVGLTQVKIGEEYEVVITNYAGLYRYRLGDVVKVIGFYNNTPQLKFICRRNLILSINIDKNTERDLQLSVESAAKRLSEEKIEVIDFSSYIDVSTDPGHYAIFWEISGETNEDVLQDCCNCLDRAFIDAGYVSSRKCKTIGALELRVVAKGTFRKIQEHFLGLGSSAGQFKMPRCVKPSNAKVLQILCENVVSSYFSTAF

SEQ ID NO: 1778 - protein, 419 aa, Ralstonia eutropha JMP134
MQRIAMISEHASPLASVGSVDSGGQNVYVAHLARQLGKSGYLVDVFTRRDKALLPDVVAFAPNVRVVHVPAGPAVFVPKEQLLSFMPAFGDSMVDFMRRDAIGYDVLHANFFMSGVAAMRAREVLDIPLVMTFHALGKVRRLHQGSADGFPDNRFEIEDELVRHADRVVAECPQDLDDLATLYGGDPERIDIVPCGFDEEEFAPLDRAEARRALDWDADVFTVLQLGRLVPRKGIDNVIRAIGHLRRDFRIPARLYVVGGNAEQPSVEATPEIGRLQGVADEAGVSDCVTFVGRRRRSQLCHFYSASDVFVTTPWYEPFGITPVEAMACGVPVVGADVGGIRSTVVDGETGYLVPPHAPEALADRLARLAGDRALARRMGAAGLQRAHANYTWMSVARTMEQVYARVMRAERPARRVAA

SEQ ID NO: 1779 - protein, 447 aa, Arabidopsis thaliana
MSDCVSETFSAIRTVRSFSGEKRQMSIFGSQILAYKLSGLKLGTFKSINESITRVAVYISLLALYCLGGSKVKTLFCTLFFLVLILKISPTQGELAVGTVVSFIGYTFTLTFAVQGLVNTFGDLRGTFAAIDRINSILNAVDIDEALAYGLERDIHTKKVQDENLKLFLSAGPNVNIRHLDKYYMSNLKSTNNLRTLTWAGDVCLDDVHFAYPLRPDVKVLDGLSLTLNSGTVTALVGSSGAGKSTIVQLLARFYEPTQGRITVGGEDVRMFDKSEWAKVVSIVNQEPVLFSLSVAENIAYGLPNEHVSKDDIIKAAKAANAHDFIISLPQGYDTLVGERGGLLSGGQRQRVAIARSLLKNAPILILDEATSALDAVSERLVQSALNRLMKDRTTLVIAHRLSTVQSANQIAVCSDGKIIELGTHSELVAQKGSYASLVGTQRLAFE

SEQ ID NO: 1780 - protein, 603 aa, Solanum tuberosum
MNSKEEGAYRLFSEPSPRYYDEKKVFQKSNLFHMLPKGIPVPPSGPSRRHNGDATVAPIQWMKPCNMSSLKGVQLTFQQLPKELKRPFQLDKYQLPSIRRRFDKANFFVLQNMGLGGDGEKGESWDVEKSKGKKKKEVTEEETGCWTKLWFIGSCISSRSKVDSSISGISTHCDKSTYVLTSCIALAESKSTNTSRDQPVAPIISSTTTSNAESNSSTSKLEEELKVSSRLRKFAFNDLKLATRNFRPESLLGEGGFGCVFKGWIEENGTAPVKPGTGLTVAVKTLNHDGLQVLSIWQAEVNFLGDLVHPNLVKLIGYCIEDDQRLLVYEFMPRGSLENHLFRRSMPLPWSIRMKIALGAAKGLAFLHEEAERPVIYRDFKTSNILLDADYNAKLSDFGLAKDGPEGDKTHVSTRVMGTYGYAAPEYVMTGHLTSKSDVYSFGVVLLEMITGRRSMDKNRPNGEHNLVEWARPHLGERRRFYRLVDPRLEGHFSIKGAQKAAQLAARCLSRDPKARPMMSDVVEALKPLPNLKDMASSSYYFQTMQADRVGSSPSTKNGVRTQGSFSRNGQQHPRSLSIPNGSHASPYHQQFPQNSPKPNGKT

SEQ ID NO: 1781 - protein, 604 aa, Triticum turgidum subsp. dicoccoides
MAALVTSQLATSGTVLSVTDRFRRPGFQGLRPRNPADAALGMRTVGASAAPKQSRKPHRFDRRCLSMVVRATGSGGMNLVFVGAEMAPWSKTGGLGDVLGGLPAAMAANGHRVMVISPRYDQYKDAWDTSVISEIKVVDRYERVRYFHCYKRGVDRVFVDHPCFLEKVRGKTKEKIYGPDAGTDYEDNQQRFSLLCQAALEVPRILDLNNNPHFSGPYGEDVVFVCNDWHTGLLACYLKSNYQSNGIYRTAKVAFCIHNISYQGRFSFDDFAQLNLPDRFKSSFDFIDGYDKPVEGRKINWMKAGILQADKVLTVSPYYAEELISGEARGCGLDNIMRLTGITGIVNGMDVSEWDPIKDKFLTVNYDVTTALEGKALNKEALQAEVGLPVDRKVPLVAFIGRLEEQKGPDVMIAAIPEIVKEEDVQIVLLGTGKKKFERLLKSVEEKFPTKVRAVVRFNAPLAHQMMAGADVLAVTSRFEPCGLIQLQGMRYGTPCACASTGGLVDTIVEGKTGFHMGRLSVDCNVVEPADVKKVVTTLKRAVKVVGTPAYHEMVKNCMIQDLSWKGPAKNWEDVLLELGVEGSEPGIVGEEIAPLALENVAAP

SEQ ID NO: 1782 - protein, 1188 aa, Mycobacterium leprae TN
MWRQQSISHRKESVMSTITKQEKQLARRVDDLTANDPQFAAAKPDPAVAAALAQPGLRLPQIIQTALDGYAERPALGQRVAEFTKDPKTGRTSMELLPSFETITYRQLGDRVGALARAWRHDLLHAGYRVCVLGFNSVDYAIIDMALGVIGAVAVPLQTSAAITQLQSIVTETEPSMIATSVNQLPDTVELILSGQAPAKLVVFDYHPEVDEQHDAVATARARLADSSVVVESLTEVLGRGKTLPATPIPVADDSADPLALLIYTSGSTGAPKGAMYLQSNVGKMWRRSDGNWFGPTAASITLNFMPMSHVMGRGILYGTLGNGGTAYFAARSDLSTLLEDLKLVRPTELNFVPRIWETLYDESKRAVDRRLANSGSADRAAIKAEVMDEQRQSLLGGRYIAAMTGSAPTSPELKHGVESLLEMHLLEGYGSTEAGMVLFDGEVQRPPVIDYKLVDVPDLGYFSTDQPYPRGELLLKTQNMFPGYYKRPEVTATVFDSDGYYQTGDIVAEVGPDRLVYVDRRNNVLKLAQGQFVTVAKLEAAFSNSPLVRQIYIYGNSAHPYLLAVVVPTEDALATNDIEVLKPLIIDSLQKVAKEADLQSYEVPRDLIVETTPFSLENGLLTGIRKLAWPKLKQHYGARLEQLYADLVEGQANALHVLKQSVANAPVLQTVSRAVGTILGVATTDLPSNAHFTDLGGDSLSALTFGSLLRELFDIDVPVGVIVSPVNNLVAIADYIERERQGTKRPTFIAIHGRDAGKVHASDLTLDKFIDVSTLTAAPVLAQPGTEVRTVLLTGATGFLGRYLALKWLERMDLVEGKVIALVRAKSNEDARARLDKTFDSGDPKLLAHYQELATDHLEVIAGDKGEVDLELDRQTWRRLADTVDLIVDPAALVNHVLPYSELFGPNTLGTAELIRIALTSKQKPYIYVSTIGVGNQIEPAKFTEDSDIRVISPTRNINNNYANGYGNSKWAGEVLLREAHDLCGLPVTVFRCDMILADTSYAGQLNVPDMFTRMMLSLAATGIAPGSFYELDAESNRQRAHYDGLPVEFIAEAISTLGDQSLHDRDGFTTYHVMNPHDDGIGMDEFVDWLIDAGCPIQRINDYDEWLRRFEISLRALPERQRHSSLLPLLHNYQKPEKPLHGSLAPTIRFRTAVQNANIGQDKDIPHISPAIIAKYVSDLQLLGLV

SEQ ID NO: 1783 - protein, 605 aa, Triticum turgidum subsp. dicoccoides
MAALVTSQLATSGTVLGITDRFRRAGFQGVRPRSPADAPLGMRTTGASAAPKQQSRKAHRGTRRCLSMVVRATGSAGMNLVFVGAEMAPWSKTGGLGDVLGGLPPAMAANGHRVMVISPRYDQYKDAWDTSVVSEIKVADEYERVRYFHCYKRGVDRVFVDHPCFLEKVRGKTKEKIYGPDAGTDYEDNQLRFSLLCQAALEAPRILDLNNNPYFSGPYGEDVVFVCNDRHTGLLACYLKSNYQSSGIYRTAKVAFCIHNISYQGRFSFDDFAQLNLPDRFKSSFDFIDGYDKPVEGRKINWMKAGILQADKVLTVSPYYAEELISGEARGCELDNIMRLTGITGIVNGMDVSEWDPAKDKFLAANYDVTTALEGKALNKEALQAEVGLPVDRKVPLVAFIGRLEEQKGPDVMIAAIPEILKEEDVQIVLLGTGKKKFERLLKSVEEKFPSKVRAVVRFNAPLAHQMMAGADVLAVTSRFEPCGLIQLQGMRYGTPCACASTGGLVDTIVEGKTGFHMGRLSVDCNVVEPADVKKVVTTLKRAVKVVGTPAYHEMVKNCMIQDLSWKGPAKNWEDVLLELGVEGSEPGVIGEEIAPLAMENVAAP

SEQ ID NO: 1784 - protein, 571 aa, Sulfolobus tokodaii str. 7
MSEKLIELAKRRGIFWPSYEIYGGVAGLYDIGPIGVRIKNKIIELWRRYFIYDNSEFVVEIETPMITPYKVLEASGHVENFTDPIVECTKCHKIYRADHLIEELAKINVEGLSPSELDRIIREKGLKCPACGGELGEVRLFNLLFTTNIGPYTGNQGFLRPETAQGMFTSFKRVFEAFRQKLPLGIAQVGRVARNEISPRQGLIRMREFTIMEVEFFFDPESNVNPPLEKFGNMKLNILRGEDKLKNEKPKEYSIEELLKEKIVLNPWMLYWMATAAKFVTALGMKSYYFEEKLPHERAHYSKQTFDQIVVIGDEKVEISGHAYRTDYDLSRHMKYSGQDMTVFKKYDKPKTIKRKIVVINKDSLNKEDKEFVKNFMSFISSKKPEEIEEFINANEKVNGKNISNYVKILEKEEKVNGEKIIPHVVEPSFGVERCLYLTLLNAYKEKEGRIVLSLPKYLAPYDVAVFPLLEKEELINKAKEVYNLVRERFDTIFDDSGSIGKRYARADEIGVPYSITIDPQTLVDNSVTIRDRDTWQQIRVNINDIVSVLERLFKGEEFNKVGKVINNENE

SEQ ID NO: 1785 - protein, 604 aa, Triticum turgidum subsp. durum
MAALVTSQLATSGTVLSVTDRFRRPGFQGLRPRNPADAALGMRTVGASAAPKQSRKPHRGNRRCLSMVVRATGSGGMNLVFVGAEMAPWSKTGGLGDVLGGLPAAMAANGHRVMVISPRYDQYKDAWDTSVISEIKVVDRYERVRYFHCYKRGVDRVFVDHPCFLEKVRGKTKEKIYGPDAGTDYEDNQQRFSLLCQAALEVPRILDLNNNPHFSGPYGEDVVFVCNDWHTGLLACYLKSNYQSNGIYRTAKVAFCIHNISYQGRFSFDDFAQLNLPDRFKSSFDFIDGYDKPVEGRKINWMKAGILQADKVLTVSPYYAEELISGEARGCELDNIMRLTGITGIVNGMDVSEWDPIKDKFLTVNYDVTTALEGKALNKEALQAEVGLPVDRKVPLVAFIGRLEEQKGPDVMIAAIPEIVKEEDVQIVLLGTGKKKFERLLKSVEEKFPTKVRAVVRFNAPLAHQMMAGADVLAVTSRFEPCGLIQLQGMRYGTPCACASTGGLVDTIVEGKTGFHMGRLSVDCNVVEPADVKKVVTTLKRAVKVVGTPAYHEMVKNCMIQDLSWKGPAKNWEDVLLELGVEGSEPGIVGEEIAPLALENVAAP

SEQ ID NO: 1786 - protein, 604 aa, Triticum turgidum subsp. durum
MAALVTSQLATSGTVLGITDRFRRAGFQGVRPRNPADAALVMRTIGASAAPKQSRKAHRGSRRCLSMVVRATGSGGMNLVFVGAEMAPWSKTGGLGDVLGGLPPAMAANGHRVMVISPRYDQYKDAWDTSVVSEIKVADEYERVRYFHCYKRGVDRVFVDHPCFLEKVRGKTKEKIYGPDAGTDYEDNQLRFSLLCQAALEAPRILDLNNNPYFSGPYGEDVVFVCNDWHTGLLACYLKSNYQSNGIYMTAKVAFCIHNISYQGRFSFDDFAQLNLPDRFKSSFDFIDGYDKPVEGRKINWMKAGILQADKVLTVSPYYAEELISGEARGCELDNIMRLTGITGIVNGMDVSEWDPTKDKFLAVNYDVTTALEGKALNKEALQAEVGLPVDRKVPLVAFIGRLEEQKGPDVMIAAIPEILKEEDVQIVLLGTGKKKFERLLKSVEEKFPNKVRAVVRFNAPLAHQMMAGADVLAVTSRFEPCGLIQLQGMRYGTPCACASTGGLVDTIVEGKTGFHMGRLSVDCNVVEPADVKKVVTTLKRAVKVVGTPAYHGMVKNCMIQDLSWKGPAKNWEDVLLELGVEGSEPGVIGEEIAPLAMENVAAP

SEQ ID NO: 1787 - protein, 331 aa, Geobacter sulfurreducens PCA
MHADSHLDRSITGRLKYAIALTALTLVAEIVGGIWTNSLALLSDAAHVFLDLFALVLSLAAIKLASYPASDTKTFGWHRAEVFASFINGATVFLMALGIFYEAVGRLMNPEAVKSLPMLLIATLGLVMNLISATALHGHSHDDLNVRSAFLHVVGDAAASVGVIVGGLIMYFTGWYVLDALISIGIGCVIFAGSWRVLREAAHILLEGVPRGMSTQQVANEMAGVEGVNAVHQMNIWTICSHILALSAHVDVKPEYKGQQAEVLRQIEQLLFERYHITHTTLQAECTRCVDGPVIKDLRHRPRHGQSHDDHHHAHAHCTHGPHGHHHGHSH

SEQ ID NO: 1788 - protein, 269 aa, Zea mays
MRKRERENPCGICGHYHKYEEGEVCGVCGHRWKPSDGEGAPSRHESAFPTEVLKDFLFLGSYDNASRSEVLRTLSISHILNTVPDCHNLYKNSFTYHSLQRDRPLDFDEANQYLEKCERDKSRVLVHCMTGKNRSAAIVAAFLMKSRGWRLAQSFQWVKDRRPQVQLTDASQKELLEYELKLFGPSTQTLVPTESFASLGFGYTKPAGDMQTPVFNQTTMPSIFERFNPNDRPTNFTFGVERKAEANPRDNNSDGRVNPTSTENLMDSS

SEQ ID NO: 1789 - protein, 170 aa, Silicibacter pomeroyi DSS-3
MSLERAVLAGGCFWGMQDLIRKMPGVDRTRVGYTGGDVPNATYRNHGSHAEGIEIWFDPTRISFRQLLEFFFQIHDPTTVNRQGNDLGTSYRSAIYYVDEAQKAVALDTIADVDASGLWPGRVVTEVEPVGDFWEAEENHQDYLEKHPNGYTCHFARADWVLPKRADAAE

SEQ ID NO: 1790 - protein, 358 aa, Mycoplasma pneumoniae M129
MAILIKNKVPTTLYQVYDNEGKLMDPNHKITLSNEQLKHAFYLMNLSRIMDKKMLVWQRAGKMLNFAPNLGEEALQVGMGMGLNENDWFCPTFRSGALMLYRGVKPEQLLLYWNGNENGSKIEAKYKTLPINITIGAQYSHAAGLGYMLHYKKLPNVAVTMIGDGGTAEGEFYEAMNIASIHKWNSVFCINNNQFAISTRTKLESAVSDLSTKAIAVNIPRIRVDGNDLIASYEAMHEAANYARSGNGPVLIEFFSWRQGPHTTSDDPSIYRTKEEEAEAMKSDPVKRLRNFLFDRGILTPQQEEEMVAKIEQEVQAAYEVMVSKTPVTLDEVFDYNYEKLTPDLARQKAEAKKYFKD

SEQ ID NO: 1791 - protein, 284 aa, Ipomoea trifida
MAASSLQLPGSKRLEGKVAIITGAANGIGATTARLFAQHGCKVIIADIDDKNGHSVAEEIGPEYALFIHCDVRIESDVQNAVDTTVSRYGKLDIMFSNAGVAGSRDTSILEASPENINLVFETNVFGAFFCAKHAARVMIPARKGSVIFSASAASEVFGITSDTYTASKCAVVGLCKSLCVEMGKYGIKANCVSPYVILTKLGMSIMPTQDRKLAEEIVAEASNFKGKTLTTEDVAEAALYLAGDESKFVSGLNLLIDGGFTTTNIAFQVAVEKVLGGGEETTA

SEQ ID NO: 1792 - protein, 149 aa, Silicibacter pomeroyi DSS-3
MTRYTKSPEAIAALSPEEFHVTQRSGTERPGTGKLLHNKEPGIYVDIVSGEPLFASSDKYESGCGWPSFTKPIETTHVLELEDRTHGMIRTEVRSKHGDSHLGHVFPDGPRDRGGLRYCINSASLRFVHRDDMTAEGYADYLDQVEDIA

SEQ ID NO: 1793 - protein, 173 aa, Silicibacter pomeroyi DSS-3
MVRIIFLIVLLLVGRSVQAGAVSGSFPSIDGGTLSLEEWRGQPVLVVNTASQCGFTGQYAGLQALWERYQSAGLVVLAVPSDDFNQELATAAEVKEFCALNYALTLPMTNILHVKGADAHPFYKAVKAETGFEPAWNFNKVLVAPDGSIAATFGSAVKPDSARMQREIEALLN

SEQ ID NO: 1794 - protein, 277 aa, Ipomoea trifida
MAASSLQLPVFKRLEGKVAIITGAANGIGATTARLFAQHGCKVIIADIDDKNGHSVAEEIGPEYALFIHCDVRIESHVQHAVDTTVSRYGKLDIMFSNAGVAGSRDTSILEASPENINLVFETNVFGAFFCAKHAARVMIPARKGSVIFSASAASEVFGITSDTYTASKCAVVGLCKSLCVEMGKYGIKANCVSPYVILTKLGMSIMPTQDRKLAEEIVAEASNFKGKTLTTEDVAEAALYLAGDESKFVSGLNLLIDGGFTTTNTAFQVAVDKILG

SEQ ID NO: 1795 - protein, 385 aa, Yarrowia lipolytica CLIB122
MLNQPKKPLWPKVRHFLREPFAEFWGCVILIVLGDGSVAQVTLSNGEKGDYQSISWGWGLGVMFGVYVSGGISGGHLNPAVTLASCVYRGFPWRKFPGYMLAQTLGCMVGAAIIYGNYRSAIDTFEGCKGCRTVSGPKSTAGVFCTYPAPFMTRTGQFFSEIVASAVLQFIIFAINDTKNIPAGPLAPLVLFFLIFAIGACLGWETGYAINFARDFGPRLVTAMIGYGSEVWSAGGYYFWVPIVAPFIGCLLGGFLYDFFMYTGDESPINWPWMGFDRFLNPHKRIEHDMGTVQQNVEAPMLVEAHPNMGSVQENPLSTGTDEPKVDMDPGFSSDSQTVHLGRNMRAADHEHVEQAHTPESATPPQPTGAAQFLEFENLDDSDSS

SEQ ID NO: 1796 - protein, 457 aa, Mycoplasma pneumoniae M129
MNYDLIIIGAGPAGYVAAEYAGKHKLKTLVVEKEYFGGVCLNVGCIPTKTLLKRAKIVDYLRHAQDYGISINGQVALNWNQLLEQKGKVVSKLVGGVKAIIASAKAETVMGEAKVLDPNTVEVAGKTYTTKSIVVATGSRPRYLTLPGFAEARQNGFVIDSTQALSLEGVPRKLVVVGGGVIGIEFAFLYASLGSEVTILQGVDRILEIFDTEVSDLVAKLLQTKNVKIITNAQVTRANNNEVFYSQNGQEGSVVGDRILVSIGRIPNTECLDGLNLQRDERNRIVLNQDLQTSIPNIYIVGDANAQLMLAHFAYQQGRYAVNHILNKKQVKPAQKLTCPSCIYTNPEVASVGYTEMELKKQGIPYVKTNLVLAHCGKAIADNETNGFVKMMFDPQTGKILGCCIIAATASDMIAELALAMGAGLTVFDIANSISPHPTINEMIADVCKKALFDHFK

SEQ ID NO: 1797 - protein, 590 aa, Prochlorococcus marinus subsp. pastoris str. CCMP1986
MRLINNKNPIVRLYLNLREERSLILFAFLSSIINKILDLAPPVIIGLAVDIVVKEQNSWIASLGIKEVPNQLIFLAFASGIVWSAESFFEYLYSVLWRNLAQISQHKLRIKAYKHIQELDMAFFENDNTGRLLSILNDDVNQLERFLDQGANQLIQLFITVLIIGGTMIFVAPKIALFAFLPIPLIFLGSIRFQRKLSPKYKDVRNKAGLLASRLNNNLSGILTIKSFTKENWELNRLNKESLAYQRSNKAAIKLSSAFIPLIRFAILFAFIAILLIGGFQTWNKVLDVGTYSFLVFITQRLLWPLTTLGHVLDDFQRSMASINRVIDLIDTPIKIKDGKIKISSKKIKGDVRFENVNFNYPGRDSTLKNITFEIQNNSTLGIVGLTGSGKSTIIKLLLRIYDSNNGLIFLDNIPIKDINLKDLRKCISLVSQETYLFHGTVEENIAYGATSSKIKDIVKASKIAEAHKFIEQLPDGYKTIVGERGQRLSGGQRQRIALARAVLKDAPILILDEATASVDNETEVLIQKSLSKITKERTTIVIAHRLSTIKNADNIIVIDKGKIIESGKHDFLLNNKNVYSDLWNVQVGI

SEQ ID NO: 1798 - protein, 300 aa, Zea mays
  misc_feature (49)..(49): Xaa can be any naturally occurring amino acid
  misc_feature (51)..(51): Xaa can be any naturally occurring amino acid
  misc_feature (53)..(53): Xaa can be any naturally occurring amino acid
  unsure (1)..(300): unsure at all Xaa locations
ARRRVAVPGAAPRAPTAAQPWRERPAHVAAGCGGGGGQEPAAGGGARGXGXGXGAGVRYRECLKNHAAAIGGSATDGCGEFMPAGEEGSLDALRCSACGCHRNFHRKEPPGGDGRQLYGHHHHHPLSPLAAVHPHHHRGLLVAALPPAPTRMVMPLSAAMHHHQQPPQQHHSSASADSDDAHVPGVRGGEVQQQQQAPARKRFRTKFTAEQKARMLGFAEDAGWRLQKLDEAAVQRFCQEHTLARRGHAGLPGDPELLGPHDGQLGMPLPEPAAEPAAAAAAAAGLGVTDQAMSFGTGRH

SEQ ID NO: 1799 - protein, 472 aa, Vibrio vulnificus CMCP6
MTTLGPSTDKDNVLEEIIRAGANVVRMNFSHGSAEDHKTRAEKVRNIAARLGRQVAILGDLQGPKIRVSTFKEGKIFLSVGDLFTLDSDLPKGEGDQKSVGLDYKALPQDVGPEDILLLDDGRVQLQVLTVDGNKVNTRVIVGGPLSNNKGINKKGGGLSADALTEKDKQDILLAAEIKVDYLAISFPRNGADMDYARRLARDAGLEAKLVAKVERAETVRNDENIDDIIMASDVIMVARGDLGVEIGDPELIGVQKKLIKRAKELNRVVITATQMMESMIENPMPTRAEVMDVANAVLDGTDAVMLSGETAAGKYPVETVRSMAEVCIGAEKTWEPGSQNYRIDKSFVTAEETIAMSTIYAANHMEGVKAMVTLTESGRTALMTSRLNSTLPIFALSPNERTLNRCSLYRGVTPVFFDTKVETGFDVAMAALSTLRKKKLLDFGDLVIITQGDIMDVEGSTNCMRILPVFD

SEQ ID NO: 1800 - protein, 360 aa, Frankia sp. EAN1pec
MVVRVPVIALTGYLGAGKTTVLNHLLQAPGARLGVVVNDFGAINVDAALVSGQVDQPASIAGGCLCCLPDTDGLDQALEKLSHPRLRLDAVIVEASGVADPPALARLIRFSGVDRVRPGGLVDVIDAPAYFDTVDTGGLPPARFASASLVVINKTDRIPPARRAETLARITGRVRESNPHAHIVDTTHGRVDPVLVFDAANPYDPVDELPLAALARHDHEDGHDPHPRVDAVTVPAAGPIDPGPLVDLLEDPPANVYRLKGTVTVETARGPRGYVVNVVGREINVATRPGAVRPGAARPGTARPGTARPAADDASGLVAIGMRLDQAAVRARLEAALQPCPGRPAADGVRRLARYRRLST

SEQ ID NO: 1801 - protein, 419 aa, Gonyaulax polyedra
FLAPLCLAAVVLGAWQLLPTSFVAPSPRLRGVTSESAQVSTAAPLERSNASQSSAWLATGAACALILSGAAARALSMGRQSSSVAMRATGIAINGFGRIGRQVARIAMKDPEVELKLINASYDADYLAYMMKYDTIHGKYDGTVEVDGDALVIDGLKVALSHTRDPAEIPFTEHGAEYVCESTGVFLTTEKVEPHLKAGAKKIVFSAPAKDDSHTIVMGVNQDTYDPSMTCVSCASCTTNGLAPAVKAVNDAFGIKRGLMTTIHAMTASQPTVDSASKKDWRGGRAASGNIIPSSTGAAKAVAKVVPEVKGKLTGMAFRVPTIDVSVVDLTCELEKATTYEEICAEIKRRSEGDMKGFLGYTDEPLVSTDFETNTISCTFDAKAGIMLDPTFVKLVMWYDNEWGYSCRVVRPDKAHGEG

SEQ ID NO: 1802 - protein, 237 aa, Glycine max
  misc_feature (40)..(40): Xaa can be any naturally occurring amino acid
  misc_feature (42)..(42): Xaa can be any naturally occurring amino acid
  unsure (1)..(237): unsure at all Xaa locations
MGSDFNAPTVRATVVQASTIFYDTLYCTVLFFDSQGHYLXKXRKIMPPALERVIWGFGDGSTIPVFETPVGKIGAAICWENRMPLLRTAMYAKGCEIYCAPTADARDVWQASMTHIALEARCFVLSANQFCRRKDYPPPPEYVFAGTEEDLTPDSVVCAGGSVIISPSGAVLAGPNYDGEALISADLDLGEIARAKFDFDVVGHYSRPEVLSLIVKDHPTNPVTFTSTSTKIEDKTK

SEQ ID NO: 1803 - protein, 312 aa, Clostridium beijerinckii
MNNNVFCIGELLIDMVCVDNKGLKNGEKFEKKAGGAPANVAASICKLEGNAYFLGQVGNDFFGKHLVELLKSLNINTDMTVERGSTTIALVGIDANGERNFDFLRGSDGEYSFDNIDLSKISNSDIIHFGSATGFLDGELKKTYFKLLEYAKSNNIYVSFDPNYRDALITQDKLELFVEDCVKFLRYSNFTKLSDEELYLITKEKDIESAVNKLHEIGVKVVTVTLGSKGTYLSVNGKNEIIPSIEIKQVDSTGAGDAFVGAVLRQVSDIDDKESISFDRWKEIVSFANKVGAITCTNYGAIASMPTLNELN

SEQ ID NO: 1804 - protein, 429 aa, Gonyaulax polyedra
MARGSFLAPLCLAAVVLGVWQLLPISFVAPSPRLRGVTSESAQVATAAPLERSHGSQSSAWLATGAACALILSGAAARALSMGRQSSSVAMRATGIAINGFGRIGRQVARIAMKDPEVELKLINASYDADYLAYMMKYDTIHGKYDGTVEVDGDALVIDGLKVALSHTRDPAEIPFTEHGAEYVCESTGVFLTTEKVEPHLKAGAKKIVFSAPAKDDSHTIVMGVNQDTYDPSMTCVFCASCTTNGLAPAVKAVNDALGIKRGLMTTIHAMTASQPTVDSASKKDWRGGRAASGNIIPSSTGAAKAVAKVVPEVKGKLTGMAFRVPTIDVSVVDLTCELEKATTYEEICAEIKRRSEGDMKGFLGYTDEPLVSTDFETNTISCTFDAKAGIMLDPTFVKLVMWYDNEWGYSCRVVDLIKHMAKVDAAAA

SEQ ID NO: 1805 - protein, 222 aa, Oryza sativa
ARGERQKPAAAGRDGEEAEEAQEGEGEDGAEDGAEDGFGVNTYTFVTRDAKARYVKFHWKPTCGVSCLMDDEATLVGGKNHSHATQDLYDSIAAGNFPEWKLFVQVIDPEEEERFDFDPLDDTKTWPEDEVPLRPVGRLVLNRNVDNFFNENEQLAFGPGLVVPGIYYSDDKMLQCRVFAYADTQRYRLGPNYLMLPVNAPKCAHHNNHYDGAMNFMHQGLP

SEQ ID NO: 1806 - protein, 342 aa, Gonyaulax polyedra
MPPTMGINGFGRIGRLVFRAALANPDIEVKAVNDPFMDVKYMVYQLKYDSVHKRFPGTISTKEVDGKEFLVVDGKDVQVFHEKDPASIPWGAAGANYICESTGVFTAQEKAELHIKGDAKKVIISAPPKDAVPIYVVGVNHEDYKTDRHSWSNASCTTNCLAPLTKVVHEKFGLLEGLMTTVHAMTATQLTVDGPSVAARTGVVAAAHPQNIIPSSTGAAKAVGKVIPAVNGKLTGMAFRVPTPDVSVVDLTCRIEKAAKYDDIVAAIKEAAAGPMSGVLDWTDEEVVSTDFVSCKSSSIFDVGAGISLNDNFVKLVSWYDNEWGYSNRLVDLAIYMAKKDG

SEQ ID NO: 1807 - protein, 150 aa, Oryza sativa; identical to SEQ ID NO: 1306

SEQ ID NO: 1808 - protein, 405 aa, Pirellula sp. 1
MSRCVCTASTRITSLCYPSKLRSPAVQTRGSPSFLSRRQIDRVPSSLLLPVQCMSSNANTPMRAAILGVGFMGWIHTLAYQRSTTAELVGFASRDAKKRAGDWRGIQGNFGPPGEQWDVSGLNVSENLDGLLEDDSIDLIDVCLPPHLHVDAIKKILASGKKVLCEKPLALNSDAARSLLNIAEPGQLMVAHILPFMPAFRFLVEAKSDGRFGDPITGRFSRTISPPDWIPDFYDPEKVGGPLIDLQVHDAHLARVLFGMPAAAHCVSHNQQGVPKRYETILEYSPSADSYGVTPVVSLAGGVIDSPARGFTHGYEVSFEKATVRFEFAAYGDGSSDTIPLTVMHNDGQLERPGLGEQDPIDGFVSEIDAAAAVVAGGPLHPVLDAQLATDALTICEMQMASRRS

SEQ ID NO: 1809 - protein, 690 aa, Arabidopsis thaliana
MMNPSHGRGLGSAGGSSSGRNQGGGGETVVEMFPSGLRVLVVDDDPTCLMILERMLRTCLYEVTKCNRAEMALSLLRKNKHGFDIVISDVHMPDMDGFKLLEHVGLEMDLPVIMMSADDSKSVVLKGVTHGAVDYLIKPVRMEALKNIWQHVVRKRRSEWSVPEHSGSIEETGERQQQQHRGGGGGAAVSGGEDAVDDNSSSVNEGNNWRSSSRKRKDEEGEEQGDDKDEDASNLKKPRVVWSVELHQQFVAAVNQLGVEKAVPKKILELMNVPGLTRENVASHLQKYRIYLRRLGGVSQHQGNLNNSFMTGQDASFGPLSTLNGFDLQALAVTGQLPAQSLAQLQAAGLGRPAMVSKSGLPVSSIVDERSIFSFDNTKTRFGEGLGHHGQQPQQQPQMNLLHGVPTGLQQQLPMGNRMSIQQQIAAVRAGNSVQNNGMLMPLAGQQSLPRGPPPMLTSSQSSIRQPMLSNRISERSGFSGRNNIPESSRVLPTSYTNLTTQHSSSSMPYNNFQPELPVNSFPLASAPGISVPVRKATSYQEEVNSSEAGFTTPSYDMFTTRQNDWDLRNIGIAFDSHQDSESAAFSASEAYSSSSMSRHNTTVAATEHGRNHQQPPSGMVQHHQVYADGNGGSVRVKSERVATDTATMAFHEQYSNQEDLMSALLKQEGIAPVDGEFDFDAYSIDNIPV

SEQ ID NO: 1810 - protein, 2602 aa, Crocosphaera watsonii WH 8501
MDCRFPGNANSPEAYWELLRNGIDAITDIPSDRWDVESYYDSDPEIPGKMYSRYGGFIEGVDQFDPQFFGISPREALSLDPQQRLLLEVSYRALERAGQPLDSLQGSKTGVFMGICFDDYSRFTLNSGDPTLIDAYSSLGNTRSIAVGRIAYVLGLTGPVIQLDTTCSSSLLAVHLAAQSLRTGESNLALAGGVNLMLSPEVSIGFSKLKALAPDGRCKTFDEKADGYVRGEGCGIVVLKRLSDAIADGDKILGTVFGSAVNHDGQSNGLTAPNGSAQETVIRQAIENAKVDPTQIQYVEAHGTGTSLGDPIEVLALSKVLGKNREQDNPINIGSVKTNFGHLESAAGVASLIKVILSLQHQEIPPHLHFKNPNPYIPWEKLPINVPTKLTPWPAKKGRRLAGVSSFGMSGTNVHLILGESPKVEENIETQNVESSLHLLTLSAKTETALQAQIEQYKTYLNTHQNIPFADICYSANKRRSHHNYRFSIVASSTLEAAEKLNNSLYPNSPPLTRGSSGGSPFYSPPLTRGGWGGSSPPIAFLFTGQGSQYVGMGQQLYQTQPTFKTTVDHCCDILQSYLGWDLKEVIFSEQGTGNGEQETGRLGDGETCYNLDSTINTQPALFVIEYALAKLWLSWGIQPNIMMGHSIGEYVAATLAGVFSLEDALKLITARGRLMQKLPQNGSMIAVFTDLETVEKKISNYKNQVSIAAINHHKNIIISGNNTAIKEIIGKLESQGIKSQVLNVSHAFHSPMIEPMLREFEAIAKQINYSPPKLKLVSTVTGTVMSDEIATPKYWCRQIVEAVKFSQGMEYLVEQDIKIFLEIGAKPTLSNIGQIVIENSNKDQDFSFLASLHPKQENWQTILFTLGQLYVNGFSINWEEFYKYSQINYINNLPTYPFQKQRFWLEKKVNRSFLNQQKQQHPLLGQKINLAGSKNIYFENQISENIPIFLREHRVFDTAILPLAGFLEIALTAGINIFKTQECYLEDVVIQQGLILPPDTIKTIQINLVSETTNNYSFEIYSLNNEQDQDNDWILHSSGQLKQKQIVTSTINLEEEKERFSQGLQIDDYYQKCQERGINYGKRFQGIKHIYKLEREALAYIELPLEIINSSAYQIHPILLDNCLQVTGIVLIEENSLETYLPVALESFVSDNKQDINSSKIYTYAKLNTEKNSIDLKLLSENGEAIADIKGLKLRKASPETLLGKEENDSLENWLYGVKWNKQPLTANILLNPQKIESYLEPKLQNLKDKSDVIEYQELLSELETISFNYILEAFLKLGFKFELETRFTNSQLQEKLGILPTYKRLCDRLLNILAEEGILRKIGEEWQVIKVFEGTGNRERGTGKSPDSSAELTLLQRCGSQLAEVLRGDCDPVQLLFPDGDLTLTTQLYQESTGAKMMNNLVKQVILTALSNKTPESPLKILEIGAGTGGTTAYVLPELDQLSTEYVFTDVSSLFTEKARQQFQAYSFVDYRVLDIEKDPTTQGFLLQHYDIILAANVVHATQDLQQTLTHIRQLLTSQGMLVLLEGTRPLRWLDLIFGLTEGWWRFTDTDLRPTYPLISPSQWQQLLEKNGFVESIVLSPDSNPDSFLSQQGVMVARNAEDINTEAKNWLILGDRQGIASHLVQTLESKGENCIVAYSDSHYQQIGAKDYQVNPQNEQDISRLLEKKQFDQIIYLWGLDDPSEEDLTIDTLETGSENHCRSILQLIQNSYNKPPRFWLVTKGVMATDKNDPVVSITQSSLWGLGKAISLEHPEFNSVCVDLEINTELKQQVKVLLEEINANSPENQIAFSKNTRHVARLVPQKLSTATTQPRQLTISQRGTLENLQWQPLNRHSLKSGEVEIRVKATGLNFRDVLNALDLYPGDAGPLGCECVGEVISKGEDVELMNIGQEVMAIASGSFRDYVIVDAGMVTPKPDSLTIEEAATIPVTFLTAYYTLHHLAKIKKGDRVLIHAAAGGVGQAAIQIAQKVGAEVFATASVGKWNTLRQLGVSHIMNSRTLDFAEEILTITEDEGVDIVLNSLSGEFISKSFAILKDNGRFVEIGKSLKLEGKYPTQPSQEEIPPTPLGKGSQLPTQLSQEGKAEGLDIHSQLKPDAAYFQVDMFKVCQEEPELVQSMLCHLREQLQTGNFQPLSYQVFPREDAISAFRYMQQAKHTGKVIVSYSDRELGDWETGRLGDWETGRLGESETEGNDQSSLKFSEDGTYLITGGLGDLGLLVAQWMIEKGAKNIVLMGRNEPKLEQKQKIKALETLGGNITIAQGDVSNKEQLATILKAISPSPHLPVPPSPRPPLSPSPLSPLKGIIHAAGVLDDGVLKQLTWERFNKVMSPKVQGAWNLHNLTKDKPLDFFVLFSSAASLLGSPGQANHVTANTFLDTLAHYRRSQGLPALSINWGLWSDIGAAAKRQVKRQGVGAIAPDEGITILEMLMKDSLAQVGVVPIKWDEFLQIEQNIPFFSNFKQQKATSTNSSSNFLQQLEDIPPEEKENYLREHIRAEISQVLGFNPSDVDMEIGFFDLGMDSLTAMEFKNRLQNTFACTFPSTIAFDYPTGDALVSYIATEVLQLTEETIEPLEEDDTENLSQDDIADLLAQELSEIQGGDE

SEQ ID NO: 1811 - protein, 273 aa, Pseudomonas putida KT2440
MKVSLIQVNSVQDKAFNLAEADRLAREAIDRDGSRLVVFPEHFDWAGGTPEQKIAAGEPHSGGPAYEMCKKLAQDCNVYVHTGSFYESTPDGSRVYNTSVVFDPKGNELGRYRKIHLFDIVTPDGMRYGESSAVAPGTEVSVVDIEGLKYGFAICYDIRFPELFQKLVALGADVIVLPAAFTLQTGKDHWDVLCRARAIETQCYFLAPGQTGPFEQSGETRYSYGHSLVCDPWGHIIAKASDGVGYVTANIEPERIAAVRKQIPLASHKVLQK

SEQ ID NO: 1812 - protein, 252 aa, Ralstonia solanacearum
MRLAGKIAIVTGAGSGFGEGIATTFAREGARIIVNDLNIEAGERVASAIRVAGGDAHFVHADVSDGEAVASLLAATLERYGDLDIVVNNAGTTHRNKPVLEITEHEFDRVFAVNVKSLYWTARHMVPHFRARGGGVFVNVASTAGVRPRPGLVWYNASKGAVITASKAMAAELGPDRIRVNCVNPVMGATGLLEQFMGMPDTPENRARFLASIPMGRLSTPQDVANACLYLASDEAEFITGACLEVDGGRCV

SEQ ID NO: 1813 - protein, 189 aa, Triticum aestivum
  misc_feature (26)..(26): Xaa can be any naturally occurring amino acid
  misc_feature (53)..(53): Xaa can be any naturally occurring amino acid
  unsure (1)..(189): unsure at all Xaa locations
WASSAPSVSPFPGVKSTAGLPSSRRXNGASLGSVSNGGRIRCMQVWPIEGIKXFESLSYLPPLSTEALLNQVDYLIRSKWVPCLEFSKVGFIFREHNASPGYYDGRYWTMWKLPMFGCTDSTQVINEVEEVKKEYPDAYVRIIGFDNMRQVQCVSFIAFEPPGCEESPPPPPAHLRQAIYEVPLQVCQV

SEQ ID NO: 1814 - protein, 398 aa, Synechococcus elongatus PCC 7942
MLLLSQELPETVRPAVRDRHAQIVAWRQQLHRRPELGFQEQETAAFIAARLTELGVSFQAGVAGTGIVAEIAGQRSGPTLAIRADMDALPILEANEIPYRSEIDGRMHACGHDGHVAIALGTAACLQANSDFAGRVKIIFQPAEEGPGGAAPMIAEGVLENPAVDAIIGLHLWNYLPLGKVGVRSGPLMAAVELFDLTIQGRGGHAAIPQNCIDAVLVASQIVTLLQSIVSRNVDPLHSAVVTIGSLHAGTTYNVIADRAQLKGTVRYFDDRYQGFLQERIEQIVAGVCNSHGATYELNYRKLYPAVINDSAIADLVRSVAEEVLEPPLGVVPDCQTMGAEDMSYFLQKVPGCYFFLGSANLDRGLNFPHHHPRFNFDETALALGVELFLRCVERFCR

SEQ ID NO: 1815 - protein, 277 aa, Ipomoea trifida
MAASSLQLPVFKRLEGKVAIITGAANGIGATTARLFAQHGCKVIIADIDDKNGLSVAEEIGPEYALFIHCDVRIESDVQNAVDTTVSRYGKLDIMFSNAGVAGSRDTSILEASPENINLVFETNVFGAFFCAKHAARVMIPARKGSVIFSASAASEVFGITSDTYTASKCAVVGLCKSLCVEMGKYGIKANCVSPYVILTKLGMSIMPTQDRKLAEEIVAEASNFKGKTLTTEDVAEAALYLAGDESKFVSGLNLLIDGGFTTTNTAFQVAVEKILG

SEQ ID NO: 1816 - protein, 359 aa, Shigella flexneri 2a str. 301
MSNSHHTSMRGNDMSDNIRVGLIGYGYASKTFHAPLIAGTPGLELAVISSSDETKVKADWPTVTVVSEPKHLFNDPNIDLIVIPTPNDTHFPLAKAALEAGKHVVVDKPFTVTLSQARELDALAKSLGRVLSVFHNRRWDSDFLTLKGLLAEGVLGEVAYFESHFDRFRPQVRDRWREQGGPGSGIWYDLAPHLLDQAITLFGLPVSMTVDLAQLRPGAQSTDYFHAILSYPQRRVILHGTMLAAAESARYIVHGSRGSYVKYGLDPQEERLKNGERLPQEDWGYDMRDGVLTRVEGEERVEETLLTVPGNYPAYYAAIRDALNGDGENPVPASQAIQVMELIELGIESAKHRATLCLA

SEQ ID NO: 1817 - protein, 284 aa, Ipomoea trifida
MAASSLQLPVFKRLEGKVAIITGAANGIGATTARLFAQHGCKVIIADIDDKNGHSVAEEIGPEYALFIHCDVRIESHVQHAVDTTVSRYGKLDIMFSNAGVAGSRDTSILEASPENINLVFETNVFGAFFCAKHAARVMIPARKGSVIFSASAASEVFGITSDTYTASKCAVVGLCKSLCVEMGKYGIKANCVSPYVILTKLGMSIMPTQDRKLAEEIVAEASNFKGKTLTTEDVAEAALYLAGDESKFVSGLNLLIDGGFTTTNIAFQVAVEKVLGGGEGTTA

SEQ ID NO: 1818 - protein, 458 aa, Burkholderia vietnamiensis G4
MTQHFDAIVIGTGQAGPPLAARLAGAGMKVAIVERGRFGGTCVNTGCIPTKTLIASAYAAHLARRAHEYGVSAGPVSVDMKAVKARKDAIAGRSNHGVEQWVRGLDHTTVLQGHARFEQADTVRVGDALLQAERIFINVGGRAQIPPIPGLDTVPYLTNSTMMDVDFVPEHLVIVGGSYIGLEFGQMYRRFGARVTIVEKGPRLIQREDDDVSQAVQEILAGEGIDVQLGANCLRARRDGERVVVGLDCDGGGREVAGSHLLLAVGRVPNTDDLGLERAGVATDSRGYIAVDEQLRTNVPGIWALGDCNGRGAFTHTAYNDYEIVAANLLDDDPRKVSDRIPAYALYIDPPLGRVGMTLAQARQTGRRLLVGTRPMTRVGRAVEKGESLGFMKVIVDADDHALLGASILGVTGDEVVHGLLDVMAARAPYTTISRAMHIHPTVSELVPTLLQDLHPVE

SEQ ID NO: 1819 - protein, 149 aa, Streptococcus pneumoniae
QPNWINRDRFILSAGHGSMLLYALLHLSGFEDVSMNEIKSFRQWGSKTPGHPEFGHTAGIDATTGPLGQGISTATGFAQAERFLAAKYNREGYNIFDHYTYVICGDGDLMEGVSSEAASYAGLQKLDKLVVLYDSNDINLDGETKDSFT

SEQ ID NO: 1820 - protein, 985 aa, Ralstonia solanacearum
MTQSAARRASSRATPARKTPPAPASQTPAPSPGGTAGTALGPTSRRSSGSAAAKDQPLKEDIRFLGRLLGDVLREQEGAAAFETVETIRQTAVRFRRDGDRQAEQELDRLLKTLSRDQTTSVVRAFSYFSHLANIAEDQHHNRRRRVHALAGSSPQPGSLLRALLSAADEGLSGDALRRFFDAALIVPVLTAHPTEVQRKSILDAQREIARLLAERDAPLTVRERERNVTLLRAHVTKLWQTRMLRTTRLMVADEIENALSYYQTTFLREIPALYRELEEDVATVFPRRGARGEPAPLPAFFQMGSWIGGDRDGNPFVTAQTLRHAAQRQASVILTWYLDEIHALGAELSMSTLLVDVSADLLALAERSPDHSEHRADEPYRRALIGVYARLAATCRELTGEDAGRHAVGPAPAYTRAEELRADLQIVIDSLAAHHGEALADARLASLARAIDVFGFHLASIDLRQVSDVHEATVAELLRVAGVEGAYAALSEADKRTLLLRELQQPRLLTLPFHTYSETTASELDIFRAAREVRARYGSRIVRNYIISHTETLSDLLEVMLLQKEAGMFRHGTNGSGGAGLDVMVIPLFETIEDLRNAPQIMGELLALPGFDAVLAAQGNEQEVMLGYSDSNKDGGFLTSNWELYKTELALVELFERKGVRLRLFHGRGGTVGRGGGPTYQAILSQPPGTVNGQIRLTEQGEIISSKFANPEIGRRNLETIVAATLEATLLPTRNRPKGLEEFEAAMQALSDHAFSAYRHLVYETPGFKDYFFATTPITEIADLNLGSRPASRKLMDRKQRRIEDLRAIPWGFSWGQCRLLLPGWFGFGSAVQRWLDEAGSAKAKAARLATLKRMHKQWPFFANLLSNMDMVLSKADLNVASRYAQLCEDRKLRNAVFSRISAEFTLTEQVLGAITGQSERLADNPLLARSIKNRFPYLDPLNHLQVELLKRFRSGKAGSNDARVRRGIHLSINGIAAGLRNSG

SEQ ID NO: 1821 - protein, 277 aa, Phyllostachys pubescens
KWNYDGSSTGQAPGEDSEVILYPQAIFKDPFRRGNNILVMCDCYTPAGEPIPTNKRYNAAKIFSSPEVAAEEPWYGIEQEYTLLQKDTNWPLGWPIGGFPGPQGPYYCGIGAEKSFGRDIVDAHYKACLYAGINISGINGEVMPGQWEFQVGPSVGISSGDQVWVARYILERITEIAGVVVTFDPKPIPGDWNGAGAHTNYSTESMRKEGGYEVIKAAIEKLKLRHREHIAAYGEGNERRLTGRHETADINTFSWGVANRGASVRVGRETEQNGKGY

SEQ ID NO: 1822 - protein, 231 aa, Pseudomonas putida KT2440
MTRIKPAGGRDFTLLIKIKWGAAPRRMIEASPWEALLIHSFEEGAMSDVAKKVPVTPVASQPTEGSPPSVEPSELWRPFQQLRRQIDSLFEDFGRRPMRMPFSHTPFDVEPFWRRDLFTHGMPAMDISELAEEYRISAELPGVDAKDIEIKLVNGNLLIRGEKKEEVDEKRKEYHLSERHYGSFERVFQLPRGVDAEKIDAQFDKGVLLVHLPKRAEAIHPEKVIPIKSGK

SEQ ID NO: 1823 - protein, 420 aa, Vibrio vulnificus CMCP6
MSKRRVVVTGMGMLSPVGNTVAESWKSLLEGKSGIVNIEHFDATNFSTRFAGLVKDFNCEEYMSKKDARKMDLFIQYGIAAGIQALDDSGLEITDENAHRVGVAIGSGIGGLDLIEAGHTALVEKGPRKVSPFFVPSTIVNMVAGNLSIMRGMRGPNIAISTACTTGLHNIGHAARMIAYGDADAMVAGGAEKASTPLGMAGFGAAKALSTRNDEPQKASRPWDKDRDGFVLGDGAGIMVLEEYEHAKARGAKIYAELVGFGMSGDAYHMTSPSEDGSGGALAMEAAMRDAGIVGTQVGYVNAHGTSTPAGDVAEIKGVKRALGEEGAKQVKVSSTKSMTGHLLGAAGSVEAIITPCCRWLIRSFHQPLTWIIQKKVWISILFHILRRKWIWNTRSVTHSASVEQTAHSYLRKSNTHLGF

SEQ ID NO: 1824 - protein, 302 aa, Zea mays
  misc_feature (253)..(253): Xaa can be any naturally occurring amino acid
  unsure (1)..(302): unsure at all Xaa locations
MASCRMALLLGLLLLVVASPAIADDDSGIYYQLALMWPGAYCEQTSAGCCKPTTGVSPARDFYITGFTVLNATTDAAVTGCSNKVPYDPNLITGIQGLDQYWSNIRCPSNNGQSSWKNAWKKAGACSGLSEKDYFETALSFRSRINPLVRLKAKGIEPDFGLYGLKAITKVFKSGINATPVIQCSKGPFDKYMLFQLYFCAAGNGTFIDCPAPQQYTCSKEILFHPFKKWMLKQQLNQDDDPFQLPGVAMDNXIHRPLQEVDAQAAAQRGRTTTLSSCLASPWTTDTPYRRLCLRFCQVCME

SEQ ID NO: 1825 - protein, 88 aa, Brassica napus
  misc_feature (31)..(31): Xaa can be any naturally occurring amino acid
  misc_feature (72)..(72): Xaa can be any naturally occurring amino acid
  unsure (1)..(88): unsure at all Xaa locations
MSASRFIKCVTVGDGAVGKTCMLISYTSNTXPTDYVPTVFDNFSANVVVDGSTVNLGLWDTAGQEDYNRLRXLSYRGADVFLLAFSLI

SEQ ID NO: 1826 - protein, 756 aa, Bacillus halodurans C-125
MLTSNLGYPRIGENREWKKALESFWANDTTEEQLLATMKELRLNHLRVQQEQEVDLIPVGDFTLYDHVLDMAVMFGIIPKRFLQQGDTPTLSTYFAMARGSKNAQACEMTKWYNTNYHYIVPELHDAAPRLTKNAPLEAYLEAKNELGIDGKPVILGPYSFVKLAKGYEEDKLQETIQSLLPLYIQVIQELVDAGARSIQVDEPSLVTSISAREMALVTRIYEQINEAIADAPLFLQTYFDAVTFYEEVVSLPVKGIGLDFVHGGAKNLEALRTFGFPEDKVLAAGIIDGRNIWISNLRERHELVHQLEQHVAKDRLVLQPSCSLLHVPVTTKREEKLDPTLLGVLAFANEKLTELHTLKQLAAGNEAEVKEALEANDDALAALEKSGWRSGAATSHNLENKKRPQSFNERRPLQEEKWQLPLLPTTTIGSFPQTKDVRRTRSLWRKGELSTVEYERTMKSYIEKWINIQEELGLDVLVHGEFERNDMVEFFGEKLDGFAFTANGWVQSYGSRCVKPPIIYGNVSFTEPMTVAETVYAQSLTDKPVKGMLTGPVTILNWSFVRDDLPLTVIAHQIAEALTHEVTALEEAGIEMIQIDEPAIREGLPLKAEDQQEYLDWAVSAFRASCAHVKATTQIHTHMCYSEFHEMIEAIDDLDADVISIETSRSHGEMISAFEKTTYEKGIGLGVYDIHSPRVPSEEEMLNVIRRALTVLPASLFWVNPDCGLKTRAEKETVAALKNMVAAARAAREELKTKA

SEQ ID NO: 1827 - protein, 259 aa, Bacillus anthracis str. A2012
MKVACIQMDIFFGDVEKNIENAKNKISEAMKERPDVIVLPELWTTGYDLTRLSEIADRDGLETKEKLIEWSKQYGVHIVGGSIAKQTEQGVTNTMYVVTNKGELVNEYSKVHLFQLMDEHKYLIAGNSTGEFKLDDVECAGTICYDIRFPEWMRVHTAKGAKVLFVVAEWPLVRLAHWRLLLQARAVENQCYVVACNRAGKDPNNEFAGHSLIVDPWGEVVVEANEEESILFGELTFEKIEEVRKGIPVFADRRPELYK

SEQ ID NO: 1828 - protein, 270 aa, Gloeobacter violaceus PCC 7421
MIESYLAAAIQMTSTADIEANLDQAYALIGIAVRRGARLVSLPENFAFLGLEAEKLALAPRIAEMSEKFLVSAARDWAVTLLGGGYPVLAEQTAKCYNTALLVGPEGQELGRYRKLHLFDVNLPDGNTYHESDSIVPGKDLVVVRSDTLGNLGLSVCYDLRFPELYRALSAAGAEVLLVPSAFTAFTGKDHWRVLLQARAIENTCYVIAAAQTGEHYPRRQTYGHAMIVDPWGNVLSDAGDTTGIAIGEINPMRLEAVRRQLPVLQHRQL

SEQ ID NO: 1829 - protein, 636 aa, Triticum aestivum
  misc_feature (138)..(138): Xaa can be any naturally occurring amino acid
  misc_feature (332)..(332): Xaa can be any naturally occurring amino acid
  misc_feature (392)..(392): Xaa can be any naturally occurring amino acid
  unsure (1)..(636): unsure at all Xaa locations
MASPFGATSTVGLMAAPSGIVSDKKPFSLSSISLADRPRHVRLQRKCNFRVKAAKELYFNKDGSATKKLQVGVNKLADLVGVTLGPKGRNVVLESKYGSPKIVNDGVTVAREVELEDPVENIGAKLVRQAAAKTNDLXGDGTTTSVVLAQGLIAEGVKVIAAGANPVQITRGIEKTAKALVLELKKMSKEVEDSELADVAAVSAGNNYEIGNMIAEAMSKVGRKGVVTLEEGRSSENNLYVVEGMQFERGYISPYFVTDSEKMTTEYENCKLLLVDKKITNARDLINVLEEAIRGQYPILIIAEDIEQEALATLVVNKLRGSLKICAIKAPXFGERKTQYLDDIAILTGGTVIRDEVGLTLDKADNTVLGTAAKVVLTKESTTIVGDGSTQXEVTKRVAQIKNLIEAAEQDYEKEKLNERIAKLAGGVAVIQVGAQTETELKEKKLRVEDALNATKAAVEEGIVVGGGCTLLRLAAKVDAIKDTLDNDEQKVGAEIVRRALCYPLKLIAKNAGVNGSVVTEKVLSNDNFKFGYNAATGQYLPGRSSGRPGRYDDEVRKWVTSTGIENIGKKLVNSRDGPVTFEQPKMTVEKLLEYGHMLVQEQDNVKRVQLADTYMSQAALGDANQDAMKTGSFYG

SEQ ID NO: 1830 - protein, 219 aa, Agrobacterium tumefaciens str. C58
MLTIYGVYRSRATRTLWLAAELGIEFKHVPVIQARRLADPLATDAPLNTLSPAFLAVNPMGTIPCIEDDGMVLYESMAINLYLARKYGGPLAPVDLKEDAAMLQWSFFAATEIETNSLKISSAIAEGLAESDAGKAVIDVAARLLKRPLRVLEQHLATHDYLVGDRFTVADLNVAEIVRYAQGHQPLFDAHPALKAWLARCQARTAFKSMWDSRTAEAA

SEQ ID NO: 1831 - protein, 159 aa, Brassica napus
  misc_feature (125)..(125): Xaa can be any naturally occurring amino acid
  misc_feature (135)..(135): Xaa can be any naturally occurring amino acid
  misc_feature (156)..(156): Xaa can be any naturally occurring amino acid
  unsure (1)..(159): unsure at all Xaa locations
MERSTPVRNPHTSTADLLSWSETPPPDHSSSSAARSHQPSDGISKVLGGGQITDEEAQSLNKLKNCSGYKLKEMTGSGIFTNEPRGVSESDSATGLRYYQQTLNGVSQISFSADGNVSPKKPTTXLTEVAKQREXLSGNLLTEADLKSKKQISNAXIEE

SEQ ID NO: 1832 - protein, 575 aa, Arabidopsis thaliana
MLEKVETFDMNRVIDEFDEMTRNAHQVQKQTLKEILLKNQSAIYLQNCGLNGNATDPEEAFKSMVPLVTDVELEPYIKRMVDGDTSPILTGHPVPAISLSSGTSQGRPKFIPFTDELMENTLQLFRTAFAFRNRDFPIDDNGKALQFIFSSKQYISTGGVPVGTATTNVYRNPNFKAGMKSITSPSCSPDEVIFSPDVHQALYCHLLSGILFRDQVQYVFAVFAHGLVHAFRTFEQVWEEIVTDIKDGVLSNRITVPSVRTAMSKLLTPNPELAETIRTKCMSLSNWYGLIPALFPNAKYVYGIMTGSMEPYVPKLRHYAGDLPLVSHDYGSSEGWIAANVTPRLSPEEATFAVIPNLGYFEFLPVSETGEGEEKPVGLTQVKIGEEYEVVITNYAGLYRYRLGDVVKVIGFYNNTPQLKFICRRNLILSINIDKNTERDLQLSVESAAKRLSEEKIEVIDFSSYIDVSTDPGHNAIFWEISGETNEDVLQDCCNCLDRAFIDAGYVSSRKCKTIGALELRVVAKGTFRKIQEHFLGLGSSAGQFKMPRCVKPSNAKVLQILCENVVSSYFSTAF

SEQ ID NO: 1833 - protein, 391 aa, Bacillus cereus E33L
MDVAKELVVSKNQLIEWRRHFHKYPELSFQEEKTSQFVFDILRKIPHLEVSRPTKYSVMARLIGKQPGKTIAVRADMDALPIHEENEFDFISAYPGVMHACGHDGHIAILLGVVHKLVEAREKIKGEIRFLFQHAEENFPGGAEEMVAAGVMEGVDYIIGAHLWASLEVGKVGVIYGPAMAAPDVFKITIEGKGGHAGIPHETVDSIAIGTQVVSQLQQIVSRLTNPLDSLVVSVTQFHAGTTHNVIPAQAEIEGTVRSLRHELREETEKRIEQIVKHVTEAYGAKYTFSYEYGYRPVVNDYEVTEIIEQTALQLYGRERVTRLQPTMAGEDFSAFLQKAPGTFFFIGAGNKEKGIIYPHHHPRFTIDEDALPIGVQVFVSSIMNFISKGE

SEQ ID NO: 1834 - protein, 414 aa, Mallomonas rasilis
  misc_feature (193)..(193): Xaa can be any naturally occurring amino acid
  unsure (1)..(414): unsure at all Xaa locations
VIGHVDAGKSTTTGHLIYKCGGIDKRTIEKYEKEAAEMGKSSFKYAWVLDNLKAERERGITIDIALWKFESPKFQFTVIDAPGHRDFIKNMITGTSQADVAVLVIDGAPGGFEGGWGSDGQTKEHALLAFTLGVNQMIVAINKMDGCNYSEQRYNDIKEEVSTYLKKVGYKPAKINFVPISGWVGDNMIDRSXNMAWYKGPFLLEALDLVNPPKRPTDKPLRLPLQDVYKIGGIGTVPVGRVETGILKPNMVVTFAPVGLTTEVKSVEMHHEALAEALPGDNVGFNCKNVSVKDIKRGSVASNSAEDPAKGCDTFTAQVIIMSHPGQIQNGYTPVLDCHTSHIATKFKNIDEKMDRRTGKSMEDNPKFVKSGDACMVTMEPTKPMVVEAFSDYPPLGRFAVRDMRQTVAVGVIK

SEQ ID NO: 1835 - protein, 903 aa, Zea mays
  misc_feature (75)..(75): Xaa can be any naturally occurring amino acid
  unsure (1)..(903): unsure at all Xaa locations
RVRRQLKLLGSSFSSRDFRPVHQLQDPNHGGRDGTLLLLSVTSNDTLPSPPAQPHQQQEAPLSLPTEPAVVPARXGHLHLLKKPLHRTLSALAAQHGPVLLFRFGSRRVVHVADPAVAAECLSTHDVTFANRPRLPSARYLSNDYTTLGSSSYGPNWRNLRRIATVDVFSSHRVLCSADVRASEVRNMARQLFKAAAGADASRPARCDVKARAFEIALNTVARVIAGKRYYGDGSVASEEAERFRAMVREYLAMHGASNLQDFVPVLALVDIGGVNKRAIRLSKARNEWAQRLIDEHRAAAAAGREQGKTMVGDLLEKQASDPETYSDKVIRALCLSILQAGTDTSSSTIEWGMALLLNHPAAMAKAKAEIDEVIGTARILEEADLPNLPYLGCIIKETLRLHPVGPLLAPHESASDCSVGGYDIPAGTMLLVNVHAMHRDARVWEEPERFSPERFEGGNSDGKWMLPFGMGRRRCPGEGLAVKMVGLALGTLLQCFEWRRTGDEEVDMTEASGLTMPKSVPLEAFYWPLPRADLHEDRNNYRQIGRFTSTATPPPLRVCGSRHMELLRDSISMVSLAVLVTAVCARAASSWLRPGLPRLASLLPMVAFLAAAPLAFSSAIIRGLAGFFLGWLGVFKVVLLAVGRGPLDPALPVLPFVFTTALPVKLRCSSTGAAAACRAKSVSLVSCAVKVAVIAAILHVYQYTDQLHLYTRLALYSVHIYCFLDFLLPCIAAAGGALGMDMEPQFDKPYLASSLRDFWGRRWNLVVSDILRPSVYGPVRARAGKAPAVLATFLVSGLMHEVMIYYLTLRSPTGEMTAFFLLHGVCCIAEESCARRWMQWGWRPPPRPVATLLVVVFVAGTAFWLFFPQICREGMEELLLEEWAAVGAFFNDAARKLLQMFT

SEQ ID NO: 1836 - protein, 2578 aa, Corynebacterium diphtheriae NCTC 13129
MRDSALPRYFRALVAVISAISLVGVGLHATQPTARADEELAPAVVAGTFQKNLGCSKEWEESCDKTRMKRKGNLYATTLKIPEGDWKFKVVLNGDWGTSYGAPGFDENNIPLKLTKDTELEFSFDPLSHRIGLKPVGLDDEKLKTYDDSKDKDIVGAPFKHSAAGKNFYFVLTDRFQNGNPENDRGGAKDGDKNDHGFDPTDKAYYHGGDIEGLIKQLDYIKNLGTTALWLTPSFKNRAVQCGHDPKDCSSGYHGYWITDFTQIDPHLGSNDDLKRLIEEAHNKGIKVYFDIVANHTADLIQLAGGNQYISEDQQKYKDVDGKEFLLKDYAGKKEFPELNDFSFPYKPIRKPEDNIIVPKELNDVHLYHNRGNNTWEGESVIHGDFEGLDDLMTEHPKVVSHMIEAYNKWAGFGLDGFRIDSVKHVNMEFWKEWTEAVKKHAKESRAGEKEDFFMFGEVFNGTAESLSPFVRDTQMDAALDFAFHYKALDFAKGQSTQGLHDLFYSDDWYTTTRSDATNLPTFLGNHDVGRIGYLLRDNDDKVQRDVLAHQLMFLTRGQPVVYYGDEQGFAGTGDGKDKQARQDMFGTQVDEFKNEQDIYGKQLGSDNHFKESGELYGKIKQLAELRTANKALATGAQIERWETPGPGIYAFSRVDRDEKQEYLVALNNSHLEQTATPAPLTPNASFTKIYGEGPDKISPNLDGTVNLKLPRLSAVVYKVESNQKVSGAVDGTGLSVKGQALKDNAPIMTNIGGKAWSETSFAWRELGTEEWKKLGTDTGQNARVFHDVRDLKPGTIVEYRTVTVDADNNKTASTGWGVVGVDLGVDTAALLAPSAVVAGDFTKDLGCTGGDQGNWDPACAKTELKSVGGTDWHTVKLNLKAGEHQYKIAVAGSWNENYGQEKDGDRPNDRGYHNGKNVKFNLDREQEVQFFYNPVTNEFFNSVEHGVITLPGTMGGALNCPKNDQKSDEHGNWGPACLATLMTKTGDHIYEFSSPKVPTPGNYDVKVAYGLEWGNDWGPDGHKTQRNYDVKITDSGILHYRWDENKHELTWNITERSSLDLQDTFAHWLDDRTIAVPRSQLRDASPSDVEGLLVSVSDGKPSIKSGKGASSQADAKIEEQKLHYVGQIGGDLLARNPHLDGMVTFRFKDEVQKDKARELLQGGLGFAVVKKKEQEPVSFTGVQIPGVLDAHYAADARDAQLGVHWKGDKPTVSLWAPTAKNVKLKLFGEEGSLGNGEDHKMDYDKTTGVWSVEGKPDWKNHAYQFEVEVYAPSTHKVEHNLTTDPYSVGLSMDSKYSVMLNLNDPELKPADWGKAMDPIDPVDRMIYELHVRDFSASDKSMDQQYRGKYKAFTQSGSKSVMHLKELADAGLNSVHLLPTNDIATIPEDPAKAKTPAITSTGAADTQQQEAVAAVQKEDAFNWGYDPYHYMAPEGSYATKPDAKTRVKEYREMVKALNGMGLHVVSDQVYNHAFQGQQDEKSVLDKVVPGYYHRLMLDGKIANSTCCANLATEHVMMEKLMTDSVKSWAKNYHIDGFRFDLMGHHSAANMINVQTELSELTVEKDDIDGSSIYLYGEGWNFGEVENNQRFIQATQENLAGTGIGTFNDGLRNGVHGHEGRTQGFGTGLAMEGNGTDQKDQGHLRHLTDIVRVGMAGNLQDFKFNSKDGYKRGGDIWLDGKRIGYGLMPQDTVNYVDAHDNQTLYDLSVLQLPQSLSMDDRVRMNTVQLATVALGQSPAFWHAGTEIMRSKSLDRDSYNSGDHFNKLDLSMQEHNFGVGLPIAEKNDKQWELYKGFLNDEHLKAKPEDLKKANDMAKELMTLRKDNPLMRLGDVDQIQEKVTFPANGPDAQPGLIVMNIDDTKGEDRDAKRDGILIVINSSPKQIEQTINELEGLDFTLEKTLAEGVDKETQKGSTWNKAEKKLTIPARTVAVFERTQNEAAHHDPQYPETKVFKDATEDVKVEGPKDMPETAKYSIDPAVDGVSVDEKTGALTVKPTAIKEDGLVVTVTVKYSDGSEDRAVAKFVTDTSIASMYDPTYEETKAESADKKVTIKKPMSGEKSLPEDAHFTLEGESAKKATIDGFTGEITVEPLKDERRLELDVKVTYADESVDMVKAVVVAGDTLADQHDPKYADTQMEKGTKTVIAAPEGMPENIKYELAEPQDGVTVRDDGSIEVTTDAESLDIKVKVTYSDKSTDTAVAHVTTVAQTEQSVEVTPGTQTLVDVPGNGDVTVTVPQNSGLKAEVAGNLVTLTSDGSVEGHVTVTYQVKDADGKTTTGKINVQVAKLAEASWPKSASVAAGDSTVITPEGVDTLPYGTTLSVGSLPEWATFDQTTGQLTLTADEDATDESTTATITVAYPDGLTKQYSVALSVGAATETTADQHDPQWESVVVNGDSVTSHGVDVPADAEVSVDKLPEGWTATVTGSDVEITPAAGSPAGHVIALPVTVRYADGTTDTAVINVLTQPDWSTSNKAPKADSGMFYQAGPGAPAWVRVNNDGSMTWADNAPEGTHEIPVIVTKDGVHYLVTASVNAPKKVVLDTEGSSSILGVVVAILAAGGIMALFALLFNCTWFKNCR

SEQ ID NO: 1837 - protein, 401 aa, Glycine max
MASCTCSSSLLLVNPPPSTSRHHAIRRNLRMSLNNNDSKLNPSSLLNSVTKLLWGQSLPPGLLVATVRTAWNSTWHLMMSQLAPSDSSGGYSRPASKFRFSSTTPSQGSSLHLYVGLACPWAHRTLIVRALKGLEDAVPVSVASPGLDGSWEFKRAGGPDTNTIAPSLDRANGCNTLKEVYRLRRGGYDGRSTVPMLWDKGSKDVVCNESYDIIHLFNSELNSVAQNPGLDLSPPQLKKQTEEWYQIIYPNVNNGVYRCGFAQSQEAYDRAVNDLFSTLDKLEDHLANSRYLCGDTLTLVDICLFTTLIRFDLAYNVLFKCTKKKLCEYTNLHAYMRDIYQIPKVAATCNFTEIMDGYYKILFPLNPGSIRPAMPSTSEHESLCRPHGRESLSSATLAFVK

SEQ ID NO: 1838 - protein, 517 aa, Metarhizium anisopliae var. acridum
MTADTSVADGLAPEVHGRLLLLSNRLPITIKSSDDGSYTFSMSSGGLVTGLSGLSKTTSFQWYGWPGLEVPDNEVADMKRRLKDEYGAHPVFIDDELADRHYNGFSDSILWPLFHYHPGEITFDESAWAAYQEVNHLFAQTVIKDVQDGDLIWVHDYPLMLLPQMLREEIAKTNKKVKIGFFLHTPFPSSEVYRILPVREPLLRGLLDCDLIGFHTYDYARHFLSSCSRILGAHTTPNGVDWNGRFVTIGAFPIGIDPDKFVEGLKKPSVQERIATLNRKFEGVKLIVGVDRLDCIKGVPQKLHALEVFLTEHPEWIGKIVLVQVAVPSRQDVEEYQNLRAVVNELVGRINGKFGTIEFMPIHFLHQSASFDELTALYAVSDVCLVSSTRDGMNLVSYEYIATQQERHGVMILSEFTGAAQSLNGSLVVNPWNTEELANAIHDAVTMSPGQRAANYKKLERYVFKYTSAWWGTSFVSEMTRLDSNNAQPKTLRNVSGAVVGPGQDEDEATSPMQNNP

SEQ ID NO: 1839 - protein, 401 aa, Arabidopsis thaliana
MALKFNPLVASQPYKFPSSTRPPTPSFRSPKFLCLASSSPALSSGPKSVESLKKPFTPPREVHVQVLHSMPPQKIEIFKSMENWAEENLLIHLKDVEKSWQPQDFLPDPASDGFEDQVRELRERARELPDDYFVVLVGDMITEEALPTYQTMLNTLDGVRDETGASPTSWAIWTRAWTAEENRHGDLLNKYLYLSGRVDMRQIEKTIQYLIGSGMDPRTENNPYLGFIYTSFQERATFISHGNTARQAKEHGDIKLAQICGTIAADEKRHETAYTKIVEKLFEIDPDGTVMAFADMMRKKISMPAHLMYDGRNDNLFDNFSSVAQRLGVYTAKDYADILEFLVGRWKIQDLTGLSGEGNKAQDYLCGLAPRIKRLDERAQARAKKGPKIPFSWIHDREVQL

SEQ ID NO: 1840 - protein, 512 aa, Apium graveolens
MENGTKELNKQPPPSAAMQVQTSPPKLPIATWKLILVAAIAAGVQFGWALQLSLLTPYVQLLGIPHKWAAYIWLCGPISGMLVQPIVGYYSDRCQSSFGRRRPFIASGAGCVAISVILIGFAADIGYKAGDDMNKTLKPRAVTVFVIGFWILDVANNMLQGPCRALLADLCNGDTRRMRSANALYRFFMAVGNILGNAAGSYNNLYKLFPFSKTHACDLYCANLKSCFIISIVLLIFITVLALTVVREKQWSPDEADEEPPSSGKIPVFGELLRALKDLPRPMLMLLAVTCLNWIAWFPFILFDTDWMGREIYGGTAGQGKLYDQGVRVGSLGLLLNSVVLGLTSIAVEYLVRGVGGVKILWGLVNFLLAIGLVMTVVVSKVAQHQRQHGANGQLLPPSAGVKAGALSLFSILGIPLSITFSIPFALASIYSSGSGAGQGLSLGVLNLAIVVPQMIVSVLAGPFDSLFGGGNLPAFVVGAISAAISGVLAIVLLPKPCKDAAAKLTLSGPYH

SEQ ID NO: 1841 - protein, 166 aa, Glycine max; identical to SEQ ID NO: 1046

SEQ ID NO: 1842 - protein, 310 aa, Oryza sativa (japonica cultivar-group)
MERAVPVRKTHASTAGLLSWSESPGPDNAAAAAGAAAPPSSRPSLKPAGGITPAMFGAPVTDLEAEDLTKRKMCSGSKMKEMTGSGIFSAQGANGDSETGSGDSNPPSKTSLRMYQQTVTGISQISFSAEGSVSPKKPSSLPEVAKQRELSGTLESEADAKLKKQNSEAKSKELSGSDIFGPPPEIPSRPLAARNLELQGNLDFALPQPRSIHTSVKVSNPAGGPSNIMFGEEPAVKTAKKIHNQKFHELTGNNIFKEEAPPGSAEKSLSTAKLKEMSGSNIFADGKVASRDYFGGVRKPPGGGSSIALV

SEQ ID NO: 1843 - protein, 445 aa, Lentinula edodes
MLPFVYLLAAELVCLVYGAEVIRDTTTYGQTVSENLFIVNKQLAPDGFQRSTVLAGLTPSTGSFPGPLISGNKGVRFNLNVTDQLTDPSMVRSTTVHWHGLFQKTTNYADGVAFVSQCPIAANHSFLYDFQVPDQAGTFWYHSHISVQYCDGLRGPLVIYDPQDPQAYLYDVDDETTVLTIADWFHNTSTELIAAAVAPLADATLINGKGRYLGGPAVPLAVINVQQGKRYRFRMISIACDANHNFSIDGHRLTVIEVDGENHEPATVDNIQIFPGQRYSFVLDATQPVDNYWVRALSSSGVGTSGFIGGLNSGILRYQGAPDADPTTTNSTGVVLTESMLHPLENPGAPGLPFPGGADEVLNLTLGFNLPATFFMNDTQYIPPTVPVLLQILSGAQSPQDLLPPGSVYTLPINKTIEINFFGNATPGGPHPFHLHGVRVIQSSY

SEQ ID NO: 1844 - protein, 226 aa, Thermus thermophilus HB8
MVLLTRGKDRALLARLAALGIEAAEVALLEQVDLPARALLSEKLKEGWDYVAVTSKEGARRLLLAWEEAGRPFLKVAAVGEGTAGVLRAGGLPPAFLPPRATAKDLAQSFPQAQRVLFVAGDLAGRDLEEGLRARGVEVVRLPVYATRERALAPEEVALLERAEVVAFFSPSGVRAFARWTAKRPKAAAIGPSTGEEARRLGFPVVEAESPGLEGLFAALLRALGR

SEQ ID NO: 1845 - protein, 494 aa, Lentinula edodes
MLPFVYLLAAELVCLVYGAEVIRDTTTYGQTVSENLFIVNKQLAPDGFQRSTVLAGLTPSTGSFPGPLISGNKGVRFNLNVTDQLTDPSMVRSTTVHWHGLFQKTTNYADGVAFVSQCPIAANHSFLYDFQVPDQAGTFWYHSHISVQYCDGLRGPLVIYDPQDPQAYLYDVDDETTVLTIADWFHNTSTELIAAAVVPLADATLINGKGRYLGGPAVPLAVINVQQGKRYRFRMISIACDANHHFSIDGHRLTVIEVDGENHEPATVDNIQIFPGQRYSFVLDATQPVDNYWVRALSSSGVGTSGFIGGLNSGILRYQGAPDADPTTTNSTGVVLTESMLHPLENPGAPGLPFPGGADEVLNLTLGFNLPATFFMNDTQYIPPTVPVLLQILSGAQSPQDLLPPGSVYTLPINKTIEINFFGNATPGGPHPFHPHGHSFDVVRSADNTTYNYENPVRRDVTSVAIGNQTTIRFVTDNPGPWFLHCHIDLHLEL

SEQ ID NO: 1846 - protein, 147 aa, Helianthus tuberosus
MAASDIAVQAGPWGGNGGKRWLQTAHGGKITSIIIKGGTCIFSIQFVYKDKDNIEYHSGKFGVLGDKAETITFAEDEDITAISGTFGAYYHMTVVTSLTFQTNKKVYGPFGTVASSSFSLPLTKGKFAGFFGNSGDVLDSIGGVVVP

SEQ ID NO: 1847 - protein, 194 aa, Oryza sativa
  misc_feature (124)..(124): Xaa can be any naturally occurring amino acid
  misc_feature (138)..(138): Xaa can be any naturally occurring amino acid
  misc_feature (147)..(147): Xaa can be any naturally occurring amino acid
  unsure (1)..(194): unsure at all Xaa locations
MANTKQPELKEPGPSDNQLPDFKKSHKSEQLTTGFGRPLGERTTVVTVGPRGPMLLSDFPYIEDTQRFDRERIPERVVHAKGAGAFGVFEATDDMSDICKAKVFVKGTKTRVLARFSTVAGESXSADTARDPRGFAIXMYTDERLWXDLVGNNTPIFFIRDPFLFLMFIHSQKRYPETHFKDPNMVWDFLARNR

SEQ ID NO: 1848 - protein, 518 aa, Lentinula edodes
MFYFSSFLLLGPIGGALAAIGPVTDLHIVNSFIQPDGFNRSGVLAEGVFPGPLITGNKGDNFQINVIDELTNGTMLLSTSIHWHGLFQKTTNWADGPAFVNQCPIAANDSFLYNFNVPDQAGTFWYHSHLSTQYCDGLRGPLVVYDPQDPYVDLYDVDDDSTVITLADWYHVPAPQAGAVPTSDATLINGLGRSVNGPADAPFAVVNVVQGSRYRFRLVSISCDPNFLFSIDGHTFTVIEADGVNHEPIVADSIQIFAAQRYSFILTANQTADNYWIRANPNNGHTGFAGGINSAILRYSGAPVADPVTTQTSANLLQETSLVPRENPGAPGNATANGVNVDLNLVLSFVGGRFEINGVSFVPPTVPVLLQILSGATTAAELLPSGSVYTLPLNSVIQLSFNTVAVAAVGGPHPFHLHGHTFDVVRSAGSTEYNYINPPRRDVVSTGAAIDNVTIRFTTDNAGPWFLHCHIDWHLEAGFAIVFAEDAPDVAAVNPVPDAWNQLCPTYDALTPAQLGGN

SEQ ID NO: 1849 - protein, 147 aa, Helianthus tuberosus
MAASDIGVQAGPWGGNGGKRWLQTAHGGKITSIIIKGGTCIFSIQFVYKDKDNIEYLSGQFGVQGDKAETITFADDEDITAISGTFGAYYQMTVVTSLTFQTNKKVYGPFGTVAGSRFSLPLTKGKFAGFFGNSGDVLDSIGGVVVP

SEQ ID NO: 1850 - protein, 73 aa, Glycine max
  misc_feature (28)..(28): Xaa can be any naturally occurring amino acid
  unsure (1)..(73): unsure at all Xaa locations
TPPYTAVNSLIHLYTHSMKHQKLSSQCXAERHALDKIYQWIFRQLEGGSRVGTVDALNYIQNDFDYCGEEPSM

SEQ ID NO: 1851 - protein, 290 aa, Solanum tuberosum
MELPCSTNPTPTSTKTPDSEVDTPPLIKPLSFSNGNNHHQPPPCTVVIYKECLKNHAASLGGHAVDGCGEFMPSTESTPSDPISLKCAACGCHRNFHRREPSDNSSPPAHFIDFRRHIFPQIKRFSPSPSPSLSPPPLPSLFQPQPVTPTGLKSENPNGRKRFRTKFTAEQKEKMHSFSEKLGWKLQKCDETAVDEFCNEIGVGKNVLRVWMHNNKNTIGKKDYQISNNSSRDHSFENKNGFNINGTASSNEEEDHHKNNNNDNSTTSNSITMNNKDILEGNLYFVVKFE

SEQ ID NO: 1852 - protein, 548 aa, Lentinula edodes
MFLINVVFGFWLLCVPTSLRLVSGVEIVKSHPRDNIWHEKTDHHDQLFIVNKDIAPDGFQRSTVLAGRTPQDASFPGPLIAGRKGDRFTINVTDLLTDPTMDRSTSIHWHGLSQKTTNYADGVAFVSQCPIATNHSFLYDFGVPDQAGTLWYHSHLSVQYGDGLRGPIVIYDPEDPHQDLYDVDDESTIITIADWFHLTSLQLLAALVVPNADATLINGNGRYVGGPDTPLTVINVEHGKRYRFRLIDMSFDAFHGFSIDNHNLTIIEVDGINTLPHTVNFIEIYPAQRYSFVLNANRPISNYRIRALSNTGVGAQNFTNGVNSAILRYVGAPEEEPQTSQPLSSDVMIFREGDLHPLENPGAPGNPYPGGADLVLNFTLGFDAEMVLFSMNGVVFESPTVPVLLQILSGAHHAQDLLPKGGVHTLPPNKVIEINFFGGDAPAGPHPFHLHGHAFDVVRTSDSSEYNFKNPVRRDTTLVAMKNQTTIRFVTDNAGPWFLHCHIDLHLSLGLAVVLAEDTRDTKKDDMIPADWKGLCPIYNSLTPSQLP

SEQ ID NO: 1853 - protein, 147 aa, Helianthus tuberosus
MAASDIGVQAGPWGGNGGKRWLQTAHGGKITSIIIKGGTCIFSIQFVYKDKDNIEYLSGQFGVQGDKAVTITFADDEDITGISGTFGAYYQMTVVTSLTFQTNKKVYGPFGTVAGSSFSLPLTKGKFAGFFGNSGDVLDSIGGVVVP

SEQ ID NO: 1854 - protein, 503 aa, Zea mays
  misc_feature (362)..(362): Xaa can be any naturally occurring amino acid
  unsure (1)..(503): unsure at all Xaa locations
MSYNKAPSITAETINPRVKIIRYAPCGEIVKHAARLEQEIEENPASIPFQEIIYCNLGNPQVLGQPPLTFFREVLSLCDNPALMDRDEARALFSPCSIRRARRILNSIPSKDTGGYTDCRGIKCLRQVVADGITARDGFPSTADDIFLTDGATSAINLMMQILIRSHEDGILSPLPEYPLYSASIILHGGTMVPYNLTEDNGWGLEIFEVKRCLEEARSAGLTVRAMVVINPGNPTGQVLSVTNQEEIVEFCRKEGLVILADEVYQENIYAENKKFHSFKKVARSLAYDENDLTLVSLHSVSMSYGESGRRGGYMEVSGVAANVKDQIYKVASLTLCPNIAGQILVSLAMDPPKNFPCDLYXLGDESFESFDKEKEQIRSSFCKRAKTLEKAFSGLEGVTCNKLEGALYLFPRLHLPSAAIRAADFEGVSPDIFYAHRLLDATGIAVVPGSGFHQASGTIHIRCTILPDERKIEAMVARLRAFHKAFMNEFRGSQQVMNDLRR

SEQ ID NO: 1855 - protein, 346 aa, Escherichia coli K12
MKSVVNDTDGIVRVAESVIPEIKHQDEVRVKIASSGLCGSDLPRIFKNGAHYYPITLGHEFSGYIDAVGSGVDDLHPGDAVACVPLLPCFTCPECLKGFYSQCAKYDFIGSRRDGGFAEYIVVKRKNVFALPTDMPIEDGAFIEPITVGLHAFHLAQGCENKNVIIIGAGTIGLLAIQCAVALGAKSVTAIDISSEKLALAKSFGAMQTFNSSEMSAPQMQSVLRELRFNQLILETAGVPQTVELAVEIAGPHAQLALVGTLHQDLHLTSATFGKILRKELTVIGSWMNYSSPWPGQEWETASRLLTERKLSLEPLIAHRGSFESFAQAVRDIARNAMPGKVLLIP

SEQ ID NO: 1856 - protein, 539 aa, Staphylococcus epidermidis ATCC 12228
MAKDLKFSEDARQAMLRGVDKLANAVKVTIGPKGRNVVLDKDYTTPLITNDGVTIAKEIELEDPYENMGAKLVQEVANKTNEIAGDGTTTATVLAQSMIQEGLKNVTSGANPVGLRQGIDKAVQVAIEALHEISQKVENKNEIAQVGAISAADEEIGRYISEAMDKVGNDGVITIEESNGFNTELEVVEGMQFDRGYQSPYMVTDSDKMIAELERPYILVTDKKISSFQDILPLLEQVVQASRPILIVADEVEGDALTNIVLNRMRGTFTAVAVKAPGFGDRRKAMLEDLAILTGAQVITDDLGLELKDASLDMLGTANKVEVTKDHTTVVDGNGDENNIDARVGQIKAQIEETDSEFDKEKLQERLAKLAGGVAVIKVGAASETELKERKLRIEDALNSTRAAVEEGIVAGGGTALVNIYQKVSEIKAEGDVETGVNIVLKALQAPVRQIAENAGLEGSIIVERLKHAEAGVGFNAATNEWVNMLEEGIVDPTKVTRSALQHAASVAAMFLTTEAVVASIPEPENNEQPGMGGMPGMM

SEQ ID NO: 1857 - protein, 94 aa, Staphylococcus epidermidis ATCC 12228
MLKPLGNRVIIEKKEQEQTTKSGIVLTDSAKEKSNEGVIIAVGQGRLLDNGTQVAPQVSEGDTIVFQQYAGTEVKRGDKTYLILNEEDILAIIE

SEQ ID NO: 1858 - protein, 393 aa, Magnetococcus sp. MC-1
MPLVTKRGHPLSTIKRSPKPAPLSRPTAPFTNPCSTACVMSPWDAIDVKQTFWTQPATLEIKNMAKIDVFGIGNALVDQVYAVEESFLTQIGEEKGRMSLVDPQRQAELSRALASTPALRACGGSAANSLIALTQLGGSAFHACRVAEDETGHFFAQDLTANGVQHQLHTLPAGSSGSCMVFITPDAERTMCTFLGASADLQPEDVPDAILTTAQWCYVEGYLVTAPNTLAAALKGLQQARANGVKTALSFSDVNMVKFFRDGFSQMLGESGVDLIFCNAEEALAFAETDDMAQATAALKKQSRTFVITLGAEGALLWDGQQEIQVAGQPAKAIDTNGAGDMFAGAFFYGITQGWDFTKAAQLACRCCAVLVTHAGARLPKSRTQEILAQFVP

SEQ ID NO: 1859 - protein, 319 aa, Arabidopsis thaliana
MIAKNIGLNDNHGKDKNSKDVLTKSEYSLRCKTEPTMSGLYNYNNFSPSRAASPQIRTPSSDVDSQYISQLLAEHQKLGPFMQVLPICSRLLNQEIFRITGMMPNQGFTDFDRLRHRSPSPMASPNLMSNVSGGGLGGWNGLPPERIGGPHGMAMEWQGAPASPSSYPVKRILRLDLPVDTYPNFNFVGRLLGPRGNSLKRVEATTGCRVYIRGKGSIKDPEKEEKLKGKPGYEHLNEQLHILIEADLPIDIVDIKLRQAQEIIEELVKPVDESQDYIKRQQLRELALLNSNLRENSPGPSGSVSPFNSNAMKRPKTGR

SEQ ID NO: 1860 - protein, 468 aa, Triticum aestivum
SRVFFFFFFFFFFFFLGVGTGGERKRRLDAPLINSAAKLQRREIGGRQLAARGGGAAAAVPERFRNMQLQEEFDTYDHDAHLFVKLQFLKKRSKIIEIVAAKDIIFALAHSGLCAAFSRVTNKRLSFLNLSPDEVIRSLFYNKNNDSLITVSVYASDHFSTLKCRTTPIEYIRRDQLDAGFPLFESESLKWPGFVEFDDVNGKVLTYSAQDGIYKVFDLKNYSFLYSIPDTNVQEIKISPGIMLLIYDRTPSYVPLKILSIEDGKPLKLFKHLLHRGKKIDFIEQFNEKLLVKQEDENLQILDVRSSELIEISIEKFMTPSAFIFLYENNLFLTFRNRTVAVWNFRGELVTSFEDHLLWHQDCSTNNIYITTDQDLIISYCKSNAAADDGTASSIGSINMSDIMTGKCIAKIAANDPALSIAPRKNGSPSIWSSIPEALEDVTALFYDEDRNEIYTGNSQGLVHVWSS

SEQ ID NO: 1861 - protein, 666 aa, Oryza sativa
  misc_feature (88)..(88): Xaa can be any naturally occurring amino acid
  unsure (1)..(666): unsure at all Xaa locations
MAGSERTVVWFRRDLRIDDNPALASAARDGAVLPVFIWCPADEGQFYPGRCSRWWLKQSLPHLSQSLESLGCPLVLIRAESTLEALLXRCIDSVGATRLVYNHLYDPVSLVRDDKIKKELSALGISIQSFNGDLLYEPWEIYDDSGLAFTTFNMYWEKCMELPIDASPSLAPWKLVPVPGLESVRSCSVDDLGLESSKDEESSNALLMRAWSPGWRNAEKMLEEFVSHGLLEYSKHGMKVEGATTSLLSPYLHFGEVSVRKVYQLVRMQQIKWENEGTSEAEESIHFFMRSIGLREYSRYLCFNFPFTHEKSLLGNLKHYPWKVDEERFKSWRQGMTGYPLVDAGMRELWATGWTHNRIRVIISSFAVKFLLIPWTWGMKYFWDVLLDADLESDILGWQYISGSLPDGHELSRLDNPEVSLIKACLVFTTFSMALVQKCRLTQYLCLVFIVLVDYGKCDCYVLCLVHMVQGQKYDPDGVYVRTWIPELARMPTEWIHHPWDAPSCILEVAGVELGFNYPKPIVDLHIARECLDDSISTMWQLDTAEKLAELDGEVVEDNLSNIKTFDIPKVVLRETSPCALPIDQRVPHASSKDHNLKSKVLKDGSNELCSKLTAEVHSHIQDHGGSLVGPSRYLLQEAGRNYVDEVEDSSTADSGSSISRQRKAA

SEQ ID NO: 1862 - protein, 178 aa, Triticum aestivum
  misc_feature (12)..(12): Xaa can be any naturally occurring amino acid
  misc_feature (107)..(107): Xaa can be any naturally occurring amino acid
  misc_feature (152)..(152): Xaa can be any naturally occurring amino acid
  unsure (1)..(178): unsure at all Xaa locations
MFSGTQQKCKVXCTKTVYPMDQLSTDGAVFHRACFKCHHCKSTLSFSSYSSFEGVPYCKPHFAQLFKETGSYNKSFQSQSPAKSATEKLTPELTRSPSKAAGMFSGXQDKCATCGKTAYPLEKVTVEEKSYHKSCFKCSHGGCALSPFNYAXALEGILYCKHHFSQLFKEKGSYNHLI

SEQ ID NO: 1863 - protein, 411 aa, Rhodomonas salina
  misc_feature (79)..(79): Xaa can be any naturally occurring amino acid
  misc_feature (236)..(236): Xaa can be any naturally occurring amino acid
  unsure (1)..(411): unsure at all Xaa locations
NIVVIGHVDSGKSTTTGHLIYKCGGIDKRVIEKFEKEAAEMGKGSFKYAWVMDKLKAEKERGITIDISLWKFQTGKYDXTIIDAPGHRDFIKNMITGTSQADVAILIIDSTTGGFEAGISKDGQTREHALLAQTLGVRQMIVCLNKFDDKTVNYGQGRYDEIVKEVASYLKKVGYNPDKVPFVPISGWTGDNMIEKATDKMPWYKGPCLLEALDAIVPPKRPTDKPLRLPLQDVYXIGGIGTVPVGRVETGLLKPGMNVTFAPGNKTTEVKSVEMHHEQMSEAEPGDNVGFNVKNLSVKDIKRGNVCSDSKRDPAKQAESFVAQVIVMNHPGEIGNGYAPVLDCHTAHIACKFAEIQSKIDKRSGAVKEELPKSLKKGDAGMVKLVPQKPMCVESYTEYPPLGRFAVRDMK

SEQ ID NO: 1864 - protein, 318 aa, Pirellula sp. 1
MTVRWGLIGTGDIAHKRVAGAIQDDPRSELVAVCRRSERELNLFADQNGVPHRFTDAEQLIALSEVDAVYIATPVGCHCSQTIAAANAGKHVMVEKPMAIDPEQCQQMIEACQNSGVTLGVAYYRRFYPAVERIKNLIDSGSLGRLLSIACVTGNPNRFPADDWRVVLAQGGGGPLMDIGSHRLDLFLHLFGEVQSVQASRIDSPDFEAEQVATLLMQFKGGVHGVLQCYFGTVNTPDRLEVIGTDGRVTIEDLNGDEVLLFTGEGVSRESHPPAENFHSPLIADFTLALQEKRPPMISGHQGKQTNDIIKLAYANAL

SEQ ID NO: 1865 - protein, 398 aa, Hypomyces odoratus
MREIVHLQTGQCGNQVGAAFWQTISGEHGLDSSGIYNGSSELQLERMNVYFNEASDNKYVPRAVLVDLEPGTIDAVKSGPFGQLFRPDNFIFGQSSAGNNWAKGHYTEGAELVDAVLDVVRREAEGCDCLQGFQITHSLGGGTGSGMGTLLISKIREEFPDRMMATFSVVPSPKVSDTVVEPYNATLSIHQLVENSDETFCIDNEALYDICMKTLKLPNPAYADLNYLVSAVMSGVTTCLRFPGQLNSDLRKLAVNMVPFPRLHFFMVGFAPLTSRGAHSFRAVTVPELTQQMFDPKNMMAASDFRNGRYLTCCSIFRGKVAMKEVEDQMRNVQNKNSTYFVEWIPNNIQTALCAIPPRGLKMSSTFIGNSTSIQELFKRVGDQFSAMFKRKAFLHWY

SEQ ID NO: 1866 - protein, 151 aa, Geobacter sulfurreducens PCA
MLHLRKKILVAIDGSPLSDKAAEEAVRMAAGNPSQFKSKIYAMLVLPSAPRSTFTDFVPPPPITETPEWEELRQRVFYVIEKNAREADIPLEIRVVYGEPAEELVKFADKEQIDVIVLGSSGKGFLKRQLLGSVSHKVVKTASCSVYIVKG

SEQ ID NO: 1867 - protein, 307 aa, Ehrlichia canis str. Jake
MLLMRRFEEKSGQLYGMGLIGGFCHLYIGQEAIAAGIQNAITEGDAIITSYRDHGFMLSVGTDPKYVMAELMGKSTGCSKGKGGSMHMFNIEKNFFGGHGIVAAQVPIGTGIALANKYKKNNNIVFTCFGDGAVNQGQVYEAFNIAALWKLPVIYVIENNEYAMGTSVSRSSYITDLYKKGESFGIPGHQVDGMNLFAVTQAAIDAATYCRSNNGPILLEMKTYRYRGHSMSDPAKYRSKQEVEGIKENKDPITHLKNHLISNNIVSDEECNKYDKEIRNIVKEAVDFSQNSSEPDINTLYTDIYKD

SEQ ID NO: 1868 - protein, 437 aa, Zea mays
MSFRSIVRDVRDGFGSLSRRGFEVKFLGHRRGRSHGAVHELRDPAPVIQSSCWANLPPELLRDVIERLEASEATWPNRKSVVSCAAVCRTWREICKEIVKNPEFSGKITFPVSLKQPGPRDVTIQCFIKRDKSTQTYYLYLCLSTAVLVESGKFLLCAKRTSRPTCTEYTIFMNSENLSRSSKMYIGKLRSNLLGTKFAIYDTQPPCNAAEPGKTSRRFYSRKVSPKVSSSTYNIAQVSYELNVLGTRGPRRMNCVMHSIPTSCLEAGGTVPSQLDSILARSTDESFGSISFSKSSVVDRSMRFSSSRFSDISMSSSRRIGDTASGDNDECKERPLILRNKAPRWHEQLQCWCLNFRGRVTVASVKNFQLVAATQPAAGAPTPSQATPVPPPEHEKVILQFGKVAKDMFTMDYRYPLSAFQAFAICLSSFDTKLACE

SEQ ID NO: 1869 - protein, 352 aa, Triticum aestivum
IEQVCTKKQAGTGPEFPGYRRPTRPGNAILIILQLFFAGIIGICLDELLQKGYGLGSGISLFIATNICENIIWKAFSPTTINSGRGAEFEGAVIALFHLLITRSDKVRALREAFYRQNLPNVTNLLATVLVFLIVIYFQGFRVVLPVRSKNARGQQGSYPIKLFYTSNMPIILHSALITNLYFISQLLYRKYSGNFLVNLLGIWKESEYSGHSIPVGGLAYYVTAPSSMADILANPFHALFYVVFMLSACALFSKTWIEVSGSSAKDVAKQLKEQQMVMPGHRESNLQKELNRYIPTAAAFGGVCIGALTVLADFMGAIGSGTGILLAVTIIYQYFETFEKERATELGFFGF

SEQ ID NO: 1870 - protein, 565 aa, Candida glabrata CBS138
MNINDIKELVDQVSVEDVVNCVVNKTTRYLDDTPWYNILKDYVFLIVLYKFVKKIYYYLAGYGLLKSMQLLYKSVANWIFQRLLESPLLRGSVNKEVSKAVAGMEKELIKNDDQLADFEVLPKEGLSSESINSELDKLNSILPHTSWEQGRVSGAVYHGGKELIKLQSEAFEKYCVANQLHPDVFPAVRKMEAEVVSMTLKMFNAPETGCGTTTSGGTESLLLACLSAKVYGLKHRGITEPEMIVPVTAHAGFDKAAYYFGIKIHHVDLDPVTYKVDLKKVKRLINGNTVLLAGSAPNFPHGIVDDIEGLGKLAQKYKIPLHVDCCLGSFIIAFMEKAGFNDIGSFDFRVPGVTSISCDTHKYGFAPKGSSVIMYRNSELRKHQYYVDSKWTGGLYGSPTLAGSRPGALVVGCWSTMIHMGESGYKDSCTRIVSTARKLKDHIRNKLPQLEVLGDPKLSVVSFSSNKLNIYELADRLAKSGWHLNALQKPAALHLAITTLSVPTIDTFIETLTEAVEQMSADPTSTPSTEGTSALYGVAGSVKTTGVADKLITAFLDTLYKVKSD

SEQ ID NO: 1871 - protein, 469 aa, Corynebacterium diphtheriae NCTC 13129
MTEHYDVVVLGAGPGGYVAAIRAAQLGKKVAVVEKQYWGGVCLNVGCIPSKALLKNAEVAHIFNHEAKTFGISGDVSFDFGAAHKRSRQVSSGIVKGVHYLMKKNKITEIDGLGSFKDAKTIEITEGNDAGKVVTFDDCIIATGSVVRSLPGVTIGGNIVSFEEQILKEEAPKSMVIVGAGAIGMEFAYVLVNYGVDITIVEFMDRVLPNEDADVSKEIAKQYKKLGVKLLTGYKTTAITDNGDNVTVEVESKDGSKKDSLTVERCMVSIGFAPRVEGYGLENTGVKLTERGAIEIDDFMRTNVDHIYAIGDVTAKLQLAHVAEAQGVVAAEVIAGAETQELGDYMMMPRATFCNPQVASFGYTEEQAKAKFEGREIKTATFPFSANGKAAGLAETAGFVKIVADAEFGEIVGAHMVGANVSELLPELTLAQRFDLTCEEIGRNVHTHPTLSEAMKEAAEGIMGHMINL

SEQ ID NO: 1872 - protein, 342 aa, Mesorhizobium loti MAFF303099
MKAFYAEEQKRHDPKAFLSSGAAQPNPEKPERVEKLLAGAKSAGCMIEQPRNHGLGPVSAVHTPEYLDFLEHIFERWQRIEGASAEVIPNIHPIARNGSYPASAVGQAGYHMADTACPISGETWQSALWSAWSAVEAAEAVMAGAPAAYALCRPPGHHAFADVAGGFCFINNSAVAAQVLRKQAARVAILDVDLHHGNGTQGIFYARPDVFTVSLHADPVRFYPFFWGHADERGEGPGLGYNFNLPLPRKSADAAFLEALGVAFQRIRAFSPDALVVALGLDAFEGDPFGGLSVTTPGFSRIGEAIGKLGLPSVVVQEGGYLCDALSDNLTAFLTGFGGKVR

SEQ ID NO: 1873 - protein, 768 aa, Ashbya gossypii ATCC 10895
MVLSSVLGFPRIGANRELKKVTESYWAGKATEEELLKVGRELRASNWKLQKEAGVDVIASNDFSYYDQVLDLSLLFNVVPDRYRKHDLSAVDTMFAMGRGLQRLAKDGAPAVDVTALEMVKWFDSNYHYVRPTFSHSTDFKLNGNKPVEEYLEAKQLGIETRPVVLGPVSFLYLGKSDKDSLDLEPLSLLPKVLPLYAELLKQLSDAGAKSVQLDEPVLVLDLAEDVQSAFKTAYEHLGAEKSLDIVLTTYFGTVVPNLKALVDLPVAGLHFDLVRNPEQLDDVLAIVGENQSLSVGVVDGRNIWKNDFAKSAATISKAIEKLGGDRVIVATSSSLLHTPVDLENESALEPEIKDWFSFATQKLHEVVVLAKNASGEDFSSELKANADSIAARAASAITNDPAVQERVAGLNEKLSTRAAPFGERLKEQQPIFKLPLFPTTTIGSFPQTKDIRINRNKHAKGAISTEEYTNFINSQIEEVIRFQEEVGLDVLVHGEPERNDMVQYFGEKIKGYVFTVNGWVQSYGSRYVRPPIIVGDLSRPLPMSVRESVYAQSITTKPVKGMLTGPVTCLRWSFPRDDIDQRTQALQLAFALRDEVNDLESAGIKVIQVDEPAIREGLPLRAGEERSAYLNWAAQAFRVATSGVSNKTQIHSHFCYSDLDPKHIKALDADVVSIEFSKKDDPNYIAEFQDYPNHIGLGLFDIHSPRVPSKEEFIQKIDAILKSYPADKFWVNPDCGLKTRGWEETKASLTNMVEAAKHFRNIHTKKD

SEQ ID NO: 1874 - protein, 461 aa, Mesorhizobium loti MAFF303099
MSKTQTADQITEARRESHLFYLSSLRRPLIDRAEGIYMWTQDGRRFIDGSSGPMVANIGHSNRNVLDAMKRQMDRATFAYRLHFENEPAEELARELAKKLPEGMDRIFFVSGGSEATESCIKLARQWAVATGQASRWKVITRFPSYHGGTLGSLSITGDDALAETFEPMMRVMPTVPAPTAWRDRDNLSMEQRGVRYADMLEEKILAEGPESVVAFIMEPIGGAATAALVAPDSYYARTREICDHYGILLIHDEVMCGAGRTGKFLGGDHWNCKPDIVALSKGLGSGYAPLGALAAPMRLVQPLLASGGFQHGHTYAGNPLACAAGLAVLGEMDRLDLIANAAAMGDVLMDGLKGLAKRFPFIADVRGKGLLTGAEMVADPETLRPIEQGKKATQRLLDLAYERGLIIYGRRVKGGVDGDNFMVAPPMIVTSEQVGEIISIIGDSLEVLASELDLPVEGRG

SEQ ID NO: 1875 - protein, 611 aa, Nicotiana benthamiana
MPAWWGKKSTKNKETQSKEKERDKYVKPRSFDEVLCRNSPRNSKDLNLGGSGSGFSGSGFSGFDSGSSLDKAHPLPRPSVGNDQGVVLGCGSVSVSSTSSSGSSDGPVNTTDQAQFDILFRGNGDNRLSPLSRSPVRSRGTTTTSSPLHPRFSSMNLDSPTGKLDNDVSSESHQLPLPPGSPPSPSALPNPRTCGVAEGSNVNMSKWKKGKLLGRGTFGHVYLGFNRENGQMCAIKEVRVVSDDQTSKECLKQLNQEIILLSNLSHPNIVRYYGSELDDETLSVYLEYVSGGSIHKLLQEYGAFREPVIQNYTRQILSGLSFLHARNTVHRDIKGANILVDPNGEIKLADFGMAKHITSSSLVLSFKGSPYWMAPEVVMNTSGYGLPVDIWSLGCAILEMASSKPPWSQYEGVAAIFKIGNSKDFPEIPDHLSNDAKNFIKLCLQREPSARPTASQLLEHPFVKNQSTTKVTHVGVTKEAYPRSFDGNRTPPVLDSGGRNISPTKGNYASHPVITISRPLSCPREIVKTITSLPVSPTSSPLRQYEPARRSCYLSPPHPAYGIGGHSGYDENDYLMFQARPTTRNTLEPWLEIPQFKVQTPSRSPKLRPIL

SEQ ID NO: 1876 - protein, 134 aa, Glycine max
  misc_feature (9)..(9): Xaa can be any naturally occurring amino acid
  misc_feature (34)..(34): Xaa can be any naturally occurring amino acid
  misc_feature (51)..(51): Xaa can be any naturally occurring amino acid
  misc_feature (59)..(59): Xaa can be any naturally occurring amino acid
  misc_feature (80)..(80): Xaa can be any naturally occurring amino acid
  misc_feature (93)..(93): Xaa can be any naturally occurring amino acid
  misc_feature (104)..(104): Xaa can be any naturally occurring amino acid
  misc_feature (132)..(132): Xaa can be any naturally occurring amino acid
  unsure (1)..(134): unsure at all Xaa locations
SSYILLKPXTSTIDTVSLSLYNPPPPSPYPSINXILQSFFNYLKLLNLFSXIPISLLSXLNPHPFILFLHFFSFSIYYIXHLLLPFPSPKLIXIIFPLISNPSXIIFPKIKSKILPQIFFPSNFPTYYINPXPQ

SEQ ID NO: 1877 - protein, 513 aa, Zea mays
MANIDMAKILADLDRGAGDARLPKTKLVCTLGPASRSVPMLEKLLRAGMNVARFNFSHGTHQYHQETLDSLRQAMHNTGILCAVMLDTKGPEIRTGFLKDGKPIKLTKGQEITVTTDYDIKGDENMIAMSYKKLPVDVKPGNVILCADGTISLAVLSCDPDAGTVRCRCENTAMLGERKNCNLPGIVVDLPTLTEKDKEDILGWGVPNDIDMIALSFVRKGSDLVTVRQVLGQHAKRIKLMSKVENQEGVVNFDEILRETDAFMVARGDLGMEIPVEKIFLAQKMMIYKCNIAGKPVVTATQMLESMIKSPRPTRAEATDVANAVLDGTDCVMLSGESAAGAYPEVAVKIMARICIEAESSLDHEAVFKAMIRSAPLPMSPLESLASSAVRTANKAKAALIVVLTRGGTTAKLVAKYRPRVPILSVVVPVLTTDSFDWTISSEGPARHSLIYRGLIPLLAEGSAKATDSESTEVILEAALKSAVQKQLCKPGDAIVALHRIGVASVIKICIVK

SEQ ID NO: 1878 - protein, 614 aa, Lycopersicon esculentum
MPAWWGKKSTKNKDLQAKEKEREKYVKPRSFDELLSRNSPRTSKDFSGSGSGFSGFDSGSSLEKAHPLPMPSVSSLGNDHGVVLGCGSVSVSSTSSSGSSDGGGPVNTDQAQLDTFRGLGDNRLSPLSRSPVRSRGTTTTSSPLHPRFSSLNLDSSTGKLDDVRSECHQLPLPPGSPPSPSALPNPRPCVVAEGANVNMSKWKKGRLLGRGTFGHVYLGFNRENGQMCAIKEVKVVSDDQTSKECLKQLNQEIILLSNLTHPNIVRYHGSELDEETLSVYLEYVSGGSIHKLLQEYGPFREPVIQNYTRQILSGLSFLHARNTVHRDIKGANILVDPNGEIKLADFGMAKHITSCASVLSFKGSPYWMAPEVVMNTSGYGLAVDIWSLGCTILEMATSKPPWSQYEGVAAIFKIGNSKDFPEIPEHLSNDAKSFIRSCLQREPSLRPTASKLLEHPFVKNQSTAKVAHVGVTKESYLRSFDGSRTPPVLELHPGGRTISPGRNISPAEGNYASHPVITVSRPLICARENVKAITSLPVSPTSSPLRQYEPARKSCYLSPPHSSYGIGGQSGYEANDYSMFQTRPSTRITLEPWLEIPHFRTQTPSRSPKTRPIL

SEQ ID NO: 1879 - protein, 425 aa, Oryza sativa (japonica cultivar-group)
MWDPRRVMTAMSATELVITSRVRLLPPMEPSRRLLLSDYDGAIVSPLPSPPPSSATPFRPGVAVVVGILTSVFSITFLLLLYAKHCKRNAAESSGPYGSGGAFGSSGGGGAGERRNSGVDRAVVESLPVFRFGALRGQKAGLECAVCLGRFEPTEALRLLPKCRHGFHVECVDTWLDAHSTCPLCRSRVDPEDVLLLPEPPKPSTTGPPDPPETKVAAAAAAATAKDKEASLAPAAPAPSPAFRGFFSGRHSTGSVRAPGRVGPASRRSADLVGGDGGAVVGCFEAAKVRKDRVLLMEPAAAVAEPDPEAYDRRFGHRILVSTAGGCEDETAPAAKQRWSEVRPSDLMFVRSEMLVTEAGRYSCSAAVHSGNGRSVISARSLSELAGVSRLPPIRASGEPRAGARRWPGSSWWARGPPALNGPST

SEQ ID NO: 1880 - protein, 323 aa, Haemophilus influenzae R2846
MSHCVERKNITIQDKIMRKTLTVLGSINADHVISVPYFSKPGETLTGDNYQLVYGGKGGNQAVAAARLGANVEFIGCVGSDVIGETMKNAFAQEGIDTTHINTVSQEMTGMAFIQVAQSGENSIVLASGANAHLGEMVVRQSEAQIAQSDCLLMQLETPLSGVELAAQIAKKNGVKVVLNPAPAQILSDELLSLIDIITPNETEAEILTGIAVTDDEQSAVKAASVFHDKGIQTVMITLGAKGVFVSRKGKSRIIKGFCVQAIDTTAAGDTFNGGFVTALLEEKAFDEAIRFGQAAAAISVTKKGAQSSIPTRQETLEFLEHA

SEQ ID NO: 1881 - protein, 606 aa, Methylococcus capsulatus str. Bath
MCGIAGLFNCNLPADELRLDQAVAKLTHRGPDDRGIFLDGRFGMGHTRLSIIDLAGGHQPLFSEDRRLALIANGEIYNFIELRSELTAAGFRFQTQSDSEVILHAYLAFGEGFLERIQGMFAFALYDALEGRLILARDRLGIKPLFLARRPDGIAFASEIKALLPLLDQPREIDPQGLAQYFQNQFSTGATTVLRGVERVLPGEAVVVEAGKTTRRFRYWSPLAVRTEELDFDEAAARFDALMERVMVEHMRSDVPFGLFLSGGVDSSLLLALLTRYSGEPIRTFSVGFPGTSLTDELPLAEGLARRFRSRHREIRPGPQDILHSLPLTVWAADDLMRDNASLPTSLLARAAGEELKVVFSGEGGDEVFAGYGRYRTSPLERLFKSLLAPGSGGFRTRGSFRGRWPKTLFGPALLAAAQSARRPVQESWRETPREWSDLQRMQYVDLCHALPDNLLVKADRMLMAWGVEGRVPFLDHRVVEFGLSLPDRLKIEGRQGKLFLKRWGERLVPAEQLYARKRGFHVPLGEWLDEPFLERLNRILPEHPALTPWFKPAGIRALIARCRDERQGSAMLWAIIQFAIWHRLFISGNGERPEALTDPLEILQR

SEQ ID NO: 1882 - protein, 264 aa, Staphylococcus epidermidis ATCC 12228
MNILKIQILQFNVERGNVDKNMQNIKTKFNQYLDKDTSVVVLPEMWNNGYALEELEQKADKNLKDSSLFIKDLAHTFNVDIIAGSVSNIRENHIYNTAFAINKNKELINEYDKVHLVPMLREPDFLCGGNVVPEPFYLSDQTLVTQIICYDLRFPEILRYPARKGAKIAFYVAQWPSSRLDHWLSLLKARAIENDIFIVACNSCGDDGHTNYAGNSIVINPNGEILDHLDDKEGVLTTHIDVDLVDQQREYIPVFRNLKPHLYK

SEQ ID NO: 1883 - protein, 90 aa, Oryza sativa
  misc_feature (23)..(23): Xaa can be any naturally occurring amino acid
  unsure (1)..(90): unsure at all Xaa locations
WRLILMGAGYYEIEADKRLLGEXGGIPIGIGKNCHIRRPIIDKNARIGDNVKIINVDNVQEAARETDGYFIKSGIVTVIKDALLPSGTVI

SEQ ID NO: 1884 - protein, 769 aa, Arabidopsis thaliana
  misc_feature (50)..(50): Xaa can be any naturally occurring amino acid
  misc_feature (74)..(74): Xaa can be any naturally occurring amino acid
  misc_feature (124)..(124): Xaa can be any naturally occurring amino acid
  misc_feature (200)..(200): Xaa can be any naturally occurring amino acid
  misc_feature (382)..(382): Xaa can be any naturally occurring amino acid
  unsure (1)..(769): unsure at all Xaa locations
MASHIVGYPRMGPKRELKFALESFWDGKSTAEDLQKVSADLRSSIWKQMXAAGTKFIPSNTFAHYDQVLDTTGXWLGAVPPRYGYTGGEIGLDVYFSMARGNASVPAMEMTKWFDTNYHYIVPXSWGPEVNFSYASHKAVNEYKEAKALGVDTVPVLVGPVSYLLLSKAAKGVDKSFELLSLLPKILPIYKEVITELKAXAGATWIQLDEPVLVMDLEGQKLQAFTGAYAELESTLSGLNVLVETYFADIPAEAYKTLTSLKGVTAFGFDLVRGTKTLDLVKAGFPEGKYLFAGVVDGRNIWANDFAASLSTLQALEGIVGKDKLVVSTSCSLLHTAVDLINETKLDDEIKSWLAFAAQKVVEVNALAKALAGQKDEALFSXANAAALASRRSSPRVTNEGVQKAAAALKGSDHRRATNVSARLDAQQKKLNLPILPTTTIGSFPQTVELRRVRREYKAKKVSEEDYVKAIKEEIKKVVDLQEELDIDVLVHGEPERNDMVEYFGEQLSGFAFTANGWVQSYGSRCVKPPVIYGDVSRPKAMTVFWSAMAQSMTSRPMKGMLTGPVTILNWSFVRNDQPRHETCYQIALAIKDEVEDLEKGGIGVIQIDEAALREGLPLRKSEHAFYLDWAVHSFRITNCGVQDSTQIHTHMCYSHFNDIIHSIIDMDADVITIENSRSDEKLLSVFREGVKYGAGIGPGVYDIHSPRIPSSEEIADRVNKMLAVLEQNILWVNPDCGLKTRKYTEVKPALKNMVDAAKLIRSQLASAK

SEQ ID NO: 1885 - protein, 116 aa, Glycine max
MTYQNLVLSFHITSEAIMLAGLAFKRKWQNRRKQEGKPFDKPNIVTGANVQVCWEKFARYFEVELKEVKLRDDYYVMDPEKAVELVDENTICVAAILGSTLNGEFEDVKRLNDLLI

SEQ ID NO: 1886 - protein, 338 aa, Sulfolobus tokodaii str. 7
MDELPILPTTVIGSYPRPKWLREAIRLHKAGKISDEDLQEAFDDAVVTVLHDHEIAGVDVPTDGEMRRDEMVEFFAERLAGFKFYGPVRVWGTNYYRKPSVVSKVEYIKPMLVDEFLFAKSVSYTENLKITITGPYTIAEWSYNEYYKSKKDLAFDLAKVINSEMKKLVEAGAKIIQVDEPAIHTHKNEVEWAIEAVNESIKGINVKVVMHVCYGEYSYLEPYLDKLNVDQINLALKNYNYEPVKLFKKWDREIGVGVIDVHNKRIETPEEVANDLKMLLDYFKPEMIWVNPDCGLKLLPRKIAFQKLLNMVKGTKIVREELKNKGYNSTSLKPLVNR

SEQ ID NO: 1887 - protein, 319 aa, Staphylococcus epidermidis ATCC 12228
MRRLFAIGEALIDFIPNVTHSKLKDVEQFSRQVGGAPCNVAATVSKLGGKSEMITQLGNDAFGDIIVETIEQLGVGTQYIKRTNKANTALAFVSLQDDGQRDFSFYRKPSADMLYQPENIDDIQVFQDDILHFCSVDLIESDMKYAHEKMIEKFESVDGTIVFDPNVRLPLWEDKLECQRTINAFIPKAHIVKISDEELLFITGKRNEDEAIQSLFRGRVNVVIYTQGAQGATIYTKDDYRIHHEGYQVQAIDTTGAGDAFIGAIIYCILESRYSECKDLFKEKGKDILAFSNRVAALTTTKHGAIESLPTKEDIKDYN

SEQ ID NO: 1888 - protein, 403 aa, Crocosphaera watsonii WH 8501
MISTFPQTNSVHFSQIRLEIRTLQAQLVEWRRYLHQRPELGFQEEITADFIHQTLTKIGIPHETGIAKTGIVATIESFHPGPVLAIRADIDALPIYEENEVPYRSLHEGTMHACGHDGHTTIALGTAYYLWKHRRNFKGTVKIIFQPAEESPGGAKPMIEAGVLKNPDVDSIIGLHLWNNLPLGTIGVRSGPLMAAVECFRLNIFGKGGHGAMPHQTVDSVVVSAQIINALQSIVSRNINPIDSGVVTVGELHAGTALNVIADTARMSGTVRYFNPEFEGYFAQRIEDIVKGICQGYGADYELDYWRLYPPVINDENMADLVKSVALEVIETPIGIAPECQTMGGEDMSFFLEEVPGCYFFLGSANAEKGLNYPHHHPRFDFDETVLPLGVEMFVRCVEKFCV

SEQ ID NO: 1889 - protein, 347 aa, Comamonas testosteroni
MFIRNCWYVAAWDTEIPAEGLFHRTLLNEPVLLYRDTQGRVVALENRCCHRSAPLHIGRQEGDCVRCLYHGLKFNPSGACVEIPGQEQIPPKTCIKSYPVVERNRLVWIWMGDPARANPDDIVDYFWHDSPEWRMKPGYIHYQANYKLIVDNLLDFTHLAWVHPTTLGTDSAASLKPVIERDTTGTGKLTITRWYLNDDMSNLHKGVAKFEGKADRWQIYQWSPPALLRMDTGSAPTGTGAPEGRRVPEAVQFRHTSIQTPETETTSHYWFCQARNFDLDDEALTEKIYQGVVVAFEEDRTMIEAHEKILSQVPDRPMVPIAADAGLNQGRWLLDRLLKAENGGTAP

SEQ ID NO: 1890 - protein, 491 aa, Salmonella typhimurium LT2
MANYFNTLNLRQQLAQLGKCRFMGRDEFADGASYLQGKKVVIVGCGAQGLNQGLNMRDSGLDISYALRKEAIAEKRASWRKATENGFKVGTYEELIPQADLVVNLTPDKQHSDVVRSVQPLMKDGAALGYSHGFNIVEVGEQIRKDITVVMVAPKCPGTEVREEYKRGFGVPTLIAVHPENDPQGEGMAIAKAWAAATGGHRAGVLESSFVAEVKSDLMGEQTILCGMLQAGSLLCFDKLVAEGTDPAYAEKLIQFGWETITEALKQGGITLMMDRLSNPAKLRAYALSEQLKEIMAPLFQKHMDDIISGEFSSGMMADWANDDKKLLTWREETGKTAFETAPQYEGKIGEQEYFDKGVLMIAMVKAGVELAFETMVDSGIIEESAYYESLHELPLIANTIARKRLYEMNVVISDTAEYGNYLFSYACVPLLKPFMAELQPGDLGSAIPEGAVDNAQLRDVNDAIRSHAIEQVGKKLRGYMTDMKRIAVAG

SEQ ID NO: 1891 - protein, 475 aa, Arabidopsis thaliana
MGGGFRVLHLVRPFLAFLPEVQSADRKVPFREKVIYTVISLFIFLVCSQLPLYGIHSTTGADPFYWMRVILASNRGTVMELGITPIVTSGLVMQLLAGSKIIEVDNNVREDRALLNGAQKLLGILIAIGEAVAYVLSGMYGPVGQLGVGNAILIILQLFFAGIIVICLDELLQKGYGLGSGISLFIATNICESIIWKAFSPTTINTGRGAEFEGAVIALFHMLITKSNKVAALRQAFYRQNLPNVTNLLATVLIFLIVIYFQGFRVVLPVRSKNARGQQGSYPIKLFYTSNMPIILQSALVSNLYFISQLLYRKFSGNFFVNLLGQWKESEYSGQSIPVSGLAYLITAPASFSDMAAHPFHALFYIVFMLTACALFSKTWIEVSGSSARDVAKQLKEQQMVMPGHRESNLQKELNRYIPTAAAFGGVCIGALTVLADFMGAIGSGTGILLAVTIIYQYFETFEKEKASELGFFGF

SEQ ID NO: 1892 - protein, 477 aa, Citrus sinensis
MGILSKIATNNGHGEDSAYFDGWKAFDRNPFHPTQNPGGVIQLGLAENQLCFDLIKDWITKNPYASICTAEGVEVFKDIAIFQDYHGLPEFRQAVAKFMGKGRGGRVTFDPDRIVMGGGATGANELIMFCLANPGDAFLVPSPYYAAFDRDLSWRTGVQIVPVHCDISNNFKITREALEAAYERAQEASINIKGLIITNPSNPLGTTLDRDTLKSLVSFINDKNIHLVCDEIYAATALSSPKFTSVAEVIQEMDCNRDLIHIIYSLSKDMGLPGFRVGIVYSFNDTAVNCGRKMSSFGLVSSQTQYLLASMLSDDEFVDNFLVETSKRLAKRHHNFTKGLEQVGINCLKSNAGLFFWMDLRHLLKEKTLEGEIALWRTIVNDVKLNVSPGSSFQCTEPGWFRVCFANMDDDTLQVALNRIAAFVQQDKESEKPTKKRWQQNLRVSFSSRIYEQGVMSPHMMSPHSPIPQSPLVRART

SEQ ID NO: 1893 - protein, 447 aa, Mycobacterium avium subsp. paratuberculosis K-10
MDDGYVSDIKRGRAARNAKLASIPVGFAGRAAIGFGKRLTGKSRDEVQAELLEKAANQLFTVLGELKGGAMKVGQALSVLEAAVPEEFGEPYREALTKLQKDAPPLPAAKVHRVLDAQLGTKWRERFSSFDDTPVASASIGQVHKGVWSDGREVAVKIQYPGADEALRADLKTMQRLVGVFKQLAPGADVQGVVDELIERTEMELDYRLEAENQRAFAKAYQDHPHFAVPRIVASAPKVVIQEWMQGIPMAEIIRHGTTEQRDLMGTRLLELTFDAPRRLGMLHGDAHPGNFMLLPDGRMGVIDFGAVAPLPDGLPVELGMTIRLARDKNYDLLLPTMEKAGFIQKGQQVSVRDIDDMLRQYVEPVEVEVFHYTRKWLQKMSAIEIDRSVSQIRTARQMDLPPKLVIPMRVIMSVAAILCQLDAHVPIKALSEELVPGFAEPDNAIV

SEQ ID NO: 1894 - protein, 427 aa, Candida glabrata CBS138
MTETRVGGKPFTIVIKLGTSSLVDEKTKEPRLAIMSLIVETVVKLRRLGHNVVIVSSGSIGVGLHILGMEKRPKHLSEVQAIAAIGQSKLIGRWDSLFAHFGQSIAQILLTRNDILDWSQYRNAQNTVEELLKMGVVPIINENDTLSVQEIKFGDNDTLSAITAGLIHADYLFLLTDVDCLYTADPRSDPDAKPILIVPDLSKGLPGVDTSSGSGSDVGTGGMQTKLVAAELATNAGVHTIIMKSDAPSNIYKIVKYIQSLHDTGEDNKVFEGDLMKLQLEEYEKLDRMGVPFHTKFLANSISRHLRNKEFWILHGLVTSGAVIIDEGAYKALTRKNKAGLLPVGVIEIEGSFHEMECVDLKVGKRLPNGELDPDYPLTIVGRARCNYPSLEISKIKGQQSDEIENELGYCNSEYIAHRENMAFPPH

SEQ ID NO: 1895 - protein, 449 aa, Mycoplasma pneumoniae M129
MAQVYSQEVYVQYLKRYGFVFQSSELYNGLANSWDFGPLGAVLKQQIKTALYNFFIKNKRDVLLIDTPIILNEQIWKASGHLANFTDALVDCKSCKLRFRVDHLDEQIKSATQWNPKQVNCPNCKANNWSEVRDFNLLFQTEIGVVNSEKRLVYLRPETAQGIFINFKQLLQLKKRPLPFGVAQFGKSFRNEVTPGNFLFRVREFEQFEMEWFCNPQASLSVFESQQQAIAHFLFKVLQLNPALVKQYEYDKNELAHYANKTVDFLFQFPHGLRELWGLADRGTFDLEQHQKYAKKPLDFFDGENNEHFIPAVVEPSVGIERLFYALIVSSYQQEQLEGEMREVLRLPFHLCPEQIVVLPLVNKLKETAQTLFEALSQTHWRIGFESAGSIGKRYRKADAIGTKFAITFDFESLEDQAVTIRERDSLKQVRVPIKELKAWFAQHDDQSH

SEQ ID NO: 1896 - protein, 281 aa, Arabidopsis thaliana
MANPWWTNQSGLAGMVDHSVSSGHHQNHHHQSLLTKGDLGIAMNQSQDNDQDEEDDPREGAVEVVNRRPRGRPPGSKNKPKAPIFVTRDSPNALRSHVLEISDGSDVADTIAHFSRRRQRGVCVLSGTGSVANVTLRQAAAPGGVVSLQGRFEILSLTGAFLPGPSPPGSTGLTVYLAGVQGQVVGGSVVGPLLAIGSVMVIAATFSNATYERLPMEEEEDGGGSRQIHGGGDSPPRIGSNLPDLSGMAGPGYNMPPHLIPNGAGQLGHEPYTWVHARPPY

SEQ ID NO: 1897 - protein, 499 aa, Mycoplasma pneumoniae M129
MSSPKKNFKKPQPKTENQKQALNEERIAELKKSRILGKNRPFKKMIYVDTKAQRKQKHENVAFLKTLQENKESDVPKKRRGRKPKHAPLKEKNNLKLFDILEGSLKSHTENDDTNKVISLLVEVWEKKNKKKDNNSLSNKDIVNVLSKFELPDDEIIFVLDELRDKGIELPHDVEEHIHEFRANQDLSIIDEDIEELTTKNISNRDKVDDNVRFFLGSLDSSKMLDFESEQRIAKVLNSTDEESRKYAINQLVTSNLRLVVSIAKKHLERGLDFNDLIQEGNLGLLKAISKFNWSLGNKFSTYATWWIKQAITRAIADQARTVRIPVHMVETINRLAKAERALNQELGREPTAEELAEKMGGQAEGFTVKKIAEIKRLSLDPVSLDKTVGHDEESQFGDFVRDTDAQMPDEFTESRSNYEKIDELLNNCLSEQEELIVRMRIGMPPYNETKTLDEVSQKIKIPREKIRQIETKAIRKLRQAVRNNHMSLSFMRGNEKKD

SEQ ID NO: 1898 - protein, 151 aa, Brassica napus
ITVLQIVHVPNLKVGTVLLSCAFLYDIFWVFVSKKLFHESVMIVVARGDKSGEDGIPMLLKIPRMFDPWGGYSIIGFGDILLPGLLIAFALRYDWLANKTLRTGYFIWAMVAYGLGLLITYVALNLMDGHGQPALLYIVPFTLGTMLTLAR

SEQ ID NO: 1899 - protein, 487 aa, Bacillus cereus ATCC 10987
MGVLLPVNAGQISKLRLEGDVQELEKNLKKDLKIRHITMISIGGVIGAGLFVGSGAVVHSAGPGSIISYALAGLLVIFVMRMLGEMAAINPTSGSFATYAREAIGPWAGYTIGWLYWFFWVIVIAIEATAGAGIIQYWIPEIPLWLLSLILTILLTLTNVFSVKSFGEFEYWFSFIKVISIVLFLCLGLAVILGFVPGTEAPGTSNLVGQGGFMPNGISSVLLGITVVIFSFMGSEIVAVAAGESAEPVKAVKTATNSVIWRILVFFIGSIAVVVTLLPWNSANILKSPFVAVLEHIGVPAAAQIMNFIVLTAVLSCLNSGLYTNSRMLFSMAERGDAPKAFLKLNNSGVPVRAVLFGTFFAYIGVVFSYISPDKVFLFLVNASGGIALLVYLVIAVSHLKIRKKMGKVEQQNLKVKMWFFPYVTYVTIAAIIAVLVAMLAIESLRSQALLTMLVTVLIILSYFIFNRNKNSTVSNTTSKNEESVRF

SEQ ID NO: 1900 - protein, 506 aa, Saccharomyces cerevisiae [sequence omitted]

SEQ ID NO: 1901 - protein, 612 aa, Ashbya gossypii ATCC 10895
MAQRVFFHMVALVLCQLLNLGLVAAKVHRFNFTTGWVTARPDGVAKQVIGFNGQWPLPDIHVDKGDRVELYLTNGFADVGTTLHFHGLFHNSSEGNLAAMDGPDMVTQCGIPPGQTYLYNFSVPTQVGTYWYHSHTGAQYADGMRGAFVVHDPDAQLEYDEEMTHMVGDIYHKPYTQLVHEFLSRYNPTGAEPVPQNLLFNNTVDGSLYFKPNKTYLLRIINGAFFVSQYLYLEGHEFTIVETDGVYVQPNATNLLYLASGQRVSVLVHTKETTDRNFAFMQLFDEDMLDDIPSSLQLNRTNHVIYDDSKPRANPYFLPDYNNPAEEFYLTPLHGKPLYEHYDRQVVLDLHMDNLADGVNYAFFNNITYTTPKVPTLTTALTAGEFASNPLIYGNVNPFVLRYGEIVEIVINNYDDGKHPFHLHGHNFQLVQKSPASISEDGETVRYNESAPVMPYPEFPATRDTVVLEPNGHIVLRFRADNPGVWIFHCHVNWHMEQGLAAVFIEAPHELQAGDPLSDNYRQVCAASNIPNAGNAGGNSANWLDLSDAPRQQDPLPAGFTAKGYFAFALTTLAGLLGLYTITNFGLQKSVIDDAEMYNKLSVLLKENNVLD

SEQ ID NO: 1902 - protein, 224 aa, Bacillus halodurans C-125
MIFFDIDDTLLDHQGAERRGAAQFYHQYRHELPYGKADFLQAWEEASEHFYTKYLTGCLSLQEQRRERIRSFFPELLDVEADERFQDYLDYYEVNWRRFDDVKACLDRWTKAGLSLGVISNGSQQQQQSKLERLEIREFFRYVVTSEAAGVAKPDPHIFAYACNLAKEAVESCFYVGDRLKTDAVASQQAGLTGVWLNRLGKELRETDVIIIRSLDELDKYLTI

SEQ ID NO: 1903 - protein, 459 aa, Arabidopsis thaliana
  misc_feature (206)..(206): Xaa can be any naturally occurring amino acid
  unsure (1)..(459): unsure at all Xaa locations
MQIFVKTLTGKTITLEVESSDTIDNVKAKIQDKEGIPPDQQRLIFAGKQLEDGRTLADYNIQKESTLHLVLRLRGGMQIFVKTLTGKTITLEVESSDTIDNVKAKIQDKEGIPPDQQRLIFAGKQLEDGRTLADYNIQKESTLHLVLRLRGGMQIFVKTLTGKTITLEVESSDTIDNVKAKIQDKEGIPPVQQRLIFAGKQLEDGXRTLADYNIQKESTLHLVLRLRGGMQIFVKTLTGKTITLEVESSDTIDNVKAKIQDKEGIPPDQQRLIFAGKQLEDGRTLADYNIQKESTLHLVLRLRGGMQIFVKTLTGKTITLEVESSDTIDNVKAKIQDKEGIPPDQQRLIFAGKQLEDGRTLADYNIQKESTLHLVLRLRGGMQIFVKTLTGKTITLEVESSDTIDNVKAKIQDKEGIPPDQQRLIFAGKQLEDGRTLADYNIQKESTLHLVLRLRGGSF

SEQ ID NO: 1904 - protein, 416 aa, Staphylococcus epidermidis ATCC 12228
MNMNDTIFLFLCTLLVWLMTPGLSLFYGGLVQSKNALNTVMQSMVAIVIVTFIWIMIGFSLSFDGGNQWIGGLKFLGLHHVGFETSKTLSPHIPLSLFMLFQMMFCTIAVSILSGSIAEKMRFIPYLIFVSLWVLLIYSPVAHWVWGGGWISKIGAIDYAGGTVVHITSGVSGLVLGIMIGIGKKKEKHTPHNLLITLIGGILVWLGWYGFNVGSAFTFDHIAMISFVNTVIGASAGAFGWLIFEYILKKTTSLLGLLSGALSGLVAITPAAGYVSYMSAMIIAIMGGIGCYIVINLIKVKLQYNDALDAFGIHGVGGILGAVFTGVFQSHQINSAVENGFIYTGDFKIVVIQLGAAIATVVFSAIVTFLIARFIKIFTPLATTQEEDKTGLDVIVHGEKAYFYGELNKFNRHIKF

SEQ ID NO: 1905 - protein, 472 aa, Pseudomonas putida KT2440
MSGQNMHSGELKRGLKNRHIQLIALGGAIGTGLFLGSAGVMKSAGPSMILGYAICGFIAFMIMRQLGEMIVEEPVAGSFSHFAHTYWGGFAGFLSGWNCWVLYILVGMSELSAVGKYVHYWWPEIPTWVTAAAFFVLINAINLMNVKFFGEAEFWFAIIKVVAIVSMIGLGAYLLTSGSGGPEATVANLWTHGGFFPNGVSGLVMALAFIMFSFGGLEMLGFTAAEADKPKTVIPKAINQVIYRILIFYVGALVVLLSLTPWDNLVASIDASGGSYGSSPFVQVFSLLGSDVAANLLNFVVLTAALSVYNSGTYCNARMLLGMAEQGDAPASLAKVDKRGVPVRSILVSAAVTFVAVLLNYLMPQNALELLMSLVVATLVINWAMISYSHLKFRQHLDRTGQKPLFKALWYPYGNYVVLAFVVLILGIMLMIPGIQVSVYAIPVWLLAMLVVYMVKSRRQVNAGGAVETVAK

SEQ ID NO: 1906 - protein, 514 aa, Streptomyces griseus
MSASTSRTLPPEIAESESVMALIERGKADGQIAGDDVRRAFEADQIPPTQWKNVLRSLNQILEEEGVTLMVSAAESPKRARKSVAAKSPVKRTATKTVAAKTTVTRTVAATAAPAVESADAADDAVAAAPAKKTAAKKATAKKAAAKKTTAKKTAAKKSGKQDDEILDGDEAAEEVKAGKGEEEEGEGENKGFVLSDDDEDDAPAQQVAVAGATADPVKDYLKQIGKVPLLNAEQEVELAKRIEAGLFAEDKLANADKLAPKLKRELEIIAEDGRRAKNHLLEANLRLVVSLAKRYTGRGMLFLDLIQEGNLGLIRAVEKFDYTKGYKFSTYATWWIRQAITRAMADQARTIRIPVHMVEVINKLARVQRQMLQDLGREPTPEELAKELDMTPEKVIEVQKYGREPISLHTPLGEDGDSEFGDLIEDSEAVVPADAVSFTLLQEQLHSVLDTLSEREAGVVSMRFGLTDGQPKTLDEIGKVYGVTRERIRQIESKTMSKLRHPSRSQVLRDYLD

SEQ ID NO: 1907 - protein, 644 aa, Triticum aestivum
  misc_feature (75)..(75): Xaa can be any naturally occurring amino acid
  misc_feature (278)..(278): Xaa can be any naturally occurring amino acid
  misc_feature (535)..(535): Xaa can be any naturally occurring amino acid
  misc_feature (566)..(566): Xaa can be any naturally occurring amino acid
  misc_feature (586)..(586): Xaa can be any naturally occurring amino acid
  misc_feature (595)..(595): Xaa can be any naturally occurring amino acid
  unsure (1)..(644): unsure at all Xaa locations
NKFVQKSRLVPVRNSRDIVDPRVRGIPVIMMSKNDSMSTVFRCLSEGAVDFLVKPIRKNELKTLWQHIWRRCHSXGSESGIHTQKCSKPKAGDEYENNSGGSHDDDDDDDDDADDDFSVGPNARDGSDNGSGTQSSWTKRAVEIDSPQLLSSDHLAESPDSTCAQVIHPRSEIGSNRWLPTANKRNINNQKENNDDSMGKYLEIGAPRNSSLGYQSSPNEMSVNPTEKQHENLTSQNKSVNKIVIDKPTCQTADLISSIARNTESKQAARITVAPHCXSSHAPDGTEMKNDSPINMPSQELGLKISETARCGTEIHDERSIPKRSNLSAFTRYHTPMASPKCCPTLIGSHRSMVPGGATFRGSCSPQDNSSEAVETNSTCKMESNSDAAQIKQGSNGSSNNNDMGSSTKNAIAKPCTDRERVMSPSLVKSNQQTSAFHPVQHQVSPADAARKDKASEEIVNAVKVGHSSEAQQSSVQHHHHAHYYRHVIAQQQTLIDRASNARCGSSNASDLPLEGHAANYGVNGSISGSNNGSXTQNASSSAPNIARPNMDSGAMDKTEAGGWHXGVGAGPSGNGNDMVCQNQLXHGEAAVNKXFRQKRKDRNFGKKVRYQSRKRLPEQGPRVRGQFVRQSGQEDEAGQAEDR

SEQ ID NO: 1908 - protein, 275 aa, Agrobacterium tumefaciens str. C58
MYDVSANGANIPALGFGTFRIPEDDVRRILPEALKLGFRHVDTAQIYKNEGAVGEVIAQSGISRHDIFLTTKVWVDRYRHDDFLASVDESLAKLKTDYFDLLLLHWPKSDVPLAERMGALNAVRKAGKARNIGISNFNVALTEEAVKLSDTPLATNQIEYHPYLDQTKVISAARKHGMSVTAYYLMADGKVPNDPVLKDIGAKHGKTAAQVTLRWAVQQPDIVALSKTATESRLKENFDIFDFALSEEEMQAIHALAKPNGRIVSPGHLAPDWDD

SEQ ID NO: 1909 - protein, 476 aa, Comamonas testosteroni
MSTVLYRCPELLIGGEWRPGRHEQRLVVRNPATGEPLDELRLASADDLQLALQTTQQAFEHWRQVPAHERCARLERGVARLRENTERIAHLLTLEQGKTLAEARMECAMAADLIKWYAEEARRVYGRVIPARLPNSRMEVFKFPVGPVAAFSPWNFPLVLSARKLGGAIAAGCSIVLKAAEETPASVAAMVDCLNQELPPGVVQLLYGVPAEVSQALIASPVVRKVTFTGSVPVGRHLAELSARHLKRITLELGGHAPVIVCGDADIARTVNLMVQHKFRNAGQACLAPTRFFVDRRIYGDFVDAFGATQALRVGAGMAAETQMGPVASARRQAAVQDLIARSVAAGARPVASAVPEAGYFVAPTLLADVPLDAPVMSEEPFGPVACAVPFDSLDQAIAQANHNPYGLAGYLFTDSAKAILAVSERLEVGSLAVNGMGVSVPEAPFGGVKDSGYGSESGTEGMEAFLDTKFMHYVA

SEQ ID NO: 1910 - protein, 123 aa, Brassica napus
QGFGSINYNGKGGDNSVDYSYNDQVDLQWPPHELPYGSTVDTRNHPPPSDMAATGGERRKRRRTRSNKNKEEIENQRMTHIAVERNRRKQMNEYLAVLRSLMPPCYSQRGDQASIGGGAINYL

SEQ ID NO: 1911 - protein, 337 aa, Glycine max
  misc_feature (150)..(150): Xaa can be any naturally occurring amino acid
  unsure (1)..(337): unsure at all Xaa locations
FGSRLKEVKLRDGYYVMDPEKAVEMVDENTICVAAILGSTLNGEFEDVKLLNDLLVEKNKETGWDTPIHVDAASGGFIAPFLYPELEWDFRLPLVKSINVSGHKYGLVYAGIGWVIWRSKEDLPEELIFHINYLGADQPTFTLNFSKDNXTHSIGSSQVIAQYYQLIRLGYEGYKMVMENCNDNMAVLKEGLEKTGRFEIISKDIGVPLVAFTLKDHTHFNEFQISDMLRRYGWIVPAYTMPPDAQHVTVLRVVIREDFSRTLAERLVIDVTKVVHELDLLPARVISTNTIMVTGEAGEENDEKVLFAKKSEIETQREITKAWKKFVMDRKKMNGVC

SEQ ID NO: 1912 - protein, 444 aa, Burkholderia fungorum LB400
METVMLSHEDNETLVRVGPGTPTGQFMRLYWLPFLPSSDLTVDGQPQRVRLLGEDLIAFRDSEGRVGLVDHVCPHRGAPLVFGRNENCGLRCVYHGWQFGVDGQVIDTPAEPAESRLKDKVRIRSYPCRERNGIVWAYMGEADANALPPLPNLEWNMVPLENVHFSFRVQECNWLQAVEGEIDSAHAPILHGRIDSQGAINEWTAKRDLRPVFECQRREFGISIASRRVLDDSHHYWRVNQFLFPFYTLVPPQSKYPELSGHAWVPVDDENTLCLMFSYTPAAPLYEKTRKLFEDGHAGRETGHASAHAFAPRPVTQPYAKYWTRFNLESAFQFDYDAQTKTWFSGLPGLWVQDAACQSGVAPIYDRRKENLGISDTGVAMTRRLLLENVRKLASERVSPVRVDDPDLWMVRAVSLTLPAGAPWQSDGAEHMRARLGADFGYTP

SEQ ID NO: 1913 - protein, 180 aa, Glycine max
  misc_feature (8)..(9): Xaa can be any naturally occurring amino acid
  misc_feature (12)..(14): Xaa can be any naturally occurring amino acid
  misc_feature (20)..(20): Xaa can be any naturally occurring amino acid
  misc_feature (45)..(46): Xaa can be any naturally occurring amino acid
  unsure (1)..(180): unsure at all Xaa locations
INYIANHXXGVXXXLAKAAXLKRTGKSCRLRWLNYLRPDVRRGNXXPEEQLLIMELHAKWGNRWSKIAKHLPGRTDNEIKNYWRTRIQKHIKQAENFQQQISNNSEINDHQASTSHVSTMAEPMETYSPPFYQGMLEPFSSIQFPTINPDQSSCCTNDNNNSINYWSMEDIWSMQLLNGD

SEQ ID NO: 1914 - protein, 378 aa, Triticum aestivum
  misc_feature (156)..(156): Xaa can be any naturally occurring amino acid
  misc_feature (214)..(214): Xaa can be any naturally occurring amino acid
  misc_feature (268)..(268): Xaa can be any naturally occurring amino acid
  misc_feature (313)..(314): Xaa can be any naturally occurring amino acid
  misc_feature (317)..(317): Xaa can be any naturally occurring amino acid
  unsure (1)..(378): unsure at all Xaa locations
NKFVQKSRLVPVRNSRDIVDPRVRAGDEEPLIRQVVGGADPLDNDLELDSQFLGFVQRFGKTYRDAEEHAHRLSVFKANLRRARRHQMLDPSAEHGVTKFSDLTPAEFRRTFLGLKTTRRSFLREMAGSAHDAPVLPTDGLPEDFDWRDHGAVGPXVKNQGSCGSCWSFSASGALEGANYLATGKMEVLSEQQLVDCDHECGPAEPDSCDAGCXGGLMTSAFTYLWKSGGLERGKGYPYTGKDGSCQFEKSKIAASVQNFSVVAVIKXQISATLVKTEPLAIGINPAYKQTYIGGVSCPKFSGRHLDHGVHLXXYGXSGFAPSRFKEKPYWIIKNSWGENWGDKQGYYKICRGSNVRNKCGVDSMVSTVSAMHASKEE

SEQ ID NO: 1915 - protein, 414 aa, Crocosphaera watsonii WH 8501
MTQANDLLTLTESQIEVSFFIDEDLETPSNDIVEPETKKTRKISASRRRDPSKKKPYTEDSIRVYLQEIGRIRLLRAEEEIELARKIADLLQLERIREALWEELDQEPNDDQWGHRIFQWENIEQRLCSQKNKEPKWSDIVAELNKAEIISDLEKTWKQQSKAYLPKFKRRLYLGRRAKDKMVHSNLRLVVSIAKKYMNRGLSFQDLIQEGSLGLIRAAEKFDHEKGYKFSTYATWWIRQAITRAIADQSRTIRLPVHLYETISRIKKTTKLLSQEMRRKPTEEEIATRMEMTIEKLRFIAKSAQLPISLETPIGKEEDSRLGDFIEADGETPEDEVSKNLLREDLENVLDTLSPRERDVLRLRYGLDDGRMKTLEEIGQIFNVTRERIRQIEAKALRKLRHPNRNSILKEYIR

SEQ ID NO: 1916 - protein, 689 aa, Cryptococcus neoformans var. neoformans JEC21
MASLPIVEPEPEPDIEGHNPQQQIHTNTSTSSGYPSNTGDATSQQQQNVLSEQEPGGSAPAIKQPTTLRTILKPRSRPGHARVPSIKISEVDPVSHGTADLPSRPNSAPTISVDVNSGSAFGINRLAPLKNISIPLPPKMGPPESEEEKLPKTFIEPTWRQCFRNTIKAQPALAAVPIILPISWALHFSHQDPIAIFVTSLIAIVPLAGGLGFATEELAHRVGEAWGGLLNASFGNAVELLIAILALVKGQLDIVQASMVGSILSNVLLVLGMSYFAGGLRFHEQLYTIIGAQMHISLLGISLMAIVLPAAYHYAYPSTSDIVSSTRAGSQPEGEELENLLKMSRGLSFILLAVYAMFLTFQLYTHAYLFRIPREKVRHPLPGPAPHHQHVFPRPHWVDSIVDSSSSSSSSASSVSSVKSNRRFRKFRKFSVSSKKEQRQKEPCADGHEADNEGEQRQIPGNPLNPETPPVSEKNDNTLTQSSPISPFRTSSNISDTLRPSVANEDIERQSVVSSAESEHIIVDEDGTVHVQPKVKFHFALGMLFLMTALAGVTAEWLVDSIDGLTATGHVSREFVGLILLPVIGNSVEHITAVTVSVKDKLNLSMSIAVGSSIQVSLCLLPILVLIGWAIGQPMLLFFDTFETMALVISVLLVNFAISDGRTNYLEGFVMMMAYLSIALVCWFYDPLV

SEQ ID NO: 1917 - protein, 726 aa, Arabidopsis thaliana
MTEIDRSRAFAKDVKRIVVKVGTAVVTGKGGRLALGRLGAICEQLAELNSDGFEVILVSSGAVGLGRQRLRYRQLVNSSFADLQKPQMELDGKACAGVGQSSLMAYYETMFDQLDVTVAQMLVTDSSFRDKDFRKQLSETVKAMLRMRVIPVFNENDAISTRRAPYKDSTGIFWDNDSLAALLSLELKADLLILLSDVEGLYTGPPSDSTSKLIHTFIKEKHQDEITFGEKSKLGRGGMTAKVKAAVNAAYGGVPVIITSGYAAENISKVLRGLRVGTLFHQDAHLWAPVVDTTSRDMAVAARESSRKLQALSSEDRKQILHDIANALEVNEKTIKAENDLDVAAAQEAGYEESLVARLVMKPGKISSLAASVRQLAEMEDPIGRVLKKTQVADDLILEKTSSPIGVLLIVFESRPDALVQIASLAIRSGNGLLLKGGKEARRSNAILHKVITDAIPETVGGKLIGLVTSREEIPDLLKLDDVIDLVIPRGSNKLVSQIKNSTKIPVLGHADGICHVYVDKSGKLDMAKRIVSDAKLDYPAACNAMETLLVHKDLEQNGFLDDLIYVLQTKGVTLYGGPRASAKLNIPETKSFHHEYSSKACTVEIVEDVYGAIDHIHQHGSAHTDCIVTEDSEVAEIFLRQVDSAAVFHNASTRFSDGFRFGLGAEVGISTSRIHARGPVGVEGLLTTRWIMRGKGQVVDGDNGIVYTHKDLPVLQRTEAVENGI

SEQ ID NO: 1918 - protein, 479 aa, Xanthomonas oryzae pv. oryzae KACC10331
MPIPTPDSRLPTPDSRLPTPDSRLPTPDSRLPTPDSRLPTPDSRLPNPKSQIPNPKSQIPNPGPPMTIKTLALQCRDAAQVVSQLSSQAKCALLQAMAAALEADAGTILAANARDLEAARAKGTASAMLDRLALDDKRLAGIAAALREVALLPDPVGRITREDVRPNGIRVQKVRVPLGVIAMIYEARPNVTADAAALCIKAGNGVILRGGSEAIHSNTAIARALQRALREANVPEAALTLVEDLRRETMLELLQLNDIVDLAIPRGGEGLIRFVAEHARVPVIKHYKGVCHLFVDASAEMELALRLLIDGKATRPSACNSLETLLVHADIAERFLPLAAQALRERKVELRGDAATRAVLPEIAPASDDDYAAEFLDLILAMRVVADLDTALAHIRQYGSDHTEVIATQDPDNAERFVQSLRSAVVMVNASSRFSDGGELGLGAEIGISTTRLHSYGPMGLEALTVERFVVRGEGQVRH

SEQ ID NO: 1919 - protein, 675 aa, Salmonella enterica subsp. enterica serovar Typhi Ty2
MKLAAFALTLIPGIAIASSWTSPGFPTLSTQETGRFTSHAALTKGTRALTLHIDQQCWQPSGAIKLNQMLSLKPCEGAPPQWRLFKDGDYTITVDTRSGTPTLLLSIKTEPERTTQLAYQCPVWDGSPLTLDVRQTFPEGTVVRDYYSGQIDTVQNGKITLLPADSHGLLLLERAETHASAPFNWRNATVYFVLTDRFRNGDPTNDHSYGRHKDGMQEIGTFHGGDLRGLTSQLDYLQQLGVNALWISSPFEQIHGWVGGGTKGDFPHYAYHGYYTQDWTTLDANMGSEADLRALVDGAHQRGIRILFDVVMNHAGYATLADMQEYQFGALYLSGAERQKILGDRWTNWRPAAGQSWHSFNDYINFSDSAAWEKWWGKKWIRTDIGDYDSPGFDDLTLSLAFLPDIKTESTTPSGLPVFYANKPDTKAKFIEGYTPRDYLTHWLSQWVHDYGIDGFRIDTAKNVELPAWQQLKTQASAALHEWKQANPDKALDDSPFWMTGEAWGHGVMKSDYYRYGFDAMINFDYQEQAAKAVDCLAEMGPVWQQMADKMQDFNVLSYLSSHDTRLFREGGDKAAELLLLSPGAVQIFYGDESARPFGPTGSDPLQGTRSDMNWQDVSGKSAAAVAHWQRISQFRARHPAIGAGQQTTLTLKHGYGFVRQYGDDTVMVVWAGRR

SEQ ID NO: 1920 - protein, 395 aa, Xanthomonas oryzae pv. oryzae KACC10331
MSGTRTEYAAAMSTPASTSSPFAEQALPPWRRAVLKVGSSLLAADGGGLSPRFALGLAQFVSANLAAGRELVIVSSGAVAAGRAILPKAVDVGAPIAARQALAALGQAQLIALWQRFFERPVAQVLLTHDDLRNRRRYLNARATLGELLRLGALPVINENDTVSVDELKLGDNDNLAAIVAALVDADALFIATDIDGLYSADPRSNPLARPLDDVPELTPEVLAMAGGSGSNVGTGGMRTKLEAAAKAGAAGIETYLFNGRSGEVVRALAQDRLRGTRIHAARTRIAARKYWLRHAPVEAGAILVDAGAAMALSDKGASLLPGGVVGAEGDFRRGDMVEIRLRDDEGERCLARGVSQYSAVDIRRIARRHSREIENVLGYSYGENVVHRDDLVLL

SEQ ID NO: 1921 - protein, 457 aa, Cryptococcus neoformans var. neoformans JEC21
MPPKLTALQPPSPSPPPPTNDAQDLLVIQDIMDTLDQIPPELTRVHSDLNELGAVLYSTLVSLEKKLYTLIDWIQDPNVTPEKRFELLQEIAEEAARYKLGGDDKIRVAAGACDGILNHQKHISNLLASSTLLVPSPPSPYSQSLTLPFPQPVTNSRRVARAANSPFGSRGYTANGGPSETKVGDTPSKKKRSRVQQLGARDDDESSSAGGEKKKPVKRRKQNRATSPTDSVVSNSGFGGKPIEPRTARQLAAAANRARREADDGGSDTESRTGNDEKRSNVPMQPSFSIDSKRTDGLGLDTGSREGSGVRSANVTPTLGYAAVMPPTAELKRPSRRGGKRSSTNIPAAEEFEEEESEGYGDDDRSKRGERYAEMEMGEETGGAGDDLDSKVYCTCRQVSYGEMIGCDDDDCEIEWYHIGCLGLDKTPAGNWICPRCIERRKKQPRGKKGTRGKARK

SEQ ID NO: 1922 - protein, 445 aa, Phalaenopsis hybrid cultivar
MARGIGLGAPLSKIAVSKAHGEDSPYFAGWKAYDEDPYDPVANPTGVIQMGLAENQVSFDLLEDYLEQHPETASWSSGISGFKENALFQDYHGLQSFRKAMASLMEQIRGKRVKFNPDRMVLTAGATAANELLTFILADPGDAVLVPTPYYPGFDRDLQWRTGVKIFPVHCHSSNGFQLTLPSLQSAYSIAEASNLRVKALLITNPSNPLGTTMPRSLLEDILNFISQKNIHLISDEIYSGSVFSSPEFISVAEVVEASQHKNCDGVHIVYSLSKDLGLPGFRVGTIYSYNDRVVTTARRMSSFSLVSSQTQKMLASMLSDEEFTVKYIKTNRERLRRRHGYIVEGLKDAGIECLEGNAGLFCWMNLTQMLEEKSMEGELRLWKMILSEVKLNVSPGSSCYCAEPGWFRVCFANMTKETLEVALRRTKDFVEKIKGRKSNVIFRS

SEQ ID NO: 1923 - protein, 212 aa, Paenibacillus polymyxa
ANVFWEPLSYYNPSTWQKADGYSNGDMFNCTWRANNVNFTNDGKMKLSLTSSAYNKFDGGEYRSKNTYRYGLYEVNMKPAKNTGIVSSFFTYTGPANGTQWDEIDIEFLGKDTTKVQFNYYTNGIGGHEKVVDLGFDASSGFHTYAFDWQPGYIKWYVDGVLKHTATTNIPKTPGQIMMNLWNGTGVDSWLGPYNGVNPLYAEYDWVKYTSN

SEQ ID NO: 1924 - protein, 338 aa, Bartonella phoceensis
TASCESKITYIDGNKGMLLYRGYPIDQLAEKGDFLESCYLLLYGELPTKQEKNDFDRCITQHTMVHEQFARFFHGFRRDSHPMAVMVACLGAMSAFYHDSIDITDPQQRMIASVRLISKVPTLAAMAYKYSIGQAFVYPRNDLSYAANFLRMCFSVPCEEYKINPVLVRAMDRIFILHADHEQNASTSTVRLAGSSGANPFACIAAGVACLWGPAHGGANEACLKMLQEIGSVERIPEFIARAKDKNDPFRLMGFGHRVYKNYDPRAKIMQKTCHEVLKELNIQDDPLLEIAMELEKIALNDEYFVEKKLYPNVDFYSGITLKALGFPTEMFTVLFAL

SEQ ID NO: 1925 - protein, 397 aa, Burkholderia vietnamiensis G4
MDGLKSGVDTLFLLIGAVMVLAMHAGFAFLELGTVRKKNQVNALVKILVDFSVSTLAYFFIGYTIAYGVEFFDDIGSLSQHNGYALVRFFFLLTFAAAIPAIVSGGIAERAKFNPQLVATMIIVGFIYPFFEGIAWNERFGVQAWLTHAFGAPFHDFAGSVVVHAFGGWVALPAVLLLGARHGRYAKDGRIAAHPPSNIPFLALGAWVLAVGWFGFNVMSAQTLDKISGLVAVNSLMAMVGGTLAAWMAGRNDPGFTYNGPLAGLVAVCAGSDVMHPIGALVTGAAAGALFVAMFTCVQNKWRIDDVLGVWPLHGMCGALGGLAAGVFGMPALGGLGGVSFMSQLIGTLGGIAIATAGGTLVYGALKATVGLRLDREAEFDGADLSIHRISATPERD

SEQ ID NO: 1926 - protein, 482 aa, Bartonella rattimassiliensis
ELEDKFENMGAQMLREVASKTNDIAGDGTTTATVLGHAIVQEGIKAVAAGMNPMDLKRGIDAAVDEVVANLFQKAKKIQTSAEIAQVGTISANGAVEVGKMIADAMEKVGNEGVITVEEAKTAETELEVVEGMQFDRGYLSPYFVTNAEKMVADLDDPYILIHEKKLSNLQSLLPVLEAVVQSGKPLLIIAEDVEGEALATLVVNKLRGGLKIAAVKAPGFGDRRKAMLEDIAILTSGQVISEDVGIKLENVTLDMLGRAKKVNISKENTTIIDGAGQKSEIAARVNQIKAQIEETTSDYDREKLQERLAKLAGGVAVIRVGGATEVEVKEKKDRVDDALNATRAAVEEGIVAGGGTALLRAASALTVKGINPDQEAGINIVRRALQAPARQIATNAGEEAAIIVGKVLENNADTFGYNTATGEFGDLIALGIVDPVKVVRSALQNAASIASLLITTEAMVAEVPKKDTPMPPMPAGGMGGM

SEQ ID NO: 1927 - protein, 353 aa, Ashbya gossypii ATCC 10895
MSSSMQQAVVLREKGAIVYEHRPVPVIEDPHYVKVKIEKTGICGSDVHYYLHGSIGPFVVRSPMVLGHESSGTVVEVGSDVTRVRIGDRVAIEPGVPSRYSEETKSGHYNLCREMRFAATPPYDGTLVKYYISPEDFLVKLPDSVSLEEGALCEPLAVAVHANRLAGTQFPSRVVVFGAGPVGLLTASVAKAFGATTVAIVDISKHKLCVAPALGVTHPVDSSDCSSPEALANKLRAELRSDVDIAFDCSGAEICIAAAVLICRPGGTHVQVGSSRDYVSFPLAEATVKQLRILGSFRYAAGDYATAVELLASKRVDAARLVTHRFPFDRAVEAYKFNATADEHIIKTIIEGP

SEQ ID NO: 1928 - protein, 788 aa, Magnetospirillum magnetotacticum MS-1
MDGKIVWVHAAGKLVRDEANGAIRFMYGAYQDITAVKAAEDAIRAAKEIAEEATKAKSDFLANMSHEIRTPMNAIIGMSHLALQTKLDKKQRNYIEKVHRSGENLLGIINDILDFSKIEAGKMTMESIDFRLEDVMDNLANLVGLKAEDRGLELLFNVAPDIPSALIGDPLRLGQILINLGNNAVKFTEKGEIIVGAELVERSEDQAELHFWVRDSGIGMTPEQCGKMFKSFSQADTSTTRKYGGTGLGLAISKTLVELMDGRIWVESEAGKGSTFHFHVRVGVQSHPPLRRVFSPDELLGLRVLVVDDNAAAREILSAMAKGFGLEVDSAWDGTQALEMVAAAERKDLPYDLILMDWKMPIMDGVETVQKLQHGDHARIPAVIMVTAYGREEAATNAEERGVVMKTVLTKPVTAASLLEAIGETLGKGVVAEHQGQDKAESYKETMKALEGCRVLLVEDNEMNQELATELLSQAGMEVVVAVHGQDALDILARDNRFDGILMDCQMPVMDGYTATRAIRANPALSAIPVIAMTANAMAGDREKVMEAGMLDHIAKPLNLETMFSTMAKWIKVAKAPAKTAPAPREKPKTAEVSGGLPDLPGIDIKAGMATMANKESLYLRMLAKFRDSQGHFADLFAAARQDPDPQAATRAAHTLKGTAGNIGAKGVQSAAAALEQACKEGRPEGEIRQALVSALAELDPVIAALGRMDAPETTKAPAIPEAEVTAALARLAALLEDSDAEAGDLLDELLPKLEGTALAGALKPVADAIEDCDLDLALAKLRGLDVK

SEQ ID NO: 1929 - protein, 486 aa, Bartonella rattimassiliensis
ELEDKFENMGAQMLREVASKTNDIAGDGTTTATVLGHAIVQEGIKAVAAGMNPMDLKRGIDAAVDEVVANLFQKAKKIQTSAEIAQVGTISANGAVEVGKMIADAMEKVGNEGVITVEEAKTAETELEVVEGMQFDRGYLSPYFVTNAEKMVADLDDPYILIHEKKLSNLQSLLPVLEAVVQSGKPLLIIAEDVEGEALATLVVNKLRGGLKIAAVKAPGFGDRRKAMLEDIAILTSGQVISEDVGIKLENVTLDMLGRAKKVNISKENTTIIDGAGQKSEIAARVNQIKAQIEETTSDYDREKLQERLAKLAGGVAVIRVGGATEVEVKEKKDRVDDALNATRAAVEEGIVAGGGTALLRAASALTVKGINPDQEAGINIVRRALQAPARQIATNAGEEAAIIVGKVLENNADTFGYNTATGEFGDLIALGIVDPVKVVRSALQNAASIASLLITTEAMVAEVPKKDTPMPPMPAGGMGGMGGMD

SEQ ID NO: 1930 - protein, 478 aa, Bartonella phoceensis
MGAQMLREVASKTNDVAGDGTTTATVLGQAIVQEGVKAVAAGMSPMGVKRGIDAAVDEVVANLFKKAKKIQTSAEIAQVGTISANGAAEIGKMIADAMEKVGNEGVITVEEAKTAETELEVVEGMQFDRGYLSPYFVTNAEKMVADLDDPYILIHEKKLSNLQSLLPVLEAVVQSGKPLLIIAEDVEGEALATLVVNKLRGGLKIAAVKAPGFGDRRKAMLEDIAILTSGQVISEDVGIKLENVTLNMLGRAKKVNISKENTTIIDGAGQKNEISARVSQIKAQIEETTSDYDREKLQERLAKLAGGVAVIRVGGATEVEVKEKKDRVDDALNATRAAVEEGIVAGGGTALLRAASALTVKGSDPDEEAGINIVRRALQAPARQIATNAGEEAAIIVGKVLENNADTFGYNTATGQFGDLIALGIVDPVKVVRSALQNAASIASLLITTEAMVAETPKKDTTMPPMPAGGMGEWAEWI

SEQ ID NO: 1931 - protein, 135 aa, Brassica napus
MSSAPSDDAHWCYHCNKRVVVETLDDFVVCSECNKGFVESIHPIPRSPPLSPDLRVEDSSIGSHFLQMLRLLTHAPAPPRLDVLSYEDEFFGLEINSRNEEDEDDEAEEEEEEAGEDRGRGDVPDRRRARGPPHP

SEQ ID NO: 1932 - protein, 767 aa, Candida glabrata CBS138
MVKSAVLGFPRIGPNRELKKITEAYWAGKVSVDELFKVGKEIRESNWKLQQAAGVDIIPSNDFSFYDQVLDLSLLFNAIPERYTKYGLAPIDTLFAMGRGLQRKATETEKAVDVTALEMVKWFDSNYHYVRPTFSHSTQFKLNGQKPVDEFLEAKALGIQTRPVLLGPVSYLFLGKADKDSLDLQPLSLLEKLLPVYIEILSKLKEAGATEVQLDEPILVLDLPQEAQDAIKTAYTKLGAAANIPKITLATYFGTVVPNLKAIQGLPVDAFHFDFVRAPQQFDEVIAAIGQNQKLSVGIVDGRNIWKNNFAKSSDFVKAAINKLGEDRVIVATSSSLLHTPVDLENESKLNPEIKSWFSFATQKLDEVVVIAKNVSGQDVSAALDANAKLIASRAASNITNDPAVQKRVASIDSKMSTRLAPFAERLAEQKEIFKLPLFPTTTIGSFPQTKDIRINRNKFTKGTITAEEYEKFINSEIEKVIRFQEEVGLDVLVHGEPERNDMVQYFGEQINGYAFTTNGWVQSYGSRYVRPPIIVGDLSRPKAMTVKESVYAQSITDKPVKGMLTGPVTCLRWSFPRDDIDQKTQAMQLALALRDEVKDLESAGIKVIQVDEPAIREGLPLREGAERSAYYVWAAEAFRVATSDVSNKTQIHSHFCYSDLDPNHIKALDADVVSIEFSKKDDANYIAEFKNYPNHIGLGLFDIHSPRVPSKEEFISKIETILKTYPAEKFWVNPDCGLKTRGWDETRQSLTNMVEAAKYYRAKYSN

SEQ ID NO: 1933 - protein, 252 aa, Bacillus anthracis str. A2012
MDIEVKNEKKKPQLKDHELKALIQKSQDGDQQARDTIVQSNMRLVWSVVQRFLNRGYEPDDLFQIGCIGLLKSVDKFDLSFDVKFSTYAVPMIIGEIQRFLRDDGSVKVSRSLKETGNKIRKMRDELSKEFGRAPTINEVAEALELTPEEVVLAQEASRAPSSIHETVYENDGDPITILDQIADQSETKWFDKIALKEAIRELDERERLIVYLRYYKDQTQSEVAERIGISQVQVSRLEKKILKQMKDRIDE

SEQ ID NO: 1934 - protein, 555 aa, Triticum aestivum
  misc_feature (485)..(485): Xaa can be any naturally occurring amino acid
  misc_feature (514)..(514): Xaa can be any naturally occurring amino acid
  unsure (1)..(555): unsure at all Xaa locations
REQKLELHRGGGRSRTSGSPGLQEFGTSGGGIYTKAADVGADLVGKVERNIPEDDPRNPAVIADNVGDNVGDIAGMGSDLFGSYAESSCAALFVASISSFGTEHNFAAMMYPLLISAMGIVVCLATTVVATDVAEVKTVEEIGPALKRQILISTVLMTVGIAIVSFLVLPHSFTLFDFGRRKLVKNWYLFICVSAGLWAGLVIGYVTEYFTSNAYRPVQAVANSCRTGAATNVIFGLAVGYKSVIVPIFAIATAIYASFRLAAMYGIALAALGMLSTIATGLSIDAYGPISDNAGGIAEMSGMPHVVRERTDALDAAGNTTAAIGKGFAIGSAALVSLALFGAYVSRAGVAAVDVLSPRVFAGLLVGAMLPYWFSAMTMRSVGSAALAMVEEVRRQFDSIPGLMEGTAKPDYATCVKISTDASLKKMLAPGALVMLSPLVAGTLFGTETLAGLLAGALVSGVQVAISASNSGGAWDNAKKYNRGXAPRAEAPALGAPGGRDAHKSRRSSGDTIXGDPLKDTSGPSLNILIKLMAVEALVFAPFFAAHGGLIFKHL

SEQ ID NO: 1935 - protein, 240 aa, Oryza sativa
  misc_feature (40)..(40): Xaa can be any naturally occurring amino acid
  unsure (1)..(240): unsure at all Xaa locations
WRGRRRRRAGRRSGRCTPPPPPPPRWQPAAGQGRTPPPPXAAVAPWVMPTIGFPPPHAAAMVPPPPHPPPFCRPPLHVWGHPTAGVEPTTAAAPPPPSPHAQPPLLPVWPRHLAPPPPPLPAAWAHGHQPAPVDPAAYWQQQYNLQRFPVPPVPGMVPHPMYRPIPPPSPPQGNKLAALQLQLDAHPSKESIDAAIGDVLVKPWLPLPLGLKPPSLDSVMSELHKQGIPKVPPAASGAAG

SEQ ID NO: 1936 - protein, 459 aa, Candida glabrata CBS138
MGQILSNPVIDKEHHSGADLLTAFGLCAMQGWRMSMEDAHIVEPNVLPETDDEHIAFYSIFDGHGGSAVAQFCGSKMVSILTSQESFKEKKLKQALIDTYLKTDEELLKDPEMRNDHSGCTATSILVSKLQQTLVCGNSGDSRTVLSINGVAKALSFDHKPTLTSERSRIVAADGFVEMDRVNGNLALSRAIGDFEFKSNDKLGPHEQIVTCVPDIVEHRLNYDNDEFVILACDGIWDCLSSQECVDLVHHGIMKGDMSLNDISSRIIDVCCSPTTEGTGIGCDNVSIVVVALLKENETINAWFERMRNKGYKPPHSFEEQRRSIFSYYQFPEDDEKVFDVTTKKPQDRFNQDSEISTGDEDERNKMEIDEDDNDRSGAQKKTGASIPVDLLSLEALLNGAGNIQLNQGPDNVSYISGSSLTDMINSLSRAAAMANNTRDSDSEEEDTKIIEDVSDKQE

SEQ ID NO: 1937 - protein, 675 aa, Oryza sativa
IHLKSLVLSLLSLPPMEPSRRLLLSDYDGAIVSPLPSPPPSSATPFRPGVAVVVGILTSVFSITFLLLLYAKHCKRNAAESSGPYGSGGAFGSSGGGGAGERRNSGVDRAVVESLPVFRFGALRGQKAGLECAVCLGRFEPTEALRLLPKCRHGFHVECVDTWLDAHSTCPLCRSRVDPEDVLLLPEPPKPSTTGPPDPPETKVAAAAAAATAKDKEASLAPAAPAPSPAFRGFFSGRHSTGSVRAPGRVGPASRRSADLVGGDGGAVVGCFEAAKVRKDRVLLMEPAAAVAEPDPEAYDRRFGHRILVSTAGGCEDETAPAAKQRWSEVRPSDLMFVRSEMLVTEAGRVQLETITSRALFLSTIGCYYYPMVNMHVSRRQSGDVIVVRVSLIETWRTTDDDVLSRSSLLGGPDEHDVREHLLDVGGVGEEGAAAAAGPKIRVRGLTRRSEARGEEILRGVDLDVPRGVVVGVIGPSGSGKSTLLRALNRLWEPAPGAVLLDGVDICGIDVLALRRKVGMLFQLPAMFDGTVADNVRYGPQLQGKKLTDAEVQSLLSLADLDPALCSKPASELSVGQAQRVALARTLANDPEVLLLDEPTSALDPISTQNIEEAIVRLKKTRGLTTVMVSHSVKQIQRIADLVCLLVAGEVVEVLPPSELSEAKHPMARRFLELS

SEQ ID NO: 1938 - protein, 137 aa, Leuconostoc mesenteroides subsp. mesenteroides ATCC 8293
MVERTFMMIKPDGVSRGKIGEIIQRIEHKGYAIKAMKMVQPTPELLAKHYAEHVGKSFYPSLVQYMTLGPVIAMIGEGTNIVSGWRTIMGTTNPTLAAPGTIRGDLGREWEGEAVMNIVHGSDSVEAAEYEIKLWFA

SEQ ID NO: 1939 - protein, 523 aa, Apium graveolens var. dulce
MAGAFNVSGDDSGGSKDVGSPVIFDAVKKPKRNKYAFGCAILASMTSVLLGYDIGVMSGAAIYIKDQLHVSDVKLEIVVGIINFFSLVGSALAGRTSDWIGRRYTMVLAGAIFFVGAILMGFATNYSFLMFGRFVAGIRSRLCPHDCSGVHGRGFFSIISWISYFIPGSFINIGVLLGYVSNYAFSKLPANLGWRFMLGIGAIPSIGLAIGVLGMPESPRWLVMKGRLGEARQVLDKTSDSKEESRLRLSDIKQAAGIPEECNDDIVVMPKRRNDEAVWKELLLHPTPSVRHAFIAGVGLHFFQQSSGIDAGGLYSPRIFEKAGITSTDLKLLATIAVGISKTLFILVATFLLDRIGRRPLLLTSMGGMIISLTLLGTSLAVIATQITQFIGPGHWQSSEVYHTWAVFFWLGPIAWGYSSEVFPLRLRAQGCSIGVAVNRGTSGIISMTFLSLYKAISIAGAFYLFAAIAGVAWIFIFTLLPETQGRSLEEMGLLFGTYFGWRKTLKGLKNREAEEAKNANVI

SEQ ID NO: 1940 - protein, 351 aa, Alkalilimnicola ehrlichei MLHE-1
MSTMQAAVFVEPGRIEVQEKPIPEIGPTDALLRVTTTTICGTDVHILKGEYPVEPGRIVGHEPVGVIEKLGEAVTGYEPGQRVIAGAITPCGQCHACQDGVSSQCGGKAMGGWQLGNTIDGCQAEYVRIPNAQANLTPVPDELTDEQVLMCPDIMSTGFGGAENGHIRIGDTVAIFAQGPIGLCATAGAKLMGATRIIVVDGVPERLETARKLGADVGVNFREQDPVEAIMELTGGRGVDVAIEALGLQETFEACLRVLKPGGTLSSLGVYSGKLSMPLDAIAAGLGDHTIVTTLCPGGKERMRRLMEVVAAGRVDLTAMVTHRYTLDQIVEAYDLFSHQRDGVLKVAITP

SEQ ID NO: 1941 - protein, 334 aa, Staphylococcus epidermidis ATCC 12228
MTKVYYDETVTQDALQGKKIAVIGYGSQGHAHAQNLKDNGYDVVIGLRPGRSFNKAKEDGFDVYTVSEATQQADVVMVLLPDEIQGEVYNKEIKPYLEKGNALAFAHGFNIHFSVIEPPSDVDVFLVAPKGPGHLVRRTFVEGSAVPALFGVQQDATGQARNIALSYAKGIGATRAGVIETTFKEETETDLFGEQAVLCGGVSKLIQSGFETLVEAGYQPELAYFEVLHEMKLIVDLMYEGGMENVRYSISNTAEFGDYVSGPRVITPNVKENMKKVLEDIQNGNFSRRFVEDNKNGFKEFYQLREDQHGHQIEQVGRELREMMPFIKSKSIEK

SEQ ID NO: 1942 - protein, 577 aa, Gloeobacter violaceus PCC 7421
MLEYDIVIVGGGLAGSRAAVEIARTDNRLKVALVSKVHPIRSHSVAAQGGIAAALQNVDPQDNWLTHAFDTVKGADYLADQDAVAVLTQQAPQVIIDLEHMGVLFSRLPDGRIAQRPFGGHTHQRTCYAADKTGHAILHELVSRLFQYKVPIFEEWYVLELIVEEGEARGLVMFHIPTGRIEVVRAKAILFATGGYGRVFNTTSNDYASTGDGLCLAAMAGLPLQDMEFVQFHPTGLYPVGVLISEAVRGEGAHLINDAGERFMAGYAPSRMELAPRDITSRAIATEIREGRGVGGGRYVHLDLRHMGKEKILERVPFAHDEALRHLGIDVVYEPMPVRPTVHYSMGGIPTTVDCQALAAHGQVMEGFFAAGECSCVSVHGANRLGSNSLLECVVYGARAGASLARYVQDRRLPHVDEARHRRVAEQGIQNLLDQPGSLRIDALRREFQDTLTDHCSIFRDEQILKTGLEKIQQLKARYGDIRLDDKGKLYNTEITEAFELRSLITVGEIIVASALERRESRGAHSRSDYPERNDGEYLKHTLAYREGDALRIDYRPVDLSLQAVDPERFTPQARKY

SEQ ID NO: 1943 - protein, 145 aa, Carboxydothermus hydrogenoformans Z-2901
MLIPFDPWREMLNFKNQMERFFERGDFLEPFNPARLFSPRVEIFEEGADVVVRAEIPGLNAKEDLEVIVEPESLTLRGEIRDERERKQERFYRSERYYGKFSRTIALPAEVEPDHARASYQNGILEVRMKKSGKNNPRARRIEIQ

SEQ ID NO: 1944 - protein, 329 aa, Streptomyces coelicolor A3(2)
MKAAVIESVGRAVVTEVPDPTPGPREVVVEVAACGLCGTDLHILQGEFAPKLPIVPGHEFAGAVVGVGAQVTEVAVGDQVAVDPSLYCYECRYCRTGHNNLCERWAAIGVTTAGGAAQYAVAPVANCVKLPEHVRTQDAALIEPLSCAVRGYDVLQSRLGAHVLIYGSGTMGLMMLELAKRTGAASVDMVDLNPARLETARGLGVSASAATPDELDRPQGWDLVIDATGNAAAIQDGLDRVAKAGTFLQFGVADYATRVQIDPYRIYNQEITITGSMAVLHSYERAAELFANGVLDPDVFISDRIELARYPQALEQFAAGVGRKIVVVP

SEQ ID NO: 1945 - protein, 461 aa, ASPERGILLUS NIDULANS FGSC A4
MGSLEAGHRHRDHLPAIGFIGSRGPTTSPAPLVSPTTMYPNNPLPYSYSTTPANVGPGYASPPEPRRAEDEKEKAPRQSLPSIHEALGNDNPLPYPPAPTSAAPQQPNSAPPPHHLPNFGRSSAEGPSGPPNPFSNGSSFLRESSSSHQPQLQAEPSRSSLASLNTTDSRNASLQSISSGKSPTQSASTVMTSVSGSQTGTGYDYNAPPSAGSVASPNGYSGFSQPFPFQSQPPPGAPVYPAASYDSRPYEMKGGVTGSFGHQGDSAKRHLDVYDIESSLTEMVDLNTRALDFSRHYANRAHQSRSGAVVGSALPSLHEVEEMLNIQRRNHDALMRIRAVVFSQEHAMAEQVAQRKAFKFGGAHDDDHRMAMYQEEFKSSGGFGPDSKKRRGKAAPPGRCHSCNRAETPEWRRGPDGARTLCNACGLHYAKLTRKMGAKQAAGLGSNLKPKTLDSVSPRSH

SEQ ID NO: 1946 - protein, 428 aa, Zea mays
EVASEMSKNVKALDEQEVTSQHSRAQTSDAAEEQQQQQQAVDPLARQSSIMSLTLEELQNSLCEPGRNFGSMNMDEFMANIWNAEEFQAATAGCNKEGAEREPVPVATTTGTGENGGGGGSGRGLVRQGSFALPPPLSRKTVEEVWAEISQGPADFQASAAPQPVAQPQAASGGGVAASGRQATLGEMTLEDFLVKAGVVRGAFAGHGHGVGMVPAGPMGMQHNAAPPMMYQVAAAAAPPPGAVYPVMGDGMGYHGGGYPGGVAVVPPPPPSQCVAAAASPGSSDGMSAMTQAEMMNCIGNGGVVRNGGGGARKRDFPEDGCTEKTVERRQRRMIKNRESAARSRARKQTRSRSAPGMMPMLVQAYTVELEAELNHLKEENERLRAEERTILLSKKKMLVEKMMEQARENVSAKKVGPGLRRWGSAMW

SEQ ID NO: 1947 - protein, 235 aa, Magnaporthe grisea 70-15
MSSFPGPSSSLWPSFLLPAITIPFRQRRTVADNNDVNSPPSLSSSVESATSSIAPPATATLRCVHCSTEFAFNSQVVSKGFTGRHGRAYLVAPPSSRPTPTCPATDTQSTNLVNVSIGRAESRRLSTGAHVVADINCLRCGIKVGWKYIDAREPSQRYKIGKFILETSHVVVFRDWGADDGSIGASADDVVTERLEQPRDSAEFDSEDEDECDELFSGTWDPHTSAIRKRAKEEA

SEQ ID NO: 1948 - protein, 461 aa, Rhodobacter sphaeroides 2.4.1
MRHALLAFSLIALLSPLAAPAETRLPESAAEISLSFAPVVRSAAPAVVNIYATRVVEQRVSPFAADPFFDQLFRDFGRRQPRVQNSLGSGVIVSGDGIVVSNYHVVGQADAIRVVLNDRREYEAEVMLADQDSDLAVLKLKEARDLPHLGLRDSDGVEVGELVLAIGNPFGVGQTVSQGIVSGLARSGLSIDGGRGYFIQTDAAINPGNSGGALVDTAGRLVGINTAILTQSGGSNGIGFAIPANLVRSFLAQAEAGEAHFQRPWAGVNGQAVDASMAEAMGLERPEGVVLTELDPESPFRAAGLRAGDVVVALEGQRTDSPQEVIFRLSSLGIGARATVSYLRDGETREAEIALVVAPDKPPRETVALRETVLAGLTVERLNPAVRAELNLPLTLEGVVVRASEATAAQTGLRPGDILLEINGRRIERPRDVERAAQERVRWWQIDVLRDGKPLRLRFRL

SEQ ID NO: 1949 - protein, 624 aa, Methanosarcina barkeri str. fusaro
MPNELELLPLHKLGAWEDEQTSGKINFGLFLPGISEEGEYELFVRVIHEKDQFLQDILPMDFEMEHSVDPDYGDYWSATINIEAKDKLKPFSAWGIPGKYVYRYCLKNPKNPELIDWIIDPFAREFGVGKLSAFTLGYEQYTWDKNELEWKTPFINDIVLYELMVNEFADDIKGTIDHLDYLADLGINCIELMPLSNIEKRVDWGFAPIGYFGVDERFGNRKDMQELIDKAHQKDIAVIVDSVYAHTSHLFPYYYVYNELGYPLDKNPFMGPFAENAFGISTDFTYKFTRNFFLTVNNHWLDSYHIDGFRYDYVPGYWLEDSENGYTKLVRDTYQLVKAKKGSSDHWQRFFEGESVNLIQCAEQLQKPVEILNKTYSNCTWQNRTLNTARGIYGNCEKLTELGSLFGLSGYQTGVQNNGDKITKTALQYLENHDHSRFICNFGTVARDNELLKEGDRAFWYKVQPYLIGMFTAKGIPMLWQGQEFGENYWLPQEGWGRVLLYRPVRWEYFYTSEGRSLVQLVRKLVKLRKNNPQFTRGEHYFYNDYTLYQSRNIMMFSRTCKEVFSLVALNFGAQDQVVYFKFPSDGNYQEELHGQDNLKGISAGKNIQLNIPSNYGKIWTLAV

SEQ ID NO: 1950 - protein, 240 aa, Bacillus cereus ATCC 10987
MVKLVLIRHGQSEWNVENRFTGWTDVDLSSKGLEEAREAGVMLKASGFSFDIAYTSVLRRAMRTLWITLEEMDLMWIPVYKTWKLNERHYGALQGLNKEETARKYGDEQVTLWRRSTNVRPPALTKDDERYEAAHPKYRDIKDYEFPLTEDLEDTEKRVVSYWNEEIAPNVKAGKQVIIAAHGNTIRALVKHLDQISDKDIENVNIPTGTPLVYELDNDLKPIGHYYLNREIETLEEKQV

SEQ ID NO: 1951 - protein, 447 aa, Staphylococcus aureus subsp. aureus MRSA252
MYMSKAHQLIQEDEHYFAKSGRIKYYPLVIDHGYGATLVDIEGKTYIDLLSSASSQNVGHAPREVTEAIKAQVDKFIHYTPAYMYHEPLVRLAKKLCEIAPGDFEKRVTFGLTGSDANDGIIKFARAYTGRPYIISFTNAYHGSTFGSLSMSAISLNMRKHYGPLLNGFYHIPFPDKYRGMYEQPQANSVEEYLAPLKEMFAKYVPADEVACIVIETIQGDGGLLEPVPGYFEALENICRENGILIAVDDIQQGFGRTGTWSSVSHFNFTPDLITFGKSLAGGMPMSAIVGRKEIMNCLEAPAHLFTTGANPVSCEAALATIQMIEDQSLLQASAEKGEYVRKRMDQWVSKYNSVGDVRGKGLSIGIDIVSDKNLKTRDASAALKICNYCFEHGVVIIAVAGNVLRFQPPLVITYEQLDTALNTIEDALTALEAGNLDQYDISGQGW

SEQ ID NO: 1952 - protein, 508 aa, Haemophilus influenzae
MSSQCPFSHLAATNLTMGNGAPVADNQNSLTAGPRGPLLAQDLWLNEKLADFVREVIPERRMHAKGSGAFGTFTVTHDITKYTRAKIFSEVGKKTEMFARFTTVAGERGAADAERDIRGFALKFYTEEGNWDLVGNNTPVFFLRDPRKFPDLNKAVKRDPRTNMRSATNNWDFWTLLPEALHQVTVVMSDRGIPASYRHMHGFGSHTYSFWNEAGERFWVKFHFRTQQGIKNLTDAEAAEIIANDRESHQRDLYEAIERGDFPKWTLFVQIMPEADAEKVPYHPFDLTKVWSKKDYPLIEVGEFELNRNPENFFADVEQSAFAPSNLVPGIGASPDRMLQARLFNYADAQRYRLGVCYRQIPVNRPRCPVHSNQRDGQGRVDGTYGSLPHYEPNSFSQWQQQPDFAEPPLRISGDAAHWDYRTDDNDYFSQPRALFNLMNAEQKQSLFNNTAAAMGDAPDFIKYRHIRNCHWCDAAYGEGVAKALGLTVEDALKARDTDPALGQGGLL

SEQ ID NO: 1953 - protein, 505 aa, Oryza sativa
MVLSHASSGRDDAVRCTFATRYACETLPRFRMPEQSIPREAAYQIINDELMLDGNPRLNLASFVTTWMEPECDKLIMDSVNKNYVDMDEYPVTTELQNRCVNMIAHLFNAPIKEDETAIGVGTVGSSEAIMLAGLAFKRKWQNKRKEQGKPCDKPNIVTGANVQVCWEKFARYFEVELKEVKLSEGYYVMDPVKAVEMVDENTICVAAILGSTLTGEFEDVKLLNNLLTEKNKETGWDVPIHVDAASGGFIAPFLYPELEWDFRLPLVKSINVSGHKYGLVYPGVGWVIWRSKEDLPEELIFHINYLGTDQPTFTLNFSKGIQEHHAELHGEHSNTKGRHRGDWSIRNPLQGGRCALGGVLAQGQRQVHRVRHLRAPEEVRLDRAGVHHAGQRRARRRPPRRHQGGLQPEPRRAARLGHRQDPARAGRPFGPGAEDLQRHREAAIGRRWRGHQEERPGDREGDLRVLEGPGEEEADRNLLVWLCEKCLNNVACSICAWDGRIGWD

SEQ ID NO: 1954 - protein, 324 aa, Salmonella enterica subsp. enterica serovar Typhi Ty2
MKPSIILYKTLPDDLLHRLEAHFTVTQVPNLHPETVARHAQAFASAQGLLGTSETVNRALLEKMPALRAASTISVGYDNVEVDALTARKIVLMHTPAVLTETVADTVMALMLATARRVVDVAERVKAGEWTESIGPAWFGVDVHHKTLGIVGMGRIGMALAQRAHFGFTMPVLYHARRRHQEAEDRFNARYCDLDTLLQEADFVCVILPLTAETRHLFGATQFARMKSSAIFINAGRGPVVDENALIAALQNGEIYAAGLDVFEQEPLSVDSPLLNMSNVVAVPHIGSATHETRYNMMACAVDNLIDALQGKIEKNCVNPQAAG

SEQ ID NO: 1955 - protein, 162 aa, Mesorhizobium loti MAFF303099
MLTRPTTHNHLAERVRRLFGTAPCRLQVAALPWRDTGNGVEIMLITSRDTGRWVLPKGWPEAKEPLCEAAAREAGEEAGLRGTVSHLEAGRYFYAKVLASGEEVPCEVLVFPLHVDKIADRWKEKHSRTRKWVSSSEAVRMINEPDLCQIIAYFCADPHRFS

SEQ ID NO: 1956 - protein, 533 aa, Candida glabrata CBS138
MVSVKSLALAIGVASAIQLPDAIAPDSSNIIKANISQFATHVKENPIVMVEFFTPWCTHSKMLQPRLSEAATIVKGVKIPILQVDCTQYGVLCDQQMIDFYPTLKVYKNHRLVGAENYKGSQAGNEIANYLLNLKNNPVTNITSAQEVEKMKSETDMPIVHNRGNLEIDEILRSVALDMSEKFAFIRDTVASENGTLEMYFPGTNRTAVYDGPQPPTEESISIWMHMENLPFFADIEAADFKNYMATKLPIAYFYYSTPQELNDFTGLFNELGEKYRGKLNFVGMNPHKFQEHLKLLNLKQRFPLFVIHNVNNNLKYTLDQFTDESDKVMKKLESEDIKKLVEDFVEGKAQPIIKSEPIPKTQDSVLYKLVAKTHNDFVYNNDKDVFVKYYAPWCQHSKAFRPVLEEIAELFGSNPETKEKIVFAEVDSTANDIIDFPVAGYPTLVLYRAGSKPGSQPIIFEGKRSLENVLDFIKSHSTSNLDGQALLEKQKQDEAKAIEDAQAAEAAEAVNAQAQAANADQKAFNNEIKDEL

SEQ ID NO: 1957 - protein, 334 aa, Pseudomonas stutzeri
MAHYPKFKAAAVQAAPVYLNLDATVEKSVKLIEEAASNGAKLVAFPEAFIPGYPWFAFLGHPEYTRRFYHTLYLNAVEIPSEAVQKISAAARKNKIYVCISCSEKDGGSLYLAQLWFNPEGDLIGKHRKMRVSVAERLCWGDGNGSMMPVFETEIGNLGGLMCWEHNVPLDIAAMNSQNEQVHVAAWPGFFDDETASSHYAICNQAFVLMTSSIYSEEMKDMLCETQEERDYFNTFKSGHTRIYGPDGEPISDLVPAETEGIAYAEIDIEKIIDFKYYIDPVGHYSNQSLSMNFNQSPNPVVRKIGERDSTVFTYDDLNLSVSDEEPVVRSLRK

SEQ ID NO: 1958 - protein, 550 aa, Oryza sativa
MGNCCVTPEGSGRGRKKQQQEQKQKQKEPKQQQQQQKKGKKPNPFSIEYNRSSAPSGHRLVVLREPTGRDIAARYELGGELGRGEFGVTYLCTERETGDAYACKSISKKKLRTAVDIEDVRREVDIMRHLPKHPNIVTLRDTYEDDNAVHLVMELCEGGELFDRIVARGHYTERAAALVTRTIVEVVQMCHKHGVMHRDLKPENFLFANKKETAALKAIDFGLSVFFTPGERFTEIVGSPYYMAPEVLKRNYGPEVDVWSAGVILYILLCGVPPFWAETEQGVAQAIIRSVIDFKRDPWPRVSDNAKDLVKGMLNPDPRRRLNAQQVLDHPWLQNIKKAPNVNLGETVKARLQQFSVMNKFKKHALRVIAEHLSVEEVAGIKDMFEKMDLNKDNMINFDELKLGLHKLGHQMADADVQILMDAADVDGNGSLDYGEFVALSVHLRKIGNDEHLHKAFAYFDRNQSGYIEIDELRESLADDLGANHEEVINAIIRDVDTDKDGKISYDEFAAMMKAGTDWRKASRQYSRERFTSLSLKLQKDGSLQLTTTQ

SEQ ID NO: 1959 - protein, 907 aa, Candida albicans
MFTKNHRRMSSTSSDDDPFDVAEKYYGEERKKKLNRVRTFSAFESTKYGAGPISPLRPTYEPPPVIKETSEPLSSSSSTSSPPTLTPQTSQVQFNLGVGKTKNGSAIHSDSEEEEEDEDPVSNTKKGEADEKDPFDTTDSKLENENSTPSSITGKEIIPHPTGFRGSSEESAIRRKPSIIPIYHDNISQESVIRNANTPTTYNREKFHLRRGSLDESTFIRPKKYYINDVQGTLRELLANEDTDNNCQITIEDTGPKVLRLGTANSLGINQSSIRGTYRLSNLLQELTIASRFGRHQIVLDEARLSENPVDRMKRLISTSFWNNLTRIITKENIVDMAKDTKIKESWIDDQGKLHENQESHRIYVPYNRKDQYEFFQLIKKQRSDIQLDVQYLPQKIDADYIKSINKKPGLLSIATRPDPQAPDSGSLISWPYVVPGGRFNELYGWDSYMETLGLLTDVKIDPSGNPRNLRHLELARGMAENFIYEIHHYGKILNANRSYYLGRSQPPFLTDMALRIFNKTIEVTPELMDEAIDFLKRATLAAIKEYETIWCAHPRLDDKTGLSCYHPEGKGIPPETEPTHFNALLKPYLAKYNDIDQLDFIEKYNSGEIKEPELDEYFLHDRAVRESGHDTSYRLEGKCAYLATVDLNSLLYKYENDIAFILQSFFNDNLQDPYDDNNSNKIHSSKIWLERSHQRKLNVDKYLWNEQDGIYYDYNVKLQQQTNYESATTFWPLYAKLASSNQAAKLIDQSLHKFEEHGGLVAGTLKSRGEVGLTRPSRQWDYPFGWAPQQILAWIGLVNYGYDGIARRLAYRWLFMMTKSFVDYNGVIVEKYNVTKGAVPHRVDAEYGNQGLDFKGVATEGFGWVNASYVFGLTFLNLYAQRALGSLTPPEIFLRNMHPEQRKQYK

SEQ ID NO: 1960 - protein, 596 aa, Bordetella pertussis Tohama I
MSNIVEIKVPDIGDFKEVEVIEVLVAAGDTIKAEQSLITVESDKASMEIPASSAGVVKSVKVKVGDKVAEGTVILDVEAAGEAAAAPKAEAPKAEAPKAEAPKADAPKAPAAKASAPAAAAYSGSADLECDMLVLGAGPGGYSAAFRAADLGMDTVMVERYATLGGVCLNVGCIPSKALLHNAAVIDEARALAAHGISFGEPKVDLDKLRGYKDSVVAKLTGGLAGMARARKVRVVTGTGEFADPHHLTVTDGEGKKQTIRFKQAIIAAGSQSVKLPFLPDDERIVDSTGALQLRAIPKKMLIVGGGIIGLEMGTVYSTLGARLDVVEMLDGLMQGADRDLVKVWQKMNAPRFDNIMLKTKTVGAEARKDGIYVSFEGEGAPKEPQRYDLVLQAVGRSPNGKKIGAERAGVAVTERGFIEVDRQMRTNVPHIYAIGDVVGQPMLAHKAVHEGHVAAEAAHGEKSYFDARVIPSVAYTDPEVAWVGLTEDEAKKQGVKVEKGLFPWAASGRAIANGRDEGFTKLLFDAETHRIVGGGIVGTHAGDLISEIALAIEMGADMVDIGKTIHPHPTLGESVGMAAEVAEGVCTDLPPMRKK

SEQ ID NO: 1961 - protein, 357 aa, Phanerochaete chrysosporium
AVCPDGTRVSHAACCAFIPLAQDLQETIFQNECGEDAHEVIRLTFHDAIAISRSQGPKAGGGADGSMLLFPTVEPNFSANNGIDDSVNNLIPFMQKHNTISAADLVQFAGAVALSNCPGAPRLEFLAGRPNKTIAAVDGLIPEPQDSVTKILQRFEDAGGFTPFEVVSLLASHSVARANKVDQTIDAAPFDSTPFTFDTQVFLEVLLKGVGFPGSANNTGEVASPLPLGSGSDTGEMRLQSDFALAHDPRTACIWQGFVNEQAFMAASFRAAMSKLAVLGHNRNSLIDCSDVVPVPKPATGQPAMFPASTGPQDLELSCPSERFPTLTTQPGASQSLIAHCPDGSMSCPGVQFNGPA

SEQ ID NO: 1962 - protein, 215 aa, Streptomyces avermitilis MA-4680
MTAFSTLIRTASHEQHVEAETSTFMSDLLGGRLGVEAYARYTEQLWFVYRALEESAERLAEDPVAGPFIQPELMRVPSLERDLAHLRGADWRSGLTALPATREYARRVTECALTWPGGYLAHHYTRYLGDLSGGQIIRDKAEKTWGFARKGDGVRFYVFEQIANPAAFKRGYRELLDGIRADDLEKQRIVAECKRAFALNTGVFRALGEEFPLSA

SEQ ID NO: 1963 - protein, 357 aa, Phanerochaete chrysosporium
AVCPDGTRVSHAACCAFIPLAQDLQETIFQNECGQDAHEVIRLTFHDAIAISRSQGPKAGGGADGSMLLFPTVEPNFSANNGIDDSVNNLIPFMQKHNTISAADLVQFAGAVALSNCPGAPRLEFLAGRPNKTIAAVDGLIPEPQDSVTKILQRFEDAGGFTPFEVVSLLASHSVARANKVDQTIDAAPFDSTPFTFDTQVFLEVLLKGVGFPGSANNTGEVASPLPLGSGSDTGEMRLQSDFALAHDPRTACIWQGFVNEQAFMAASFRAAMSKLAVLGHNRNSLIDCSDVVPVPKPATGQPAMFPASTGPQDLELSCPSERFPTLTTQPGASQSLIAHCPDGSMSCPGVQFNGPA

SEQ ID NO: 1964 - protein, 180 aa, Glycine max
MPHIVETTEPQEPFGGQLLERAGSSKDLRNLCPSADAVLEDQVPEAYKMNPQCSDLPQMQHMDNLNNTLTPFAVRKEVKSVTIKATYKEDIIRFKVSMDCGIVELKEEIAKRLKLEAGTFDIKYLDDDHEWVLIACDADLQECMDISRSSGSNVIRLVVHDILPILGSSCESSGDWKGCI

SEQ ID NO: 1965 - protein, 678 aa, Bordetella pertussis Tohama I
MSNPTAPKLALADAIRVLAMDAVQKANSGHPGAPMGMAEIAQALWLGNLRHNPADPAWANRDRFVLSNGHGSMLIYALLHLTGYDLPLEELKNFRQLHSRTPGHPEVGITPGVETTTGPLGQGLANAVGMALAEALLAAEFNRAGHTVVDHHTYVFLGDGCLMEGISHEACSLAGTLKLSKLVALYDDNGISIDGHVEHWFADDTATRFEGYGWNVIRGVDGHDVAAVDAAIKQARAQSEKPTLIVCRTVIGKGSPNMAGTHNVHGAPLGNDEIAATRAALGWSAGPFEVPQDIYAAWDSRPAGALAQAAWEDKFQAYAAQYPAEAAEFTRRMKGELPEGFAARFEAFLQATVAKGETVATRKASQFAIAELAGLLPEMLGGSADLTGSNFTDWKGVAPLRAGHHGVHFGRHINYGVREFGMAAIMNGIALHGGYLPFGGTFLTFSDYSRNAIRMAALMKQRVVHVFTHDSIGLGEDGPTHQSIEHAASLRLIPNLSVWRPCDTVETAAAWGAAVTRPASIGMDLHDGGPTALLLSRQNLPFVARDEATQKAIVRGGYVLRDAHDARAAIIATGSEVAIALAAQELLAADGIAVRVVSMPSTDVFDRQDAEWKREVLPAGMPRVAVEAGVTAFWHKYVGLEGAVVGIDRYGESAPAGALFKFFGLTAEKVAEAVKQVL

SEQ ID NO: 1966 - protein, 480 aa, Photorhabdus luminescens subsp. laumondii TTO1
MKKRGLTTNAGTPVVDNNNVMTAGQRGPMLLQDVWFLEKLAHFDREVIPERRMHAKGSGAHGVFVVTHDITKYTRAKIFSEIGKKTEMFARFSTVAGERGAADAERDIRGFALKFYTEEGNWDLVGNNTPIFYLRDPLKFPDLNHVVKRDPHTNLRNPAYKWDFFSHQPESLHQLTIDFSDRGVPKSFRHMHGFGSHTFSFINADNERFWVKFHFRCQQGIKNLMDEEAEALVGKDRESSQRDLFAAIEQGDYPRWKLKVQIMPEKEANLLPYNPFDLTKVWPHGDYPMIDVGYFELNRNPDNYFSDVEQAAFNPANVVPGISFSPDKMLQGRLFSYGDAQRYRLGVNHHQIPVNTPRCPFHNYHRDGAMRVDGNSGNTVTYEPNNAGLFQEQPEFKHPSLSLEGDADHWNHRQDEDYFSQPRKLFMLINSKEHQRMFDRIASELSQAHEDTQRRQVELFRKVHPEYGAGVENALKKIKG

SEQ ID NO: 1967 - protein, 214 aa, Brassica napus
MVSSDSNVLPVSTTQPPTLTESQPPAVRAFVNRFTETVRDGLSRSRPWSELLDRSAFAKPDSLSEAASRLRKNSSYFRANYVCIVSLILAFSLLAHPFSLVLLVCLAASWLFLYLFRPVDRPLILFGRSFSDLETLGALILSTIAVIFFTSVGSVLISALLVGIATVCVHGAFRAPNDLFLDEQDPAAAGFLSFIGVPTTYSSLSSTSSAPSAV

SEQ ID NO: 1968 - protein, 313 aa, Medicago sativa
MATAIKFFQLNTGAKIPSVGLGTWQAEPGVVAKAVTTAVQVGYRHIDCAEAYKNQSEIGSALKKLCEDGVVKREELWITSKLWCSDHHPEDVPKALDKTLNDLQLDYLDLYLIHWPVSMKRGTGEFMGENLDHADIPSTWKALGALYDSGKAKAIGVSNFSTKKLQDLLDVARVPPAVNQVELHPGWQQAKLHAFCESKGIHLSGYSPLGSPGVLKSDILKNPVVKEIAEKLGKTPGQVALRWGLQAGHSVLPKSTNEARIKKNLDVYDWSIPEDLFPKFSEIKQDKLIKGTFFVNDTYGAFRTIEELWDGEV

SEQ ID NO: 1969 - protein, 252 aa, Terrabacter sp. DBF63
MSNSLDGKVALVTGGGGGIGRETAKVLVDHGARVVVADLSEDAGNGTLEYIDGGDAVAFVRADVTDLASMQHLVQAAVDRYGRLDIAHNNAGIEVTGPDLADVTVEQFDKVIAVNLTGVFISMKAEIPQMLAQGGGSIINTASSLGQAALAHQSAYVTSKHGVIGLTRAAAVEYSDKGIRVNAVLPGVIQTPMIDALEETYPGFKDALLTKHPIGRLGTPHDIAEMVAWLGSDAAAFATGSQFAVDGGYLAI

SEQ ID NO: 1970 - protein, 620 aa, Alkalilimnicola ehrlichei MLHE-1
MEETVEKTTDYIEPGEAGTLHRLFLERVRRSPDAPAYRQYDYAHQSWRTYTWRETAEAVRRWQATLAREGLQRGDTVAVMLPNGWPWVLFDQAALALGLVVVPLYTSDRPDNVAYILEDSGARVLILEQAETWQAIQRGGHRLNAVQRVVVTQGVAPADSRGTVVALEAWLAPEGDPGDPPEPPRDGHALASIVYTSGSTGRPKGVMLSHRNMLENAYAGLQRIAIYPDDLFLSFLPLSHTLERTIGYYLPIMTGSTVAYARSVPDLPEDLATHRPTALVSVPRIYERVYGRIQEGLKAKSGLARALFHSAVRVGWHRYQRGQGLCGWHPRELAWPLLHRLVAGKVTARLGGRVRVAISGGAPLSREVAQLFLSLGVPVLEGYGLTESSPVISVNTLEDNRPGTVGKPLPGVEVRIGEQGELLARGPNIMLGYWNNPEATAAALDRDGWLHTGDQARLDDEGRITITGRLKEIIVMANGEKVPPADMELAIANDPVFEQVMVVGEGRPYLGALVVLNEAVWPSVAGEHGLPEAVTAARDDPRVERYLLERVGHLLHAFPGYAQIRRLRVLPEPWSVDNAMLTPTLKLKRARIAEHFQDELATLYAGHDTPGGSARQSGQH

SEQ ID NO: 1971 - protein, 347 aa, Carboxydothermus hydrogenoformans Z-2901
MEIVKKENYQGYETVLFATDKKTNFKAIIAVHSTVLGPALGGCRMWFYKSDEEALTDVLRLAEGMTYKNSAMGLNLGGGKAVIIGDPRTDKSSELFARFAEAVNALGGKYYTAEDVGITSQDMLEVSRHTPYVAGLPAKSGDPSPFTAFGVYTGMKAALEYVFGDTSLKGKKVAVQGLGHVGMYLLEHLHQEGAELIVTDIFEDRVAEAIKRFNARFVQPEQIYDVKADIFAPCALGGILNENTIPRLKVKIVAGAANNQLAKLEDGKLLAERGIVYVPDFIINGGGVINVAEELNPEGYDQNRVKAKVATIYDKVKEVLTLSREQKITPQEAAIMYAKKRLLQRRA

SEQ ID NO: 1972 - protein, 396 aa, Alkalilimnicola ehrlichei MLHE-1
MTETVYIVAAQRTPVGKAPRGAFRHTRPDDLLAHVIRGAVDRCPGLDPAEIADVIVGCAMPEGSQGLNVARIGALLAGLPDRVPGYTVNRFCASGLQAVALAADRIRLGEADVVVAGGTESMSQVPMMGHKPQFNPALFQDDPHRAIAYGMGITAEKVAERWGVGREAQDAFALRSHQRAVAATEAGHFRDEILPYTVRESVLDPQGGAVALQERVVDSDEGPRPETSAEALAKLKPSFAARGSVTPGNSSQMSDGAGAVVLMSERRVSALGLTPLARFVGFSVAGVAPEIMGIGPVEAVPRVLRQAGLRAADVDWVELNEAFAAQSLAVMRDLELDPERINPQGGAIALGHPLGATGAIRTATLVHGLRRTGGRYGLVTMCVGTGMGAAGLFERM

SEQ ID NO: 1973 - protein, 122 aa, Nicotiana plumbaginifolia
ITTKELGTVMRSLGQNPTEAELQDMINEVDADGNGTIDFPEFLNLMARKMKDTDSEEELKEAFRVFDKDQNGFISAAELRHVMTNLGEKLTDEEVDEMIREADVDGDGQINYEEFVKVMMAK

SEQ ID NO: 1974 - protein, 335 aa, Agrobacterium tumefaciens str. C58
MTTTSEPFAAAEHHHIYLGQNHERNERRVWMVIALTTVMMVAEIVAGHWFGSMALTADGWHMSTHAGAMLISALAYLYARREARNPRFSFGTGKFGDLAGFASAVVLAVVALLIAVESGLRLVSPVQIDFNQAILVAVIGLVVNLVSAVLLKDDHHHDRGHGHGHGHASHAHHGHGSHAHHDHGSHAQHGAKGGRDNNLRAAYLHVLADALTSVLAIVALLLGKWNGWNFLDPLMGIVGGLVIARWSWGLIRSTATTLVDAVPLTDDLPQEIRDTVETEEDRITDLHVWQVGPGHHAAIVAIHSQAPKAPAFYKQKLAAIHELSHVTVEVSPASA

SEQ ID NO: 1975 - protein, 428 aa, Arabidopsis thaliana; identical to SEQ ID NO: 1152

SEQ ID NO: 1976 - protein, 256 aa, Zea mays
MEASRQYMIRFDGHFEEGPSSAAAEPPQPFASRAFSPEQEQSVMVAALLHVVSGYATPAPDLFFPAGKEACTACGVDGCLGCEFFGAEAGRAVAASDAPRAATAGGPQRRRRNKKSQYRGVRQRPWGKWAAEIRDPRRAVRVWLGTFDTAEDAARAYDRAAVKFRGPRAKLNFSFPEQHLRDDSGNAAAKSDACSPSPSPRSAEEEETGDLLWDGLVDLMKLDESDLCLLLPVDNTLDKFHAPGQRRSGSGVPLCY

SEQ ID NO: 1977 - protein, 159 aa, Salmonella enterica
GASLGLWEICIIWGLGISLAVYLTAGISGGHLNPAVTIALWLFACFPKQKVLPYIIAQFAGAFGGALLAYVLYSSLFTEFETAHHMVRGSVESLQLASIFSTYPAAALNVWQAALVEVVITSILMGMIMALTDDGNGIPKGPLAPLLIGILVAVIGAST

SEQ ID NO: 1978 - protein, 335 aa, Haloarcula marismortui ATCC 43049
MNFGYREVCLDHDTGPRHPESPDRLRAIRRALKENHGVEYVAADNADLDLVRAVHDTDYIAEFREFCDDGGGNWDADTVAVEETWDAALASAGLAVWAAEAALDGNTGRDTPFSLGRPPGHHAVGDDAMGFCFINNAAVAAQAALEADADRVAIFDWDVHHGNGTQDIFYDRSDVFYASIHEDGLYPGTGDISETGTGDADGTNLNVKYKPGADTADYLAAIDECIAPAIRDYDPDLLLISAGFDAHEHDPISRMRVSTEGYGAMTDRMRSLTDACDAALGIILEGGYGLDTLSDSVTTVHEVFDGYQPMEPDDDVSDDARDVLDDLADQGFGSK

SEQ ID NO: 1979 - protein, 241 aa, Arabidopsis thaliana
DLSSKPQQQLLNSLPIAGELTVTGEMGVCYKECLKNHAANLGGHALDGCGEFMPSPTATSTDPSSLRCAACGCHRNFHRRDPSENLNFLTAPPISSPSGTESPPSRHVSSPVPCSYYTSAPPHHVILSLSSGFPGPSDQDPTVVRSENSSRGAMRKRTRTKFTPEQKIKMRAFAEKAGWKINGCDEKSVREFCNEVGIERGVLKVWMHNNKYSLLNGKIREIEHGLCLNTHSNDGDGWSSS

SEQ ID NO: 1980 - protein, 100 aa, Zea mays
KITEQGEVLASKYSLPELALYNLETLTTAVIQASLLKSSFDFIEPWNRIMEELACTARRAYRSLIYEEPDFLDFFLTVTPIPEISELQISSRPARRKGGK

SEQ ID NO: 1981 - protein, 203 aa, Ustilago maydis 521
MSYRQAFSAFYARNFERRPWVTLAVTNGTLGVIADGVAQSLERISQAQSRQQQLEQEGRTDTATSQVSQADVSGWDWSRSGRFLAFNVGMAPLLAEWNKFLEFKFPLRSSALATGAAAAAAASTASSMSKVSLRALANRLVMDQVLFAPFGLALFTGAMGYMERGSIDGVKDKFGEMYIPALLANWQVWPLVQLVNFRYMPLK

SEQ ID NO: 1982 - protein, 152 aa, Salmonella enterica
LWRICIIWGLGISLAVYLTAGISGGHLNPAVTIALWLFACFPKQKVLPYIIAQFAGAFGGALLAYVLYSSLFTEFETAHHMVRGSVESLQLASIFSTYPAAALNVWQAALVEVVITSILMGMIMALTDDGNGIPKGPLAPLLIGILVAVIGA

SEQ ID NO: 1983 - protein, 145 aa, Arabidopsis thaliana
  misc_feature (56)..(56): Xaa can be any naturally occurring amino acid
  misc_feature (86)..(86): Xaa can be any naturally occurring amino acid
  misc_feature (91)..(91): Xaa can be any naturally occurring amino acid
  misc_feature (108)..(108): Xaa can be any naturally occurring amino acid
  misc_feature (117)..(117): Xaa can be any naturally occurring amino acid
  unsure (1)..(145): unsure at all Xaa locations
RRFINLFYPLHQFNHWNPLKTKAWFDPLGNLNHQPQRENRNQEKTGAHQKEDPGAXGGSIGRVGEVRRTTGEKKQNPLLDLELKVXDLVKXGSQWKGKRAGTGKVLKXKVLGRIRLXMKASKTLKNWGYHFGGTGINGQEPPWNG

SEQ ID NO: 1984 - protein, 85 aa, Ustilago maydis 521
MKVKADRDESSPYAAMLAAQDCAVRCKEVGITALHIKLRATGGTGTKTPGPGAQAALRALARAGMRIGRIEDVTPVPTDSTRRKD

SEQ ID NO: 1985 - protein, 427 aa, Glycine max
MAIRNSLTGQFLRRSSVAGARLMSSSSSWFRSIEPAPKDPILGVTEAFLADQSPNKVNVGVGAYRDDQRKPVVLECVREAERRVAGSQFMEYLPMGGSIKMIEESLKLAFGDNSEFIKDKRIAAVQALSGTGACRLFAAFQQRFHPNTQIYIPVPTWANHHNIWRDAGVPMKTFRYYHPESRGLDFSGLMDDIKNAPDGSFFLLVLTAHNPTGVDPSEEQWREISSQIKAKGHFPFFDMAYQGFASGDPERDAKAIKIFLEDGHLIGLAQSYAKNMGLYGQRAGSLSVLCEDEKQAVAVKSQLQLIARPMYSNPPLHGALIVSTVLGDPDLKKLWLKEVKVMADRIIGMRTTLRENLEKKGSTLPWQHITNQIGMFCYSGLTPEQVDRMTNEFHIYMTRNGRISMAGLNTGNVGYVLDAIHEVTKSF

SEQ ID NO: 1986 - protein, 193 aa, Oryza sativa
  misc_feature (121)..(121): Xaa can be any naturally occurring amino acid
  unsure (1)..(193): unsure at all Xaa locations
MASRNFTKALRGPARQLASAPRVQQRTFVAAARSAARVGAVARPVAAGPVQQQVRGVKTIDFAGHKEDVYERADWPQEKLLEYFKNDTLALIGYGSQGHGQGLNLRDNGLNVIVGVRKNGXSWKDAEQDGWVAGKNLFDVDEAISRGTIVMNLLSNAAQSETWPAIKPQLVEGKNLYFSHGFSPVFKDLTKVE

SEQ ID NO: 1987 - protein, 165 aa, Staphylococcus aureus subsp. aureus MRSA252
MNNRNVYDIEVSDYKGLTYKLEAFRGKVILVVNTATECIYSEQLKKLETLFQKYKDRGFVVLSFPNNNFDNRQPGSNEEILKISREKFGVTFPVLAKISVNGNDEHPLFTHLKNEQPGIFGSPIKWNFTKFIIDRQGNVVNRFLPMEDPLDISANIEILLQESSS

SEQ ID NO: 1988 - protein, 276 aa, Oryza sativa (japonica cultivar-group)
MHPSGGALSVPPGFRFHPTDEELLYYYLRKKVAYEAIDLDVIREIDLNKLEPWDLKDRCRIGTGPQNEWYFFSHKDKKYPTGTRTNRATTAGFWKATGRDKAIFLANACRIGMRKTLVFYVGRAPHGKKTDWIMHEYRLDQDNVDVQEDGWVVCRVFMKKSYQRGLNPADMAAVDDDDLLHHHHHPFPPAQLHGGAADHKHDGAGGHHHHHLMQPHHHYDDFPSFDPSMQLMAAPSHHQHLMDQLAGGGGGTASSLQRLPLQYLGCEAADLLRFSK

SEQ ID NO: 1989 - protein, 126 aa, Brassica napus
MKIQCDVCENAPATVICCADEAALCPKCDVEIHAANKLASKHQRLHLNSLSTKFPRCDICQEKAAFIFCVEDRALLCRDCDESIHVANSRSANHQRFLATGIKVALSSSSCSKETDKNHQSEPFNN

SEQ ID NO: 1990 - protein, 232 aa, Haemophilus influenzae R2846
MNYISFPTAQHAVDKIAQEFVIYSQLNHPVHISLSGGSTPKLLFKTLAKSPYAEQINWKNLHFWWGDDRMVPPSDPESNYGEVQKLLFDHIQIPTENIHRIRGENEPHFELKRFEEELSAVIPNGVFDWIILGMGTDGHTASLFPHQTNFDDENLAVIAKHPESGQIRISKTAKLIEQAKRITYLVTGESKADILKEIQTTPAENLPYPAAKIKAKNGVTEWYLDKAAAQLL

SEQ ID NO: 1991 - protein, 571 aa, Chlamydophila psittaci
MLMNTQNGQAMEAAHEEEAQKKLEELVSLAKDQGFITYEEINEILPMSFDTPEQIDQVLIFLTGMDIQVLNQADVERQKERKKEAKELEGLAKRTEGTPDDPVRMYLKEMGTVPLLTREEEVEISKRIEKAQVQIERIILRFRYSSKEAISIAQYLINGKERFDKIISEKEVEDKAHFLKLLPKLISLLKEEDAYLESLLFRLKQNNLSKEETAKLNDDLEKCRIRTQAYLRCFHCRHNVTEDFGEVVFKAYDSFLQLEQQINDLKVRAERNKFAAAKLDAAKRRLYKREVAAGRTLEEFKKDVRMLQRWMDKSQEAKKEMVESNLRLVISIAKKYTNRGLSFLDLIQEGNMGLMKAVEKFEYRRGYKFSTYATWWIRQAVTRAIADQARTIRIPVHMIETINKVLRGAKKLMMETGKEPTPEELAEELGLTPDRVREIYKIAQHPISLQAEVGEGGESSFGDFLEDTGVESPAEATGYSMLKDKMKEVLKTLTDRERFVLIHRFGLLDGKPKTLEEVGSAFNVTRERIRQIEAKALRKMRHPIRSKQLRAFLDLLEEEKITGKAKNIKGK

SEQ ID NO: 1992 - protein, 449 aa, Alkalilimnicola ehrlichei MLHE-1
MAARLDEKLEPIFQDVLRRNPGESEFHQAVHEVLETLGPVLVKYPELAERKIIQRICEPERQIIFRVPWQDDRGETHINRAFRVEFNSALGPYKGGMRFHPSVYLGIIKFLGFEQIFKNALTGLPIGGGKGGSDFDPKGKSEDEIMRFCQSLMTELYRHLGEYTDVPAGDIGVGQREVGFLFGQYKRITNRYESGVFTGKGLSWGGSRARKEATGFGTVYFLEEMLKARNDGLEGKTCVVSGSGNVAVYAMEKIYELGGKVIACSDSSGIVVDEKGIDLDRVKRIKEVERRRISTYADEVKHAKYIEDGNIWAVPCEAALPCATQNELNGKDAKKLLQNGCIAVAEGANMPSTPEAIRLFLESGIAYGPGKAANAGGVATSALEMQQNASRDSWTFEHTEQRLHEIMKNIHRNCYETADEFGAPGNYVTGANIAGFLKVSQAMEAMGLI

SEQ ID NO: 1993 - protein, 3567 aa, Saccharopolyspora erythraea
MTDSEKVAEYLRRATLDLRAARQRIRELESDPIAIVSMACRLPGGVNTPQRLWELLREGGETLSGFPTDRGWDLARLHHPDPDNPGTSYVDKGGFLDDAAGFDAEFFGVSPREAAAMDPQQRLLLETSWELVENAGIDPHSLRGTATGVFLGVAKFGYGEDTAAAEDVEGYSVTGVAPAVASGRISYTMGLEGPSISVDTACSSSLVALHLAVESLRKGESSMAVVGGAAVMATPGVFVDFSRQRALAADGRSKAFGAGADGFGFSEGVTLVLLERLSEARRNGHEVLAVVRGSALNQDGASNGLSAPSGPAQRRVIRQALESCGLEPGDVDAVEAHGTGTALGDPIEANALLDTYGRDRDADRPLWLGSVKSNIGHTQAAAGVTGLLKVVLALRNGELPATLHVEEPTPHVDWSSGGVALLAGNQPWRRGERTRRARVSAFGISGTNAHVIVEEAPEREHRETTAHDGRPVPLVVSARTTAALRAQAAQIAELLERPDADLAGVGLGLATTRARHEHRAAVVASTREEAVRGLREIAAGAATADAVVEGVTEVDGRNVVFLFPGQGSQWAGMGAELLSSSPVFAGKIRACDESMAPMQDWKVSDVLRQAPGAPGLDRVDVVQPVLFAVMVSLAELWRSYGVEPAAVVGHSQGEIAAAHVAGALTLEDAAKLVVGRSRLMRSLSGEGGMAAVALGEAAVRERLRPWQDRLSVAAVNGPRSVVVSGEPGALRAFSEDCAAEGIRVRDIDVDYASHSPQIERVREELLETTGDIAPRPARVTFHSTVESRSMDGTELDARYWYRNLRETVRFADAVTRLAESGYDAFIEVSPHPVVVQAVEEAVEEADGAEDAVVVGSLHRDGGDLSAFLRSMATAHVSGVDIRWDVALPGAAPFALPTYPFQRKRYWLQPAAPAAASDELAYRVSWTPIEKPESGNLDGDWLVVTPLISPEWTEMLCEAINANGGRALRCEVDTSASRTEMAQAVAQAGTGFRGVLSLLSSDESACRPGVPAGAVGLLTLVQALGDAGVDAPVWCLTQGAVRTPADDDLARPAQTTAHGFAQVAGLELPGRWGGVVDLPESVDDAALRLLVAVLRGGGRAEDHLAVRDGRLHGRRVVRASLPQSGSRSWTPHGTVLVTGAASPVGDQLVRWLADRGAERLVLAGACPGDDLLAAVEEAGASAVVCAQDAAALREALGDEPVTALVHAGTLTNFGSISEVAPEEFAETIAAKTALLAVLDEVLGDRAVEREVYCSSVAGIWGGAGMAAYAAGSAYLDALAEHHRARGRSCTSVAWTPWALPGGAVDDGYLRERGLRSLSADRAMRTWERVLAAGPVSVAVADVDWPVLSEGFAATRPTALFAELAGRGGQAEAEPDSGPTGEPAQRLAGLSPDEQQENLLELVANAVAEVLGHESAAEINVRRAFSELGLDSLNAMALRKRLSASTGLRLPASLVFDHPTVTALAQHLRARLVGDADQAAVRVVGAADESEPIAIVGIGCRFPGGIGSPEQLWRVLAEGANLTTGFPADRGWDIGRLYHPDPDNPGTSYVDKGGFLTDAADFDPGFFGITPREALAMDPQQRLMLETAWEAVERAGIDPDALRGTDTGVFVGMNGQSYMQLLAGEAERVDGYQGLGNSASVLSGRIAYTFGWEGPALTVDTACSSSLVGIHLAMQALRRGECSLALAGGVTVMSDPYTFVDFSTQRGLASDGRCKAFSARADGFALSEGVAALVLEPLSRARANGHQVLAVLRGSAVNQDGASNGLAAPNGPSQERVIRQALAASGVPAADVDVVEAHGTGTELGDPIEAGALIATYGQDRDRPLRLGSVKTNIGHTQAAAGAAGVIKVVLAMRHGMLPRSLHADELSPHIDWESGAVEVLREEVPWPAGERPRRAGVSSFGVSGTNAHVIVEEAPAEQEAARTERGPLPFVLSGRSEAVVAAQARALAEHLRDTPELGLTDAAWTLATGRARFDVRAAVLGDDRAGVCAELDALAEGRPSADAVAPVTSAPRKPVLVFPGQGAQWVGMARDLLESSEVFAESMSRCAEALSPHTDWKLLDVVRGDGGPDPHERVDVLQPVLFSIMVSLAELWRAHGVTPAAVVGHSQGEIAAAHVAGALSLEAAAKVVALRSQVLRELDDQGGMVSVGASRDELETVLARWDGRVAVAAVNGPGTSVVAGPTAELDEFFAEAEAREMKPRRIAVRYASHSPEVARIEDRLAAELGTITAVRGSVPLHSTVTGEVIDTSAMDASYWYRNLRRPVLFEQAVRGLVEQGFDTFVEVSPHPVLLMAVEETAEHAGAEVTCVPTLRREQSGPHEFLRNLLRAHVHGVGADLRPAVAGGRPAELPTYPFEHQRFWPRPHRPADVSALGVRGAEHPLLLAAVDVPGHGGAVFTGRLSTDEQPWLAEHVVGGRTLVPGSVLVDLALAAGEDVGLPVLEELVLQRPLVLAGAGALLRMSVGAPDESGRRTIDVHAAEDVADLADAQWSQHATGTLAQGVAAGPRDTEQWPPEDAVRIPLDDHYDGLAEQGYEYGPSFQALRAAWRKDDSVYAEVSIAADEEGYAFHPVLLDAVAQTLSLGALGEPGGGKLPFAWNTVTLHASGATSVRVVATPAGADAMALRVTDPAGHLVATVDSLVVRSTGEKWEQPEPRGGEGELHALDWGRLAEPGSTGRVVAADASDLDAVLRSGEPEPDAVLVRYEPEGDDPRAAARHGVLWAAALVRRWLEQEELPGATLVIATSGAVTVSDDDSVPEPGAAAMWGVIRCAQAESPDRFVLLDTDAEPGMLPAVPDNPQLALRGDDVFVPRLSPLAPSALTLPAGTQRLVPGDGAIDSVAFEPAPDVEQPLRAGEVRVDVRATGVNFRDVLLALGMYPQKADMGTEAAGVVTAVGPDVDAFAPGDRVLGLFQGAFAPIAVTDHRLLARVPDGWSDADAAAVPIAYTTAHYALHDLAGLRAGQSVLIHAAAGGVGMAAVALARRAGAEVLATAGPAKHGTLRALGLDDEHIASSRETGFARKFRERTGGRGVDVVLNSLTGELLDESADLLAEDGVFVEMGKTDLRDAGDFRGRYAPFDLGEAGDDRLGEILREVVGLLGAGELDRLPVSAWELGSAPAALQHMSRGRHVGKLVLTQPAPVDPDGTVLITGGTGTLGRLLARHLVTEHGVRHLLLVSRRGADAPGSDELRAEIEDLGASAEIAACDTADRDALSALLDGLPRPLTGVVHAAGVLADGLVTSIDEPAVEQVLRAKVDAAWNLHELTANTGLSFFVLFSSAASVLAGPGQGVYAAANESLNALAALRRTRGLPAKALGWGLWAQASEMTSGLGDRIARTGVAALPTERALALFDSALRRGGEVVFPLSINRSALRRAEFVPEVLRGMVRAKLRAAGQAEAAGPNVVDRLAGRSESDQVAGLAELVRSHAAAVSGYGSADQLPERKAFKDLGFDSLAAVELRNRLGTATGVRLPSTLVFDHPTPLAVAEHLRDRLFAASPAVDIGDRLDELEKALEALSAEDGHDDVGQRLESLLRRWNSRRADAPSTSAISEDASDDELFSMLDQRFGGGEDL

SEQ ID NO: 1994 - protein, 371 aa, Bacillus subtilis subsp. subtilis str. 168
MADKQTHETELTFDQVKEQLTESGKKRGVLTYEEIAERMSSFEIESDQMDEYYEFLGEQGVELISENEETEDPNIQQLAKAEEEFDLNDLSVPPGVKINDPVRMYLKEIGRVNLLSAKEEIAYAQKIEEGDEESKRRLAEANLRLVVSIAKRYVGRGMLFLDLIHEGNMGLMKAVEKFDYRKGYKFSTYATWWIRQAITRAIADQARTIRIPVHMVETINKLIRVQRQLLQDLGREPTPEEIAEDMDLTPEKVREILKIAQEPVSLETPIGEEDDSHLGDFIEDQEATSPSDHAAYELLKEQLEDVLDTLTDREENVLRLRFGLDDGRTRTLEEVGKVFGVTRERIRQIEAKALRKLRHPSRSKRLKDFLE

SEQ ID NO: 1995 - protein, 305 aa, Gloeobacter violaceus PCC 7421
MEKDMSSLVKIQLSDPQQRRGRTSQASLEDSVGQFLREMSRYPLLTSEQEVELAQVIATGGSEAEAAKRRLVRANLRLVVSIAKKYLNRGVPFLDLIQEGAIGLMRAAEKFDFERGFKFSTYAYWWIRQGITRAIASQSRTVRLPVHMVEKLNQVKRVRRQLTQELARKPTKPEMAEALELDIDKLDEILDAGRRTLSLHVKVGKEEDTELLQLIEDSDTISPSEVLDHNLLVEQIESLLHLLTPRERDIIELRFGLADGNSYTLADIGEMYNLSRERVRQIQAKAMRKLRHPRRQVLLRDWAEE

SEQ ID NO: 1996 - protein, 449 aa, Carboxydothermus hydrogenoformans Z-2901
MEIGLLLLFLVNLIVLFLVEGKLLSILEGIFLAALGYIIFGAFIKEVNNKFKLLEEFTSKWRQGQYSKVSYYNDKELGKIVDNVNHLIEQLENCKRAINEGEKRLTAILAGIKAGVMVLDRDGRVILVNKGLENLFGKLNFTGEPKPLLEVIRNYELEKFLKEALANLKEMTREIEFLLPNSKTILIHVTPLKDEHDQKVGLVAVFDDITEERKLEKMRSEFIANVSHELRTPLTSIKGFLETLLDGALEDKTIAKHFLQIMNSETERLTRLIDDLLSLSKIEAKKVDFAPKPLMLQELIQKMKLLFKSRLEEKELSFIISLPENLPLVLADGDMISQVLINLIDNAIKYTPAGGKIEVTAAVKGSWVEVVVKDTGIGIPEESQKRIFERFYRVDKARSRELGGTGLGLAIVKHIIELHNGKVWVKSKVGEGSAFGFTIPIAQTVQKEE

SEQ ID NO: 1997 - protein, 898 aa, Chromobacterium violaceum ATCC 12472
MSEHDKDLPLRADLACLDRLLSEVVGEQEGAVVSGAVQAIALRRGDERSHPLPQLAPEAAASLLRACGLYAQLFNIAEDLHHNRRRRAHQLAGSAPQQGSLPRALQRLRQDGVSFHALHQLLSHAKVGAILTAHPTEVQRQSVLDGHRAVRRFLSQLNAADLTPEEREALEAKLKRAILALWQTSEIRHFKMTVRDEITNGVAYHPLAFFEALPALYRRLEREIGQLWGEEARLPSFIRVGSWIGGDRDGNPNVDAGLLRHAVTRQSQQAFEYYLQELKSLYRELSLSSRLVEAGAEVLALAEQSPDQAVSRGEEPYRRALATMQGKLRATARLRGVELACRWDERAPYRDHRELIQDLASLSASLRAHGSALLADGRLSRLIRSVDVFGFFLMPLDLRQHAAVHEGVVAELFSAAGLEEYRALDEAARVRVLIRELATPRLLFSPYLRYGEQAEKELAIFREAAAIQRDFGVEAIGQCIISNCASVSDILALALLCKEAGLIRLEDGQPRASVNLVPLFETIADLENSEAVMRALFALPWYKQLLDSRERVQEVMLGYSDSNKDGGYLTSQWQLWQAETRLVKVFADAGARLQLFHGRGGSVGRGGGPSYEAIVAQPAGSVAGRIRITEQGEVITAKYSDPAIAGRNLEALVAATLEASLGNIPGGEVDTALFDELSASAFAAYRALVETPGFMQYFLEATPVTAIARLNIGSRPASRKSLSSIGDLRAIPWVFSWSQSRLMLPGWFGVGSAVAAYVQKHGDAGLAKLQHLYRHSPFFQVMLSNMEQVLAKADLGIARRFSELVADRELAARLFGAIEAEWRKTHDAFFAITGQAELLEGNPTLRRSLETRLPFLDALGLLQADLLARLRAEPDDEDTLYAIHLTINGTSAGLRNTG

SEQ ID NO: 1998 - protein, 249 aa, Coffea arabica
PMVFNVVILSPHGYFAQENVLGYPDTGGQVVYILDQVPALEREMLKRIKEQGLDVKPRILIITRLLPDAPGTTCGQRLEKVYGSEYSHILRVPFRTEKGVVRKWISRFEVWPYMETFTEDVAKEVTAELQAKPDLVIGNYSEGNLVASLLAHKLGVTQCTIAHALEKTKYPDSDIYLSKFDEKYHFSCQFTADLIAMNHTDFIITSTFQEIAGSKDTVGQYESHMAFTMPGLYRVVHGIDVFDPKFNIV

SEQ ID NO: 1999 - protein, 164 aa, Salmonella enterica
GASLGLWEICIIWGLGISLAVYLTAGISGGHLNPAVTIALWLFACFPKQKVLPYIIAQFAGAFGGALLAYVLYSSLFTEFETAHHMVRGSVESLQLASIFSTYPAAALNVWQAALVEVVITSILMGMIMALTDDGNGIPKGPLAPLLIGILVAVIGASTGPLTG

SEQ ID NO: 2000 - protein, 573 aa, Brassica rapa
MKRDLHQFQGPNHGTSIAGSSTSSPAVFGKDKMMMVKEEEDDELLGVLGYKVRSSEMAEVALKLEQLETMMGNAQEDGLAHLATDTVHYNPAELYSWLDNMLTELNPPAATTGSNALNPEINNNNNNNSFFTGGDLKAIPGNAVCRRSNQFAFAVDSSSNKRLKPSSSPDSMVTSPSPAGVIGTTVTTVTESTRPLILVDSQDNGVRLVHALMACAEAVQSSNLTLAEALVKQIGFLAVSQAGAMRKVATYFAEALARRIYRLSPPQTQIDHSLSDTLQMHFYETCPYLKFAHFTANQAILEAFEGKKRVHVIDFSMNQGLQWPALMQALALREGGPPSFRLTGIGPPAADNSDHLHEVGCKLAQLAEAIHVEFEYRGFVANSLADLDASMLELRPSETEAVAVNSVFELHKLLGRTGGIEKVFGVVKQIKPVIFTVVEQESNHNGPVFLDRFTESLHYYSTLFDSLEGAPSSQDKVMSEVYLGKQICNLVACEGPDRVERHETLSQWSNRFGSSGFAPAHLGSNAFKQASTLLALFNGGEGYRVEENNGCLMLSWHTRPLITTSAWKLSAVH

SEQ ID NO: 2001 - protein, 146 aa, Salmonella enterica
IIWGLGISLAVYLTAGISGGHLNPAVTIALWLFACFPKQKVLPYIIAQFAGAFGGALLAYVLYSSLFTEFETAHHMVRGSVESLQLASIFSTYPAAALNVWQAALVEVVITSILMGMIMALTDDGNGIPKGPLAPLLIGILVAVIG

SEQ ID NO: 2002 - protein, 435 aa, Synechococcus elongatus PCC 7942
MRIGSILRQASAEALATTGILAGVTLAPYSPILAGLAVVPALGWSSWQQRSQLLKSPLNQALLALSGLLLLSALVGTSGSLRWLGLANFLPFFWLLAVAPALLLKPSVLRSLLWILAIGSIPVCCIGYLQLYANLGFSLKLGIIHWVVDAGGRASGRMDAFFGYPNWLAAYLLMPWTAALGFWGESLSQRRWRRWLGLSLLLSLLGGCLLLTDSRNAWIVAGAIALVLALYEGLKWLVWGGIGYAIAILWAAFGPTGRDRLRQWIPAFFWARFSGDKFADIPRSPAESRLHQWQFAWQMTEARPWLGWGSHSFTQQYETATQVWLGHPHNLVLMFSAEFGLPATLLFLGILGSILGRALWIFLRWSVQAPSDRQDQRLLLTLLLACLGCAIFNTADVTVFDVRNNLLSWIVLAALQAATTTFATQRSPGLRAQSA

SEQ ID NO: 2003 - protein, 640 aa, Haloarcula marismortui ATCC 43049
MDFDAGSDDDVFEDARERVDRPMLRLFTGYGQGHWGAFVVGLCSSIVARMLDLLPPILLALAIDAIFLQEAEYGLFLIPDAWIPNGQGPQLWLTAGIIAASFGLGAVFHWSRNWGWNKFAQHVQHAVRTDTYETMQRLNMDFFADKQTGEMMSVLSNDVNRLEKFLNDGLNSASRMIIMVVGIATYLFYMNWQLALVALLPVPIIAVFTKRFIDVIQPKYAEVRSTVGKLNSRLENNLSGIQIIKTANTEPYEADRVEDTSEDYLDANWDAIETRITFFPGLRLVSGIGFVVTFIVGGLMVTGQAPGPLTASLSRGQFVAFIIYTQRFVWPMAQFGQIINMYQRAYASAERVFGLMDTPGRLEEAEDAPPLAVTDGRVAYEDVVFSYDGDDEPVLSDISFEADGGETVALVGPTGAGKSTVLKLLLRMYDVDSGTVRIDGQNVQDVQIQSIRRAIGYVSQETFLFYGTVRENIAYGTFDATDEEIVAAAEAAEADQFVRNLPDGYDTMVGERGVKLSGGQRQRIAIARAILKDPEILILDEATSDVDTETEMLIQRSLDDLTADRTTFAIAHRLSTVKDADTILVVEDGRIVERGSHAELLAADGLYANLWAVQAGEIDELPEEFVERAIQRRARTDADD

SEQ ID NO: 2004 - protein, 181 aa, Triticum aestivum
  misc_feature (90)..(90): Xaa can be any naturally occurring amino acid
  unsure (1)..(181): unsure at all Xaa locations
LDGVFAFVLYDTRDRTYVAARDAIGVNPLYIGWGSDGSVWMSSEMKALNEDCVRFEIFPPGHLYSSAAGGFRRWYTPHWVPRSRCPGTPXYQAAPSLREASEKAGYQRGHDRLPFRGLLSRRLDPPFVASVNKAPLRPRPTPPESGQTPSFVVRSRGPLTEGRTRVPDTRDTTRFLTKTDH

SEQ ID NO: 2005 - protein, 582 aa, Escherichia coli K12
MHNDKDLSTWQTFRRLWPTIAPFKAGLIVAGVALILNAASDTFMLSLLKPLLDDGFGKTDRSVLVWMPLVVIGLMILRGITSYVSSYCISWVSGKVVMTMRRRLFGHMMGMPVSFFDKQSTGTLLSRITYDSEQVASSSSGALITVVREGASIIGLFIMMFYYSWQLSIILIVLAPIVSIAIRVVSKRFRNISKNMQNTMGQVTTSAEQMLKGHKEVLIFGGQEVETKRFDKVSNRMRLQGMKMVSASSISDPIIQLIASLALAFVLYAASFPSVMDSLTAGTITVVFSSMIALMRPLKSLTNVNAQFQRGMAACQTLFTILDSEQEKDEGKRVIERATGDVEFRNVTFTYPGRDVPALRNINLKIPAGKTVALVGRSGSGKSTIASLITRFYDIDEGEILMDGHDLREYTLASLRNQVALVSQNVHLFNDTVANNIAYARTEQYSREQIEEAARMAYAMDFINKMDNGLDTVIGENGVLLSGGQRQRIAIARALLRDSPILILDEATSALDTESERAIQAALDELQKNRTSLVIAHRLSTIEKADEIVVVEDGVIVERGTHNDLLEHRGVYAQLHKMQFGQ

SEQ ID NO: 2006 - protein, 735 aa, Neurospora crassa
MSSPQTSPAPDVGTNIMNSGKPKCGGGEEVGEYDLGLHVAGLFLVMLFSILGAGFPVVAKKVSWVKVPTKVFFMCKHFGTGVLIATAFVHLLPTAFGNLMDPCLPDLFTTQYPAMPGVIMMGSMFILFVIEMWLNSKTGGHSHGGPTGFDNHSHGGNSLAAAQASLAQGNGVNRPSQHRRTNTEDTLFESPSDDIDYEKAMAQELYAEQVRRKAYTQTPPRNPFTNDYDDDDHYEQLSPRSEMPPWFIVFYEQYVRQRLELVNMIKATANRQQAFLPQPDTTSSSNENRKSLIPASIMDSPYRDVETGEPVHPLVYKKMSLNITLLEGGILFHSVFVGMTVSITIEGFTILLIAILFHQMFEGLGLGSRIAAVPYRQGSPRPWLLVVAFGTTAPIGQAIGLLARSSYDPNSAFGLIIVGVFNAISSGLLLYAALVDLLAEDFLSEEAQRIMTKKDKITAFIFVLLGECVKRLRLIFRFSLAQFSTGRRRGLMVHITANTPRSIKHHQQQILCITTSASFLVTVLAGIYPSKTHSPDRSIQAQQRNTMCGNYYQHHAPCGHGGIVSVNSCRALGSTCFGPDPSKGMDITLPPINSRCSDCHAAAHQPNPDARLDENDPYRKEARERAAALETEARIFRAEQEEKLKREKAKQEEEKRLAAEVKKLEKEKREKKKIMKRKIADDAESTELPAKKVREDKKGRKGKKGNTKEMKVSISEHRSYDGGQELPLAPGSGLG

SEQ ID NO: 2007 - protein, 446 aa, Antirrhinum majus
MSPTSLNTSSETAPPSSTTVCVTGAAGFIGSWLVMRLLERGYTVRATVRDPGNMKKVKHLIELPKADTNLTLWKADMTVEGSFDEAIQGCEGVFHLATSMEFDSVDPENEVIKPTIDGMLNIIKSCVQAKTVKKFIFTTSGGTVNVEEHQKPVYDETDSSDMDFINSKKMTGWMYFVSKILAEKAGMEAAKENNIDFISIIPPLVVGPFIMPTFPPSLITALSPITGNEAHYSIIKQCQYVHLDDLCEGHIFLFEYPKAEGRYICSSHDATIYDIAKLITENWPEYHIPDEFEGIDKDIPVVSFSSKKMIGMGFIFKYTLEDMVRGAIDTCREKGMLPYSTKNNKGDEKEPILNSLENNYNIQDKELFPISEEKHINGQENALLSNTQDKELLPTSEEKRVNGLESALLSKIQDKEVLPTSGVKHAKGQENALLPDIANDHTDGRI

SEQ ID NO: 2008 - protein, 534 aa, Listeria monocytogenes str. 4b H7858
MIDTLLPGKDFGLIITAALALLFFYILNTFMQYIVTYFGHMLGLNIETDMRRDLFSHLQKQPFGFYDNQKTGKLMSRMTTDLFEIGEVAHHGPEDIFISIMSLFGAFFLMLNINVKLAISTFILVPILTVLIVYFNKRMTKVTTGIFKDLGNFNAGVENAISGVRVVQAFANEPHEKGRFRVLNQAYRQSKLMFYKVMGLSFSFNYFLMRLISLFALLFGAYFTINGEISYGEFVGFILLTNVFIRPIEKINNVIESYPKGFAGFKRFLEVMDTEPAIQDEKDAKPAKAFRGDIAYNHVSFEYSDGKNVLNHINLSIKAGETVAFVGPSGAGKTTICNLLPRFYDVSAGEITIDGENIKRFTLPSLRAQIGVVQQDVFLFSGTVRENIAYGKLDASDEEIEHVVKLAHLSKVVEEMPDGLDTIIGERGVKLSGGQKQRLAIARMFLKNPPILILDEATSALDTETEQVIQASLEELAEGRTTLIIAHRLATIKHADRIIVVNETGIAETGTHNELLAQDNGAYKRLYDAQFNTI

SEQ ID NO: 2009 - protein, 180 aa, Photorhabdus luminescens subsp. laumondii TTO1
MTLKELVVGFATQVRSIWMIGLHAFHKRETQMYPEEPVYLPPRYRGRIVLTRDPDGEERCVACNLCAAVCPVGCISLQKAEHEDGRWYPEFFRINFSRCIFCGLCEEACPTTAIQLTPDFEMGEFKRQDLVYEKEELTISGPGKYPDYNFYRKTGVAIDGKSKGEADNEAKPIDVKSLLP

SEQ ID NO: 2010 - protein, 539 aa, Chlamydomonas reinhardtii
MSGDFGSEPLGSCSVETVTALLGYGLEQDSITALCQPEGGAGCTSTDNCMFQYLMGATADAQSTASDVGVGLDVSFLLFSGYLVFVMQLGFAVLCAGSIRSKNCMNILLKNMLDACVGAIGFYVFGYAFAYGRKYGQNSNGFIGNWNFALSYTTQTSMSGTEFTTFGWHQFFFQWSFCAATTTIVSGAVAERCTFMAYMIYAFFLSSFVYPVIVHWVWDGQGWLSAFNTFQDGYALILKTGAIDFAGSGVVHMTGGIAALMGAWIMGPRVGRFANDGTVNEMRGHSSTLVVMGTFLLWFGWFGFNPGSNLVVASQAAATVVSRVAVTTALAGGAGGISMLFYKFLTVKAWDVVATCNGILAGLVAVTASCSVIEPWAAIITGAIGAIIFSIADYVTLYKLKVDDPVSAFALHGAVGAWGVLFPGFLAAPHYVVEVYGAYGFGMDAREGKRFGLFYGGHGQVLLVQLIEVLAIFGWTGFMMGSFFFILNKAGLLRVPLQEEMAGLDAANYSKSVGSKDPSVHCTVGVDKLEGGALGEGKA

SEQ ID NO: 2011 - protein, 230 aa, Arabidopsis thaliana
  misc_feature (116)..(116): Xaa can be any naturally occurring amino acid
  unsure (1)..(230): unsure at all Xaa locations
MGRGNIQIHRIDNSTNRQVTFCQRRNGLLKKAYELSGLCDAELALIVFSTRGRLYEYAHNNIRSTIERYKKACSDSTNTTTAQEINAAYYQQESAQLTQQMQTIHNLHRNLTGDLXSPLSVQELKQLENRPSESPPLGIRSQKPWTRASNRKSKTRHKNGRLELCTMRTTLLIRNLRKHKIGQADPTTPLLPEGLTGSRRITGIAQVKPPTQHPWLTRFMERPAFQPPRK

SEQ ID NO: 2012 - protein, 253 aa, Triticum aestivum
MVSALSHVIRATPDQQQAYYPAGSAAVSGEQQHQHDAAAAAAIAEEQGRKRHYRGVRQRPWGKWAAEIRDPKKAARVWLGTFDTAEDAAIAYDEAALRFKGTKAKLNFPERVQGRTDLGFVVTRGIPDRLQQQQQCPATVGAPAMRPLPHQQQTVVPYPDLMRYAQLLQGAGSAGGAVNLPFGAMSPPSMSSSSPHILDFSTQQLIRVSPTSPAAAISSSGTTGPSTSSSTTTASSPGAAWPYTGEHKNNKDS

SEQ ID NO: 2013 - protein, 1288 aa, Thermoanaerobacterium saccharolyticum
MYKKLFTKKFISFVMSLLLVLTAAFSSMPFHNVYAADNASVVANIVGDFQDQLGDSNWNIDSNITIMQYVGNGLYEFTTPTQLKAGSYQYKVALNHSWNGGGVPSQGNLTLNLTNDSYVTFWFDYNTQSVTDSTKYTPISNDKLPRLVGTIQSAIGAGKDWDPGTSTAIMIDDNFDNVYSYTAHIPKGDYQYKVTLGNTWAENYGANGVQDGSNIQLSVANDADITFFYDANTHNIWTNYSPTLTGLDNNIYYDDLKHDTHDPFFRNPFGAIKVGQTVTLRIQAKNHDLESARISYWDDINKTRTELPMTRIGESPDGNYEYWEIKLSFDHPTRIWYYFILKDGTKTAYYGDNDDQLGGLGKATDTVNKDFELTVYDKNFDTNDWMKGAVMYQIFPDRFYNGDTSNDHAKTLSRGNDPIEFHNDWNDLPDNPNNAGTPGYTGDGIWSNDFFGGDLKGIDDKLDYLKGLGVSVIYLNPIFESPSNHKYDTADYTKIDEMFGTTQDFEKLMSDAHAKGINIILDGVFNHTSDDSIYFNRYGKYPDLGAYQDWKDGNQSLSPYGDWYTINSDGTYECWWGYDSLPVIKSLNGSEYNVTSWANFIINDKNAISKYWLNPDENLNDGADGWRLDVENEVAHDFWTHFRDAINTVKPEAPMIAENWGDASLDLLGDSFNSVMNYQFRNDIIDFLIGQSFDDGNGQHNPIDAAKLDQRLMSIYERYPLPAFYSTMNLLGSHDTMSILTVFGYNSADPNENSDAAKRLAEQKLKLATILQMGYPGMADIYYGDEAGVSGGKDPDDRRTFPWGNEDTALQDFFKNVSSIRNNNQVLKTGDLETLYAQNDVYAIGRRIINGKDAFGNSYPDSAAIVAINRSNSDQQITIDTTKFLRDGVAFKDLINGDKSYTINGGQITINIPAMSGVMLISDDGQDLTAPQVPSNVVATSGNGKVDLSWSQSDGATGYNIYRSSVEGGLYEKIASNVTGTTFEDTNVTNGLKYVYAISAVDELGNESEMSIDTVAYPAYPIGWVGNLTQVVDNHVISVSNPTEDIYAEVWADGLTNSTGQGPNMIAQLGYKYVGGTVNDSVYGSVYNSVYGVDDSDFTWVNAQYVGDIGNNDQYKASLHLINRSMGYLMRFSDNQGQSWTTTDTLSFYVVPSDDLIKPTAPILNQPGVESSRVSLTWSPSTDNVGIYNYEIYRSDGGTFNKIATVSNEVYNYVDTSVINGTTYSYKVVAADPSFNRTESNVVTIKPDVVPIKVTFNVTVPDYTPNSVNLAGTFPNATWDPRVPSSNS

SEQ ID NO: 2014 - protein, 323 aa, Oryza sativa
MALASLAAAASLLPAAAARSRVSLARCRGMASSSSPSAAAGASAAARVGVVQMTSVGDLDANYATCSRLAKEAASSGVKFLCFPEVFSFIGSKDGESIKIAEPLDGPIMQRYCSLAKESSMWLSLGGFQEKGPDDSHQYNTHVLIDDSGEIRSSYRKIHLFDVDVPGNMVYKESRFTTAGDTVVAVDSPFGRLGLTVCYDLRFPELYQCLRFKHQAQVLLVPSAFTKVTGEAHWEILLRARAIETQCYVIAAAQAGKHNEKRESYGDSIIIDPWGTVIARLPDRLSTGFAVADVDLSKVEAVRTKMPISEHRKFDSVWKTSSL

SEQ ID NO: 2015 - protein, 380 aa, Gloeobacter violaceus PCC 7421
MSGEYVPGLEGVPATRSNISFVDGKAGVLEYRGIPIDQLAESSTFLETAFLLIFDHLPTKDELLSFEVEILGHRRVKYRIRDMIKSFPESGRPMVALQSCIAALGLFYPLQNESKEKYAYDSTIRLLAKMPTMVATFHQMRLGNDPIPPRDDLGHAANFLYMLTGKEPDPRAARIFDVCLMLHAEHTVNASTFSALVTASTLADPYTVITSAAGTLSGPLHGGANEEVIRMLKEIGTIERVRPYLENRLARKEKIMGVGHRVYKVKDPRATILQNLAQELFDRFGHSRLYDIAVEVERVCDELLGQKGIYPNVDFYSGLVYEKMGIPADMFTPVFAISRVAGWLAHWHEQLADNRIFRPTQVYTGSHNVEFTPLSLRSYA

SEQ ID NO: 2016 - protein, 509 aa, Vibrio rumoiensis
MSDDTKKCPVTHMTTDFGAPVVTNRDSLTAGPRGPLLAQDVWLNEKLAGFVREVIPERRMHAKGSGAFGTFTVTHDITKYTRAKIFSEVGKKTEMFARFTTVAGERGAADAERDIRGFALKFYTEEGNWDMVGNNTPVFFIRDPRQFPDLNKAVKRDPRTNLRSATNNWDYWTLLPEALHQVTVVMSDRGIPASYRHMHGFSSHTYSLWNQAGERFWVKMHFRTQQGIKNLTDAEAGELVAQDRESHQRDLYEAIERGEYPKWTMFIQVMPEADAEKYALHPFDLTKVWYKGDYPLIEVGEFELNKNSENFFADVEQVAFSPSNLVPGIGVSPDRMLQARLFNYADAQRYRLGVNYHQIPVNQARCPVHSNHRDGQGRVDGNYGALPHYEPNSFGQWQGQPQFSEPPLKLTGNAAHWSYDKDDHNYFEQPGKLFRLMNDGQKEALFGNTGRAMGDAPEFIKFRHIRNCHAADPAYGAGVAKALGINLEKALASKKDDPMYGNPLVALPA

SEQ ID NO: 2017 - protein, 404 aa, Photorhabdus luminescens subsp. laumondii TTO1
MLAVKKSSKLDNVCYDIRGPVLKEAKRLEEEGNKVLKLNIGNPAPFGFEAPDEILVDVIRNLPTAQGYSDSKGLYSARKAIMQHYQARNMMDVTVEDIYIGNGVSELIVQAMQALLNTGDEMLVPAPDYPLWTAAVSLSSGKAVHYMCDEGSDWFPDLNDIRNKITPRTRGIVIINPNNPTGAVYSKELLLEVVEIARQHNLIIFADEIYDKILYDDAEHHSIAALAPDLLTVTFNGLSKTYRVAGFRQGWMVLNGPKKHAKSYIEGLEMLASMRLCANVPMQHAIQTALGGYQSISEFILPGGRLYEQRNRAWELINQIPGVSCVKPKGALYMFPKIDAKRFNVHDDQKMVLDLLLQEKVLLVQGTAFNWPEPDHLRIVTLPRLDELEMAIQKFARFIGKYHQ

SEQ ID NO: 2018 - protein, 229 aa, Leptospira interrogans serovar lai str. 56601
MNYQKYLFLDVGDTILHLKKSAGETYLEILLQAGLQKKENAGEIYRRAFTESWQKMQKNSPPEHRDKYQFHSGGTPGWWKELLEDFLKRVPDQVSIEKAFPIIYHKFADPELWTLDPGFWKLKDYCKEENWGLGAISNWDHRLRALLEAKGILEYLNPVIVSAEFGYEKPSPKIFEEAMRLVELSGDCLVYCGDKYELDIKIPKSLGWRSYLKGEKGDLKTLSELIQFL

SEQ ID NO: 2019 - protein, 321 aa, Bacillus anthracis str. 'Ames Ancestor'
MKALCFETFGNADVLQYKEIPDPIINPNEILVRTKAIGLNFADIYRRRGDYHLAGNPPYILGYEGAGIVEEIGTNVTTIKPGDRIAFADVPFANAELVAVPSKKTIQLPNSISFETAASVLLQGLTAHYLTKDSYQIKQGDIALVHAAAGGVGQLLIQIIKLLGGTAIGLTSSNEKAKVATLAGADHVFLYSEKWHSKVLEITNGTGVNVVYESVGSTLEESFNATKIGGTVVFYGMAGGNPAPVDPRMLMDTSKTLTGGDLWNVLTTFEERKQRSTQLFDWIASGKLNIASPTTFSLQDGAHAHKLLESRKSTGKILLIP

SEQ ID NO: 2020 - protein, 553 aa, Nocardia farcinica IFM 10152
MTDVASQGAAQGDDRRVLTNRQGHPVFDNQNQRTVGARGPATLENYQFLEKISHFDRERIPERVVHARGAVAYGYFEATGKWGDEPIENYTRAKIFAEAGKRTDLAIRFSTVIGGRDSSEAARDPRGFAIKFYTEDGNWDLVGNNLGVFFIRDAIKFPDVIHALKPDPVTFRQEPARIFDFMSQTPEAMHMLVNLFSPRGIPANYRTQQGFGVNTYKWVNAEGVTHLVKYHWIPKAGVKSLTEADAAAIQAQDLGHASKDLYEHIEAGDYPEWELRVQIMSDDEHPELNFDPLDDTKVWPENEFPPKPVGKMVLNRNVSNHFLENEQISFGTGVLVDGLDFSDDKMLVGRTFSYSDTQRYRVGPNYLQLPVNQAKNAHVATNQQGGPMAYGIDDVGENPHVNYEPSITGGLREAQYPTHDEQGPEIRGRLTRKRIPRTNDYEQAGQRYQLMEQWEKDDLVTNLVANIGQATREVQERMVWHFYMCDDELGERVGQGLGISADDVRGLPPLQSQTLSDEELQRAANLGKNGPRDVEGLQMTHCVPDEREVHAAA

SEQ ID NO: 2021 - protein, 360 aa, Glycine max
  misc_feature (165)..(165): Xaa can be any naturally occurring amino acid
  misc_feature (242)..(242): Xaa can be any naturally occurring amino acid
  unsure (1)..(360): unsure at all Xaa locations
MEQSWWANMPRELLREVLLRIESSEATWPSRRSVVACGGVCRTWRLIVKEIVKPPQLSSNITFPISLKQPGPREHLLQCFIRRNSATQTYYLFLSLSSALIADDGKFLLAARKFRRPTCTDYIISLDADDMSRESNAYVGKLRSNFLGTKFTIYDSPLPHVGAKXCSTELVVNSKQVSPRPRVPTGNYPVAHISYELNVLGSRGPRRMHCVMDTIPASAIEPGGVAVAAPSQTDFSVSNRDXSFPFFQTNSTSLENSISGDQSYQKDDVLVLRNKAARWHEQLQCWCLNFHGRVTIASVKNFQLVASAENRPAGPEHDKIILQFGKVGKDLFTMDYRFPISAFQAFAICLSSFDTKIACE

SEQ ID NO: 2022 - protein, 773 aa, Alkalilimnicola ehrlichei MLHE-1
MSTTHVLGYPRIGARRELKRATEAYWKGEIDQAELERTGRELRARHWQAQRDAGLDWVTVGDFAFYDHVLNVSALLGAVPPRFGDAGETVDLDTTFRMARGRAPTGEPAAACEMTKYFDTNYHYLVPELHADQRFGLASRRLFDEVAEARAAGHPVKVVLTGPLTWLWLGKAKSPGLDRLDLLDGVVDVYGEILQQLGEQGVEWVQLDEPALVQDLPADWQQAYERAYHRLQAGPVKLLLATYFGGLGENLSTALNLPVDGIHIDCVRDPDQLTAVLDRLLPHKVLSLGVIDGRNVWRSDLAALARTLAPVRERLGERLWLAPSCSLLHVPVDLDLETELQPQLRRWLAFARQKLDELVVLGRLLGDRAGAADEQAAAEASAALADRQASTHIHKAEVAERMQRVGPADRQRGQPYPERARKQRKRLALPLFPTTTIGSFPQTAEIRAARRDLKAGRLTPEAYEARMREEIAFAVARQEEIGLDVLVHGEAERNDMVEYFGEQLDGFAFTRAGWVQSYGSRCVKPPIIYGDVSRPRPMTVRWSEYAQSLTGRPMKGMLTGPVTVLQWSFVRDDQPRSETCRQIALALRDEVADLEAAGIPAIQIDEPALREGLPLQQRQWPGYLDWAVDCFRLTASVAQDATQIHTHMCYSEFNDIMGAIATLDADVITIETSRSDMELLEVFEGFEYPNEIGPGVYDIHSPNTPSVDWMVRLMEKAARRIPVERLWVNPDCGLKTRAWAEVEPALQNMVAAAEILRERYGQAQTRVATQGKR

SEQ ID NO: 2023 - protein, 579 aa, Brassica rapa
MKRDLHQFQGPPDTRFPNHGTANTGSSSKDKMMMVKEEEDGGNMDELLAVLGYKVRSSEMAEVALKLEQLETMMGNVQEDGLSNLATDTVHYNPSELYSWLDNMLTEFNPPPPEINNSFLAGAGGSDYDLKAIPGNAIYARSDQFAIDSSSSSNQAGDNSQSTKRLKSCSSPDSLVTGTTVTTTTTESTRSVGLAAESTRSMVLVDSQENGVRLVHALMACAEAIQNNDLSIAEALVKQIGFLAVSQAGAMRKVATYFAEALARRIYRLSPPQTQIDHSLSDTLQMHFYETCPYLKFAHFTANQAILEAFEGKKRVHVIDFSMNQGLQWPALMQALALREGGPPVFRLTGIGPPAADNSDHLHEVGCKLAQLAEAIHVEFEYRGFVANSLADLDASMLELRPSEIEAVAVNSVFELHKLLGRTGGIEKVLGVVKQIKPVIFTVVEQESSHNGPVFLDRFTESLHYYSTLFDSLEGVPSSQDKVMSEVYLGKQICNLVACEGPDRVERHETLSQWANRFGSSGFAPAHLGSNAFKQASMLLALFNGGEGYRVEENNGCLMLGWHTRPLITTSAWKLSAAH

SEQ ID NO: 2024 - protein, 389 aa, Nocardia farcinica IFM 10152
MRDAVIVEAVRTPIGKGKPNGALHQVHAVDLLAHSLREVVRRSGIDPVLIDDVIGGVVTQVGEQGANITRRAALAAGYPESVPATTVDRQCGSSQQAIHFAAQGVLAGAYDVVVAAGVESMGRIPMGANIAGSADLGGVAFTERYPEGLVPQGISAELIAARWGLTRTQLDEFALSSHDKAARATKNGQFAAELAPLAGLETDEGIRVGSTLETLAGLRPAYYDPAMAERFPQIGWQITAASASQVSDGSAAVLIMTGERAAQLGLTPLARLHSFAVAGDDPLLMLTAVIPATRKVLQRAGLQLADIDLVEINEAFSPVVLAWAQETGADLSKVNVNGGAIALGHPLGASGARLTTTLVHAMRERGARYGLQTMCEAGGLANAMILERL

SEQ ID NO: 2025 - protein, 425 aa, Chromobacterium violaceum ATCC 12472
MSRNLELFERGKQVIPGGVNSPVRAFGQVGGTPRFVARAEGAYFWDADGKQYLDYVGSWGPAIVGHAHPEVVKAVQDAAVGGLSFGAPTEGEVVIAEEICKLLPSVEQVRLVSSGTEATMTAIRLARGFTGRDLIVKFEGCYHGHSDSLLVKAGSGLLTFGNPSSGGVPADFTKHTLVLQYNDVEQLSRTFAEIGDKIACVILEPIAGNMNLIQPSREFVQALRQLTEKHGAVLIYDEVMTGFRVAKGCAQGLHGVTPDLTTLGKVVGGGMPLAAFGGRADIMGKIAPLGTVYQAGTLSGNPLSVAAGLATLKLIQQPGFYETLGSRTARLAQGLAEEARKAGVTLSTDSVGGMFGFYFSDKAPKSYAEATGCDIERFKRFFHAMLDEGVYFAPSAYEAGFVSAAHSEQMIESTLAAAGRAFARL

SEQ ID NO: 2026 - protein, 149 aa, Brassica napus
  misc_feature (119)..(119): Xaa can be any naturally occurring amino acid
  misc_feature (136)..(136): Xaa can be any naturally occurring amino acid
  misc_feature (139)..(139): Xaa can be any naturally occurring amino acid
  misc_feature (148)..(148): Xaa can be any naturally occurring amino acid
  unsure (1)..(149): unsure at all Xaa locations
PLEGCPSVFQVICNLTPGYHQYKFYVDGEWRHDEHQPFVNGNGGVMNTILITLPDMVPTGFSPSNMDVDDFSQQMADPSQDSIPRMSAVDLEMSRHRISVLLSTCTAYELLPESGKVIXALDVNLPVKQAFHILYXSRXIPLAPLWDXW

SEQ ID NO: 2027 - protein, 588 aa, Petunia x hybrida
MAGVANGGTKCIQDSSSASAIANAEATLGRHLARRLVEIGIEDVFSVPGDFNLTLLDHLIAEPKLKNIGCCNELNAGYAADGYARERGIGACVVTFTVGGLSVLNAIAGAYSENLPVICIVGGPNTNDYGTNRILHHTIGLPDFSQELRCFQTVTCYQAVVNHLDDAHEQIDKAISTALKESKPVYISISCNLPAIPHPTFSRDPIPFSISPRLSNKRGLEAAVDATVAFLRQAVKPVMIGGPKLRVAKALNAFVEFADSSGYAMAVMPSAKGLVPEQHPHFIGTYWGAVGTSYCGEIVESADAYLFAGPIFNDYSSVGYSLLIKKEKSIIVQPDRVVIGNGPAFGCVLMKDFLTELAKRIQKNTTAYENYRRIFVPEGTPPKSEPNEPLRVNVMFQHIQKMLSDETAVIAETGDSWFNCQKLKLPKGCGYEFQMQYGSIGWSVGATLGYAQSVPKKRVISCIGDGSFQVTAQDVSTMIRCDQKNIIFLINNGGYTIEVEIHDGPYNVIKNWNYTGLVEAIHNGEGNCWTQKVRTEEELTDAIATATGEKKDCLCFIEVIVHKDDTSKELLEWGSRVCSANGRPPNPQ

SEQ ID NO: 2028 - protein, 600 aa, Arabidopsis thaliana
MAGDGVENAKPPQKQEDLQPHPVKDQLYGITYCLTSPPPWPETILLGFQHYLVMLGTTVLIPTMLVSKIDARNEDKVKLIQTLLFVSGINTLFQSFFGTRLPAVIGASYSYVPTTMSIVLAARYNDIMDPQKKMQRFEQIMRGIQGALIIASFLHILVGFSGLWRNVTRFLSPLSAVPLVAFSGFGLYEQGFPMLAKCIEIGLPEIILLVIFSQYIPHLMQGETCSNFFHRFAVIFSVVIVWLYAYILTIGGAYSNTEINTQISCRTDRAGIISASPWIRVPHPIQWGGAPTFNAGDIFAMMAASFVSLVESTGTYIAVSRYASATPIPPSVLSRGIGWQVNTQKRLKYFSMASSKLSLLMRFSVFKGFGILLCGLFGAGNATSVENAGLLAVTRVGSRRVIQVAAGFMIFFSILGKFGAIFASIPAPIVAALYCLFFSYVGTILETTETELFCFLFLEPQGTHLFAQKTENIAGAGGLSLIQFCNLNSFRTKFILGFSIFMGLSIPQYFYQYTTLETYGPVRTSATWFNNIINVPFSSKAFVSGILAFFLDTTLPPKDKTTKKDRGLVWWKRFKSFQSDNRSEEFYSLPLNLSKYFPSH

SEQ ID NO: 2029 - protein, 507 aa, Petunia x hybrida
MDAKIGSIDTCKPTTNNVATLPTNNTVTISTHTPSTTIIPCNSTTDSTLGRHLARRLVQVGITDVFGVPGDFNLTLLDHLISEPNLEFIGCCNELNAGYAADGYARPRGVGACVVTFTVGGLSVLNAIAGAYSENLPLICIVGGPNSNDYGTSGVLHHTIGLPDFSQELRCFQTVTCYQAVVNNLEDAHEMIDTAISTALKESKPVYISISCNLPAIPHPTFSREPVPFSLSPRLSNQMGLEAAVEAAAEFLNKAVKPVVVGGPKLRVAKASDAFVELMDASGYAVAVMPSAKGMVPEHHPHFIGTYWGAVSTAFCAEIVESADAYLFAGPIFNDYSSVGYSLLLKKDKAIIVQPDRVTIGNGPAFGCVLMKDFLAALAKRLKHNPTAHENYRRIYVPEGHPLKCEPNEALRVNVLFEHIQRMVSADTAVIAETGDSWFNCQKLKLPEGCGYEFQMQYGSIGWSVGATLGYAQAARDKRVLAFIGDGSFQVTAQDISTMLRCGQRTI

SEQ ID NO: 2030 - protein, 160 aa, Salmonella enterica
SLGLWEICIIWGLGISLAVYLTAGISGGHLNPAVTIALWLFACFPKQKVLPYIIAQFAGAFGGALLAYVLYSSLFTEFETAHHMVRGSVESLQLASIFSTYPAAALNVWQAALVEVVITSILMGMIMALTDDGNGIPKGPLAPLLIGILVAVIGASLEVS

SEQ ID NO: 2031 - protein, 512 aa, Arabidopsis thaliana
MEISVSSVTFSLAVVVVSWWVWRTLKWVWFTPKMLERSLRRQGLSGTSYTPLIGDFKKMISMFIEATSKPIKPTDDITPRVMPHPLQMLKTHGRTNLTWFGPIPTITIMDPEQIKEVFNKVYDFQKAHTFPLSKILGTGLVSYDGDKWAQHRRIINPAFHLEKIKNMVHVFHESCSELVGEWDKLVSDKGSSCEVDVWPGLTSMTADVISRTAFGSSYREGHRIFELQAELAQLVMQAFQKFFIPGYIYLPTKGNRRMKTAAREIQDILRGIINKRERARESGEAPSEDLLGILLESNLGQTEGNGMSTEDMMEECKLFYLAGQETTSVLLVWTMVLLSQHQDWQARAREEVKQVFGDKQPDTEGLNQLKVMTMILYEVLRLYPPVVQLTRAIHKEMKLGDLTLPGGVQISLPVLLVHRDTELWGNDAGEFKPERFKDGLSKATKNQVSFFPFAWGPRICIGQNFTLLEAKMAMSLILQRFSFELSPSYVHAPYTIITLYPQFGAHLMLHKL

SEQ ID NO: 2032 - protein, 476 aa, Zea mays
  misc_feature (274)..(274): Xaa can be any naturally occurring amino acid
  misc_feature (287)..(287): Xaa can be any naturally occurring amino acid
  misc_feature (338)..(338): Xaa can be any naturally occurring amino acid
  unsure (1)..(476): unsure at all Xaa locations
MAGGFRVLHLVRPFLAFLPEVQSADRKIPFREKVIYTVISLFIFLVCSQLPLYGIHSTTGADPFYWMRVILASNRGTVMELGITPIVTSGMVMQLLVGSKIIEVDNSVREDRALLNGAQKLLGILIAIGEAVAYVLSGMYGSVSQLGTGNAILIILQLFFAGIIVICLDELLQKGYGLGSGISLFIATNICENIIWKAFSPTTINSGRGAEFEGAVIALFHLLITRTDKVRALREAFYRQNLPNVTNLLATVLVFLIVIYFRGFRVVLPVRSKXNARGQQGSYPIKXFYTSNMPIILHSALITNLYFISQLLYRKYSGNFLVNLLGMWKESEYSGHSXPVGGLAYYVTAPSSLADVLANPFHALFYVVFMLSACALFSKTWIEFSGSSAKDVAKQLKEQQMVMPGHRESNLQKELNRYIPTAAAFGGVCIGALTVLADFMGAIGSGTGILLAVTIIYQYFETFEKERATELGFFGF

SEQ ID NO: 2033 - protein, 444 aa, Arabidopsis thaliana
MTIYIRFSTCIETNLHESVNTPDDLLRRVGCGGDRDESMNRCETDSSSHKHTNRVKSSDSVPKAKQLPKKIKSENVRSTLIPFYYYYYCYYITSYNSVCRIMERYEIVKDIGSGNFGVAKLVRDKFSKELFAVKFIERGQKIDEHVQREIMNHRSLIHPNIIRFKEVLLTATHLALVMEYAAGGELFGRICSAGRFSEDEARFFFQQLISGVNYCHSLQICHRDLKLENTLLDGSEAPRVKICDFGYSKSGVLHSQPKTTVGTPAYIAPEVLSTKEYDGKIADVWSCGVTLYVMLVGAYPFEDPSDPKDFRKTIGRILKAQYAIPDYVRVSDECRHLLSRIFVANPEKRITIEEIKNHSWFLKNLPVEMYEGSLMMNGPSTQTVEEIVWIIEEARKPITVATGLAGAGGSGGSSNGAIGSSSMDLDDLDTDFDDIDTADLLSPL

SEQ ID NO: 2034 - protein, 161 aa, Salmonella enterica
SLGLWEICIIWGLGISLAVYLTAGISGGHLNPAVTIALWLFACFPKQKVLPYIIAQFAGAFGGALLAYVLYSSLFTEFETAHHMVRGSVESLQLASIFSTYPAAALNVWQAALVEVVITSILMGMIMALTDDGNGIPKGPLAPLLIGILVAVIGASTGPLT

SEQ ID NO: 2035 - protein, 551 aa, Burkholderia vietnamiensis G4
METHSHECRTAGFAAARERIDARPHVVQSRRAQRAASRHVCGRRRSARDRRTRSRDSRRGAHGRRSLLLRGRQPEPPARQPFEGSVLSGRQHRSARRVGDGDPRVDEARDRRSGRRGGRCRLLARARLRHGRGRARREVRDVVRARRPHARWRRIVVSRARTAAGARGRNPARRQTDRGRTAACARHRQSARGARRRIARRTRVGRLACRRLAERACAHQATARRRDRPAARRTPRDRARSFRRGAASRRRVRRHHRIPGEASAALQALIARVRNVPAALPRPRRGASRAAPAALADPCCNGRLSRRAPGAVFAHATKELTMIDVYSWATPNGHKVHIMLEETGLAYRAHPVDIGAGDKFKPEFLKISPNNKIPAIVDSDGPGGKPISLFESGAILVYLAEKTGKFLPADPAERYATLEWLMFQMGGVGPMLGQAHHFRLYAPEKIEYAINRYTNEAKRLYNVMEKRLAQSEYLAGDTYTIADIATFPWTRSWQNQGIVLDELPNVKRWHEAIAARPAVQRGVEVLASLRKALQDDKAREILFGATQYAKH

SEQ ID NO: 2036 - protein, 484 aa, Synechococcus elongatus PCC 7942
MAAPILFWHRRDLRLSDNIGLAAARAQSAQLIGLFCLDPQILQSADMAPARVAYLQGCLQELQQRYQQAGSRLLLLQGDPQHLIPQLAQQLQAEAVYWNQDIEPYGRDRDGQVAAALKTAGIRAVQLWDQLLHSPDQILSGSGNPYSVYGPFWKNWQAQPKPTPVATPTELVDLSPEQLTAIAPLLLSELPTLKQLGFDWDGGFPVEPGETAAIARLQEFCDRAIADYDPQRNFPAEAGTSGLSPALKFGAIGIRQAWQAASAAHALSRSDEARNSIRVWQQELAWREFYQHALYHFPSLADGPYRSLWQQFPWENREALFTAWTQAQTGYPIVDAAMRQLTETGWMHNRCRMIVASFLTKDLIIDWRRGEQFFMQHLVDGDLAANNGGWQWSASSGMDPKPLRIFNPASQAKKFDATATYIKRWLPELRHVHPKDLISGEITPIERRGYPAPIVNHNLRQKQFKALYNQLKAAIAEPEAEPDS

SEQ ID NO: 2037 - protein, 652 aa, Arabidopsis thaliana
MRRKTKKIESKMHALKIERLIESASVQIPVLHSRVYYFPQGHVEHCCPLLSTLPSSTSPVPCIITSIQLLADPVTDEVFAHLILQPMTQQQFTPTNYSRFGRFDGDVDDNNKVTTFAKILTPSDANNGGGFSVPRFCADSVFPLLNFQIDPPVQKLYVTDIHGAVWDFRHIYRGTPRRHLLTTGWSKFVNSKKLIAGDSVVFMRKSADEMFIGVRRTPISSSDGGSSYYGGDEYNGYYSQSSVAKEDDGSPKKTFRRSGNGKLTAEAVTDAINRASQGLPFEVVFYPAAGWSEFVVRAEDVESSMSMYWTPGTRVKMAMETEDSSRITWFQGIVSSTYQETGPWRGSPWKQLQVYDVFEMITWDEPEILQNVKRVNPWQVEIAAHATQLHTPFPPAKRLKYPQPGGGFLSGDDGEILYPQSGLSSAAAPDPSPSMFSYSTFPAGMQGARQYDFGSFNPTGFIGGNPPQLFTNNFLSPLPDLGKVSTEMMNFGSPPSDNLSPNSNTTNLSSGNDLVGNRGPLSKKVNSIQLFGKIITVEEHSESGPAESGLCEEDGSKESSDNETQLSLSHAPPSVPKHSNSNAGSSSQGIFRSLSNPEAWNDFTIIYNSVVSAIDFSLAFLCHVTIPFFTFFLFFLSISQTHLMNISLSSNR

SEQ ID NO: 2038 - protein, 309 aa, Salmonella enterica subsp. enterica serovar Typhi Ty2
MSKKIAVIGECMIELSQKGADVQRGFGGDTLNTSVYIARQVDSAALAVHYVTALGTDSFSQQMLEAWQHENVDTSLTQRMENRLPGLYYIETDDTGERTFYYWRNEAAAKFWLESEQSAAICETLATFDYLYLSGISLAILSPTSRDKLLSLLRECRANGGKVIFDNNYRPRLWTSREETQQVYQKMLECTDIAFLTLDDEDALWGKQPVEEVIARTHAAGVQEVVVKRGADSCLVSIQGEALIDVPAVKLPKEKVIDTTAAGDSFSAGYLAVRLTGGSATDAAKRGHLTASTVIQYRGAIIPHDAMPQ

SEQ ID NO: 2039 - protein, 285 aa, Pseudomonas syringae pv. tomato str. DC3000
MTIALKQPTLTGQCVAEFLGTALMIFFGTGCVAALKVAGATFGLWEICIIWGMAVSMGIYLSAGISGAHLNPAVSIALSLFAGFEKRKLPFYISAQIAGAFCGAGLVYLLYISLFFDFEHAHHIIRGSEQSLELASVFSTYPNPAISVGQAFLVEVVITTILMGVIMALGDDNNGLPRGALAPLLIGLLVAVIGSAMGPLTGFAMNPARDFGPKLMTFFAGWGEIAFTGGRDIPYFLVPIFAPILGACLGAAGYRALIARHLPSTVTVENEKEAPVVRGKVQASS

SEQ ID NO: 2040 - protein, 396 aa, Escherichia coli K12; identical to SEQ ID NO: 745

SEQ ID NO: 2041 - protein, 364 aa, Lycopersicon esculentum
MAIENNDQSFFLDVLYCEEEEEKWGDLLEDEEGVIINPLLLSSEGTTKTNSLLLLPLLLLEQDLFWEDEELLSLFVKEKETRCCFESFGSDPFLCSARVDVVEWILKVNAHYDFSALTAILAINYLDRFLSSLQFQKDKPWMTQLAAVTCLSLAAKVEETQVPLLLDFQVEDAKYVFEAKTIQRMELLVLSSLKWRMNPVTPLSFLDHIIRRLGLKNNVHWEFLRRCESLLLSVMIDCRFVRYMPSVLATAIMLHVIHQIEPCNAIDYQNQLLGVLKISKENVNNCYELISEVSSKPITSHKRKYDENPSSPSGVIDPIYTSESSNDSWDLDLPSFKKSKVQEQQMKMSSSLSRVFVEAVGSPH

SEQ ID NO: 2042 - protein, 189 aa, Desulfovibrio desulfuricans G20
MDIDFKKLAPWNWFKKEQEEQQSTASLPMQRNDLPVAGGPVSPILQLHREIDRLFDDAFRGFGFPALAMPRWPSDWPGLLKPALDIQETDKLYKISLEVPGVEEKDIQITLDNDVLLVRGEKRQEQETKDGGFHRVERSYGSFQRALNLPADANQDTIKAAFKNGVLTITMEKREACAPKQGRSIPING

SEQ ID NO: 2043 - protein, 336 aa, Arabidopsis thaliana
MVMMIIIYTEPEISLFPLQDRSEELSSNVENGSCNSNEGINPETSSHWIENVVKVRKPYTVTKQREKWSEEEHDRFLEAIKLYGRGWRQIQEHIGTKTAVQIRSHAQKFFSKMAQEADSRSEGSVKAIVIPPPRPKRKPAHPYPRKSPVPYTQSPPPNLSAMEKGTKSPTSVLSSFGSEDQNNYTTSKQPFKDDSDIGSTPISSITLFGKIVLVAEESHKPSSYNDDDLKQMTCQENHYSGMLVDTNLSLGVWETFCTGSNAFGSVTEASENLEKSAEPISSSWKRLSSLEKQGSCNPVNASGFRPYKRCLSEREVTSSLTLVASDEKKSQRARIC

SEQ ID NO: 2044 - protein, 122 aa, Aspergillus japonicus
DKDGDGQITTKELGTVMRSLGQNPSESELQDMINEVDADNNGTIDFPEFLTMMARKMKDTDSEEEIREAFKVFDRDNNGFISAAELRHVMTSIGEKLTDDEVDEMIREADQDGDGRIDYNEF

SEQ ID NO: 2045 - protein, 644 aa, Magnetococcus sp. MC-1
MGFLFSLQGMDRALTTQSAPATAWTIEESMELYRTQGWGLGYVHVDAEGDLTITPGSQPHIESISLPKLVDDVEAMGFQGPMLIRFGGILQDRITRLNRAFTESRSRLNYAGHYQGVYPVKVNQDRHVVSEVVASGTPMGLEVGSKPELVLAMAYMDRTPLIICNGYKDRDYIELALRATGLGFPIFVVVDRLEELAPIIDLAKSLNVSPNLGLRARLLTEGVGKWSESAGGFSKFGLTAGEILLAVNQLEREGLKESLKLLHMHQGSQISLLDVVRQSAQEIVRFYLELRKMGCPIEYVDVGGGLGVDYEGLSSSAPCSVNYSLGQYADALLGVFAERCREAGAPEPNVVTESGRALTAPHAVLVVEVMGWSEPVGRDPAPETIPEQAPEVQTLHTLAMEFDKERADLIWEQALMLFESIKQGFVLGRLDLTARSIAERVMVHLGRLVHEAKGQDPKPESRLQGYVSERYLTNFSMFQSLPDAWAIGQLFPIMPLQRLHEEPAAEAILQDLTCDSDGQVKRFIGVQGENATLPVHHPGPTERYRLGFFLVGAYQEILGDYHNLFGDTHVVEVGLKADGSMAKPVVRRGQRSVDVLKAVSYEPSELYDAVGRLARGACKDDRAAQFIEAYARLVKGCPYLTSRS

SEQ ID NO: 2046 - protein, 383 aa, Desulfovibrio desulfuricans G20
MAYPDPYARPPQDHFIRRWLFITACIAALMLLWQFLPAIEAWFSPREAAERTVTARGDLAADEKATIELFEKSRASVVYITTAQLVRDVWTRNVFSVPRGTGSGFIWDDAGHVVTNFHVIQGASEASVKLADGRDYQAALVGASPAHDIAVLKIGVGFKRPPAVPIGTSADLKVGQKVFAIGNPFGLDWTLTAGIVSALDRSLPGEAGGPAIDHLIQTDAAINPGNSGGPLLDSAGRLIGINTAIYSPSGASAGIGFAVPVDTVMRVVPQLIKTGKYIRPALGIQVDEQLNQRLLALTGSKGVFVLRVTPGSAAHKAGLAGVEVTPQGIVPGDRIIGVDGKATDNVAKLLARLDDRKVGDVVVLSVERAGKTREVRVELQPGI

SEQ ID NO: 2047 - protein, 489 aa, Escherichia coli K12
MVSETKTTEAPGLRRELKARHLTMIAIGGSIGTGLFVASGATISQAGPGGALLSYMLIGLMVYFLMTSLGELAAYMPVSGSFATYGQNYVEEGFGFALGWNYWYNWAVTIAVDLVAAQLVMSWWFPDTPGWIWSALFLGVIFLLNYISVRGFGEAEYWFSLIKVTTVIVFIIVGVLMIIGIFKGAQPAGWSNWTIGEAPFAGGFAAMIGVAMIVGFSFQGTELIGIAAGESEDPAKNIPRAVRQVFWRILLFYVFAILIISLIIPYTDPSLLRNDVKDISVSPFTLVFQHAGLLSAAAVMNAVILTAVLSAGNSGMYASTRMLYTLACDGKAPRIFAKLSRGGVPRNALYATTVIAGLCFLTSMFGNQTVYLWLLNTSGMTGFIAWLGIAISHYRFRRGYVLQGHDINDLPYRSGFFPLGPIFAFILCLIITLGQNYEAFLKDTIDWGGVAATYIGIPLFLIIWFGYKLIKGTHFVRYSEMKFPQNDKK

SEQ ID NO: 2048 - protein, 501 aa, Saccharomyces cerevisiae
MTDVLRSLVRKISFNNSDNLQLKHKTSIQSNTALEKKKRKPDTIKKVSDVQVHHTVPNFNNSSEYINDIENLIISKLIDGGKEGIAVDHIEHANISDSKTDGKVANKHENISSKLSKEKVEKMINFDYRYIKTKERTIHKRVYKHDRKTDVDRKNHGGTIDISYPTTEVVGHGSFGVVVTTVIIETNQKVAIKKVLQDRRYKNRELETMKMLCHPNTVGLQYYFYEKDEEDEVYLNLVLDYMPQSLYQRLRHFVNLKMQMPRVEIKFYAYQLFKALNYLHNVPRICHRDIKPQNLLVDPTTFSFKICDFGSAKCLKPDQPNVSYICSRYYRAPELMFGATNYSNQVDVWSSACVIAELLLGKPLFSGESGIDQLVEIIKIMGIPTKDEISGMNPNYEDHVFPNIKPITLAEIFKAEDPDTLDLLTKTLKYHPCERLVPLQCLLSSYFDETKRCDTDTYVKAQNLRIFDFDVETELGHVPLVERPAIEERLKHFVSAPSSSL

SEQ ID NO: 2049 - protein, 459 aa, Gloeobacter violaceus PCC 7421
MAFDYDLLIIGCGVGGHGAALHAVAHKLKVAVVEARDLGGTCINRGCIPSKALLAAAGRLRVLRESEHLGISVGEISFDRAKIAHHAASVVDKIRADLTKSLQKLGVTILHGHARLKGSQTVEIDPGEGGGEVQVLTARDVLIASGSQPFVPPGIVTDGKTVYTSDEGVRLEHLPEHICIIGSGYIGLEFSDVYTALGTKVTMIEALDRLMPGFDPDIARLAARLLVKSRDIDTKVGVFAKKVTPGQPATVELSTGEQLQFDAVLVACGRTPDTKNLGLESVGLETARGFIPVDGRMATSAEHLWAIGDATGKMMLAHAASAQGIVAVDNMLGHERTIDYRSIPAACFTHPEIGFVGLTEPQAKEQGYKVGVVRTYFGGNSKAIAQGDTEGMAKIVYDQTTGELLGCHIIGPEASLLVAEAAQAIAGRDRIERLAHLVHTHPTLSEILDEGYKRAAAVL

SEQ ID NO: 2050 - protein, 324 aa, Geobacillus kaustophilus HTA426
MTKPYVFITRKLPEDVVAPLLAIAEVEMWPHEDMAVPHDVLVEKAKRATAILPMVSDPIDEDVLSAGSALRVVANMGVGYDNIDVAAAAHRGILVCNTPDVLTDTTADLTFALLLATARRLVEAAMFLKEGKWKSWSPFLLAGADVHHKTIGIVGMGNIGQAVAKRAKGFDMNILYYNRSRRPEAEEKLGAVYRPFADLLSESDFVVCLTPLTSETRHLFNREAFRQMKKSAIFINAARGAVVDEQALYEALVGGEIAAAGLDVFEHEPVAADHPLVSLPNVVALPHIGSATYETRRAMMTLARDNIIAVLEGRPPLTPVNRIS

SEQ ID NO: 2051 - protein, 348 aa, Rhodobacter capsulatus
MSDLTKIPVTVITGFLGAGKTTLIRHLMANPEGRKLAVLVNEFGTVGVDGEILRQCADENCPDENIVELANGCICCTVADEFIPTIEALMARPVRPDHILIETSGLALPKPLLKAFDWPAIRSKITVDGVIAVADAEAVAAGRFAPDVAAVDAQRQADDIIDHETPLSEVFEDQIACADIVLLSKADLAGAEGLATARALIEAELPRKLPILPLTEGVIDPKVILGLGAAAEDDLAARPSHHDDHDDHEHDDFDTVVIELPEIADPAALVAAIERLAREQNILRVKGHIAVAGKPMRLLVQAVGERVRHQYDRPWGTEARRSALVVIAEHHDVDEAAIRAVLLGGVAA

SEQ ID NO: 2052 - protein, 159 aa, Salmonella enterica
AGASLGLWEICIIWGLGISLAVYLTAGISGGHLNPAVTIALWLFACFPKQKVLPYIIAQFAGAFGGALLAYVLYSSLFTEFETAHHMVRGSVESLQLASIFSTYPAAALNVWQAALVEVVITSILMGMIMALTDDGNGIPKGPLAPLLIGILVAVIGAS

SEQ ID NO: 2053 - protein, 239 aa, Rhodopseudomonas palustris CGA009
MSFAGKAALVTGGSKGIGFAIAQALAQAGASVMICARDESEIAQALPALRNGVRGRVHGLACDVRDEAEVRQLVDHTVTAFDGLDILVNNAGVGLLGPVETFPPEHWRLTLDTNLTGAFYCCHYAIPALKARGGGAIVNIGSRSSVNAYGGGAAYCASKFGLLGLSESLLQELHPFGIRVSCVMPGRVATDFAGEPPQDWHLSADDVAQAVIDVLSFAPRALASRIELRPARPPSPAPR

SEQ ID NO: 2054 - protein, 252 aa, Hordeum vulgare subsp. vulgare
MAFRRALLCLLGMLIASSAIAVSDSGIYYQIGLMWPGAYCVQTTGGCCMPKSPIVPAADFYVSGFTVLNATTDAPETSCSSTPFNSDEILGISGLRQYWSNIKCPSNNGQKSWKSAWKTSGVCSGLDDKAYFQAAIALRSKINPLSRLVSKGIKPDFGLYSLEKIKKAIQAGTGVAPLIQCSKGPFDKFQLYQIFICVAEDAKTLIECPKPQKFTCSDEILFHPFKKWMLKQAASSVSFAEAFEMAGAAMGY

SEQ ID NO: 2055 - protein, 162 aa, Burkholderia vietnamiensis G4
MTAIQHFFKTFFLTELLKGLALTGRYTFRRKFTVQFPEEKTPISPRFRGLHALRRYENGEERCIACKLCEAVCPAMAITIESETRADNTRRTTRYDIDLTKCIFCGFCEESCPVDSIVETQILEYHGEKRGDLYFTKEMLLAVGDRYEKDIAAAKAADAPYR

SEQ ID NO: 2056 - protein, 549 aa, Salmonella enterica subsp. enterica serovar Typhi Ty2
MLNQKLNPTPSEDLTIDVDLFYETDPCELKLDEMIEAEPEPEMIEGLPASDALTPADRYLELFEHVQSTKLFPDSKTFPDCAPKMDPLDILIRYRKVRRHRDFDLRRFVENHFWLPETLSSEYVSNPENSLKEHIDQLWPILTREPQDHIPWSSLLALPQSYIVPGGRFSETYYWDSYFTMLGLAESGREDLLKCMADNFAWMIENYGHIPNGNRTYYLSRSQPPVFALMVELFEEDGVRGARRYLDHLKMEYAFWMDGAESLALNQAYRHVVRMPDGSLLNRYWDDRDTPRDESWLEDVETAKHSGRPPNEVYRDLRAGAASGWDYSSRWLRDAGRLASIRTTQFIPIDLNAFLYKLESAIANISALKGERDTEALFRQKASDRRAAVNHYLWDDENGCYRDYDWRREEMALFSAASIVPLYVGMANHEQADRLANVVRSRLLTPGGIMATEYETGEQWDKPNGWAPLQWMAIQGFKRYGDDMLGDEIAHNWLKTVNHFYQEHHKLIEKYHISGGTPREGGGGEYPLQDGFGWTNGVVRRLIGLYGEP

SEQ ID NO: 2057 - protein, 358 aa, GIBBERELLA ZEAE PH-1
MEFQKPSLPPKAPRTNALKASNVANTHDLDFYVHPHLVPDQDPCKGRLLRATGPIREGTILLVDTAYAIVPSVTSDAEPLICSNLSCSRRVPQNGRAVRCENACFKDVVWCNIACRASDKLRHDYECAWLKKNADSMRRKESEYNFATLWHVVRLLATWNAELHSGNAVAQHRYPWEAHFLRGWKAVDMCCAYLDSWPEEQLTHWKRLVNEYLSDTSVLPCMLTADDMLLLLCKEETNTFGLYPKATGTQFVNDNATSRGESYGFALYPRAAQFNHSCLPNVSHKPDGQARMVYTAARDISKGEECMITYFDLATRKDVSSRQKYAQTQFQFKCTCNRCLEEEADENMDIMDSLPFGF

SEQ ID NO: 2058 - protein, 223 aa, Bifidobacterium longum NCC2705
MLLKAVFWDLDGTLIDSEPLWHDGEIEIAHNNGGEWNEDLGWECSGTPVPHVAEVMIAHGCTLSVPEIDKQLKDYVFKAEVERLPWIPGVQDVLHSLKEADIPSMLVTTSPRRMAENIMKQADGLLAGYVCGDDPYEHKPSPAPYLAAAERLGIAPEDMVKCVVMEDSSSGLRSGAASGATLIAQTGWIRTDTSGLGQFASIDSYEGIDAAALDAFVRQRLGE

SEQ ID NO: 2059 - protein, 362 aa, Xanthomonas campestris pv. campestris str. ATCC 33913
MSVAAQFEIEYLQYMDADGQLVRDDLPADAANPQQLLALFKRMLFVRTFDSKSIALQRTGKLGTYAASLGHEATHVGIGASMRSGDVFAPSYREYGTMFERGVRPRDVLLYWGGDERGSDYPRDADAAIDFPICVPISTQCLHAAGAALSFKLQGKAQVAVACCGDGGSSKTDFYAALNSAGAYTLPLILCVINNGWAISVPRSAQTGAQTLAQKGLAGGLHCLQVDGNDLIAVLEAMRQARARALAGDGGTVIEFLTYRLTDHTTADDARRYRGEDEVKQAWTREPMLRLRRYLTAQGLWDEAQEEAWKAECGARIDEEVNAYLNTPVQPVEAMFDYLYGDPPAELLAQRAEVIALEARHG

SEQ ID NO: 2060 - protein, 677 aa, Arabidopsis thaliana
MIPLSFAALGDIVDKKLDEDYVKEEVEMMIQVSLLSTQAAPGERPTMSEVEIFRNSCLCYINWFCNIISIIYSNSLLLRIDSGSSSISVVFLVFTLSRMEQRRMLTAARPRLSSTIRTITSHVAFSASRLLKPYVAYRLGLEDANQRKTENESTGGDKEIANSLLHCLKFHYLLLHFPSFSLQIHNRSTSLSLSRFEKMAKLVMLLVLCILPAIAMAARRGNIGKNTMVVQGSTYCDICKFGFETPESSYFIPGATVKLSCKDRKTMEEVYTDKAVSDKEGKYKFIVHDDHRDQMCDVLLVKSSDKTCSKISVGREKSRVILNHYSGIASQIRHANNMGFEKEVRMATSTTMSHQAIGSVVSQRPFKASQFLKEPLNNVPMKFRQKRFKIEATASQISVVDNTFLSPSPSKNKPHESKKKSNEAALILIRHGESLWNEKNLFTGCVDVPLTQKGVGEAIEAGKKISNIPVDLIFTSSLIRAQMTAMLAMTQHRRKKVPIILHNESVKAKTWSHVFSEETRKQSIPVIAAWQLNERMYGELQGLNKKETAERYGTQQVHEWRRSYEIPPPKGESLEMCAERAVAYFEDNIKPELASGNNVMIAAHGNSLRSIIMYLDDLTSQEVTTLDLSTGVPLLYIFKEGKFMKRGSPVGSTEAGVYAYTKRLAQYREKLDAAATI

SEQ ID NO: 2061 - protein, 392 aa, Heterocapsa triquetra
MAKALLIPATFGCAAAFVAPGQSLRGVPAAGVQEASQAPTAAPAQSSSVLSTTATLAGAAIAVGGVVRRRGGRAAAKATAMRATGIAINGFGRIGRQVARIAMKDPEVELKLINASYDAEYLAYQMKYDSIHGRYNGTIEVDGDSLVIDGQKVALSHTRDPAEIPFKKHGAEYVCESTGVFLTTEKVQPHLKAGAKKVVFSAPAKDDSHTVVMGVNQETYKSSMECVSCASCTTNGLAPLVKCINDAFGIRRGLMTTIHAMTASQPTVDGASKKDWRGGRAASGNIIPSSTGAAKAVAKVIPEVAGKLTGMAFRVPTIDVSVVDLTCELEKATTYEEICAEVKKRAEGDMKGFLGYCDEDLVSTDFETCTISSTFDSKAGIMLDPTFVKLVA

SEQ ID NO: 2062 - protein, 450 aa, Salmonella enterica subsp. enterica serovar Typhi Ty2
MTKHYDYIAIGGGSGGIASINRAAMYGQKCALIEAKELGGTCVNVGCVPKKVMWHAAQIREAIHLYGPDYGFDTTINQFDWSKLIASRTAYIDRIHTSYDNVLGKNNVDVIKGFARFVDAKTIEVNGETITADHILIATGGRPSHPSIPGVEYGIDSDGFFALSALPERVAVVGAGYIAVELAGVINALGAKTHLFVRKHAPLRSFDPMISETLVEVMNAEGPQLHTHAVPKAVVKNADGSLTLELEDGRSETVDCLIWAIGREPSTDNINLAAAGVKTNEKGYIIVDKWQNTNVEGIYAVGDNTGAIELTPVAVAAGRRLSERLFNNKPDEHLDYSNIPTVVFSHPPIGTVGLSEPQAREQYGDEQVKVYKSSFTAMYTAVTTHRQPCRMKLVCVGPEEKIVGIHGIGFGMDEMLQGFAVALKMGATKKDFDNTVAIHPTASEEFVTMR

SEQ ID NO: 2063 - protein, 274 aa, Photorhabdus luminescens subsp. laumondii TTO1
MTMQTSSSSAGTGFYERAFGSFSAEAVSEVRKETYGEDLGQNNWSSADEFRKFSQWLQLSDSSHVLDVCSGSGGPALFLARTSGCSVTGVDIHPHGLLTARQLAADFGLEDRSNFVDSDVRQPLPFPDGTFDALWCIDSVIHIPDRLALLREWCRLLKPGGRFLYTDPTLVTGMLSKDEIMIRGMPGYFLYSPLGLNERLISEAGLCLERQVDLTQSVVELSERWRAGREKRREQFIAIEGEEAFERMQNFLSTTQLVSIERRLSRVAFIGYRP

SEQ ID NO: 2064 - protein, 450 aa, Bifidobacterium longum NCC2705
MSIRKELTAQNVLLGFQHVLVSNVWLDPVFVAGAIGLPIALSSNMINAIFIVSGLVTLVQATRLVRLPVVQGPSAAFDALMIAAGTAGMLGAASSSILIASLVFLLLCLTGVIERMRFLFSPMISGVVIFMVGVSLSGFTLSEFLGGAPGDKTFADPHILTVSILTTAIVLVLSLLGKGLLKSFSFLIALVVGTVVAAAFGMVDFSPVASKGWLGLPTFLPYGPFTFDWKIFIPFFIAYMVAVMEALGVYQAASEIQGTSLERKQVRYGLAGEAAGSAISSLIGGFTTTAYPQNVGLLNLTGEGKLRTRTPVIIAAVLLLILGFVPKAGALLSVIPSAVVGGIFLPAAASLIVTGLRALRKVADDERRQTVIGMSLLLGIALPKALSGLTGGASVFFGNNIMVGVFSAIILNALFVALPDLVAKHRAPASVDVPAADPADGTGAAAYDER

SEQ ID NO: 2065 - protein, 484 aa, Photorhabdus luminescens subsp. laumondii TTO1
MIKNNKTQQNLSAEKFADTQTLHRGLSARHIQLISIGGAIGTGLFMGSGKTIAVSGTSIIITYAIVGFFVYMVMRAMGELLLTKLNYRSFADFVSDYLGTKASFFLGWTYWMSWIVSCIADVVVCGGYIQYWFPGVSLWVPAFITLGLLGTCNLLSVRLFGEAEFWFAMIKVIAILALIIIGVGMVMVGWQSPDGTIASVNNLTDPSVFLPNGIFGFFAGFQIAIFSFTGVELVGTMTAETKDPEKILPKAINYIPMRIMIFYIFSMLSIIAVTSWGRISAETSPFVTLFALAGLPAAAAVVNFVALTSAMSSANSGLYACTRMLYGLSTEKNAHRKFKILSRNTAIPVHSLIFSCFCMVVGTSLLFIVPNVMQLFTIVSTVASVMVIYSWCVILIAYLVYRKNYPDVHKRSIFKMPLGVLMTWLTLIFFIFTIVVMVFDPDTLIALCGTPLWFIMLSILWRVKKKNEAQKEQRYQIAKESFRS

SEQ ID NO: 2066 - protein, 334 aa, Leuconostoc mesenteroides subsp. mesenteroides ATCC 8293
MAVLVLGGAGYIGSHMVKRLVEAGRDVVVVDALFTGHRAAVNPAATFYQVDIRDKAELSAVFDKENIEQVVHFAAFSIVPESVANPLKYFDNNTSGMITLLEVMKAHDVKQIVFSSTAATYGNPVHIPIKETDPQNPINPYGESKLMMEKIMNWSDQADGVKWVALRYFNVAGAAEDGTIGEDHNPETHLVPIILQAGLGQRDYIEMFGDDYNTPDGFNVRDYVHVLDLADAHILALQYLADGHESNQFNLGSATGFSVKEMVEAAREATGVDIPAKIGPRRAGDPDILIANSDKAREVLGWAPKYDNVQDIIKTAWQWHQSHPKGYDERHEDQ

SEQ ID NO: 2067 - protein, 503 aa, Listeria monocytogenes str. 4b H7858
MFYEIYMKSFQDSNGDGLGDFKGLTSRLDYLVDLGIDGIWLTPFYPSPQVDNGYDVSDYCDINPDYGDMTDFRAFMKAADARGIKVIIDLVLNHSSTEHAWFKESRSSKTNPKRDYYIWREKPNNWESFFGGSAWEMDELTGEYYYHSFAKEQADLNWANEAVRAEMEQVLAFWLNEGVAGFRLDVINNLTLVLEFTDNPVTSGEMEHVYDRNQSGLEQALEDIASFCRKERDVFLVGEISSDQLAEIARYSSKKMLDVTFNFNFGSVDQLDAKSVFTTLNEMETALNEGQWPTLFFGSHDMSRFRSRLASGDIVKTQLLAFLMLTAKGVPFIYYGEEVGMPDLTFSSVKEMRDIQGTAAYYQALQTGSDEKQALEIAIEKTRDKARGPMIFPDGKPFTLGEPWIKMATLPEKEARTMWRFYQGLLAFRKENDFKEMEYTFLKLDGEVLSYQRGEFIFLLHFGEEEVTYPLQGNYQLVFGEAVMVGNGIRMGAHTGIALRVEE

SEQ ID NO: 2068 - protein, 433 aa, Solanum tuberosum
MGSEKMMKINIKESTLVKPSKPTPTKRIWSSNLDLIVGRIHLLTVYFYKPNGSSSFFDNKVMKEALSNVLVSFYPMAGRLARDEQGRIEVNCNGEGVLFVEAESDSCIDDFGDFTPCLELKKLIPSVETSGDISTFPLAIFQVTRFKCGGIALGGGVFHTLSDGLSSLHFINTWSDIARGLSVAVPPFIDRTLLHAREPPTSSFEHVEYHPPPTLISSKKGESTGPKSSTTAMLKFSSEQVGLLKSKSENEGSTYEILAAHIWRCTSKARGLADDQLTKLHVATDGRSRLCPPLPPGYLGNVVFTATPIAKSCELQSEPLRNSVKRIPNELIKMDDNYLRSALDYLELQPDLSTLIRGPTYFTSPNLNINSWTRLPVHECDFGWGRPIHMGPACILYEGTIYIIPSPNTKDRNLRLAVCLDPDHMPLFEKYLC

SEQ ID NO: 2069 - protein, 242 aa, Cyanidium caldarium
MFIAYLTAGAPDLNTTKQALLNLANDGADVIEIGVPYSDPLADGMILQKASQQALKNGFRLEQLWHLLAEIELPVPVVILAYYNQIFHYGVEKWVTTLVNLKVKALIVPDLPYEEAAILRAACARHHLHMIWLISPTLPKVRAKQLALACDDWIYLVSRTGVTGVDAHFDNQIPNMIAELKQVTTTPIALGFGIHQKQQLQLVKSWGADGVIIGTACMQILLEKGVDQLTEWISAMKKSSYP

SEQ ID NO: 2070 - protein, 413 aa, Rubrobacter xylanophilus DSM 9941
MEDGRPAAYITGIGVVSPVGVGRKRFWEALLACESGMGPITLFDPEGFEVRIAAECNDFDPKEFMDRKMVPRTDRFGQMALASAKLALEDAGAWELLQERPERVGLILGSGLGGATSLEETQRVMDGRGPTRVGPFAVTKIMPNSAAAHIGIQLGVQGPSASPALACACGTDAMGLGYDLIRRGDADAVICGASEAVITPVIVAGFAAMRAMSRRNDDPEGACRPYDADHSGFVIGEGAAVLLLESAESVRRRGAEPYAKITGVGRTTDAYNMTDPDPKGRGILRAMQLALKEAGVPGERVGYINPHGTGTAAGDAPESRAMETINPRVKVSATKSTLGHSMGATGAIETAICALAVRERTVPPMRNLERLAEDCARLDYVVNEPREAPDLEAAVCANLGVGGHNAAVVLERA

SEQ ID NO: 2071 - protein, 343 aa, Arabidopsis thaliana
MEAEKKMVLPRIKFTEHKTNTTTIVSELTNTHQTRILRISVTDPDATDSSSDDEEEEHQRFVSKRRRVKKFVNEVYLDSGAVVTGSCGQMESKKRQKRAVKSESTVSPVVSATTTTTGEKKFRGVRQRPWGKWAAEIRDPLKRVRLWLGTYNTAEEAAMVYDNAAIQLRGPDALTNFSVTPTTATEKKAPPPSPVKKKKKKNNKSKKSVTASSSISRSSSNDCLCSPVSVLRSPFAVDEFSGISSSPVAAVVVKEEPSMTTVSETFSDFSAPLFSDDDVFDFRSSVVPDYLGGDLFGEDLFTADMCTDMNFGFDFGSGLSSWHMEDHFQDIGDLFGSDPLLAV

SEQ ID NO: 2072 - protein, 239 aa, Haloarcula marismortui ATCC 43049
MGPNMDGVVLAAGEGTRMRPLTADKPKGLVEVAGKPLLTHCFETLRSVGGDRLVVVIGYRADDILSHYGDQYRGTPIAYVRQDEQLGLAHALEQARSAVDGTFVVLNGDNVCRANLSDAIARHRETDASATLLVESVSRAEARSTGVVTTDSEGRVTGLVEKPSDPPSTLVTRGFFVFEPAIGHACVLTRPSERGEYELPDAIDLLLSAGHRVEAVELDGWCHNVNEPGDIDAVEDRLA

SEQ ID NO: 2073 - protein, 168 aa, Zea mays
MAASSTATSVHDFIVKDASGKDVDLSAYKGKVLLIVNVASQCGLTNSNYTELAQLYEKYKDQGFEILAFPCNQFGGQEPGTNEEIVQFACTRFKAEYPIFDKVDVNGNNAAPIYKFLKSSKGGLFGDSIKWNFSKFLVDKEGRVVDRYAPTTSPLSIEKDIKKLLGSS

SEQ ID NO: 2074 - protein, 766 aa, Pseudomonas syringae pv. tomato str. DC3000
MALAHNLGFPRIGADRELKKALEAYWKGDLDQTGLRAVGQQLRAAHWQVQKEAGIELLPVGDFAWYDQVLTHSLTLGVIPERFSPAQDAAGLPTLDTLFAMARGASNCCGASHGKTQHAQELTKWFDTNYHYLVPEFTQDQRFQLSWEQLFEEVDEAHALGHKVKPVLIGPLTYLWLGKAKGDSFDRLELLDRLLPVYGEILGRLAAQGVEWVQFDEPVLTLDLPQDWKTAFERAYHSLQYSPLKKLVATYFGGLEDNLGLAATLPVDGLHIDLVRAPEQLPAVLDRLPSYKVLSLGVVNGRNVWRCDLDNALAALQQAHARFGDNLWVAGSCSLLHSPVDLNREDRLDPELKGWLAFAVQKSREIAILSHALNDPEATEVVEALAQSCEIQASRAQSSRVHNPQVQARLASVTAADHQRRSAFAERITVQRERLKLPAFPTTTIGSFPQTSAIRLARQAHKQGKLSLNDYTDAMRHEIRHAVQVQENLGLDVLVHGEAERNDMVEYFAEQLDGYLFTRFGWVQSYGSRCVKPAIIFGDLSRPQPMTVDWIRYAQSLTDKTMKGMLTGPVTMLMWSFSREDVSRQVQAQQLALAIRDEVLDLERAGIKIVQIDEAAFREGLPLRKAQWQQYLDWAVAAFRLCASGVRDETQIHTHMCYSEFNDVIKSIAAMDADVITIETSRSDMELLDAFEAFDYPNDIGPGVYDIHSPRVPETAEMVSLIAKAARRIPAERLWVNPDCGLKTRGWPETEAALINMVAAARQLRL

SEQ ID NO: 2075 - protein, 444 aa, Vigna radiata
MGSHQHEPWLLENGNPKVLTREMRHGRTAHSKSSNSLRTKSDRTLVSKVPCATIRNVLFNLQEVILGTKLSILIPAIPVAIVAEYCGFGRPWVFVLSLLGLTPLAERVSFITEQVAFYTGPTVGGLLNATCGNVTELIIAIFALSSNKIAVVKYSLLGSILSNLLLVLGTSLLCGGIANVGLEQKYDRRQGDVNSLMLLLALLCYLLPMLFKYSAASAALTVDPSLHLSRASSIVMLIAYVVYIIFQLWTHRQLFEAEDEDEDDNNGSDEQAVIGLWSGIAWLIGMTVFIALLSEYVVDTIEDASDSWGLSVSFLSIILLPIVGNAAEHAGAVIFAFKNKLDISLGVALGSATQIAMFVVPLCVIVAWTMGVKMDLNFNILETGSVALAIIVTSFTLQDGTSHYMKGLVLLLCYIVIGACFFVQRTPFNQADVTNVIPNGVLSA

SEQ ID NO: 2076 - protein, 548 aa, Cryptococcus neoformans var. neoformans JEC21
MSVDQINPGQAVYAQDENGRPFIIVREQGRKVRTHGLEAIRSHILAARSVTNIIKTSLGPRGLDKILISPDGEITVTNDGATILGQMEVEHQIAKLLVEVSKSQDDEIGDGTTGVVVLAGALLSSALSLLDRGIHPIRIADGYEKACEIAVAELDRVADTIEFSKDDVSNLMKTAKTSLGSKIVSIAHDKFASIAVEAVLSVADLERRDVDFELIKVDGKVGGSLEDTSLVKGVVIDKDMSHPQMPSVVRDAKIAILTCPFEPPRPKTKHKLDIESVEEYKKLREYEKEKFLDMIKKVKDTGANLVICQWGFDDEANHLLMQNELPAVRWVGGPEIELIAIATNGRIVPRFEDLTADKLGHAGVVRELTFGTTRDKMLVIEECANSRAVTVFVRGSNKMIIDEAKRALHDAICVARNLVRDNRVVYGGGAAEICASVAVSKRADEIPTIEQYAMRAFANALDAIPLALAENSGLSPIDTLADVKSRQVTEGNPRLGIDCLGRAENDMKKQHVYDPLISKRQQFLLATQVVRMILRVDDVIDASAFGDE

SEQ ID NO: 2077 - protein, 121 aa, Salmonella enterica
NPAVTIALWLFACFPKQKVLPYIIAQFAGAFGGALLAYVLYSSLFTEFETAHHMVRGSVESLQLASIFSTYPAAALNVWQAALVEVVITSILMGMIMALTDDGNGIPKGPLAPLLIGILVA

SEQ ID NO: 2078 - protein, 464 aa, Cryptococcus neoformans var. neoformans JEC21
MSFIASRNALRSQLRPSLARSFATTPAAYAQSLKDRMAELIPQEIENVKATRAAHGAKSLGDVTVDMAYGGMRGIKGLIWEGSVLDPNEGIRFRGLTIPECQQKLPTAPGGSEPLPEALFWLLLTGEVPTDEQVKGLSQEWAARAAIPKFVEELIDRCPNTLHPMTQFAIAVNALNHDSAFAKAYSNGVHKKEYWKTTFDDSMDLIAKLPNIAGRIFRNVFGDGKLPPIDPSKDYSANLATLLGFGDNADFVELMRLYITIHSDHEGGNVSAHTGHLVGSALSDPFLAFGASLNGLAGPLHGLANQEVLRWVQKMRSQIGEDASDEKVAEYVWSTLKSGQVVPGYGHAVLRKTDPRYTAQREFALKHLPEDPLFKLVGQIYKIVPNILLEAGKAKNPWPNVDAHSGVLLTYYGLHQQDFYTVLFGVSRAFGVVSQLIWDRALGMPLERPKSYSTEAIKKMFEGK

SEQ ID NO: 2079 - protein, 589 aa, Zea mays
  misc_feature (559)..(559): Xaa can be any naturally occurring amino acid
  misc_feature (572)..(572): Xaa can be any naturally occurring amino acid
  unsure (1)..(589): unsure at all Xaa locations
MCGILAVLGCSDCSQARRARILACSRRLKHRGPDWSGLYQHEGNFLAQQRLAIVSPLSGDQPLFNEDRTVVVVANGEIYNHKNVRKQFTGAHSFSTGSDCEVIIPLYEKYGENFVDMLDGVFAFVLYDTRDRTYVAARDAIGVNPLYIGWGSDGSVWMSSEMKALNEDCVRFEIFPPGHLYSSAGGGFRRWYTPHWFQEQVPRTPYQSLVLREAFEKAVIKRLMTDVPFGVLLSGGLDSSLVASVTKRHLVETDAAEKFGTELHSFVVGLEGSPDLKAAREVADYLGTTHHEFHFTVQDGIDAIEEVIYHDETYDVTTIRASTPMFLMARKIKSLGVKMVLSGEGSDELLGGYLYFHFAPNREELHRETCRKVKALHQYDCLRANKATSAWGLEVRVPFLDKEFVDVAMGMDPEWKMYDKNLGRIEKWVLRKAFDDEEHPYLPEHILYRQKEQFSDGVGYNWIDGLKSFTEQQVTDEMMNSAAQMFPYNTPVNKEAYYYRMIFERLFPQDSARETVPWGPSIACSTPAAIEWVEQWKASNDPSGRFISSHDSAATDRTXATSWRWPTAAGTXAANGTVNGNDVAVAIAV

SEQ ID NO: 2080 - protein, 684 aa, Arabidopsis thaliana
MEVGSATKKLQCQRIGCNAMFTDDDNPQGKHTTEKPVLAKSVPKHPVAAPTSSPDANAATKDSCSRCRQGFFCSDHGSQPKEQIKQTLNTPGQAEEEKIEPLAPPVQKAVIDINQPQVCKNKGCGQTFKERDNHETACSHHPGPAVFHDRLRGWKCCDVHVKEFDEFMEIPPCTKGWHSSSPDPAATTISAAEHFPMRLIVPLRGVIQGRGGLFVGSLIPCCLFYFLQLYLKRRRPPPSDPTDLPRTFSRTNLFSRGNSIGRVRVSSRAVPVAKPSDSPYYIGLERVKTDPYDRITNTDGIIQLGLAESTRWMSENLMESMMQSDDGEFDISSIAMYKPFEGLLELRVAFADFMSRIMGGNVSFDPSNMVITAGGTPAIEVLAFCLADHGNAFLIPTPYYPGFDRDIKFRTGVELIPVHCRSSDNFTVTVSALEQALNQARKRGSKVSGILFSNPSNPVGNILSRETLCDILRFAQEKNIHVISDEIFAGSVYGDKEFVSMAEIAGSGEFDKTRVHIIYGLSKDLSIPGFRAGVIYSFHEDVVNAAKKLMRFSSVPVLVQRILISLLSDVRFIEGYMAAHRQRIRDKHIRFVEGLKQLGIPCAESGGGLYCWVDMSSLLTSYSEKGELELFEKLLTVAKINATPGTACYCIEPGWFRCCFTALADEDIPVIMERIRQLAESFRS

SEQ ID NO: 2081 - protein, 652 aa, Burkholderia sp. 383
MSLLNFPSDRPIDLACLGRVAVDLYAQQYGSRLEDARSFQMYLGGSSGNVAFGVARLGLKTAMISRVGDEQMGRFLRETLEREGCDTSQLQTDRERLTALVLLGLKDRDTFPLLFVRENCADMAVRADEISEDFIAGCRALAITGTHLSTPGTREASLTALGYARRHGVVRILDIDYRPVLWGLTSRGAGENRYVPDAQVTRQLQQVLGEFDLLVGTEEEFLIAGGVPHDVIGSLQAVRKITNATLVVKRGALGCCVIEGDIPARIDDAPTFLGERVEVLNVLGAGDAFLSGLLSGLLRGRDWAESTRIANACGAIVVSRHACSAAMPTPAELAHWFDGSRNPVVDADHTLAHLHRVTVPRREWDDLCVMAFDHRSQFYELAVQAGADEARIKTLKRLLVRAVEQVERDRHIEGHVGVLIDGGGYGSDALASATGRGWWVGRPVELPGSRPLRFDETRSVGSSLTHWPTEQVVKCLVHYHPDDQVDLRVEQEQRVLELWEATRASGNELLLEMIPPRAVTPAGTEDDAVLRTIARFYNLGVMPEWWKLTPLSADGWTRLAALIAERDPHCRGAVILGLNQPLQYLVDSFRSATNPIVKGFMVGRTLWADASLNWFAGRIDDQALIDEVAGNFAQLVDAWLGRRAAAARAAAA

SEQ ID NO: 2082 - protein, 158 aa, Staphylococcus aureus subsp. aureus MRSA252
MAVVYVAGGCLWGVEAFFTTIPGIIHTEAGRANGRSSKLDSPYDGYAECVKLHFDDRMLTITDIMNYLFEIIDPYSVNRQGNDIGEKYRTGLYSCVDDHLIEARQFIERRKDRDKIAVEVLPLSNYIKSAEEHQQHLEKYPEDMHMCHISIDLLNKYK

SEQ ID NO: 2083 - protein, 566 aa, Arabidopsis thaliana
  misc_feature (378)..(378): Xaa can be any naturally occurring amino acid
  unsure (1)..(566): unsure at all Xaa locations
MATEPTRSWFQIRQQKPDKSSPTKKGQEGNVKNLGRPPMNDAPSNATKQKVAAAKQYIENHYKIQKKSLQERKERRSILEQNLADADVTVEDKMDILKNFEKKEMEYMRLQRQKMGVDDFELLSIIGRGAFGEVRICKEKSTGSVYAMKKLKKSEMLRRGQVEHVKAERNVLAEVDSPFIVKLCYSFQDDEHLYLIMEYLPGGDMMTLLMRKDTLREDETRFYVAQTILAIESIHKHNYVHRDIKPDNLLITRNGHIKLSDFGLSKSLESKNFPDFKAELVDRSTKPAAEHDRLSKPPSAPRRTQQEQLLHWQQNRRTLAFSTVGTPDYIAPEVLLKKGYGMECDWWSLGAIMFEMLVGFPPFYSEEPLATCRKFISXIVNWKTCLKFPDEAKLSIEVKDLIRRLLCNVEQRLGTKGVHEIKAHPWFRGVEWERLYESNAPYIPQVKHELDTQNFEKFDEVPSTSQTSSKSSPWRKMISSKDANFLGYTFKNLEIVDEHHIPGMAELKRKSKTANKPSLKTLFETPYPPSENQALKDLLDSPIYSEGSRGSSGSPFSRPNQSQARR

SEQ ID NO: 2084 - protein, 375 aa, Saccharomyces cerevisiae
MGITLYTNIGLVHKRVYKHDRKTDVDRKNHGGTIDISYPTTEVVGHGSFGVVVTTVIIETNQKVAIKKVLQDRRYKNRELETMKMLCHPNTVGLQYYFYEKDEEDEVYLNLVLDYMPQSLYQRLRHFVNLKMQMPRVEIKFYAYQLFKALNYLHNVPRICHRDIKPQNLLVDPTTFSFKICDFGSAKCLKPDQPNVSYICSRYYRAPELMFGATNYSNQVDVWSSACVIAELLLGKPLFSGESGIDQLVEIIKIMGIPTKDEISGMNPNYEDHVFPNIKPITLAEIFKAEDPDTLDLLTKTLKYHPCERLVPLQCLLSSYFDETKRCDTDTYVKAQNLRIFDFDVETELGHVPLVERPAIEERLKHFVSAPSSSL

SEQ ID NO: 2085 - protein, 436 aa, Arabidopsis thaliana
MNSKNRINNVGEGVDIEIPDTAHQISSDSWFQAAFVLTTSINSAYVLGYSGTVMVPLGWIGGVVGLILATAISLYANTLVAKLHEFGGKRHIRYRDLAGFIYGRKAYCLTWVLQYVNLFMINCGFIILAGSALKAVYVLFRDDHAMKLPHFIAIAGLICAVFAIGIPHLSALGIWLAVSTILSLIYIVVAIVLSVKDGVKAPSRDYEIQGSPLSKLFTITGAAATLVFVFNTGMLPEIQATVKQPVVKNMMKALYFQFTVGVLPMFAVVFIGYWAYGSSTSPYLLNNVNGPLWVKALANISAILQSVISLHIFASPTYEYMDTKFGIKGNPLALKNLLFRIMARGGYIAVSTLLSALLPFLGDFMSLTGAVSTFPLTFILANHMYYKAKNNKLNTLQKLCHWLNVVFFSLMSVAAAIAALRLIALDSKNFHVFADL

SEQ ID NO: 2086 - protein, 141 aa, ASPERGILLUS NIDULANS FGSC A4
MARTKQTARKSSLCKSTGGKAPRKQLASKAARKAAPSTGGVKKPHRYKPGTVALREIRRYQKSTELLIRKLPFQRLVREIAQDFKSDLRFQSSAIGALQESVEAYLVSLFEDTNLCAIHAKRVTIQSKDIQLARRLRGERS

SEQ ID NO: 2087 - protein, 604 aa, Bifidobacterium longum NCC2705
MTANNLNDDWWKQAVVYQIYPRSFKDVNGDGLGDIAGVTEKMDYLKNLGVDAIWLSPFYPSDLADGGYDVIDYRNVDPRLGTMDDFDAMAEAAHEAGIKVIVDIVPNHTADKHVFFQEALAAEPGSPARDRYIFRDGRGEHGELPPNDWQSFFGGPAWARVADGQWYLHLFDKAQPDVNWKNPDIHEEFKKTLRFWSDHGTDGFRIDVAHGLAKDLESKPLEELGREYSVVGVLNHDFSHPLFDRREVHDIYREWRKVFNEYNPPRFAVAEAWVVPEHQHLYASMDELGQSFNFDFAQANWYADEFRKAIAAGLKAAAETGGSTTTWVMNNHDVPRSPSRYGLPQVKGAPYHQLPHDWLLRNGTTYPEDRELGTRRARAAALMELGLPGAAYIYQGEELGLFEVADIPWDRLEDPTAFHTAQATMDKGRDGCRVPLPWTASDEPALADFSRPAPADDGTGENHVPLCAAGQFGTGASFGFSPAVRADGVTPAADPHLPQPLWFKDYAVDVEQADPDSMYTLYHAALAIRQESLTATRDTTAEQVDMGADVVAYRRAAVEGRTFTSVTNFGTAPVSLPEGSVVLTSGPLTPDGQLPTDTSAWVIK

SEQ ID NO: 2088 - protein, 109 aa, Oryza sativa
SSTAVAAALEIVDPPGCRNSARGLKEVKGMADRIIGMRKALRENLEGVGSPLSWDHISNQSGMFWFSGMTPEQVDRLTNEYHIYMTRNGRISMGGVAPGNVAYLGNAIH

SEQ ID NO: 2089 - protein, 353 aa, Bifidobacterium longum NCC2705
MPIMAAQIWYENDGDLSVLEGKKVAIIGYGSQGHAHALNLRDSGVDVVVGLRPTSKSVDFAKEQGLEVKSVAEASAEADVIMILAPDQYQRTIWANDIEPNIKPGAAVAFAHGFNIHYGYIKPSEDHPVFMVAPKGPGHIVRREYAAGRGVPVVVAVEQDPRGDGWALTLAYAKALGALRAGAIKTTFKEETETDLFGEQNVLMGGVNKLVEMGFEVLTDAGYQPEIAYFEVCHELKMLVDLMNEGGLNKARWSCSDTAQYGDYVNTVINEDCRKRMEYHLQRIQDGSFAKEFIDDQDAGAPHFKELQEKYSNERIETVGPKLRAMFSWNKDGVKDADEANSFTGKIARAQVQ

SEQ ID NO: 2090 - protein, 350 aa, Bifidobacterium longum NCC2705
MAATIWYEKDADLSVFDGKKVAILGYGSQGHAHALNLRDSGVDVVVGLRPTSKSVEFAKEQGLEVKPVGEAVAEADVVMILLPDQYQAAVYKKDVEPNLKPGAALAFAHGFNIHYGYIKPSEDHPVFMVAPKGPGHIVRREYAAGRGVPVVVAVEQDPDGKTWPLCLAYAKALGALRAGAIKTTFTEETETDLFGEQDVLMGGINHLCDLGFDVLTEAGYQPEIAYFEVFHELKMLVDLANEGGLNKARWSCSDTAQYGDYTSTVITEETKKRMQYQLKRIQDGSFAKEFMDDQAAGAPKFKKLQEEYSHPHLETVGPKLRAMFSWNNAEAKDKDETESFNGKIARTQVQ

SEQ ID NO: 2091 - protein, 324 aa, Solanum tuberosum
MANGEGEVVCVTGGSGFIGSWLVSSLLERGYTVHATVKDLNDEKETKHLLALDGAESRLRLYQIDLLDYDSIVSAITGAVGVFHLASPCTVDEVKDPENDLLSPAIKGTSNVLTASKELGVKRVVVTSSVSSITPNPNWPADRIMNEDCWTDIEYCKQNGVWYPLSKTLAEKDAWKFAEEKDLDIVVVNPGTVMGPIIPPSLNASMQMILRLLQGCTDTYQDFFMGLVHVKDVALAHILVYENKSAKGRHMCVEAITHYGDFAAKVAELYPEYNIPRLPKDTQPGLLRAKDGAKKLMDLGLEFIEMEQIIRDAVESLKIKGYIS

SEQ ID NO: 2092 - protein, 373 aa, Arabidopsis thaliana
MGYLFQETLSSNPKTPIVVDDDNELGLMAVRLANAAAFPMVLKAALELGVFDTLYAAASRTDSFLSPYEIASKLPTTPRNPEAPVLLDRMLRLLASYSMVKCGKALSGKGERVYRAEPICRFFLKDNIQDIGSLASQVIVNFDSVFLNTWAQLKDVVLEGGDAFGRAHGGMKLFDYMGTDERFSKLFNQTGFTIAVVKKALEVYEGFKGVKVLVDVGGGVGNTLGVVTSKYPNIKGINFDLTCALAQAPSYPGVEHVAGDMFVDVPTGDAMILKRILHDWTDEDCVKILKNCWKSLPENGKVVVIELVTPDEAENGDINANIAFDMDMLMFTQCSGGKERSRAEFEALAAASGFTHCKFVCQAYHCWIIEFCK

SEQ ID NO: 2093 - protein, 354 aa, Oryza sativa
MMVYAWGAVGGLLNATCGNATELIIALFALLKGKIEVVKCSLLGSVLSNLLLVLGTSLFCGGVVNLGARQPYDRNQSDVSTALLFLAVLCHSAPLLLRYAVAAGEHSVSATSAAASLDLSRACSFVMLASYVAYLFFQLKTHRQLFEPQEVDGGDAGDDDEEPALGFASALFWLALMTAVISVLSEYVVGTIEPTSQSWGLSVSFISIILLPIVGNAAEHAGAIIFALKNKLDITLGVALGSATQISMFVVPLSVLVAWIMGVQMDLDFKLLETGSLFMAVLVTAFTLQDGTSHYLKGILLLLCYIVIGACFFVARQPAASGTAVSLYVDYHIFVMISSIWCDRVANLSDSWNA

SEQ ID NO: 2094 - protein, 352 aa, Glycine max
MEKKKVAVPLVCHGHSRPVVDLFYSPVTPDGFFLISASKDSSPMLRNGETGDWIGTFEGHKGAVWSCCLDTSALRAATASADFSTKVWDALTGDELHSFEHKHIVRACAFSEDTHLLLTGGVEKILRIYDMNRPDAPPREVDKSPGSVRTVAWLHSDQTILSSCTDMGGVRLWDVRSGKIVQTLETKSSVTSAEVSQDGRYITTADGSTVKFWDANYYGLVKSYDMPCTVESVSLEPKYGNKFVAGGEDMWVRVFDFHTGNEIACNKGHHGPVHCVRFSPGGESYASGSEDGTIRIWQTGPLTLDDSETVSANGSVDKVKETADEVSRKIEGFQIADEGKSKEKDEAVEESS

SEQ ID NO: 2095 - protein, 98 aa, Quercus robur
VNSIISRVKYFPILLYSNLKKMSSFGGNCGCGSDCKCGSGCNCNSMNPGLSEKTSTETIITGVAPAKIYSEGSEMSFGAENGGCKCGSNCTCDPCNCK

SEQ ID NO: 2096 - protein, 695 aa, Haloarcula marismortui ATCC 43049
MHHPGPPRFATVGESVELAPRQPDPGMAAEWRLVERPAASTATLGDGPVCHLEPDVPGVYRAELIVPDGTHEQVIRAFPGVTETARFSVTADDFDGDELTVADRAIVIGTFNDFTMGTHWAERDGDEWVIEADLPPGTHHAIFSFDGSFESTATDEVTVEGPGRPRVELTSQAEDGDFVVSADARAAPSGSEPEVEFYLDGRDALEESAVTIDGDELRVPHEALPEMARVHAVAVAERHSVADTLVVERGGENGETGTGETVSVSRPADPPAWAGDATIYEIFVRSFAGETVDTTFEAIERRVPYIESLGVDVVWLTPVQASPTRHGYHITDFFDTAEDLGTREEFESLVDRLHDAGIRVVFDLVINHSSRDHPAFQLHRAGVPEYADYYERIPVSQDVSDVDWAGTDAPGYYFNWTRIPNLNYDSLAVRRWMLDVVDEWRDVVDGFRCDVAWGVPHGFWKEVRERVKADDPEFLLLDETVPRDAAFAENEFDVHYDTDLFDTLRDIGTGEEPASVLFEALDATAEHGYPDRAGHMRYVDNHDEDRYLDECGAASLQAAVGATFTLPGTPMVYAGQERGVEQQRGTMRWHDGDNALTDFHRRLVALRADHAALRVPGVCPVAHTVETGDADRVVAYERTDGDETLVVVLHFGDGTAKVSLDTIDEETDLLSGNPVGGDGTVEVGDIVVVPATRER

SEQ ID NO: 2097 - protein, 336 aa, Yersinia enterocolitica (type 0:8)
MSILITGGAGYIGSHTVLTLLEQGRNVVVLDNLINSSAESLARVSKICGRKPNFYHGDILDRSCLKLIFSSHKIDSVIHFAGLKSVGESVEKPIEYYQNNVVGSITLLEEMCLANVKKLIFSSSATVYGEPEFVPLTEKARIGGTTNPYGTSKVMVEQILKDFSLAHPDYSITALRYFNPVGAHPSGLIGEDPNGKPNNLLPFITQVAIGKLSKLLVYGNDYDTPDGSGIRDYIHVMDLAEGHLSTLINLTSGFRIYNLGTGVGYSVLHMIKEFERITGKNIPFDIVSRRPGDIAECWASPELAHLELGWYAKRTLVDMLQDAWKWQKMNPNGYNC

SEQ ID NO: 2098 - protein, 165 aa, Salmonella enterica
ASLGLWEICIIWGLGISLAVYLTAGISGGHLNPAVTIALWLFACFPKQKVLPYIIAQFAGAFGGALLAYVLYSSLFTEFETAHHMVRGSVESLQLASIFSTYPAAALNVWQAALVEVVITSILMGMIMALTDDGNGIPKGPLAPLLIGILVAVIGASTGPLTGFE

SEQ ID NO: 2099 - protein, 238 aa, Cryptococcus neoformans var. neoformans JEC21
MAEPTETVNTGEEHDPQFEPVIRLTEQVEAKTFEEDEEPLFKMRAKLFRFHKDTTEWKERGTGDVRLLKHKQSGKVRLVMRRDKTLKVCANHILSPDMKLSPNVGSDRSWVYNVAADYAEGEASAETLAIRFGNSENANLFKQAFEDAQAHNASLSGAAPKEEDESAAVAKPEAAAESAAPEAEAKKEEASTLEESKPEEPATGAEAETKVADAPAATEIKEEGIREADEAAAEKKDE

SEQ ID NO: 2100 - protein, 155 aa, Salmonella enterica
SLGLWEICIIWGLGISLAVYLTAGISGGHLNPAVTIALWLFACFPKQKVLPYIIAQFAGAFGGALLAYVLYSSLFTEFETAHHMVRGSVESLQLASIFSTYPAAALNVWQAALVEVVITSILMGMIMALTDDGNGIPKGPLAPLLIGILVAVIGA

SEQ ID NO: 2101 - protein, 177 aa, Haloarcula marismortui ATCC 43049
MSDKPASMYRDIDKPAYTRREYITGIPGSKIAQHKMGRKQKDADDYPVQISLIVEETVQLRHGSLEASRLSANRHLIKELGEEGDYKMTLRKFPHQVLRENKQATGAGADRVSDGMRAAFGKIVGTAARVQAGEQLFTAYCNVEDAEHVKEAFRRAYNKITPSCRIKVERGEELLIA

SEQ ID NO: 2102 - protein, 416 aa, Haloarcula marismortui ATCC 43049
MSRYIEAGLSDIGTLGEYVAERPNKGFEPARRRAGVSHTTVSGPKLAVAVMAVSAVCCPCGCQCVLVTPLSPRSFTLCAHIIDTMNTLVDGEWRTDAYETTNEDGAFDRQDTTFRDRVEDDPDARFQPEAGRYHLYACRACPWAHRILVARKLLGLEDAITVDYVDPFRGEDGWQFTPEKAGCTPDTVNGSDYLREVYVEADPDATCRVTVPVLWDKQEETIVNNESEEILRMLDTEFDDVSDNDVDLYPEGYQDEVDRIIDDIYEPINNGVYRSGFADSQSAYDEAVEELFDALDHWDTVLEDQRFLAGDRLTEADICLFTTLVRFDEVYHTHFMCNHKLIREYDNLWPYLRDLYQLPGVAETVNMDHITEHYYTTHPDVSPKRIVPMGPDPDFEAVHDRDELPGDLPETLFPTA

SEQ ID NO: 2103 - protein, 411 aa, Cryptococcus neoformans var. neoformans JEC21
MRLSISISAALLAFTSLVSASNVVDLDSTNFDQIVGQDKGALVEFFAPWCGHCKNLAPTYERLADAFPTDKVVIAKTDADGVGRELGSRFGVSGFPTLKWFPAGSLEPIPYSGARDLETLAAFVTKQSGVKSNIKPPPPPAYTELDASNFDEIALNESKNVLVAFTAPWCGHCKNMKPAYEKVAKVFSSEPDVVIALMDADEAENKPVAQRYGVSSFPTIKFFPKGSKEPVAYDSGRTAEQFVNWINEKSGTHRSVSGLLSETAGRVLTLDTLASEFFSANVPERSEIVKKAQEAVTTVDEKSKATANYYIKAMERITAKGEEWLTKEQARLANLLASPSLAPTKLDELKVKINILSAFAAQKAGEAYDSAEEVLEDAWDSAKQIPIQAKDGLDQFADAVEEKAKRVRSDL

SEQ ID NO: 2104 - protein, 4682 aa, Nostoc punctiforme PCC 73102
MTSLNCATFVDLLSYRSLSQPNQIAYTFLVDGDTEEVKLTYQELDQKARAIAVELQSLKAAPGERALLLYPSGLEFIVAFFGCLYAGVLAVPVYPPRRNQRMTRLQAIVKDSEARFALTTASVLTNIQQGFAQEPELTALHCIAIDKIVSDASNWQKPPLEKSTLAFLQYTSGSTGTPKGVIVTHGNLLQNSEYIKSAFELTPNSVSVTWLPSFHDMGLIDGVLQPLYTGFPSVMMSPASFVQQPIRWLKAISDYKATHCGGPNFGYELCVSKITPEQRANLDLSSWCSAYSGAEPVRRETLEKFAATFKSSGFQAKFFYPCYGMAEATLMISGGGVADEPVYCVVDPKALEKNQIIQVSEDTPKVKHLVGCGYAWLDTKIAIANPQSLTLCAPEQVGEIWVSGSSIAKGYWNRPEQTKETFHAYLADTAEGPFLRTGDLGFLKDGQLFITGRLKDVVIIRGCNHYPQDIELTVEQSHQALKAGSGAAFSVDIDGEEQLVIVQEVERTYLRHLNLDEVVEAIKTSVSQIHELQVYAVLLLKTGSIPKTSSGKIQRHACRAGFLAGTLNALNTVDVVIEPQLQNPKESKKMQFSLLYFSSNEAEFSDEKYKLFLEGAKFADRNGFTAVWTPERHFHAFGGLYPNPSVLSAALTSLTKRIRLRAGSVVLPLHNPIRVVEEWSVVDNLSHGRVDLAFARGWNPNDFVLSPDTHADSKEVMFSGIQTVQKLWRGENISLPNGVGKQTDIKVYPLPMQRELSIWITCTGGKERFIEAGASGFNILTALLFQPVEELAQKIALYRETRKQHGYDPDSGQVTLMLHTFIGEDIKVVRNQVREPFIEYMKSSVNLWRHGSDDLDKLTETEKANLLAYAFERYFHTSALFGTPSTCLEMVQRLHEIGVDEIACLIDFGIDGNTVLASLDSLNNLRQLVNGVDEPSIKETIESYNQPKTDVLKQTNNAIINNSLPAFSIETSLKIPSRQNEEVQVPQGSLLQWIGEVIVQQIANSLGKKSSQISLDKSFYSFGIDSLKAVEIMETLGEKFGFSISPTLLFEYPTPTEFALYLIQEQKTQLQKYLLVNWEPAKLWAVNLERQKAVVLSNKLFNPASTKVVEPINDRIRAEDIAVIGMSGRFPQSPDLQSFWELLSQGKNAIAQVPSLRWNLSDWYDKNPGAANKTYSCWGGFIDHIDQFDPLFFQISPREAELMDPQQRLFLEVAWEALENAGYSPESFAQSQVGVFVGCSNNGYYQRIAPALNTSDYSAGIGNQNAIIANRVSFLLNLRGPSVLIDTMCSSSLVALHMACRSLQQGECTTALAGGVNLLLSPEYYVGMSRMKMHSPNGRCATFDSQADGIVLGEGAGALLLKPLSQALKDGDRIYAVIKGSAVNHDGRTNGITAPNSRSHAEVICQALDAAGISADTISYVEAHGTGTSLGDPIEVEGLTKAFRKYTERKQFCKIGSVKTNIGHLECAAGMAQLLKVILAIQHRQIPANLHFQQPNPLIPFAETPFQVNTKLCSWESSGLRRAGISSFGIGGTNAHIVIEEAPPLEPVIPEIERPKHLLTFSAKTENALVQLVSRYETYLAANLDLPLGDICFTANTGRSHFQHRLSAIATSTSDLHQRLLNFISQQEVTGIKIGRIHENTPPKIAFLFTGQCSQYVGMGSQLYETQPTFRKILDYCNEILRPYLKEDLLKVIYPQPGETSLIDQTAYAQPALFALEYALVQLWKSWGVEPSVVMGHSVGEYVAACVAGVFSLEDGLKLIAERSRLMQSLPQTGAMVAVFACEADIWAITEIDLAEVAFAPRLEEKPSVGIAAYNGPQNTVISGEREAIERICANLKAAGIQTKKLVTSYGFHSPLMEPILAEFRQVAATVTYNAPQIDIISNVTGQLIGEAINPEYWCDHLISSVQFAKSIQTLHTADYEIFVEIGPKPILLGMGSKCLLGKGLWLASLRQGREDWQQILESLGELYVHGVQVEWSGFDRDYFRRRVQLPTYPFQRKRYWIDAPVSTSDNKFDTQKSLPSQLSTSQFDTEIAPPLKALQPKVDTTPQIKRLDLIVSKLHSYIVNLLKAEPSEVDFYAPFLEIGADSLMLIDAINYIDITYRIKITISQLFEQLTTIYAVASYIDQNLLPEPIFVDVQLPEPVYQTQPPTPQSPPLAFVESNGNGHSHTQQPTLKSTVQQTAGETAVERIMLQQLQVMSQVMSQQLDVLRATGNVLSSNGNSHLASSPPTPQNQVVKETGIAINQVQSNQTVTKNFSPIEPPPPREINQPQQQHLKTLISNYTQKTQSSKQYAQTYRSFLADSRAVAGFRPSTKEMVYPIIGERAKGARCWDIDGNEYVDITMGFGVLLFGHAAPFITAAVDEHLQQGIQIGPQANYAGEVAALISELTGMERVTFCNSGTEAVMTALRLARTKTGRSKIAIFAGSYHGHFDGILAKESLDGLSTVPIAPGITANAVEDVLVLDYGEPKSLEILQAHAAELAAVLVEPVQGRNPDLQPREFLQQLRQFTAVAGVALIFDEVLVGFRIHLGGAQAWFGIEADIVTYGKIVGGSIPIGVVAGKASYMNGIDGGLWNYGDASYPQVEKTFFAGTFNKNHLGMAVARAVLKYLKSQGPALQQHLNQRTSDLAIALNTYFEQEEVPIKIVYFGSLFRFAFSGNFDLLFYHLIYKGVYIWEGRNCFLSTAHTDEDIEYVIQAVKHSIEEMRAVGFIPKRSPKLSAGSNGNGTVKTTQNGVLTKPVVTESVPVLEAIAREGKLPLSLAQQRLWFLDQLEPNSAFYNIPAAVRLQGQLNVAILEQSFREIIRRHEALRTNFITLDGQPHQVIHPNLNWQISVVDLQHLPVSKRENESQKIAIAEAQRPFNLETESLVRATLLVLSQTEYILQVTMHHIVSDGWSMSILIEEFTALYTAFSQGQPTPLVELPIQYVDFAVWQRKWLQGTVLQSQLTYWKKQLSGAATILSLPTDRPRPTMQTVRGAHQPFALSFELTEALKALSKKEGVTLFMTVLAAYNILLYRYTGQADILVGSPNASRNRPEIQGLIGYFLNILLLRADMSGNPSLREFLKQVRKTALGAYAHQDVPVEELIEALQPVRDLSYTPLFQVMFILDSATPISEMQLPGVTWSSMTVENYTSKLDLTLTLENTAQGLVGEWEYNTDLFEAATITRMAEHFRNLLEGMVANPEQRIAELPLLAAWERQQLLVEWNNTQREYPHKCIHQLFEEQVELTPNAVAVVFGNQRLTYQELNSRANQLAHYLQELEIKPDTLIGICLERSLDIFVGILGILKTGAAYVPLDPDYPQERLDYMFSDSQVSILLTAKKLVTQIPRHSAQLVYLDADWDVIATKSQQNLASEVKPENLAYVIYTSGSTGRPKGVMVPHRSLVNAYFGWEQAYELRTKTSSHLQMANFSFDVFTGDLVRGLCSGAKLVLCPREWLLTPELLYKLMQEEKVDCAEFVPAVIRNLIAYLEKTKQNLDFMRVLAVGSDSWYVKEYEEFQRFCGLETRLINSYGVSEATIDSCYFESTNVKLPVEALVPIGKPFPNVQIYILDSDLQPVPIGVLGELYIGGAGLAHGYLNRPDLTQERFIANPLSNEPTSRLYKTGDLARFLADGNIEFLGRIDNQVKIRGFRIELAEIEAVLRQYPTVSQTVAMAREDIPGDKRLIAYVVGNQESVPVISDLRRFLKEKLPEYMIPAAFMVLQTIPLTPNGKVNYRELPAPEISRAGLEASFIAPRNPIEEILAQIWVDVLGVKQVGIHDNFFELGGHSLIATQLISRIRTALKVELPLRSLFEASTVADLAERIALQQDAPHLNAPSLQSVVRDGQLSLSFAQQRLWFLNQLEPNSALYNIAGTARLQGELNVIALEQSLGEIIRRHESLRTNFITQEDGQAVQIIRPDAAFTMPVVDLRQLSASEQEIEIQRLATVEAQQAFDLANQLLIRATLLVLSKTEHILLFCMHHIVSDGWSMGVFVQETAAIYGAFSQGQPTPLPELAIQYVDFAVWQRQLLQGEIKESQLAYWQQHLAGATALLELPTDRPRPAVQTFRGANQSFVLSFELTGSLILLSRQEGVTLFMMLLAAYDTLLYRYTGQTDILVGSAIANRNHNEIEGLIGFFVNTLVFRTDVAGNPSFRELLNRVREVALGAYSHQDLPFELLVETLQPERNLSYTPLFQVAFVLQNAPMSEIELPGLTLSSMTPDNKTAKFDLTLTLENTATGLMGVWEYNTDLFEASTIERMTGHFQTLLESVVIQPEQRIGELPLLTAKEQYQLLEEWNHTQKDYLGNICIHQFFEMQVERTPDAVALVFENQQLTYRELNQQANHLAHYLRTLGIRVDVLVGLCVERSLEMLVGLLGILKAGGAYVPIDPEYPQERISHILSDSQVSLLLTQHRLVARLPEHQATLVVIDESWEQIIQHSQENPISGVKDSDLVNVIYTSGSTGKPKGVMVKHSGLCNLAQAQIDLFDLLPSSRILQFASFSFDASIWEVVMALGSGARLYLGTKESLLPGLELIELLRDYGITHITLPPSALAVLPQAELPALQNIIVAGEACAPDLIKQWSVGRRFFNAYGPTETTVCATVAECGNGERSDKPPIGRPIPNTQAYILDSYLQPVPIGVPGELHIGGAGVAQGYLNRPELTTEKFILNPFEDSAALASPRASAEGSRLYKTGDLARYLPDGNIEY

SEQ ID NO: 2105 - protein, 149 aa, Geobacillus kaustophilus HTA426
MSSNHPLDQLYRQVIMDHYKNPRNRGVLEGTNVDVNMNNPTCGDRIHLTMKVEDGKVVDVKFEGEGCSISMSSASMMTQAIKGKTVEEALRLAHIFSDMIQGKEYDDSVDLGDIEALQGVSKFPARIKCATLAWKALEKGLHNHEHEGR

SEQ ID NO: 2106 - protein, 157 aa, Salmonella enterica
GASLGLWEICIIWGLGISLAVYLTAGISGGHLNPAVTIALWLFACFPKQKVLPYIIAQFAGAFGGALLAYVLYSSLFTEFETAHHMVRGSVESLQLASIFSTYPAAALNVWQAALVEVVITSILMGMIMALTDDGNGIPKGPLAPLLIGILVAVIGA

SEQ ID NO: 2107 - protein, 255 aa, Arabidopsis thaliana
MNIVGLCKRFFSDRRSLHGINNALVKTVFTGRKPILGFSGRSFHELRKTGNFVIPRVFSVSRNLTTKASSSSSSKQPAFLRWYLRKLESHPFMTKSITTSVIYMAADLTSQMITMEPTGSFDLIRTARMASFGLIFLGPSQHLWFSYLSKILPKRDVLTTFKKIMMGQVLFGPVSNTVFYSYNAALQGENSEEIVARLKRDLLPTLKNGLMYWPVCDFVTFKYVPVHLQPLMNSSCAYIWTIYLTYMANQTKADS

SEQ ID NO: 2108 - protein, 633 aa, Bacillus cereus ATCC 14579
MCGFVGCLCENPREFSETEKHQFENMNTMIFHRGPDDEGYFRDEHVQFGFRRLSIIDLEAGHQPLTYENDRYVIIFNGEIYNYVELREMLLEKGATFATQSDTEVIIALYAHMKEKCVDYLRGMFAFMIWDREEKKLFGARDHFGIKPLYIAQQGDTTFFASEKKSIMHVMEDKGVNPTSLQHYFTYQYGPEPETLTIDVNKIEPGHYFVKEIGKEMEIHRYWKPYFNASSATKEEHIQAIRDVLYDSVKVHMRSDVPVGSFLSGGIDSSIIASIAREMNPNLLTFSVGFEQRGYSEVDVAKETAEKLGVKNHNVFISAKEFMDEFPKNHWHMDDPLADPAAVPLYFVAKEARKHVTVVLSGEGADELFGGYNIYREPNSLKMFSYIPSPGKSVLKALSGALKEGFKGKSFLERGCTPIEERYYGNAKIFREEEKAELMKYYNESVNYMDITKPLYNEIKDYDDVSKMQYIDMFTWLRGDILLKADKMTMANSLELRVPFLDKEVFDVASKIPTEFKIANGTTKAILREAARGIVPDHVLDRKKLGFPVPIRHWLKDEMHDWAINIINESKTEHLIDKQYVLNLLEAHCADKGDYSRKIWTVLAFMVWHQIYVEHKYDTNKFHEETKRAYSLV

SEQ ID NO: 2109 - protein, 508 aa, Bifidobacterium longum NCC2705
MKNKVQLITYADRLGDGTLSSMTDILRTRFDGVYDGVHILPFFTPFDGADAGFDPIDHTKVDERLGSWDDVAELSKTHNIMVDAIVNHMSWESKQFQDVLEKGEESEYYPMFLTMSSVFPNGATEEDLAGIYRPRPGLPFTHYKFAGKTRLVWVSFTPQQVDIDTDSDEGWEYLMSIFDQMAASHVSYIRLDAVGYGAKEASTSCFMTPKTFKLISRLREEGVKRGLEILIEVHSYYKKQVEIASKVDRVYDFALPPLLLHSLFTGHVEPVAHWTEIRPNNAVTVLDTHDGIGVIDIGSDQLDRSLKGLVPDEDVDNLVNTIHANTHGESQAATGAAASNLDLYQVNSTYYSALGCNDQHYLAARAVQFFLPGVPQVYYVGALAGRNDMELLRRTNNGRDINRHYYSTAEIDENLERPVVKALNALAKFRNELSAFDGEFSYEVDGDTSITFRWTAADGASTAALTFEPGRGLGTDNATPVASLAWSDAAGDHETHDLLANPPIADID

SEQ ID NO: 2110 - protein, 217 aa, Aquifex aeolicus VF5
MKFFLDTANVEEIKKAMEWGILDGVTTNPTLISKTGRPFKEVVKEILELVDGPVSLETVSLDAEGMIREGRMLAELGENVVVKIPMTPEGLKAVIALESEGIPTNVTLVFSPTQALLAAKAGASYVSPFVGRLDDISGEGMKLIEEIKTIFSNYEFDTEIIVASVRHPMHVLESALIGADICTMPFKVMEQLFKHPLTDIGLERFLKDWEKVPEKPF

SEQ ID NO: 2111 - protein, 643 aa, Magnetospirillum magnetotacticum MS-1
MSEYLDTTIHDTFPKALVHNAQRWPGEIAMREKEFGIWNAFTWADYLDRVRNLALGMLALGVQRGDVVAILGKNRPESLWGEVAAHAVGAMSLGIYHDSMNAEVAYLLSYTGAAVVLAEDEEQVDKLLEISAEVPTIRHIVYFDPRGMRKHKDPRLISAEDLKSKAQEIAAANPGRFDEEVGKGKGDDVAILCTTSGTTSNPKLAMLQAGPFLRHSTAYLRADPKSAGDDYVSVLPLPWIMEQIYAVAQPLICRNIVNFVEEPETMMADMREIGPNFVLLAPRMWEGIAADVRARMMDSTPFKQAMFNLGMKLGMKALDQGKRSKLANWILFDALKDRIGFTFLKSAATGGAALGPDTFRFFLAMGVPLRQIYGQTELAGAYTVHREGDIDFDSVGIPFDDAQLRIENPDANGVGEIVATTDGMFTGYFRNPEASTADIVDGNWLKTGDAGYIKKENGHLVVIDRIKDLATTSHAVRFSPQFIENKLKFSPFIAEAVILGDTKPYLSALICIRFSIVSKWAESKGISFTNYTNLSAQGAVYDLLQAEVEKVNATLPEPQRIRKFLLLYKELDADDGELTRTRKVRRGVINEKYGDIIDAMYADRAMVPVDAVITFQDGTTTRVKTELKVVTLLPPPSQQLAAE

SEQ ID NO: 2112 - protein, 323 aa, GIBBERELLA ZEAE PH-1
MPKPVISVLGSLNIDLVSYVPHHPLPGETITSSQFNVFPGGKGANQAVACAKLSRTSDFKDASVDVVMIGAIGADAYGTTLLDSLKSYDVGTDSIIVNRDGGAGSQSGIAMIIVDEPTGQNRIILSPGANNSLQPSQFQTIPGPAPALLIMQLEIPLETVIQAFQAAKATGTPVLLNPAPAQALPTEIYKGLAHLILNETEAALLSDKDELEFENISVVEQAASDFLARGVHNVVITLGGKGAYFANDTGAKGLIPAQKVKVVDTTAAGDTFIGSYAVEVALAGQRAKTFDIEKAVRSGIRASSHTVARRGAQVSIPWKDELE

SEQ ID NO: 2113 - protein, 548 aa, GIBBERELLA ZEAE PH-1
MAGTQDQSQDYFSKPTTPSTPGQAHLGNVANRIPSTIPDRESGTERAKSTHSRHRVLHGLPSTFMSYMSRRPVASSRGFSRVSSEGTASRPTAPQHSSHFHHYAPAEDGYYQENPWFGEADKKPIFSLGKPLPHKVRRKVLKPVRPDGKVDEEMAIVKEETTNEPHPGYASRTTSGQPYRVETQSSLPSRDIQRQQSRTTAAGVAHNDRRNDAGQPVFEYIPGEATPTPGHRDPASRVQSKQDNGHSPPDFKVDGEPLGHQEKPCVESGDTNANEMRNWWARLRARHPEPLAEFLATAVAIFLGLTGTLSVNLSATQSQPYGTYETSCWAWGFAWMFGIYLGGGVSGAHMNPAISVSLSIFRGFPWRQCVIYVFVQFIASIVAGALAYAMYADSINHVDPDMTKMSMTFFSTPREWVTLKSAFFNQVVGSAIMMIAVFALGDDQNNPPGAGMHALVLGFLVTTLKFTLGYNIGSALNPASDFGPRVIAYAVGFRGDNVFHSGWWFYGPWAATLIGSLLGCTLYDGFVFVGSESPVNFRVDKRVKKLFN

SEQ ID NO: 2114 - protein, 1533 aa, Magnaporthe grisea 70-15
MYPGSSQSRPYQVPPPPPMSPPLSQMHQQMSFVPPPPPPLNRYQTTPNLGASAPPPPPPGPPPASALNPQAPWNGAWGGVPAPRQAYDNRSGMYAQAPIQQYNPQAHAATAPGLNIPPPPLQTDAPMSDTYNPGQDPMFDGFMPDLSFDLEQETMGSSQTWQTTSSSSTNTASVNDNVQSNAPTEERTRRNNSASITGTQSSSNVPGIPSDITASWSLDKVIAWLQMNSFSRDWQETFKSLNIHGAQFLELGSGHFGRGNFGMMHQQVYPKLAKVCTASGTGWDQPREREEGKRMRRLIRGLVHARAVPDSARVPSSHGRQGSINSRGNDKGTHDGSDSPNTPIMKTPSSQSRSTTIPTFPDGSSFSNHRGVLKNIDIDRHSSPKLNGDSPAASPNPVMASSTPKSSTLSVSPHSSRFGNNVRNSTDSVKAIYGSGIPADAQKMMSNSNLDELINGRGARQSPSDLGDNSAGTDSPVSARDTKLPFRQRMQAKDIDGNLSSPNGEGSLSPQMYRNGLGLDDYLRFKKPGGSIYLMATADGWNYRVVDVTDVETVLDLRSEISRGLGIPDEDGVEFYLTELGKSDHSQPLDDNQLMNHNKSRADAEGTLKLFVKPPPMSQQSTWSAGDTGQRHRFGTSSSMSRQQNTLKDDQSEEARLRAQREYKAEIDRKGREYLAIRKAKLESNNNGLSSSTEGIGIVGKPVDFDTPRHSPYEDKNTDRMFPTRNAPAPPVAPSATLNRVNSLMTGQRRVQGSMDGYPSQRVPPGVGTTTSPKEMSEDRRRQPMSGSQPMGGITSALVDMGRNLGGVALPNRGVSANNVPSKPSPPYRVATAPVSGRDFVSPDNRAAFPRSQTAGDLSPISQMPANFAAYQEPNPSPRGFGAAPVSSAAHKRAPSGPDIDFTEPEVSFDRPAPSTAQNEAQSDDDSGDDSDDGLFVIPIAARKASMKKAKSRASVTFDASDSGDGKRPALTVNTARDRKSVSFNSPQSARTGDDDDDSGRQRRTPKSDMWDSEDGKLGRRKSFKMDVWANRPPAEALINNLEDFFPGMDVDQPVLEEGDQEQNIDGSPVAPSPIAEVDETQSPGHLQINATPLNSLPPSRVQSMYNESDTLGSDESTLKALERPPSFQSLAQRSVRRSGGLGRMKSIREKARGAHEAHKRYTQTSMAAPQGLSRSGGTPATETQPTQNNSSALLRRKSTKMFNANIVQIRPNRDSMLVPDIPQDSISSSSRGAPKHPTTFRWFKGQLIGKGTYGRVYLGMNATTGEFLAVKEVEVNPRAAAGDKKRMKELVAALDQEIETMQHLDHVNIVQYLGCERKETSISIFLEYISGGSIGSCLRKNGKFEESVVQSLTRQTLSGLAYLHREGILHRDLKADNILLDVDGTAKISDFGISKKTDNIYGNDKSNSMQGSVFWMAPEVIRSQGEGYSAKVDIWSLGCVVLEMFAGRRPWAKEEAVGAIYKIANGEIPPIPEDVQDTISPIAVAFMMDCFTVDSHDRPTANKLLSQHPFCELDPNYNFLDSELYAKIRGTY

SEQ ID NO: 2115 - protein, 260 aa, Zea mays
MAGVPSTAIREISLLKEMNHGNIVRLHDVVHSEKRIYLVFEYLDLDLKKFMDSCPEFAKNPTLIKSYLYQILHGVAYCHSHRVLHRDLKPQNLSLDRRTNALKLADFGLARAFGIPVRTFTHEVVTLWYRAPEILLGARQYSTPVDVWSAGCIFAEMVTQKPLFPGDSEIDELFKIFRILGPPNDQSWPGVSCLPDFKTAFPRWQAQDLAPVVPNFAPAGWALLFKMFRSEPSKRIPARQALEHEYFKALEVVQCPAKCV

SEQ ID NO: 2116 - protein, 149 aa, Solanum tuberosum
MADQLTEDQISEFKEAFSLFDKDGDGCITTKELGTVMRSLGQNPTEAELQDMINEVDADGNGTIDFPEFLNLMARKMKDTDSEEELKEAFRVFDKDQNGFISAAELRHVMTNLGEKLTDEEVDEMIREADVDGDGQINYDEFVKVMMAK

SEQ ID NO: 2117 - protein, 780 aa, Magnetococcus sp. MC-1
MSILHKLWGHSIRHQLMLGIALVHAVLMTLFIFDLVDRQRDFLHKQAVAQATSLSRTLAANSISWVLARDFVGLEELLSSMLDYPELRYAMVVDVNGKVLSHSDKSKAGKFLADPLSLKLIDAPNTLQVLLQSKQVIDVAMPILTNQQLVGWARVSLSQNKSGQELLHVTYKGFLYTLFAIVVGIVFAYFMARGLTKDLYHLLHVANTTRLGQLNHRVQIKRHDEIGLLSNGFNQMLGVLEQEEQQLRLIQQSLTQSNQALRQSEEKFRRLVESLSSEYFLYSHNTEGVFEYVSPSIRTVLGYDPQEFMTHYATYFTENPINMQAVNHTEASIRGEQQASYVIEIFNKQGQAVRLDVLEYPIFDKDGRVIAVEGLAHDVTERHRAEFELLTAKEQAEAANRTKSEFLAMMSHEIRTPMNSILGMAELLSESPLTPEQQGYLKIQRRAGHGLLELINDILDLSKLEAGRIELYIQPFNLPELLQSVVDLLENLARERGLALRLERMEEIPTLCQGDRARLRQIMVNLVGNAIKFTHDGSVKISVEKSSDDATNLLFHVIDSGIGIAEKDQSSVFQRFTQIDSSNSRFYGGSGLGLAITHHLVELMGGKIWLKSALGEGSCFTFTLPLPPVQIDEPALAATHDEEAPMVATESCCATKPLRILLAEDSPDNELLIRIFLRDSPHSLCCVKNGLEAYQQVQKENFDLILMDIQMPVMGGDEAIIKIRAWEQSQQCDPTIIIALTAHAMSEHQKHYLTLGFDAFLSKPINKKTLLNALAQYGQS

SEQ ID NO: 2118 - protein, 328 aa, Oceanobacillus iheyensis HTE831
MTESQLGISNDIALGMYEMMLLARKLDERMWLLNRAGKIPFVISCQGQEAAQVGAAFALNRTTDYIAPYYRDLGVVLAFGMSAQDVMLSAFAKAEDPNSGGRQMPGHFGQKKNRILTGSSPVTTQLPHAVGVALAAKMDKEPLVSFVTLGEGSSNQGDFHEGLNFAGVHKLPVITMVENNKYAISVPYDRQVASETISERANSYGMPGVTVDGNDPVAVYQAVSEARDRAVRGEGPTLIEAITYRLTAHSSDDDDRAYREKNEVEEAKKKDSIITFATTLKEAGVLKDEKEQEIMSRIDELVNEATDYAENASYAEPEDALRYVYEEE

SEQ ID NO: 2119 - protein, 473 aa, Oceanobacillus iheyensis HTE831
MATEYDLVILGGGTGGYVAAIRASQLKMKVAIVEKAELGGTCLHRGCIPSKALLRSAEVYQQTTRADEFGIQVAKPVLDFSKVQQRKQKIIDQLHQGVQGLMKKGKIDVYQGFGRILGPSIFSPMPGTISVEYSDGKENDMLLPKNVLIATGSRPNQLPGFEFDHNYILSSDDALALETLPDSIVIIGGGVIGIEWASMLNDFEVDVTILENQDRILSTEDAEISKEMSKLLSQKGINIITNANVKADSVKKDQGVSLQVDVDGEIQTHQAEKVLMSVGRKGNIENIGLENTDIVTDRNLIMTNEFYQTKESHIYAIGDVIGGLQLAHVASHEGIKAVEHMAGHTVEKIKANAIPSCIYSSPEAASIGLTEAQAKEKDYEVKVGKFPFKAVGKALVYGESEGFVKIVSDKNTNDLLGVHMIGPHVTDMIAEASLAKFLDATPWEISESIHPHPTLSEVIGEAALAVEGNQIHG

SEQ ID NO: 2120 - protein, 482 aa, Glycine max
KLLLQARKFQNLPPGPPSLPIIGNLHHLKRPLHRTFRALSDKYGHVISLWFGSRLVVVVSSQTLFQECFTKNDVVLANRPRFLSGKHIFYNYTTLGSSPYGEHWRNLRRITALDVLSTHRLHSFAAIRRDETHRLVRKLAEAQGSESSLSFAEVELTSKFYDMTFNNIMRMISGKRYYGDDCDMADVEEAKQFRAMVSELLKLAGANNKNDFMPVLRLFDFENLEKRLKKISNKTDTFLRGLLEEIRAKKQRANTMLDHLLSLQESQPEYYTDQIIKGLALGMLIAATDSQAVTLEWALSCVLNHPEVFKRARDELETHVGQDHLLEESDLSKLPYLKNIIYETLRLYTPAPLLLPHSSSEECIIGGFKVPGDTIVLINAWSIHRDPKVWSEATSFKPERFEKEGELDKLIAFGLGRRACPGEGLAMRALCLSLGLLIQCFEWKRVGDKEIDMREESGFTLSRLIPLKAMCKARPVINRLGK

SEQ ID NO: 2121 - protein, 364 aa, Oceanobacillus iheyensis HTE831
MEIFTSLQKYDYEQLLFCQDKNSGLKAIIAIHDTTLGPALGGTRMWTYKTEDDAIVDALRLAKGMTYKNAAAGLNLGGGKTVIIGDPKKDKNPEMFRAFGRYIQGLNGRYITAEDVGTTEMDMDLIHLETDYVTGTSSYSGASGNPSPITALGLYHGMKATAKEAFGTESLEGKTVAVQGVGNVAYHLCEFLHKEGANLIVTDINKESVKRAVEDFGAKAVDPDEIYGVECDIYAPCALGATINDETLDKLKAKAVAGSANNQLMSTKHGDILHERGIVYAPDYVINAGGVINVADELVGYNRERAMKKVEMVYDNVEKVFEISKRDNIPTHVAADRMAEERIQSVRNSRSQFLRNEKHILNFN

SEQ ID NO: 2122 - protein, 263 aa, Oryza sativa (japonica cultivar-group)
MEAMDVKYKPLVFPNGAIKKAAKPAAVAPAVGGGGGGETVYRECLKNHAASLGGHALDGCGEFMPSPAANPADPTSLRCAACGCHRNFHRRMLLSLGSSGQAQRLPPQVMSPAAAAAPPPGGGGGGMPRKRFRTKFTAEQKQRMQELSERLGWRLQKRDEAIVDEWCRDIGVGKGVFKVWMHNNKHNYLGGHSARRSASSSSAAAAAAPPFNPPTSPPPPPPPPPHATDFNINGTATAATAAAAATIAAGNHQENGASSPQSA

SEQ ID NO: 2123 - protein, 314 aa, Cyanidium sp. 3-8 CR
NGFGRIGRLVLRAALESKLIRVTAINDPFIGSDPAYVAYLLTHDTAQGRFFGEIRVDDDCIMIDSVPIRCFAVHDPAEIPWQQAGVEYVVEASGKFVTREGAEKHLLAGARKVIVSAPAKDVPMFVVGVNHSQYHPSMDIVSNASCTTNCLAPLAKILDEHFGIEQGLMSTIHAVTGTQRTVDGPSSKDWRRGRSALGNVIPTSTGAARAVGKVYPKLEGKITGLAYRVPLAVVSIVDFTVVLQKPVTLSQLKEVMRAASEHPTYRGIVGYTEDAVVATDMAHSAFSTVFDAEASIVLSPTFVKIVAWYDNEWG

SEQ ID NO: 2124 - protein, 114 aa, Brassica napus
MAPGGITYKEALESYSTGLDYEVKMSKFEATNKPAKPGSGSVGKYGIRSSNGNGVHELLECPVCTNLMYPPINQCPNGHTLCSSCKQQVQNTCPTCRYELGNIRCLALEKVAES

SEQ ID NO: 2125 - protein, 296 aa, Antirrhinum majus
GKTITLEVESSDTIDNVKAKIQDKEGIPPDQQRLIFAGKQLEDGRTLADYNIQKESTLHLVLRLRGGMQIFVKTLTGKTITLEVESSDTIDNVKAKIQDKEGIPPDQQRLIFAGKQLEDGRTLADYNIQKESTLHLVLRLRGGMQIFVKTLTGKTITLEVESSDTIDNVKAKIQDKEGIPPDQQRLIFAGKQLEDGRTLADYNIQKESTLHLVLRLRGGMQIFVKTLTGKTITLEVESSDTIDNVKAKIQDKEGIPPDQQRLIFAGKQLEDGRTLADYNIQKESTLHLVLRLRGGF

SEQ ID NO: 2126 - protein, 506 aa, Crocus sativus
MVSTGCSGNGAKGTNGGIVVPEIKFTKLFINGEFVDSVSGSTFETRDPRNGDVIANIAEGDKEDVDLAVKAAREAFDHGKWPRMSGYERGRIMMKFADLIEAFIEELAALDTLDAGKLLSMGKAVDIPAAVHIIRYYAGAADKIHGYTLKLSSELQGYTLKEPIGVVGVIIPWNFPTTMFFLKVSPALAAGCTMVVKPAEQTPLSALYYAHLAKLAGVPDGVINVVPGFGPTAGAALSSHMDVDSVAFTGSAEIGRAIMESAAKSNLKNVSPELGGKSPMIVFDDADVDMAVSLNSLAVFFNKGEVCVAGSRVYVQEGIYDEFVKRAVEAARSWKVGDPFDQSRNMGPQVDKDQFESVLKYIEHGKSEGATLLTGGKPAADKGYYIEPTIFVDVTEDMKIAQEEIFGPVMSLMKFKTVEEGIDCANNTKYGLAAGILSQDLDLINTVSRSIKAGIIWVNCYFGFDLDCPYGGYKMSGNCRESGMDALDNYLQTKSVVMPLHNSPWL

SEQ ID NO: 2127 - protein, 162 aa, Zea mays
RAGLQVPIPAGQVYAINDALSAEGAAEDYETILKQLVKNGVLAMSKTTGFPRFDLQLLGMGPDGHIASLFPGHPLVKENKKWVTHILDSPKPPPQRITFTFPVINSSAYVAMVVTGAGKAGAVQKAISDKKTSDLLPVEMAILDDGEFTWFTDKEAVSMLQN

SEQ ID NO: 2128 - protein, 238 aa, Methanosarcina barkeri str. fusaro
MGHLILVRHGEPGLKPEERLAGWVDISLSRKGIEEALQCAAELEKFELDLAFASNLVRTQETLFLILSGQKKTGVVVHESTGKKGNPGKTDWYSYPEKLGKKLIPIYFTPYLNERYYGKLQGRKKQKMEEKYGAEKLASWRWNFQPGPPEGESLKVVYERAVPYFKEKILPAVKAGKNVLICAHQGSLRALVKYIEEISDEDIKEVKFSTGELAIYRYSEGKLIRENAEMSSEIKRNL

SEQ ID NO: 2129 - protein, 320 aa, Hyphomicrobium methylovorum
KKKILITWPLPEAAMARARESYDVIAHGDDPKITIDEMIETAKSVDALLITLNEKCRKEVIDRIPENIKCISTYSIGFDHIDLDACKARGIKVGNAPHGVTVATAEIAMLLLLGSARRAGEGEKMIRTRSWPGWEPLELVGEKLDNKTLGIYGFGSIGQALAKRAQGFDMDIDYFDTHRASSSDEASYQATFHDSLDSLLSVSQFFSLNAPSTPETRYFFNKATIKSLPQGAIVVNTARGDLVDNELVVAALEAGRLAYAGFDVFAGEPNINEGYYDLPNTFLFPHIGSAATQAREDMAHQANDLIDALFGGADMSYALA

SEQ ID NO: 2130 - protein, 125 aa, Brassica napus
MKFFLCILALQQLYVLSVAQDFDFFYFVVQWPGAYCDSRHSCCYPKTGKPAADFGIHGLWPNYKTGGWPQNCNPDSTFDELRVSDLMSNLQREWPTLSCPSNDGVHFWTHEWEKHGTCAESELDQ

SEQ ID NO: 2131 - protein, 590 aa, Asparagus officinalis
MCGILAVLGCSDDSQAKRVRVLELSRRLKHRGPDWSGLCQHGDCFLSHQRLAIIDPASGDQPLYNEDKSIVVTVNGEIYNHEELRRRLPDHKYRTGSDCEVIAHLYEEHGEDFVDMLDGMFSFVLLDTRNNCFVAARDAVGITPLYIGWGLDGSVWLSSEMKGLNDDCEHFEVFPPGNLYSSRSGSFRRWYNPQWYNETIPSAPYDPLVLRKAFEDAVIKRLMTDVPFGVLLSGGLDSSLVAAVTARHLAGSKAAEQWGTQLHSFCVGLEGSPDLKAAKEVAEYLGTVHHEFHFTVQDGIDAIEDVIFHIETYDVTTIRASTPMFLMARKIKSLGVKMVISGEGSDEIFGGYLYFHKAPNKEEFHHETCRKIKALHQYDCLRANKATSAWGLEARVPFLDKEFMDVAMSIDPESKMIKPDLGRIEKWVLRKAFDDEENPYLPKHILYRQKEQFSDGVGYSWIDGLKAHAAKHVTDRMMLNAARIYPHNTPTTKEAYYYRMIFERFFPQNSARFTVPGGPSIACSTAKAIEWDARWSNNLDPSGRAALGVHDSAYDPPLPSSISAGKGAAMITNKKPRIVDVATPGVVIST

SEQ ID NO: 2132 - protein, 196 aa, Mitthyridium sp. Mishler 7/23/98
GGAKKVVISAPSKDAPMFVMGVNEEKYTNEDIVSNASCTTNCLAPLAKVINDKFGILEGLMTTVHATTATQKTVDGPSNKDWRGGRSAGSNIIPSATGAAKAVGKVLPELNGKLTGMAFRVPTTDVSVVDLTVRLEKPASYDAIKAAVKEASQGKMKGILGYTEDDVVSSDFITDSQSSIFDAKAGIALSDTFVKL

SEQ ID NO: 2133 - protein, 502 aa, Paracoccidioides brasiliensis
MGADVASSTYRYTETPTYTTSNGCPVMDPESSQRVGMKGPLLLQDFHLIDLAHFDRERIPERVVHAKGAGAYGEFEVLDDISDITVIDMLLGVGKKTKCITRFSTVGGEKGSADSARDPRGFSTKFYTEQGNWDWVFNNTPVFFLRDPSKFPIFIHTQKRNPQNNLKDATMFWDYLSTHQESANRSCMHLFSDRGTPILPTGTCNGILGHHITQWTKPDGTFNYVQIHCKTDQGNKTFNNEEATKMAADNPDWHTEDLFKAIERGEYPSWTCTFRSSAPSRLEIRWNVFDLTKVWPQAEVPLRRFGRFTLCENPQNYFAEIEQAAFSPSHMVPGVEPSADPVLQSRLFSYPDTHRHRLGVNYQQIPVNCPLRAFNPYQRDGAMAINGNYGANPNYPSTFRPMEFKPVKACQEHEQWAGAALSKQIPVTDEDFVQPNGLWQVLGRQPGQQENFVHNVSVHLCGAQEKVRKATYCMFSRINADLGARIEKATERLVASQPQSHL

SEQ ID NO: 2134 - protein, 391 aa, Desulfovibrio desulfuricans G20
MLNKPRMLTPGPTPIPAAVRLAMAQDMIHHRKPAFKAVMAETQRLLRPLFGTAQPVLPLSCSGTGAMTAAVTNLFSAGEKVVVVEGGKFGQRWTEIARSHGLVPVVIEVPWGSAVTAQAVKQTLEQHGDAAGVLVQCSETSTGVMHPVREIAAVTRSAETLLVVDGISSVGLSPCPMDEWGVDCLLTGSQKGLMLPPGLALIALSERAWARTATVTPSCFYFNLRAERKNAEADQTLFTTPVSLIIGLRESLRMYEETGLEEVFRKQWALTQMVRTGVSAMGLAPFVAADYGWGLTSIALPGGIDGTAVLAHAAQHYGVIMAGGQDHLKGRIIRMGHMGWVDWGDIAAGLHALAESYRACGGYIGCRDYIEQALQAYNEALLSYAENNPFA

SEQ ID NO: 2135 - protein, 145 aa, Bacillus cereus ATCC 14579
MRNLFPEITKRQNGIFDFGPSLLEGMTDAFFKPLNMDTFKVDVHEQSGKYTVKADLPGFQKENIQVDFEQDILTIQATNHNEVDEKNENGTYIRKERSIGSVTRRFNFKQVEEENVKANYKDGVLTIELPKLKEEKSSKTTINIE

SEQ ID NO: 2136 - protein, 366 aa, Desulfotalea psychrophila LSv54
MSDPIFAKRLRACPLIGAGVICFFATIFCLAESNAAESIMKNREDLSITTLAGGCFWCLEADLEKLPGIVDVVSGYSGGDQKNPSYEEVSTGRTGHLEAVQIRFDPEVISYEEILQRFFRLHDPTDAGGSFVDRGRQYSSAIFYHDEVQKEIAERVRDELAPTFSRPIVTELISFRAFYPAEDYHQNYSLKSPQAYARYRSLSGRDSFIEAIWGSAGEMNYEKMSDDQLRKRLTALQYEVVREDGTEPPYDNAYWDNKRAGIYVDIVSGEPLFSSRDKYKSGTGWPSFIRPLVAENVVELKDNSFFLRRTELRSLHADSHLGHLFTDGPAPTGLRYCINSASLRFIPREVMQAEGYGEYLSSFLHN

SEQ ID NO: 2137 - protein, 348 aa, Arabidopsis thaliana
MARNVLVSGGAGYIGSHTVLQLLLGGYSVVVVDNLDNSSAVSLQRVKKLAAEHGERLSFHQVDLRDRSALEKIFSETKFDAVIHFAGLKAVGESVEKPLLYYNNNLVGTITLLEVMAQHGCKNLVFSSSATVYGSPKEVPCTEEFPISALNPYGRTKLFIEEICRDVYGSDPEWKIILLRYFNPVGAHPSGDIGEDPRGIPNNLMPFVQQVAVGRRPHLTVFGNDYNTKDGTGVRDYIHVIDLADGHIAALRKLEDCKIGCEVYNLGTGNGTSVLEMVDAFEKASGKKIPLVIAGRRPGDAEVVYASTERAESELNWKAKYGIEEMCRDLWNWASNNPYGYDSEDNSH

SEQ ID NO: 2138 - protein, 600 aa, Frankia sp. CcI3
MGQAELRAAGPGGRARARLRCAGPVVMDSEPLSEPIGDHTPGPAPAMPVGGTLRDPHWFKRAVFYEVLIRGFADSNGDGTGDIRGLISRLDYLEWLGVDCLWLLPIYSSPLRDGGYDISDYFQILPEFGDLGDFVSLVDEAHRRGIRIIADLVMNHTSDAHPWFQASRSDPDGPFGDFYVWSDSDELYPDARIIFVDTEKSNWSWDPVRGQYYWHRFFSHQPDLNYDNPEVQEAMLEVLRFWLDLGIDGFRLDAVPYLYVRENTNGENLPETHEYLKRVRKEVDAKYADRVLLAEANQWPSDVVEYFGNDDECHMAFHFPLMPRIFMAVRRESRYPISEILAQTPQIPPNCQWGIFLRNHDELTLEMVTDEERDYMWAEYAKDPRMKANIGIRRRLAPLLDNSRDQMELFTALLLSLPGSPVLYYGDEIGMGDNIYLGDRDSVRTPMQWSPDRNAGFSTADPARLYLPLIMDPVYGYQALNVEAGQRMPTSFLAWTKRMIEVRKRHPVFGLGDYTELGASNPSIFAFVREFGDDRVLCVANLSRFAQPVELDLRRFEGMVPVELLGRVHFPPIGELPYLLTLPGHGHYWFAVTRPGEFTP

SEQ ID NO: 2139 - protein, 307 aa, Sinorhizobium meliloti 1021
MPEPGPHEVRIRVKALGLNRAEALLRSGAYIETATFPSGLGLEAAGFVEKVGPGVQGFIPGDPVSVLPPKSMIRWPAYGELAIFPAALLVRHPPSLSFEEAAAVWMQYLTAYGGLVDIGGLRRGDFVAITAASSSVGLAAIQIANMVGAIPVAVTRTSAKRQGLLEAGAAHVIASMEEDLEAQLKRVSGQHGIRVVFDPVGGPIFEPLAAAMAWGGILVEYGGLSPEKTPFPLFAVLSKSLTLRGYLVHELLADPGRLERAKAFILDGLVSGALRPIIARAFPFDQIVEAHRFLESNEQFGKIVVTV

SEQ ID NO: 2140 - protein, 468 aa, Solanum tuberosum
MAASRRLRDLQAQPGNKICVDCSQKNPQWASVSYGVFMCLECSGKHRGLGVHISFVRSVTMDSWSEIQIRKMELGGNESFNKFVLQYGIPKETDIVTKYNTKAATVYRDRIQSLAEGKPWRDPPVVKEVLRGSASNNGSRPPLSSGASGGGGSRNGGWDSWDNNDDGGFSGSNTKDIRRNQTVGDFRSGGSSGGAPARSRSTADISKEQYEASAANKDNFFARRMAENESRPDGLPPSQGGKYVGFGSNPAPMPRNNMNQQGDVFSAVTQGFGRLSMIAATAAQSAASVVQVGTKELTSKVKEGGYDTKVNETVNVVTAKTSEIGQKSWGIMKGVLAMASQKVEEYTKESPAWKNDSWQRGESDKNGYYQDFNQDSKGWNASGGAQSSGRNANSVSSGSWDDWDNEDKSKVNPTKAAAAPNNKNDDWAGWDDGQDDGFDNHYQSASNNKHAAVHAGKSDSKWTDGGFL

SEQ ID NO: 2141 - protein, 485 aa, Arabidopsis thaliana
MDSATTKNIRVHPQDRESRTIKSKRLREREITQDLVVDVVEKTEEIFRIVQPFQGKACNQAPVTSNQRPMIPTPPPMIESRCPSPEFTSRCCIGSGGFLGPQRENLMLVKPSIISGLVRLTSHSPSSSSSVLRRQEFLVRTLCGSPIIRAMSSTSEADAESVLRTVTPSLDLKRHKGQAGKIAVIGGCREYTGAPYFAAISALKIGADLSHVFCTKDAAPVIKSYSPELIVHPVLEESYSISQLSEEDKREVQDKVLGEVGKWMERFDCLVIGPGLGRDPFLLNLICHYFGGGLTSYVTLYFQECVSIIMLLAKKSNVPFVIDGDGLFLVTNSIDLVHSYPLAVLTPNVNEYKRLVQKVLNCEVDEQNAEDQLRSLAKQIGGVTILRKGKSDLISNGETVFLSWAQQLKSDPESPSENPAILGCIAASGLLRKAASLAFTKHKRSTLTSDIIECLGERESTKTFRLNHNVLSTFFDSLEDICPAS

SEQ ID NO: 2142 - protein, 1120 aa, Magnaporthe grisea 70-15
MAATQSRDWASFGVSLPSTALGRHLQAAMPFLSEENHKSQGTVLIPDAQGPIPFLGSVPLVDPELPSQSLQRLARQYGEIYRFVIPGRQSPILVSTHALVNELCDEKRFKKKVAAALLGLREAIHDGLFTAHNDEPNWGIAHRILMPAFGPMAIKGMFDEMHDVASQMILKWARHGSTTPIMVSDDFTRLTLDTIALCSMGYRFNSFYHDSMHEFIEAMTCWMKESGNKTRRLLPDVFYRTTDKKWHDDAEILRRTADEVLKARKENPSGRKDLLTAMIEGVDPKTGGKLSDSSIIDNLITFLIAGHETTSGMLSFAFYLLLKNPTAYRKAQQEIDDLCGREPITVEHLSKMPYITAVLRETLRLYSTIPAFVVEAIEDTVVGGKYAIPKNHPIFLMIAESHRDPKVYGDDAQEFEPERMLDGQFERRNREFPNSWKPFGNGMRGCIGRAFAWQEALLITAMLLQNFNFVMHDPAYQLSIKENLTLKPDNFYMRAILRHGMSPTELERSISGVAPTGNKTPPRNATRTSSPDPEDGGIPMSIYYGSNSGTCESLAHKLAVDASAQGFKAETVDVLDAANQKLPAGNRGPVVLITASYEGLPPDNAKHFVEWLENLKGGDELVDTSYAVFGCGHQDWTKTFHRIPKLVDEKLAEHGAVRLAPLGLSNAAHGDMFVDFETWEFETLWPALADRYKTGAGRQDAAATDLTAALSQLSVEVSHPRAADLRQDVGEAVVVAARDLTAPGAPPKRHMEIRLPKTGGRVHYSAGDYLAVLPVNPKSTVERAMRRFGLAWDAHVTIRSGGRTTLPTGAPVSAREVLSSYVELTQPATKRGIAVLAGAVTGGPAAEQEQAKAALLDLAGDSYALEVSAKRVGVLDLLERFPACAVPFGTFLALLPPMRVRQYSISSSPLWNDEHATLTYSVLSAPSLADPARTHVGVASSYLAGLGEGDHLHVALRPSHVAFRLPSPETPVVCVCAGSGMAPFRAFAQERAALVGAGRKVAPLLLFFGCREPGVDDLYREELEGWEAKGVLSVRRAYSRRTEQSEGCRYVQDRLLKNRAEVKSLWSQDAKVFVCGSREVAEGVKEAMFKVVAGKEGSSEEVQAWYEEVRNVRYASDIFD

SEQ ID NO: 2143 - protein, 113 aa, Brassica napus
  misc_feature (111)..(111): Xaa can be any naturally occurring amino acid
  unsure (1)..(113): unsure at all Xaa locations
MRKHRIVSLVAALLVLLALAAVSSTRSAQKESVADNAGMLAGGIKDVPANENDLQLQELARFAVNEHNQKANALLGFEKLVKAKTQVVAGTMYYLTIEVKDGVVKKLYEAXVW

SEQ ID NO: 2144 - protein, 359 aa, Glycine max; identical to SEQ ID NO: 1251

SEQ ID NO: 2145 - protein, 447 aa, Solanum tuberosum
MREILHIQGGQCGNQIGAKFWEVICAEHGIDSSGRYQGDSDLQLERLNVYYNEASCGRFVPRAVLMDLEPGTMDSVRSGPYGQIFRPDNFVFGQSGAGNNWAKGHYTEGAELIDSVLDVVRKEAENCDCLQGFQVAHSLGGGTGSGMGTLLISKIREEYPDRMMLTFSVFPSPKVSDTVVEPYNATLSVHQLVENADECMVLDNEALYDICFRTLKLTTPSFGDLNHLISATMSGVTCCLRFPGQLNSDLRKLAVNLIPFPRLHFFMVGFAPLTSRGSQQYRALTVPELTQQMWDAKNMMCAADPRHGRYLTASAMFRGKMSTKEVDEQMINVQNKNSSYFVEWIPNNVKSTVCDIPPTGLKMASTFIGNSTSIQEMFRRVSEQFTAMFRRKAFLHWYTGEGMDEMEFTEAESNMNDLVSEYQQYQDATAEEEGYDYEDEEDEPLES

SEQ ID NO: 2146 - protein, 319 aa, Bacillus cereus E33L
MYEMIPVTILTGFLGSGKTTLLNRILTENHGKKLAVIVNEIGQIGIDNQLIMNVEEEIMEMTNGCLCCTVREDLLVALKQLLDVKAEGKMDFDGLVIETTGLANPGPIIQTFFLDPVIQSAYQINGVVTVVDSYHIHKHFEKGLEAKEQIAFADVVLVNKLDLIEESEKDHLLHELQGINPTAKLIQSTHCDVDIPSLLKIQTFKTKDTLQIYPHKEHNHLEGVKSFVLREERPLDLQKLNEWMSAVVQELGEYLYRYKGILSIDGVDKRIVFQGVHTLFAASYDREWQEGEDRVSEVVFIGKDINKEWFQEHFEECVK

SEQ ID NO: 2147 - protein, 564 aa, Nitrosomonas europaea ATCC 19718
MTKFVFVTGGVVSSLGKGIAAASLAALLETRGIRVTILKLDPYINVDPGTMNPFQHGEVFVTDDGAETDLDLGHYERFISTKMTRQNNFTTGQIYESVIRKERRGDYLGGTVQVIPHITDEIKLFIRNGVSDAQVAIVEIGGTVGDIESLPFLEAIRQMSVQLPHHDTCFIHLTLLPYISSAGELKTKPTQHSVKELREIGIQPDVLLCRSDRPLPLEERRKIALFTNVREESVISAIDVDNIYKIPALLHEQMLDEIVCHRLDILARPANLTVWKKLVHALEHPEHEVSIALVGKYVDLTESYKSLSEALIHAGIHTRCKINIHYIDSENIEQHGTGCLTNMDAILVPGGFGKRGVEGKIMAISYARNHRIPYLGICLGMQLAVIEFSRNRLQLENAHSTEFDPDTPYPVLGLITEWRDRCGRVEKRSAQTDLGGTMRLGGQECLLKPHTLAHKIYGADKVIERHRHRYEVNAEFIPQLEQAGMHISGLSAEGDLCEMIELPQSEHPWFVACQFHPEFTSTPRNGHPLFKSYIQAAISFAGQSDRTKLHSRNVQESVTTDSSN

SEQ ID NO: 2148 - protein, 126 aa, Brassica napus
MDTGGNSLASGPDGVKRKVCYFYDPEVGNYYYGQGHPMKPHRIRMTHALLAHYGLLQHMQVLKPFPARDRDLCRFHADDYVSFLRSITPETQQDQIRQLKRFNVGEDCPVFDGLYSFCQTYAGYAL

SEQ ID NO: 2149 - protein, 210 aa, Glycine max
MASSSSMISNPVPNTDRSRDAKRRKKKAQLRQQQQRQEDQSNPKWKSQAQQQIYSSKLRQALARVNLGLAPPPRRGKAVRDAADRVLAVTAKGMTRWSRAILTNRLKLKFTKHKRQRLTTPPTRSKKPRVSVYRLKGKGSPGVQRKVRFLARLVPGCRKEPLPVILEEAIDYIPALEMQVRAMSALFNLLSGSSSSSGAAASPSAPPSSS

SEQ ID NO: 2150 - protein, 587 aa, Nitrosomonas europaea ATCC 19718
MKVKQRKFDVVIVGAGGAGMRAALQLSEAGFKVAVLSKVFPTRSHTVAAQGGIAASLGNVTEDDWRWHMYDTVKGSDYLGDQDAIEFMCRHAAEVVYELEHFGMPFDRLENGKIYQRPFGGQSLNFGGEQASRSCAVADRTGHAMLHTLYQRNVSANTQFFVEWLGLDLIRDHEGEVLGITALEMETGEIMILQARATLLATGGAGRIFEASTNAFINTGDGLGMVARAGIPLEDMEFWQFHPTGVYGAGILISEAVRGEGGYLVNAEGERFMERYAPHARDLASRDVVSRALITEIRQGRGCGPKEDHLLLKLDHLSAETITSKLPGIREIALKFAHVDPLVDPIPVVPTAHYMMGGIPANYHGQVVAPYKTSPDEVVPGLYAVGECACVSVHGANRLGTNSLLDIVVFGRAAGNQIIKDLTRNNHHKPLPPDAAEQTLTRLDRLETQKDGENVAATSEALRKTMQTHCGVFRFPDVLKEGVEKIGEVAERVRHTEICDKSRVFNTARVEALELDNLIEVAIATMIAAEARHESRGAHTRDDFPERDDQKWLRHSLFFSKDQRLDYKPVRLKPLTVESFPPKARTY

SEQ ID NO: 2151 - protein, 154 aa, Streptococcus thermophilus
MLNKIQQRNSDTYSVTPFNFFEDFRRNLFNDFFEDFSHNLFNDFKPNLIKTDIHETDNEYFVEAELPGIPKEDIQINYENGVLTISGQRQIDAATEDKKGKLIRNERSLTSVRRQYLLENVKEDEIKASYSDGILKVTLPKDSNKEIKTSIPIE

SEQ ID NO: 2152 - protein, 581 aa, Mesembryanthemum crystallinum
MVEGGVVKVDKTEFTECFRTVGKTPYIMRLAFSAGIGGLLFGYDTGVISGALLYIKEDFKEVAQKTWLQETIVAMAVAGAIVGAGLGGFLNDKFGRKPAMIVADILFLTGAIIMSVAPAPWVIIIGRIVVGLGVGMASMTAPLYISETSPAKIRGALGATNGLLITGGQFVSYLVNLGFTRVKGTWRWMLGVAAVPAAIQVVLMLTLPESPRWLYRQNKISEAEEILGRIYPPEQVKEEMDSLKTSIENEMADRKAVGEGNAFVRAKRAWDNKVVRRGLIAGISVLVAQQFVGINTVMYYSPTIIQLAGFASNSTALALSLVTSGLNAVGSIVSMMFVDRFGRRRLMIISMFAIITCLVVLSGLFYGAAQAAPKISQLESSHFGANSTCPAFASATSPDRWNCMTCLKASDCAFCSNSASEFHPGACVAQTSTMKNACLGEKRIYFTEGCPSKFGFMAIIVLGLYIITYSPGMGTVPWILNSEIYPLRYRGICGGIGAVTLWCANLIVSETFLTLTEALGSSGTFLLYAGFSLIGLIVIFLLVPETKGLPIEDIEKMLEKGFWPSLCGGNKDKDNKEEQQA

SEQ ID NO: 2153 - protein, 94 aa, Lactobacillus johnsonii NCC 533
MLQPIGDRVIVKVKDEEEEKVGGIVLASNAKEKPQMGEIIAVGNGKRNANGDLIPMSVAKGETVFFDKYSGTNLKYEGEKYLVLRESDLLAVVK

SEQ ID NO: 2154 - protein, 390 aa, Geobacillus kaustophilus HTA426
MREAVIVAGARTPVGKAKKGTLAHVRPDDLGALVVKETIKRAGNYEGNIDDLIIGCAMPEAEQGLNIARNIGALAGLPYTVPAITINRYCSSGLQAIAYAAERVMLGHSDTVIAGGVESMSMVPMMGHVVRPNARLAEEAPEYYMSMGHTAEQVAKKYGVSREDQDAFAVRSHQRAAKAIAEGKFNEEIVPVEVTVRKVEGNKLVEEKVVFTQDEGVRPDTNMETLAKLRPAFAVNGTVTAGNASQMSDGAAAVMVMDREKAESLGLKPLGKFRSFAVAGVPPEVMGIGPVAAVPKALKLAGLELSDIGLIELNEAFASQSIQVIRELGLDEDIVNVNGGAIALGHPLGCTGAKLTLSLLYEMRRRNVQFGIVTMCIGGGMGAAGVFELL

SEQ ID NO: 2155 - protein, 543 aa, Lactobacillus johnsonii NCC 533
MAKEIKFSENARHSLLKGVDKLADTVKTTLGPKGRNVVLEKSYGAPDITNDGVTIAKSIELENHFENMGAKLVSEAAQKTNDIAGDGTTTATVLTQAIVREGMKNVTAGANPVGIRRGIETATKAAVDELHKISHKVSTKDEIAQVASVSSASTEVGNLIADAMEKVGHDGVITIEESKGIDTELSVVEGMQFDRGYLSQYMVTDNDKMEADLDNPYILITDKKISNIQDILPLLQEIVQQGKSLLIIADDVDGEALPTLVLNKIRGTFNVVAVKAPGFGDRRKAMLEDIAILTGGTVISSDLGLELKDTKIDQLGKAGKVTVTKDSTTIVEGAGSKEAIAERVDQIKKQIADTTSDFDREKLQERLAKLAGGVAVIKVGAATETELKERKYRIEDALNATRAAVEEGYVAGGGTALVDVMKSIQGTVKGDSEDAETGVKIVMKALGAPVRQIAENAGKDGAVILDHLEHEDPEVGYNAATNKWENMVKAGIIDPTKVTRSALQNAASIAALLLTTEAVVADAPEDDKNQAPAAPNPGMGMGM

SEQ ID NO: 2156 - protein, 441 aa, Arabidopsis thaliana
  misc_feature (297)..(297): Xaa can be any naturally occurring amino acid
  unsure (1)..(441): unsure at all Xaa locations
MSPAIKAPLLPNQEPSSSSSENHGSFAGAVFNISTSIVGAGIMAIPAAFKVLGVIPSLSIIVIIAWLSNVSAGFLMKSSLAGESTTYAGVMKESFGKSGAVAVTVVTMVVTFGSMIIFSIIIGDVISGNEKDGIIHLGLLQEWFGSHWWNTRFFGLLFIFVFLFLPLVLCRRVERLAFSSAISFLLALLFVVISSVLAIIALVQGKTKPPRLFPELNDGGLSFFSLFTASPVIVTAFTFHFNVHPVAFELKDPLNVLSATRISVILCATIYSATGLFCYLLFGDSTMTDVLMNFDQXSTSSSVGSLLNDIVRLSYAIHLMLVFPLLNFSLRANLDELLFPMKLSLVEDNKRFFALTFPLLISCFLGAIAIPDIWYFFQFLGSTSTVSIAFIFPAAIVLRNVNGFSTLREKIVASVMLVLAVATSIIAISTNIYTFTATEET

SEQ ID NO: 2157 - protein, 215 aa, Glycine max
MMKVWNWYQNCLSVHPVKTQAISSAILWGVGYLSAQYITHSAAKKPLQLSDSDAKFTINWNRLVVTSMFGFGFVGPVGHFWYEGLDKFIRFKLQLKPKSVRSVATKVAMDGIIFGPLHLFVFFTYMGLCAGKNVAQVKDDLKRNYVPALILEGGVWPVVQVFNFWYLPVKYQLLYVNLFCLLDSVFLSWLEQQKDTPWKKWFASFHSTNEKGGRC

SEQ ID NO: 2158 - protein, 782 aa, Zea mays
MVRENLKTAQSRQRSYADRRRRELSFEVGDYVYLKVSPIRGIKREHQNIALMNLILLSTRNKRGALQGYAPRRLYINQRLASNQSHHSCLPLRVARMPANDHHPNGLLQESAPGLQHDDMENQQQQVCWERFLLKDTLNVLLVESDASTRQVVSALLRCCMYQVISAKNGQQAWSYLEDKGNNIDLVLTEVFMPGVSGISLLNRIMRHSVFKNIPVIMMSSSDDMSTVFKCLSKGAVDFLVKPIRKNELKNLWQHVWRQRCHSSSGSGSESGIQTQKCAKSKGVNESGNNSGSNDDEAGMGLNARDDSDNGSGTQAQNLWTKLAVEIDSPQATSLDQLADPPNSTCAQVIHSKSEICSNRWLPDKSNRNCKKPKNTNDDFKGKDLEIGGPENLYMGHQSSPNGRSIKAADHENNSKESMMENLEEPTVRAADLIGSMAKNMDTQQAARAAEDTPNFSSKVPEGKGKNNQNDKYVLPSLELSLKRSRSCGDGANNKNTVKDDEQRNCVLRRSNLSAFTRYHTSAASNQGGTGLVGSCSPHDNSSEAVKTDSTYNMKSNSDAAPIKQGSNGSSNDNDMGSTTKDVVTKPMLPSAIKANGYTSAFHPVQQWMVPANATAGKTKADENTARNHYVHFENGGSGALQCGSSNVFDPPLEGQATNNYGGVKAGSNSGSNKGQNNGSTAAANAGLAETEIQAMDKSGVGGGNGNGSGSGSGNDTYVRRLAANMTPRQAQLKKYREKKKDRNFGKKVRYQSRKRLADQRPRVRGQFVKQAVQNQDGARER

SEQ ID NO: 2159 - protein, 217 aa, Oryza sativa
MGRPPCCDNGVGVKKGPWTPEEDIILVSYIQQHGPGNWRSVPENTGLMRCSKSCRLRWTNYLRPGIKRGNFTPHEEGIIIHLQALLGNKWAAIASYLPQRTDNDIKNYWNTHLKKKELQEEQEGSAAAAAMASSIDGVSKDQDYHMCAVISGDDKSSSSEMMTAAAMAGHGEAATTTFSLLENWLLDDMPGQAAMSAAMDGFLEISAGYCCADPIMF

SEQ ID NO: 2160 - protein, 1938 aa, Bacillus sp.
MKKRFQRGMAGLLSILLIVSMFAGYLPARAAAETGDKRIEFSYERPDGNYEGWNLWVWGTGVKDDQIDFTEFKEGKAYADIAVSDNADKVGFIIRKGDWEEKDFDGDRSITINKIDNITKVHVTSQQEKFGQIPDGSPPVVADGNADFFFRDKELYAAGEMDKVEKVELSILGEKYEMNGEPEKERFTYTLSDLPTGEHEYTYLVTVDGQTEEVTDPYNTVDGRSVVEYVTSDVQVSASFIPAKVDYNQNAVVKVDIESETETKIREMSINLSEIGGKEKATIDPALNELTVAVKQGVTAGVKNLPITAIDEFGNRHEGSATLEVQARTITGEKADFDWDQSVVYFMLTDRFFDGDSSNNDPHGIGYDTSKSGTYQGGDFKGITQRLDYLDELGINTIWISPVVDNIKFDVRHSEGPDTPYYAYHGYWADNFGELNPHFGSMADFHEMIDAAHERGIKIMVDVVLNHTGYGLKPGDSSSVANFPTDEDRARFDGMLRDGGSGEVRGELAGLPDFLTENPDVREQVVQWQTDWIEKSRTAKGNTIDYFRVDTVKHVEDTTWMAFKNALTKAMPEHKLIGEAWGANVNDDLGYLNSGMMDSLLDFDFKNYARDFANGQLDAVQQKLEARNSKLNNTATLGQFLGSHDEDRFYEVVEGDLGKYQVAASLQLTAKGQPVIYYGEELGLPGKNDYPYYTNRQNMPWDDVDGNEILEHYQKLLAFRNDNPNTFAKGDRKKVAGSDSEGYLLFSRTYGENSVYVGLNTEAAAKDVTLNFGSSEAVVTDRYSGQEYQANEEGQVTFSIPAMEDGGTVLLEVENGAVPPVEEEPTEPGEIEENTLRIHYQRTDNSYENLGLWLWGDVAAPSENWPSGGTPFQAGNVTDYGAYVDVELAEDAQNIGFLVLNTTNGDKDGGDKAVELFSPDLNEIWIKQGSDEVFLYEPVDLPANTVRIHYERTNADYEGWGLWNWEDVESPSDGWPNGAADAAGIGKYGAYYDIKLKEDANKIGFLFVNKQSGGQTGDMTFDMLKQYNQLFVKEGEDKVYTNPYGTVPLALVSGEVLSDKLISLTFTRTEGLDLEELKEQLEIKDVDGNDVSFTDVTIEGEKTVHVHGEFDLEKIPFSVTYLDRTISVKSGWKLIDEMYAYDGKLGAELHEDGTATLKVWSPKADNVSVVLYDKVDQNEVVDTIEMVKGDRGVWSVKLTKDNTGLDSLKGYYYHYEITHGDVTNLALDPYAKSMAAWNNEAGDKVGKAAIVDIGSIGPELDYADIPGFEKREDTIIYEVHVRDFTSDPNIGEDLKAQFGTFASFVEKLDYIQELGVTHIQLLPVMSYYFSNEFESGERMLEYASTGTNYNWGYDPHNYFSLSGMYSENPEDPELRIKEFKNLINEIHKRDMGVVLDVVFNHTAQVHIFEDLVPNYYHFMDADGTPRTSFGGGRLGTTHEMSRRVLVDSIKHWVDEYKVDGFRFDMMGDHDAESIQIAFDEAKKLNPNIVMIGEGWVTFAGDEGEPVQAADQQWMQYTEAVGSFSDEFRNELKSGFGSEGQPRFITGGAVNVQQIFDNIKAQPHNFMADQPGDVVQYIEAHDNLTLYDVIAQSIKKDPEIAENDLEIHKRIRVGNAMVLTSQGTAFLHAGQEFGRTKQWRAPATEAPYKSTYMTDADGNPFVYPYFIHDSYDSSDIINRFDWEKATDAEKYPVNNVTRDYTAGLIELRRSSDAFRLGSRELVDSNVTMVDAPEIKEQDLVVAYRSVSTAGVEYYTFVNADTSSRTLTLGQDLTEGVVVVDAEEANVAGVAEPAGFELTAEGITLEPLTTVVVRVGEQEGTDPGDGDGDGNTPPPGDGDGDGNTPPPGDGDGDGNTPPPGNGNGNNPGTPPGKGGENPGKGKNDKTPPGKGGDNPGKGNKLPLTATGTLNYILFGAIMLVLGTLLYLGVRRKAGLKEKTL

SEQ ID NO: 2161 - protein, 652 aa, Helicobacter hepaticus ATCC 51449
MQKTSPHITDEDIPLLQKMSHTLGFLCADMVQKANSGHPGAPMGLSDIASVLHFHINLAPTQPQWLNRDRIIFSGGHASALVYSLLHLWGFEVSMADLHSFRQLDSKTPGHPEYRHTQGIEITTGPLGQGIANAVGMAMASKYAQNLFGREIISHNIYCLCGDGDLQEGISYEAASLAGHHALSNLILIYDSNHITIEGDTQLAMSEDIAKRFEAQGWEVLSCDGHDYIQIHNVLTNAKTSSKPILIIAHTIIAKNALSLEGSHKAHGAPLGEEIIATAKQKLSFPAESFYIPDDVALAFGTMKERGELNFAQWYKNYENLPQIAKERLDKMREPDVSHIVYPQFALGESMATRVSNGKILNSISQALEGFIGGSADLAPSNNTQLQDEGDFPQGKNWHFGIREHAMGAICNGVANYGLFLPFCATFFVFSDYMSPSVRVASLMKAKVYYIWTHDSIGVGEDGATHQPIEQLSHFRAMPNLLVFRPADANENIACWQVGLDSKLPCAFVLSRQNLPVIMESTPQLKKQVQKGGYVLRSCDNAVITLMASGSEVSLALKACETLEDLGIKTQVVSVPCLDLLLEQPKGYIKELCGKSAVLAIEASRGLEWYAVADEVIGMQSFGASGKGEALFNRFNFNIDYIIAAAQKLIQN

SEQ ID NO: 2162 - protein, 139 aa, Arabidopsis thaliana
  misc_feature (8)..(8): Xaa can be any naturally occurring amino acid
  misc_feature (68)..(68): Xaa can be any naturally occurring amino acid
  misc_feature (78)..(78): Xaa can be any naturally occurring amino acid
  misc_feature (85)..(85): Xaa can be any naturally occurring amino acid
  unsure (1)..(139): unsure at all Xaa locations
PYPIEMEXKRPCIVLSTIGISKPGKLEDKSTQQCATHLHQLHVCLPSSKNKTRLLYLMSLDFAPYIKXILPFMEHLWXAFAAEHXLFRSYLRLFLGRQVRRFNGAPQKQKPNKKDKLRYRYRQWRNTVDRGDEKLPFTV

SEQ ID NO: 2163 - protein, 118 aa, Asparagus officinalis
PPDQQRLIFAGKQLEDGRTLADYNIQKESTLHLVLRLRGGAKKRKKKTYTKPKKIKHKKKKVKLAVLQFYKVDDTGKVIRLRKECPNAECGAGTFMANHKDRHYCGKCGLTYVYQKGE

SEQ ID NO: 2164 - protein, 524 aa, Trametes sp. C30
MGRLQRFSAFVPLTLSFISQASAAIGPVTDLTISDADISPDGFTRAAVVMNDQFPGPLIAGNKGDNFQINVIDNLSNSTMLTSTTIHWHGFFQKGTNWADGAAFVNQCPISAGNSFLYDFTATDQAGTFWYHSHLSTQYCDGLRGPMVVYDPDDPHASLYDVDDDSTVITLSDWYHTAARLGARFPAGADSTLINGLGRAAGGDADAALAVFNVTQGSRYRFRLVSLSCDPNFNFTIQDHNMTIIEVDGVNVEPVTVDSIQIFAGQRYSFVLTADQDIGNYWIQAVPNTGTVTTDGGVNSAILRYDTADPIEPDAADPTSSIPLVETDLVPLENLAAPGDPTVGGVDLAMNLEFDFNGTWFFINGEPFVPPSVPVLLQIMSGAQSAADLLPSGSVYTLPANSTIEISFPMNTTAAPGAPHPFHLHGHTFYVVRSAGSTEYNYVNPPQRDTVSTGTDGDNVTIRFTTNNPGPWFLHCHIDFHLDAGFAIVLSEDTPDAASANTPSSAWDDLCPTYNTDYPDGLGR

SEQ ID NO: 2165 - protein, 675 aa, Bifidobacterium longum NCC2705
MADEFNPQGVDQTPRNNENPNSTADTGNAEPKNPFVGGDSVDAGNASDSSEQQAPVSSAALAADQQPTQAATDTAATEPIPDYASAKGESTVVSSSPASPAAPAAGQTSATTPLYRPAPEYGAYGPTPTQAQGQQGGQAGSNAQPTQQFPFGQPAQQTLQGQQGNRNPYYTNNPQPQGNGNPFNPPTQPQQNNGNPFASQSGQNGQNGQQPQQGGLFGFGTPGTGTPNGQGPTQPGQPGQPGPAKQGMSKTASNILIAVVAAVLAAALCLGLGYGALTSGLITLPTSNSLSNVSSNKSGSGSATAKSGEAPDWQTVASDVSGSVVSIQTALSNGTAKGSGAIIDTEGHIITNNHVISGAQQIQVTLANGNMYSATLVGTDTTTDLAVIKLDNPPSDLKAVEFADSDKLAVGENVMAIGNPLGYDDTATTGIVSALNRPVTVTDDNNNEIVTNAVQIDAAINPGNSGGPTFNAAGQVIGINSSIASTATSSDSAGSIGIGFAIPSNLVKRVADEIIKDGKVKHVALGVVIKSDTVEADGVTRGGATITKSSATGSAVVSGGPADKAGLKEGDTIVAFNGNAVNNNYSLLGYVRAAALGDKVTLTIVRDGKTMNVDVTLDQEESSVNGSSGSDSNGNSQNNQNNQNGNGQNGYGNGNGNSDGGTGDGGGFSDPFGLW

SEQ ID NO: 2166 - protein, 1070 aa, Magnaporthe grisea 70-15
MSDLHMSHITKWFTSSPPAEWAIKNLRQLLIGALRQGPIPRHVAFEMDGNRRYARSHKIETVAGHHMGFEALARVLEICYNCGVKVVTVYAFSIENFNRPKYEVEGLMQMAKYKLEQLLEHGEVLDRYGARVIISGQRDLIPPDVLGFVDRAVNETKHNKGEEITQAIRSTAVEYSSHPRPQNSAFSQTRIKQKILSKHAGNKEAALGSIQESPPPDDVDCSVSSGTTLPPGTPPSSDSTTQDVPRAFKNPETITAETLNNHMYTAECPPLDLFIRTSGVERLSDFMLWQCHQDTQIFFLKCLWPDFDLWYFLPVLFRKFMRDLPYLEVGKESPRTTALVGMKTARPAPAASAAADTPSGRRQPVRQTRTHGSRNTGGAGRAAGQRDSGASTGLGREQPAEIFPGITHFADTITALPKELVRHFTLLKEVDAKIHAPQQALFAAAERTLNAPPYDRLQPHVGHAGDFVSDSTAPNGVAPSTHQAVATPSGHGLANSAQSEADSFERRKLWRETGLKIQEMLLSLDEKNHVISTAVDALNKQLSRIDSVWPHLMEEFSDEAKWGSNTHWAYPENKAYKAGRALNAQAERSRREGAASLSAAAQQIAEEAAARSDARKQAVAAKKEKSNRAQAAHDSDAEDQDPKSRSESTRKPATSSKSRKPAAAAAAAAAAAAVAESPTPVGLGIANASPAVNNSTSKRRKVEKPNNTNGGAPMERAMSSVYGNSTTKPKTTSPRETPAPEGPTKKRKALPTAGNHSKKSRNGVANSPSIASSPVISNFPEPVVKAARNSPVPIPTPVTRAPTTSRAKVLPQNNNEAGRQRPPSSASNKPNGITATPIEPPVHTNGVRVSTEPKPVRETPVVAPIPKVESQKPDVVESTTAIPPPIIPPLQPKKEPVIKPNDTSRQGSKETTPSAHGANTTPSAPMVTTKSGRASKPSTPALGNFPDNVRARPSRTSGAANATTKRSHKKGAAAAAKANAAAQAPTKVGGDMAAGSKEDDDDDDEVEITYCYCDQPSYGEMIACDNRDCAYEWFHLPCVGLKAAPKGSVKWYCKYCKRNMGIPDDEHIGV

SEQ ID NO: 2167 - protein, 702 aa, Arabidopsis thaliana
MSGSVSGCGSGGCSIVWFRRDLRVEDNPALAAAVRAGPVIALFVWAPEEEGHYHPGRVSRWWLKNSLAQLDSSLRSLGTCLITKRSTDSVASLLDVVKSTGASQIFFNHLYDPLSLVRDHRAKDVLTAQGIAVRSFNADLLYEPWEVTDELGRPFSMFAAFWERCLSMPYDPESPLLPPKKIISGDVSKCVADPLVFEDDSEKGSNALLARAWSPGWSNGDKALTTFINGPLLEYSKNRRKADSATTSFLSPHLHFGEVAWANEGNEAGEESVNLFLKSIGLREYSRYISFNHPYSHERPLLGHLKFFPWAVDENYFKAWRQGRTGYPLVDAGMRELWATGWLHDRIRVVVSSFFVKVLQLPWRWGMKYFWDTLLDADLESDALGWQYITGTLPDSREFDRIDNPQFEGYKFDPNGEYVRRWLPELSRLPTDWIHHPWNAPESVLQAAGIELGSNYPLPIVGLDEAKARLHEALSQMWQLEAASRAAIENGSEEGLGDSAEVEEAPIEFPRDITMEETEPTRLNPNRRYEDQMVPSITSSLIRPEEDEESSLNLRNSVGDSRAEVPRNMVNTNQAQQRRAEPASNQVTAMIPEFNIRIVAESTEDSTAESSSSGRRERSGGIVPEWSPGYSEQFPSEENGIGGGSTTSSYLQNHHEILNWRRLSQTGYVKSAFGGAKGEEHHKGCNSGEIWLDCKPSTFGTV

SEQ ID NO: 2168 - protein, 196 aa, Mitthyridium sp. Streimann 27524
GGAKKVVISAPSKDAPMFVMGVNEEKYTNEDIVSNASCTTNCLAPLAKVINDKFGILEGLMTTVHATTATQKTVDGPSNKDWRGGRSAGTNIIPSATGAAKAVGKVLPELNGKLTGMAFRVPTTDVSVVDLTVRLEKPASYDAIKAALKEASQGKMKGILGYTEDDVVSSDFTTDSHSSIFDAKAGIALSDTFVKL

SEQ ID NO: 2169 - protein, 292 aa, Aquifex aeolicus VF5
MISAFVVTGFLGSGKTSLIINSVKEHLKDKKVAIVVNEFGEVGVDGKILKNVYSEVLELSEGCICCKLSAEFESSVRRLIQDYNPEVLIVETSGVAEPFPIVFSLKTLGLFVDGVICVIDSKNFPKYKEDDTAKYQLATSNVVVLNKTDLVSKEELEKVKEEVKKIKEKYKVVNMFSPEEKESFYKIYEATYGKVPAEVFKGVGKPVELKEHLHFHSHDSRKEEVVTFDRELTEEELVNFLKNLPKEVIRAKGIVKLKDYPFPVFVHYVFGDYDYGMPAENYEGESFLVLIR

SEQ ID NO: 2170 - protein, 306 aa, GIBBERELLA ZEAE PH-1
MKAAVVQAEPVWFDLAKTVEKTCKLIKEAASNGAQIVAFPELWLPGYPTWIWQVIIWRIMARPMDLEMSVKYIKNSMRVDSEEIQAIQSCAAENNIVVCVGFSESCGGSVYIAQCTIDSNGEILMTRRKLKPFHIERTLFGDGGGKSLDNVASTTVGRVGQLSCGVREDIHCAAWPCVPTHLGGPEPYSMSDEAVASISRVYSIQAQCYTLHSTTVITEPSIEQMGTKQAPVFNVPGGGNAKIFAPDGRQLTEDLPATEEGMVMADLDLDQITMHKSLLDICGHNGRPELLWLGRDSFEKLPVRSS

SEQ ID NO: 2171 - protein, 425 aa, Methanopyrus kandleri AV19
MIGIVLAAGEGTRMRPLTKTRPKVLLPVADRRLIDFSIEAMKRIGVEHLVVVVEYLAEKVERYVKDRWGDSFELEFVRQGKPLGTAHAVYVAWREIEPDETVVITNGDLVFDSELLERAVREHEGVASMVLVEVEDPSEFGVARLQDGYVVELVEKPKPEEAPSNLANAGVYVAEPEFERFLERVKPSPRGEFEITDALLDAAIDEGVLGISYDGFWSDVGRPWDLLDANAWALRNAMSRPEVEGVIEENVELRGPVWVAEDAILRSGAVVEGPAYIGPGCEIGPNCYIRPATTLVRDVRIGQAVEIKNSIIMEGTNVSHLSYVGDSVIGAKCNLGAGTIIANLRHDERNVKVVVKGELEDTGRRKFGAVLGDGVKTGINTSILPGRKLGPYSATAPSTVVRKNVPEGKMLVQGDQILVDWEGRG

SEQ ID NO: 2172 - protein, 629 aa, Candida albicans SC5314
MTPIQQTPSVHNTIDDSSNGFPNQISLGEYLFYRISQANPKLKSIFGIPGDFNLNLLEHVYSPIIAEREIKFINTCNELNCAYAADGYSRVIGGMSAMITTFGVGELSAINGIAGAFAEHCPVLHIVGTTSMKDRLRAPNEMINIHHLVPNHDPLKPPNHDVYKSMVENISVVQESLDYDTKKNLIKIDNVLKKIIQEARPGYLFIPCDVPDLPVPGKMLFSDPFTAATRYTNSILSKQVLNDVTNAILEKMYDAKNPSIFSDCLTTRFGFQNDLNRFIDQIPETVKLFTANLARNLDESRNNFVGVYNGNGSSDDKTKQEFESSDFILTLGFFPNEMNTGGHTSNFSMIKDVVIVHPDYIKVNHQIYHIKQNDGERLFTLGEFLCTLTEKFDPSKLSVAAAEPKKIYQYQPSQQYSPSNLDYIPQGKLIDHFNSTLKPNDLFILETSSFVFGLPDMKFPTNVQLLTSPYYGSIGYAVPATFGATLAVNDLKSDRRIIVVQGDGSAQMTVQELSSFVRYKEILPNMPHIYLINNDGYTIERKIKGPNRSYNDINGKWKWRNLLNVFGGVEGEMYDSCVLKNSSELDQFFNGDKTKPISSHKLQFYEIIAGKFDVPQRVDNMMCISKNKN

SEQ ID NO: 2173 - protein, 328 aa, Rubrobacter xylanophilus DSM 9941
MPIPVTVVTGFLGSGKTTLLSRLLRDPSLRNTAVLVNEFGEVGLDHHLLRPVAERTVLLESGCVCCSEREDLVAALGELLDLHQRGEVPSLDRVVVETTGLADPAPILHTVFSHPVLSHHFAVDLVITTVDAVNGRMQLEASPEATKQVAASDEVVITKTDLAGPGAREDLEGRIRAINPSARILEASFGEVDPQELLSPEARLGERGLPRLQEHDTASTHTVSVTFDGPVDWTAFGIWLSMLLHARGESVLRVKGLLDTGGPGPVVLNGVQHVIHPPEHLESWPDADRNTRVVFITRDIPEERILASLEAFRGLLGASAVPLGRVPT

SEQ ID NO: 2174 - protein, 174 aa, Zea mays
  misc_feature (167)..(167): Xaa can be any naturally occurring amino acid
  unsure (1)..(174): unsure at all Xaa locations
MAAAALAMAEQVVAELRVRCETPPSMLREVAVEMAREMGAGLEKDGGSRVKMLLSYVDKLPTGREEGLFYGLDLGGTNFRVLKVQLGGNAKHVVDRDSREVGIPPHLMSGSSSELFGFIASELAKFVDDDEKCANISNGKKREIGFTFSFPVKQRSVASGTLVKWTXAFSINDA

SEQ ID NO: 2175 - protein, 148 aa, Triticum aestivum
  misc_feature (53)..(53): Xaa can be any naturally occurring amino acid
  misc_feature (106)..(106): Xaa can be any naturally occurring amino acid
  misc_feature (108)..(108): Xaa can be any naturally occurring amino acid
  unsure (1)..(148): unsure at all Xaa locations
MASPSVFAGIAQGPEDPILGGTGAYNKGPSPGKGNLGVGAYRTEGGKALVPNXARAPSQSRSQTRQRVKEIWPTPDWADSTRWRAKLILGAASPVFKEIRGVPGQXLXGPGSLKGEGEFLAGTYHERTIYIPKPTWGNNPKVFTLPGL

SEQ ID NO: 2176 - protein, 492 aa, Arabidopsis thaliana
MSDLQANKDAAAVNRQSSSSSADLNGPSPMRKMISVASIAAGIQFGWALQLSLLTPYVQLLGVPHKWSSFIWLCGPVSGLLVQPSVGYFSDRCKSRFGRRRPFIAMGALLVAVAVVLIGYAADFGHSMGDKVDEPVKMRAVVIFALGFWILDVANNTLQGPCRAFLGDLAAGDAKKTRTANAFFSFFMAVGNVLGYAAGSYTNLYKIFPFTMTKACDIYCANLKSCFFLSITLLLVVTIIALWYVEDKQWSPKADSDNEKTPFFGEIFGAFKVMKRPMWMLLIVTALNWIAWFPFLLYDTDWMGREVYGGDSKGDDKMKKLYNQGIHVGGLGLMLNSIVLGFMSLGIEGISRKMGGAKRLWGAVNIILAVCLAMTVLVTKKAEEHRRIAGPMALPTDGIRAGALTLFALLGIPLAITFSIPFALASIISSSSGAGQGLSLGVLNMTIVIPQMVVSFGVGPIDALFGGGNLPGFVVGAIAAAISSVVAFSVLP

SEQ ID NO: 2177 - protein, 439 aa, Musa acuminata
MVNCAESCVPLSEVATSNTHGEDSPYFAGWKAYDEDPYDAASNPAGVIQMGLAENQVSFDLLEKYLDQHPGASGWGCGISGFRENALFQDYHGLQTFRQAIATFMEQIREGRAKFDPERIVLTAATAANELLTFILADPGDCLLIPTPYYPGFDRDLRWRTGVRIIPVHCSSSNGFQVTLQALEDAYVKAEGMKIRVRGLLLTNPSNPLGTAIARHVLEEVLDFVTQKDIHLISDEIYSGSVFSSDEFVSVAEIVEARGYKDCGRVHIVYSLSKDLGLPGFRVGAIYSYNDRMVTAARRMSSFTLVSSQTQRMLASMLADRGFTENYLKTNRERLKNRRDFITEGLKNAGIECLPGNAGLFCWMNLAPLLEEPTREGELRLWSLIVHEAKLNISPGSSCHCSEAGWFRVCFANMSQQTLEVALRRIKDFMKNMKAKQEK

SEQ ID NO: 2178 - protein, 532 aa, Adiantum capillus-veneris
MSEQGCYTDCWGAIWWIWESGIKAMAGLEGEIQTRRLRGREIPVLPPVTRSAAASAANVGYNENTRKTKVSTKRAAADDTSSRVASNVPVQHAKKRAALANLTNQSNSAITRNSSLPSKSHASAVNGKTRAAAGQVKEVQQVAQQVVEPLQEVGREPNTGRSSLANSSITFDNDENACPERATSSVGMKSRTLDVLQLVGNENKTVASLERKTQHSLYISKDTKPRARQGGLFEDCKDDNEEGGWSSKNYMDIDNHKDPQMCSAYAAEIYHHLRMAELKRRPSLNFMDTVQQDINASMRGILVDWLVEVAEEYKLVPDTLYLTISYIDRFLSGNLVTRQRLQLLGVASMLIASKYEEICAPQVDEFCYITDNTYNREEVLEMERSVLNHLHFELTGPTTKSFLRRFVRAAQAGQKSPTLQLEFLGNYLAELTLLEYGFLHFLPSMIAGAAVLVARVTLNPTWRPWNSTLQHYSGYKASELKECAKAILELQKNTKNCTLPAIREKYRQHKFKCVATLHPPASIPAEYFDDIE

SEQ ID NO: 2179 - protein, 115 aa, Oryza sativa
HSIKAICIVHNETATGVTNDLSAVRKILDKHRHPALLQVDGVSSMCALDFRMDEWGVDVALTGSQKALSLPTGLGIVCASPKALEASKTASRTSSRGTTASAPPPGWPWRRGGSR

SEQ ID NO: 2180 - protein, 416 aa, Salmonella enterica subsp. enterica serovar Typhi Ty2
MLEQMGIAAKAASYKLALLSSCEKNRVLEKIADELEAQMESILSANVQDVEQARANGLSEAMLDRLALTPARLKAIADDVRQVCNLADPAGQVIDGGLLDSGLRLERRRVPLGVVGVIYEARPNVTVDVASLCLKTGNAVILRGGKETHRTNAATVLVIQKALKACDLPEAAVQAIDNPDRSLVSEMLRMDKYIDMLIPRGGAGLHKLCREQSTIPVITGGIGVCHIFVDSSADIAPALKIIVNAKTQRPSTCNTVETLLVHQDIAERFLPALSKQMAESGVTLHGDETVMQALHGPAKLVALKPEELDNEFLSLDLNVVVVENMDGAIAHIREHGTQHSDAILTCDMHNAARFVNEVDSAAVYVNASTRFTDGGQFGLGAEVAVSTQKLHARGPMGLEALTTYKWIGFGDGTIRA

SEQ ID NO: 2181 - protein, 367 aa, Salmonella enterica subsp. enterica serovar Typhi Ty2
MSDSQTLVVKLGTSVLTGGSRRLNRAHIVELVRQCAQLHAAGHRIVIVTSGAIAAGREHLGYPELPATIASKQLLAAVGQSRLIQLWEQLFSIYGIHIGQMLLTRADMEDRERFLNARDTLRALLDNHIVPVINENDAVATAEIKVGDNDNLSALAAILAGADKLLLLTDQQGLFTADPRSNPQAELIKDVYGVDDALRSIAGDSVSGLGTGGMSTKLQAADVACRAGIDTIIASGSKPGVIGDVMEGISVGTRFHAQASPLENRKRWIFGAPPAGEITVDEGATAAMLERGSSLLPKGIKSVTGNFSRGEVIRICNLQGRDIAHGVSRYNSDALRRIAGHHSQQIDAILGYEYGPVAVHRDDMITR

SEQ ID NO: 2182 - protein, 335 aa, Zea mays
  misc_feature (264)..(264): Xaa can be any naturally occurring amino acid
  unsure (1)..(335): unsure at all Xaa locations
MGRAPCCEKVGLKRGRWTAEEDQLLANYIAEHGEGSWRSLPKNAGLLRCGKSCRLRWINYLRADVKRGNISKEEEDIIIKLHATLGNRWSLIASHLPGRTDNEIKNYWNSHLSRQIHTYRRKYTAGPDDTAIAIDMSKLQSADRRRGGRTPGRPPKASASRTKQADADQPGGEAKGPAAAASSPRHSDVVNPGPNQPNSSSGSTGTAEEEGPSSEDASGPWVLEPIELGDLVWGEADSEMDALMPIGPGGHDSAALEGLGAVGXEAQVDDLFDMDWDGFAAHLWGGPEQDEHSAQLRQAAEPLEVAAAAAAATAARTPDDRELEAFETWLLSDSF

SEQ ID NO: 2183 - protein, 459 aa, Geobacillus kaustophilus HTA426
MAYSYEQLEQWDKQYVWHPFTQMKQYAKERPLIIERGQGSYLYDVDGNRYLDGYASLWVNVHGHNDPELNAALREQLEKIAHSTLLGSANVPSILLAKRLLEYWPHMSKVFYSDTGAAAVEIALKIAYQYWKNIDPVQYAKKNKFVSLKEAYHGDTVGAVSVGGMETFHRIFAPLLFERIEVPSPYVYRMDEYGSEQEIVGYCLRELERVLEEQHDQIAAVVIEPLVQGAAGIIVHPRGFLKGVERLCRRYGVLFICDEVAVGFGRTGTMFACEQEEVKPDLVCLGKGITGGYLPLAATLVTEEIYAAFLGDVDEDKTFYHGHTYTGNQLTCSVALKNIELIEKRSLIDSVKRKARRLAEWLERLYEIPIVGDIRQKGLMCGIEIVKDRRTKEVFPRAAMVEHRIILEARRRGLVIRPLGPVLTFIPVLSMSEDEMAEAVRILFDSLACLYEQARAELL

SEQ ID NO: 2184 - protein, 213 aa, Populus tremula
MKSTLLAWFTFLLFAFVLSVPSIEASTEPVLDIQGEELKAGTEYIISSIFWGAGGGDVAATNKTCPDDVIQYSLDLLQGLPVTFSPASSEDDVIRVSTDLNIKFSIKKACDRSSVWKIQKSSNSEVQWLVTTGGEEGNPGCDTFTNWFKIEKGAGILGYKLVYCPEDICPSVGLCRDVGIYFETNRGRILSLSDKLSPFLVLFKKVGPLSSSI

SEQ ID NO: 2185 - protein, 420 aa, Zea mays
MAAASFTAAKFLAPAAARSGGDRAPFPAPSAFSMRSLRHRPARRLSSVLAVSSDVLKAAPAAAAYPAVTREEALELYEDMILGRNFEDMCAQMYYRGKMFGFVHLYNGQEAVSTGFIKQLNQPDCVVSTYRDHVHALSKGVPARAVMAELFGKATGCCRGQGGSMHMFSEPHNLLGGFAFIGEGIPVATGAAFAAKYRHEVLKQSSPDGLDVTLAFFGDGTCNNGQFFECLNMAQLWKLPIVFVVENNLWAIGMSHIRATSDPEIWKKGPAFGMPGVHVDGMDVLKVREVAKEAIERARRGEGPTLVECETYRFRGHSLADPDELRKPDEKTHYAARDSITALKKYIIEQNLATESELKSIEKKIDDVVEEAVEFVDASPLPPRSQLLENVFADPKGFGIGPDGKYRWEDPKFPQGPPQV

SEQ ID NO: 2186 - protein, 215 aa, Populus tremula
MKSTLLVWFSFLLFAFVLSVPSIEADTEPVLDIQGEELKAGTEYIITSIFRGAGGGDVAATNKTCPDDVIQYSLDVFQGLPVTFSPASSEDDVIRVSTDLNIKFSIKKACDRSSVWKIQKSSNSEVQWLVTTGGEEGNPGCDTFTNWFKIEKGAGTFGYNYKLVFCPEDICPSVGLCRDVGIYFESNRGRILSLSDKLSPFLVVFRKVGPLSSSI

SEQ ID NO: 2187 - protein, 250 aa, Nicotiana tabacum
MGKCYPTVSEEYLKAVDKCKRKLRGLIAEKNCAPLMLRLAWHSAGTYDVCSKTGGPFGTMRLKAEQGHGANNGIDIAIRLLEPIKEQFPILSYGDFYQLAGVVAVEVTGGPDVPFHPGREDKTEPPVEGRLPDATKGSDHLRDVFVKQMGLSDKDIVALSGGHTLGRCHKERSGFEGPWTTNPLIFDNSYFTELLSGEKEGLLQLPSDKALLSDPAFRPLVEKYAADEDAFFADYAEAHLKLSELGFAEA

SEQ ID NO: 2188 - protein, 479 aa, Pseudomonas syringae pv. tomato str. DC3000
MSTPRMKSYFSLIAAVLMLGQVATAQAENLPDFTGLVEQASPAVVNISTRQKLPDRAVANKQMPDLEGLPPMLREFLERSMPPGSRAPGAGKGDRQREAQSLGSGFIISPDGYVLTNNHVIDGADEILVRLSDRSELKAKLIGTDPRTDVAVLKIEGKDLPTAKLGNSNTLKVGEWVLAIGSPFGFDHSVTKGIVSAKGRSLPNDTYVPFIQTDVAINPGNSGGPLFNMAGEVVGINSQIFTRSGGFMGLSFAIPIDVAMDVANQLKASGKVSRGWLGVVIQEVNKDLAESFGLDKPAGALVAQVLEDGPAAKGGLQVGDVILSANGQPVVMSADLPHLIGNLKDGSKAELEVIRDGKRQKLTVTVGALPDEGLEMGGAAGASAERSSNRLGVSVIELTAEQKKTLDIKGGVAIKEVTDGPASLIGLQPGDVITHLNNQAITSGKQFTDVAKSLPKDRSVSMRVLRQGRATFITFKLSE

SEQ ID NO: 2189 - protein, 212 aa, Populus tremula
MKSTLLVWFSFLLFAFVLSVPSIEASTEPVLDIQGEELKAGTEYIISSIFWGAGGGDVAATNKTCPDDVIQYSLDLLQGLPVTFSPASSEDDVIRVSTDLNIKFSIKKACDRSSVWKIQKSSNSEVQWLVTTGGEEGNPGCDTFTNWFKIEKAGVLGYKLVYCPEDICPSVGLCRDVGIYFESNRGRILSLSDKLSPFLVLFKKVGPLSSSI

SEQ ID NO: 2190 - protein, 518 aa, Pycnoporus cinnabarinus
MSRFQSLLSFVLVSLAAVANAAIGPVADLTLTNAAVSPDGFSREAVVVNGITPAPLIAGQKGDRFQLNVIDNLTNHTMLKTTSIHWHGFFQHGTNWADGVSFVNQCPIASGHSFLYDFQVPDQAGTFWYHSHLSTQYCDGLRGPFVVYDPNDPQASLYDIDNDDTVITLADWYHVAAKLGPRFPLGADATLINGLGRSPGTTTADLAVIKVTQGKRYRFRLVSLSCDPNHTFSIDGHTMTVIEADSVNTQPLEVDSIQIFAAQRYSFVLDASQPVDNYWIRANPAFGNVGFAGGINSAILRYDGAPEVEPTTTQTTSTKPLNEADLHPLTPMPVPGRPEAGGVDKPLNMVFNFNGTNFFINNHSFVPPSVPVLLQILSGAQAAQDLVPDGSVYVLPSNSSIEISFPATANAPGTPHPFHLHGHTFAVVRSAGSSEYNYDNPIFRDVVSTGQPGDNVTIRFQTNNPGPWFLHCHIDFHLEAGFAVVLAEDTPDTAAVNPVPQSWSDLCPIYDALDPSDL

SEQ ID NO: 2191 - protein, 215 aa, Helicobacter hepaticus ATCC 51449
MKELFEGAIKFREEDFNEHKELYESLKKRQEPHTLLITCTDSRVVPNLITNSLPGDLFVIRNMGNIVPPYLGSDKGIRGGYLATTSGIEYALSILGIKNVIICGHSDCGACSAIYEPPEELEKAPYVKKWIELLEPVKQKVDALKPGSKAKRRWLMEQVNIEHQLENLMTYPFVEERFDRGELNIYGWYYIIETGEILNYNMIQREFKPINKIKS

SEQ ID NO: 2192 - protein, 213 aa, Populus tremula
MKSTLLAWFSFLLFAFVLSVPSIEASTEPVLDIQGEELKAGTEYIISSIFWGAGGGDVAATNKTCPDDVIQYSLDLLQGLPVTFSPASSEDDVIRVSTDLNIKFSIKKACDHSSVWKIQKSSNSEVQWLVTTGGEEGNPGCDTFTNWFKIEKGAGILGYKLVYCPEDICPSVGLCRDVGIYFESNRGRILSLSDKLSPFLVLFKKVGPLSSSI

SEQ ID NO: 2193 - protein, 286 aa, GIBBERELLA ZEAE PH-1
MADTYGMNGHNGHVKDRRSSSMNGRNRLYAQQEPQRTTHLSEFGKHMVAASGEFVGTFLFLYFGYAGNIVAVLQEPISGPNGTLANNTVMYIAMAYGFSLLVNVWTFYRISGGLFNPAVTFGLCLSGQLPWIRALFLFPSQIIAAMCAGGLVNAMFPGSASIANTTLGPNTSIAQGVFLEMFFTAQLVFVVLMLAAEKSRDTFLAPVGIGLALFVALIPGVFVTGGSANPVRSFGCAVGSRDFPGYHWIYWVGPLLGAALAAGYFRLVKMMHYEEANPGQDSPVDV

SEQ ID NO: 2194 - protein, 381 aa, Arabidopsis thaliana
MELLTTVASFFTPTTLFLLLNLMIGTIVVTSRLGSGSRKHYQHHDGFGSGHAPAPLARAPSIIDRVKSINFHLYKFPHPETELFSMTAHHDIIGSDLHVYPDPNPAPLQRAPSLLDRVKSINMSYFKFPHDVTGSDPHSHSHSHSHLDLHPDPAPAPLQRAPSLLDRVKSINMSYFKFQQYNPEENDYAHHTEPTRFESIPTRMGRVDPIDISKFRIPEEDQPTGTGVNSQINPPGLTRAPSILERVKSIKLSSFYRSDPDLDQKQNPDPVLHEEHKHVRSKSESKKPVKKKKKALTKMTKSASEKSGFGFAGSHAEAPETVESLERRRPDTTRVERSTSFGDGEDGVDAKASDFINKFKQQLKLQRLDSILRYKEMLKAH

SEQ ID NO: 2195 - protein, 741 aa, Arabidopsis thaliana
MASTSSLALSQALLARAISHHGSDQRGSLPAFSGLKSTGSRASASSRRRIAQSMTKNRSLRPLVRAAAVETVEPTTDSSIVDKSVNSIRFLAIDAVEKAKSGHPGLPMGCAPMAHILYDEVMRYNPKNPYWFNRDRFVLSAGHGCMLLYALLHLAGYDSVQEEDLKQFRQWGSKTPGHPENFETPGIEVTTGPLGQGIANAVGLALAEKHLAARFNKPDAEVVDHYTYAILGDGCQMEGISNEACSLAGHWGLGKLIAFYDDNHISIDGDTEIAFTENVDQLFEALGWHVIWVKNGNTGYDEIRAAIKEAKTVTDKPTLIKVTTTIGYGSPNKANSYSVHGAALGEKEVEATRNNLGWPYEPFQVPDDVKSHWSRHTPEGATLESDWSAKFAAYEKKYPEEASELKSIITGELPAGWEKALPTYTPESPGDATRNLSQQCLNALAKVVPGFLGGSADLASSNMTLLKAFGDFQKATPEERNLRFGVREHGMGAICNGIALHSPGLIPYCATFFVFTDYMRGAMRISALSEAGVIYVMTHDSIGLGEDGPTHQPIEHIASFRAMPNTLMFRPADGNETAGAYKIAVTKRKTPSILALSRQKLPHLPGTSIEGVEKGGYTISDDSSGNKPDVILIGTGSELEIAAQAAEVLRKDGKTVRVVSFVCWELFDEQSDEYKESVLPSDVSARVSIEAASTFGWGKIVGGKGKSIGINSFGASAPAPLLYKEFGITVEAVVDAAKSFF

SEQ ID NO: 2196 - protein, 767 aa, Xanthomonas campestris pv. campestris str. ATCC 33913
MAARAGGLRGWSTLVALAALVAASAAALQWLGVAGPWRIVTTAASVLALVCGICTAVAAYRASRTLSALTRQLDDTNTAQARMQQELQRHGELEQELLRAKQAAEAASLAKGEFLATMSHEIRTPLNGIIPMLELISRGQLSLDQRDMLQTATGSSLQLLRIVDDILDYSKLEANKLELEITTFNLRELLDGVAQLMQRTAEGKQLRLGLDIEPSVRLLVRGDPIRLRQVLGNLIGNAIKFTERGSVDIQLRRLGETRAQHLLRFQVRDTGIGIAADQQARLFRSFAQADASTTRLYGGTGLGLAICKRIIDLMGGRIGVESEPGRGATFWFEIPLLKVIGDLQQTTGADAARVMVISSDARLSQRLKRLLDSWGISHVLMETTQEALERVRRHTDDEGFRCVIADHETLRYSARAVHRALARPEDLSGSRLIWLYGDEPVPDELQANATLVPRQSPDETLRALVLPPEPKPSVAPTLASAMIPEPLPPPVAHARDVRILLVEDNPVNLLVAQKLLGVLGFEADTATDGEAALSSMESTRYDMVFMDCQMPVLDGYAATRRWRAMETESGGRPIPIVAMTANAMAGDRERCLAAGMDDYLSKPVAREQLNACLQRWLPRQALLPGPSTGAPSADAESAASAAQARALPILESGVIDELYEVAGADTIRILQLFLEDAPGIIEGLEAAASNRDSMHLRDLAHTLKSSSANVGAQALANAARRIELAARTGTIERPSVMVALVIAEYARARLALLGQVTRLQAASRAAG

SEQ ID NO: 2197 - protein, 98 aa, Leifsonia xyli subsp. xyli str. CTCB07
MSVSIKPLEDRIVIKQVEAEQTTASGLVIPDTAKEKPQEGVVEAVGPGRIDDNGNRVPLDVAVGDKVIYSKYGGTEVKFGGQDYLVLSARDVLAVVVR

SEQ ID NO: 2198 - protein, 327 aa, Bifidobacterium longum NCC2705
MGRMSERNEHNDGNTQTAYFAGGCFWGLERYFQNVDGVTDTTVGYAQSTVESPTYEQVCAGGTDAAETVKVEFDPAQVSLRTLTLLFLEVIDPFSVDQQGEDRGRQYRTGMFYTDETQRAVYVAALEQLVDRQPQRPAVLVEPLRNFYPAEAHHQDYLVNNPGGYCHVPIAAIANVKRRQKYVERIWDLTLEQFAVTQNAATERPFVNEYDEEFEPGIYVDIVSGEPLFSSQDKFDSGCGWPAFSRPIAGDLLTEHEDHRIPGRDRIEVRTSDTQIHLGHVFTDGPADRGGLRYCMNSAALRFVPRSRMAEEGYGDWISVVDGDEQA

SEQ ID NO: 2199 - protein, 196 aa, Mitthyridium sp. Wall 3652
GGAKKVVISAPSKDAPMFVMGVNEEKYTNEDIVSNASCTTNCLAPLAKVINDKFGILEGLMTTVHATTATQKTVDGPSNKDWRGGRSAGSNIIPSATGAAKAVGKVLPELNGKLTGMAFRVPTTDVSVVDLTVRLEKPASYDAIKAALKEASQGKMKGILGYTEDDVVSSDFITDSQSSIFDAKAGIALSDTFVKL

SEQ ID NO: 2200 - protein, 563 aa, Xanthomonas campestris pv. campestris str. ATCC 33913
MAFREALSPMTPLIFVTGGVVSSLGKGIAAASLASILEARGLKVTMMKLDPYINVDPGTMSPFQHGEVYVTDDGAETDLDLGHYERYVRTRLSRKNSVTTGRIYENVIRKERRGDYLGATVQVIPHITDEIRRCIDEATAGFDVALIEIGGTVGDIESLPFLEAIRQVRTERGAEKAMFMHLTLVPYIAAAGELKTKPTQHSVKELRSIGIQPDVLLCRSEQAVPDSERRKIALFTNVSERAVISCPDIDVLYGMPLELRRQGLDELVIDQFKLRDKVAAADLSEWEAVVDAVKHPLDEVTIAVVGKYVDHQDAYKSVAEALKHGGLRQRTKVNLTWLEAQDLEGSDMAALQGIDGILVPGGFGDRGFEGKVQTSKYAREHKVPYFGICYGMQAAVVDYARHVADLDAANSTENDRQSPHPVIGLITEWRTATGEVEKRDEKSDLGGTMRLGLQEQRLKPGTLAREVYGKDVVAERHRHRYEFNNRYRTQLEDAGLVICGKSMDDTLVEMVELPRDTHPWFLACQAHPEFLSTPRDGHPLFIGFVRAAREKKAGGKLLKEARA

SEQ ID NO: 2201 - protein, 135 aa, Desulfotalea psychrophila LSv54
MNSKNQYGVIPYIKTKKSLKIFLITSRTNGYWILPKGHLVKKKSCIESAAQEAFEEAGIIGCIEGKKSYLIKYQHHGTKYKIQFFPMEVTEILKKWPEQHQRIRKLVSLNRAHELIELGSIQKCLRQWQDDLSRK

SEQ ID NO: 2202 - protein, 287 aa, Samanea saman
MAKDVEVAERGSYSAKDYHDPPPAPLIDAEELGKWSFYRALIAEFIATLLFLYITVLTVIGYKSQSDTKAGGDVCGGVGILGIAWAFGGMIFILVYCTAGISGGHINPAVTFGLFLARKVSLIRAILYMVAQCLGAICGVGLVKAFQKAYYSRYGGGANTLSDGYSTGTGLGAEIIGTFVLVYTVFSATDPKRSARDSHVPVLAPLPIGFAVFMVHLATIPVTGTGINPARSLGAAVIFNQQKAWDDHWIFWVGPFIGAAIAAFYHQFILRAGAAKALGSFRSNPSV

SEQ ID NO: 2203 - protein, 630 aa, Magnetococcus sp. MC-1
MCGLSAILDLTGQRLPEAEQLTAMTRALAHRGPDGEGMHREPGVGLGHRRLSIIDLAGGAQPLWNEDRSVAVVFNGEIYNFPDLMQRLQGLGHQFHSRSDTEVIVHAWEQWGEQCVEALQGMFAFALWDRCQGVLFVARDRLGIKPLYYGFSEDGWLLVGSELKALTAHPGLSRSLDPKGVMDYFAYGYIPDPHSIYRQVKKLEPGYCARFTLGSGDWRLRCYWDLSFAAQPLTEAAALQQLQELLGQTVQSHTLADVPLGAFLSGGVDSSLITALLAKQSQTPLQALTVAFTGSREDEAPHARAVAQHLGVQQQLLTVDPLDFERLERLPGLYDEPFADSSAWPTFLLCEAAASRMKVVLSGDGGDELCAGYSRYRLFMAEQQVRQRVPSWLRRGLFGPMGMLYPKLDNAPRWLRAKSTLQALGEGPLEGLFRGASMMDPAMGQGLLAPDLMLLDYHPIEHFYRLNARLPEQVAFHDRMLYLDFKTFLAGRVLTKVDRASMAVGLEVRVPLLDHRLVEWAGRLPWCLKMQGGQGKYLLKKLAAQQVPATAVYRSKQGFIPPLAAWLRGPLQERLQDRLSSRVITESGLFHPRWIHWMLEQHRKKKQDLSMPLWSLLMFEGMLRKAQNKG

SEQ ID NO: 2204 - protein, 317 aa, Sinorhizobium meliloti 1021
MEFRNVKPDLLLVEPMMPFVMDELQRNYSVHRLYQAADRPALEAALPSIRAVATGGGAGLSNEWMEKLPSLGIIAINGVGTDKVDLARARRRNIDVTTTPGVLADDVADLGIALMLAVLRRVGDGDRLVREGRWAAGEQLPLGHSPKGKRIGVLGLGQIGRALASRAEAFGMSVRYWNRSTLSGVDWIAHQSPVDLARDSDVLAVCVAASAATQNIVDASLLQALGPEGIVVNVARGNVVDEDALIEALKSGTIAGAGLDVFVNEPAIRSEFHTTPNTVLMPHQGSATVETRMAMGKLVLANLAAHFAGEKAPNTVN

SEQ ID NO: 2205 - protein, 552 aa, Ralstonia metallidurans CH34
MKARKAGRSDNAREATGNDAEMGEGCPLHWFDADLGAFDDLERRVAEHPADFFAGQDFDPVGACATREASFASVQIPEDPTAPQQHADHLLNDVFRHVMPVASPTFVGHMTSSLPSFMPSLAKIVAALNQNVVKLETSGALTGLERQVIGMLHHLVFARDDAFYAQWLHNAEHSLGAFCSGGTTANLTALWASRNNTLRARDGFAGINQAGLVAALRHYGYAGLAIVVSERGHYSLRKAADILGIGRENLVPVGVDEDGRMRVDLLRDTLRDLQQRNIRTVAIVGIAGTTETGAVDPLDAIADVAQEIGCHFHVDAAWGGATLLSARERARFAGIERADSVVIDAHKQFYVPMGAGMVLFRDPAWTQDIIQHANYIVRKGSVDLGRHTLEGSRGSAAVMLYANLHLLGRKGLAKLIDTGIDNAKYFASLIEQQPDFELDSRPQLCILTYRYVPAPVRAALLSASPEQREQLLEALDALTINIQEMQRDAGRSFVSRTQLTSSQWGGRPIAVFRVVLANPDTTHEILQSLLEEQRGLAKQSPMLPALMAMVGG

SEQ ID NO: 2206 - protein, 376 aa, Rubrobacter xylanophilus DSM 9941
MVPGRGDAPAGGARRICRGLLAALALLAALAVSGCSEEHPEGAVRQHEQSRGAAPPARLTSGEDGWPVDEAAREVEPSVVQINVEEIQRTIFGPRRLQGLGSGVIYREDGYIITNAHVVEGAEEVNVAFADGSTRRGRVLGADSFTDIAVVKVDREGLPAADFAEELDLRAGELVLSVGSPSGFESTVTAGVVSGLDREIPARLTGGVQIPSLTGLIQTDAAISPGSSGGALANAGGEVVGINVAYLPPQTGAVNIGFAIPAPVATSVADQIIERGEAVHPYLGVSLASLTPQIAERFGLPVESGALVVSVAPGSPAARAGIEPRDVITRLEERRISDAGDLIAALRAYRPGETVRLTVFSGGESRQVEVRLGERS

SEQ ID NO: 2207 - protein, 134 aa, Brassica napus
  misc_feature (25)..(25): Xaa can be any naturally occurring amino acid
  unsure (1)..(134): unsure at all Xaa locations
VDPRVRGNAKVVFNKEGDVAAYMIXAVDDPRPLNKTLYISPPKNTLSMNELVALWEKKIGKSLEKTYLSEEQVLKTIQVSPVVPATILLSINHSVFVKGDQTNFTIEPTLGVEACELYPDVKYTSIEEYLSHFA

SEQ ID NO: 2208 - protein, 257 aa, Pseudoroegneria strigosa subsp. aegilopoides
CELDNIMRLTGITGIVNGMDVSEWDPTKDKFLAVNYDVTTALEGKALNKEALQAEVGLPVDRKVPLVAFIGRLEEQKGPDVMIAAIPEIVKDEDVQIVLLGTGKKKFERLLKSVEEKFPGKVRAVVRFNAPLAHQMMAGADVLTVTSRFEPCGLIQLQGMRYGTPCACASTGGLVDTIVEGKTGFHMGRLSVDCNVVEPADVKKVVTTLKRAIKVVGTPAYQEMVKNCMIQDLSWKGPAKNWEDVLLELGVEGSEPG

SEQ ID NO: 2209 - protein, 545 aa, Escherichia coli
MTTNYIFVTGGVVSSLGKGIAAASLAAILEARGLNVTIMKLDPYINVDPGTMSPIQHGEVFVTEDGAETDLDLGHYERFIRTKMSRRNNFTTGRIYSDVLRKERRGDYLGATVQVIPHITNAIKERVLEGGEGHDVVLVEIGGTVGDIESLPFLEAIRQMAVEIGREHTLFMHLTLVPYMAASGEVKTKPTQHSVKELLSIGIQPDILICRSDRAVPANERAKIALFCNVPEKAVISLKDVDSIYKIPGLLKSQGLDDYICKRFSLNCPEANLSEWEQVIFEEANPVSEVTIGMVGKYIELPDAYKSVIEALKHGGLKNRVSVNIKLIDSQDVETRGLEILKGLDAILVPGGFGYRGVEGMITTARFARENNIPYLGICLGMQVALIDYARHVANMENANSTEFVPDCKYPVVALITEWRDENGNVEVRSEKSDLGGTMRLGAQQCQLVDDSLVRQLYNAPTIVERHRHRYEVNNSLLKQIEDAGLRVAGRSGDDQLVEIIEVPNHPWFVACQFHPEFTSTPRDGHPLFAGFVKAASEFQKRQAK

SEQ ID NO: 2210 - protein, 254 aa, Pseudoroegneria libanotica
DNIMRLTGITGIVNGMDVSEWDPTKDKFLAVNYDVTTALEGKALNKEALQAEVGLPVDRKVPLVAFIGRLEEQKGPDAMIAAIPEIVKDEDVQIVLLGTGKKKFERLLKSVEEKFPGKVRAVVRFNAPLAHQMMAGADVLTVTSRFEPCGLIQLQGMRYGTPCACASTGGLVDTIVEGKTGFHMGRLSVDCNVVEPADVKKVVTTLKRAIKVVGTPAYQEMVKNCMIQDLSWKGPAKNWEDVLLELGVEGSEPG

SEQ ID NO: 2211 - protein, 173 aa, Glycine max
  misc_feature (69)..(69): Xaa can be any naturally occurring amino acid
  misc_feature (89)..(89): Xaa can be any naturally occurring amino acid
  misc_feature (108)..(109): Xaa can be any naturally occurring amino acid
  misc_feature (114)..(114): Xaa can be any naturally occurring amino acid
  misc_feature (121)..(121): Xaa can be any naturally occurring amino acid
  misc_feature (123)..(123): Xaa can be any naturally occurring amino acid
  misc_feature (131)..(131): Xaa can be any naturally occurring amino acid
  misc_feature (136)..(137): Xaa can be any naturally occurring amino acid
  unsure (1)..(173): unsure at all Xaa locations
ETSNGDVLIFPDMIRYRRLTHFDVETFVEEVLVKEGNWLPGNPESLKASYVFVCSHGSRDRRCGVFGPXLGNVIIFGSSINREVTGHLXGGDSPWYGYVTPDDVPLLXXQHIIXGEIFDSXWXRGQIGLSXDDQKXXHEQALGGLRCMVLAAQLSCCKTLCCCFSCRFLQGLF

SEQ ID NO: 2212 - protein, 243 aa, Glycine max
MAFPDPSMSASPQRKMGRGKIEIKRIENTTNRQVTFCKRRNGLLKKAYELSVLCDAEVALIVFSSRGRLYEYANNSVKATIERYKKASSDSSGAGSASEANAQFYQQEADKLRQQISNLQNNNRQMMGDSLGSLTAKDLKNLETKLEKGISRIRSKKNELLFAEIEYMQKREIDLHNNNQLLRAKIAESERNHHNMAVLPGGSNYDSMQSSQQQFDSRGYFQVTGLQPNNQYARQDQMSLQLV

SEQ ID NO: 2213 - protein, 255 aa, Hordeum vulgare subsp. vulgare
MEDERSTQSYQGAEADQVEVTDRGLLGNLLGKKKEEEDKKKEEELVTGMEKVSVEEPEVKEDGEKKETLFSKLHRSSSSSSSSSDEEEEEEVIDENGEVIKRKKKKGLKEKLKEKLPGHKDNEAEHVTGLPAPMAPASVQTHHDTDVVVEKIDGDAKTEATPAVPEEEKKGFLEKIKEKLPGGHKKPEDAAAVPVTHAAPAPVHAPAPAAEEVSSPDAKEKKGLLGKIMDKLPGYHKTGEEDKAAAPSGEHKPRA

SEQ ID NO: 2214 - protein, 255 aa, Triticum aestivum
  misc_feature (213)..(213): Xaa can be any naturally occurring amino acid
  misc_feature (226)..(227): Xaa can be any naturally occurring amino acid
  misc_feature (233)..(233): Xaa can be any naturally occurring amino acid
  misc_feature (235)..(235): Xaa can be any naturally occurring amino acid
  misc_feature (242)..(242): Xaa can be any naturally occurring amino acid
  misc_feature (248)..(249): Xaa can be any naturally occurring amino acid
  unsure (1)..(255): unsure at all Xaa locations
LDVLLAERRVDEALDALDEAERIAVDAEKQQTLATADIVALKEIISDNRQKLSDQLAEAACQSSTCGIELRAAASALKRLGDGPRAHSLLLSAHNQRLQSKIQTTRPSSTGHSVAYTASLAKQVFSVIANALSDSMEVFGNEPSYTSELVTWATKQAMEFTLLVKRHALGSCAAAGGLRAAAECVQIALGYTSLLEARGLSLSAVLLKQFRPXVEQALDSNLRRIXXTTSALXAXDDWALIXPPTGIXXLLNICW

SEQ ID NO: 2215 - protein, 257 aa, Elymus repens
CELDNIMRLTGITGIVNGMDVSEWDPIKDKFLAVNYDVTTALEGKALNKEALQAEVGLPVDRKVPLVAFIGRLEEQKGPDVMIAAIPEIVKDEDVQIVLLGTGKKKFERLLKSVEEKFPGKVRAVVRFNAPLAHQMMAGADVLAVTSRFEPCGLIQLQGMRYGTPCACASTGGLVDTIVEGKTGFHMGRLSVDCNVVEPADVKKVATTLKRAIKVVGTPAYQEMVKNCMIQDLSWKGPAKNWEDVLLELGVEGSEPG

SEQ ID NO: 2216 - protein, 221 aa, Oryza sativa
  misc_feature (197)..(197): Xaa can be any naturally occurring amino acid
  unsure (1)..(221): unsure at all Xaa locations
MESSAAEMNPFPPIRKDTDGDNFDTLWDVYPALWLTGAWVGGAQVSVTLEPRSQISSRQQSSRGNASATATRGGGGGGGGKGGGNGKAAAAGKKPIKVVYISNPMRVRTSAAGFRALVQELTGRNADPSKYSPRASAGDDGGGATALPDTGAASDADALEAGAAPGRHPAETATFDEGGGGGGGGYDDDDDDVFRSXLLDTSYSVFSPPTLLYDDHPHSKV

SEQ ID NO: 2217 - protein, 213 aa, Populus tremula
MKSTLLAWFSFLLFAFVLSVPSIEASTEPVLDIQGEELKAGTEYIISSIFWGAGGGDVAATNKTCPDDVIQYSLDLLQGLPVTFSPASSEDDVIRVSTDLNIKFSIKKACDRSSVWKIQKSSNSEVQWLVTTGGEEGNPGCDTFTNWFKIEKGAGILGYKLVYCPEDICPSVGLCRDVGIYFESNRGRILSLSDKLSPFLVLFKKVGPLSSSI

SEQ ID NO: 2218 - protein, 255 aa, Salmonella enterica subsp. enterica serovar Typhi Ty2
MSGLKITLLQQPLVWMDGLANLRHFDRQLELVSGRDVIVLPEMFTTGFAMEAANNSLSQDSVITWMQAKARQTDALIAGSAALQTERGAVNRFLLVEPEGKVHLYDKRHLFRMADEHQHYAAGDKRIIVQWRGWRILPLICYDLRFPIWSRNRNDYDLALYVANWPAPRSLHWQTLLTARAIENQAYVAGCNRVGTDGNGLHYRGDSRIINPQGDIIATAEPHQATRIDADLSLVALQDYREKFPAWRDADPFTL

SEQ ID NO: 2219 - protein, 256 aa, Elymus repens
ELDNIMRLTGITGIVNGMDVSEWDPTKDKFLAVNYDITTALEAKALNKEALQAEVGLPVDRNVPLVAFIGRLEEQKGPDVMIAAIPEIVKEEDVQIVLLGTGKKKFERLLKSVEEKFPGKVRAVVRFNAPLAHQMMAGADLLAVTSRFEPCGLIQLQGMRYGTPCACASTGGLVDTIVEGKTGFHMGRLSVDCNVVEPADVKKVATTLKRAVKVVGTPAYQEMVKNCMIQDLSWKGPAKNWEDVLLELGVEGSEPG

SEQ ID NO: 2220 - protein, 478 aa, Helicobacter hepaticus ATCC 51449
MSKKFTTATGTPLGDNQNSITAGKKGPTLLQDTWLLEKLAHFDRERIPERVVHAKGSAAYGELTITNDITQYTKAELFNKVGKKTKAFLRFSVVAGERGAADAERDVRGFALKLYTNEGNWDIVGNNTPVFFIKDAIKFPDFIHTQKRDPKTNMKSPTAMWDFWSLHPESLHQVTILMSDRGIPRSYREMHGFGSHTYSFINAKNERFWVKFHFVCLQGIHNLTNKESEAVIAKDRESHQKDLFENIEKGNFPKWRFCIQVMSEKEAENYRFNPFDLTKVWSHKDYPLIEVGILELNKNPENYFAEVEQAAFNPANIVPGVGYSPDKVLQGRLFSYGDTQRYRLGINHTQLPVNAPIVPVNNTHRDGFMQQGQFGDRRNYEPSYFNDYVEDKNALEPPLFVQEGDVMYKYDHREYEDDYFVQAGDLYRLMTAEQKEALCQNIKESMEGVPDEIKKRQLEHFKKADKAYGKRVAELLGL

SEQ ID NO: 2221 - protein, 318 aa, Vibrio vulnificus YJ016
MNKAHSRAEEYPMNKLVVLGSVNADHVLQVPSFPRPGETLHGRNYQVIPGGKGANQAVAAARLGADTGFIACVGDDSFGINIRENFKLDGIQIDGVKMQPNCPTGIAMIQVSDSGENSICISAEANAKLTEAAIESDLPRIRDARFLLMQLETPICGIELAAREAKAAKTNVILNPAPARTLSDELLACIDVITPNETEAQVLTGIEVVDNESAQQAANVLHQKGIEIVMITLGSKGVWLSENGRGQRICGFKVDVTDTTAAGDTFNGALVTGLLEDMPLESAIKFAHAAAAISVTRFGAQTSIPTRKEVDEFLAAHS

SEQ ID NO: 2222 - protein, 147 aa, Streptococcus pneumoniae TIGR4
MYRVCSSRLGLEGANSAELAPETKYPIIDIMRDQIDIEDMGGTLRLGLYPSKLKRGSKAAAAYHNQEVVQRRHRHRYEFNNAFREQFEAAGFVFSGVSPDNRLVEIVEIPENKFFVACQYHPELSSRPNRPEELYTAFVTAAVENSN

SEQ ID NO: 2223 - protein, 580 aa, Debaryomyces hansenii CBS767
MSSSPAANEYDALEVIGKGSYGTVRKVQEKSSGEIFVRKEIEYNSMNNQERNQLISELRILRELNHPNIVKYFRHDHIMQKKSIHIYMEYCDGGDLAQVISNFRKNKEMVPEEFIWQVLVQTLLALHRCHYGIDAKKVNLFSNPVDDKEPTIDSETVVIHRDIKPDNIFMLNSGKSIKLGDFGLAKMLTSQNDFAKTYVGTPYYMSPEVLMDNPYSPVCDIWSLGCVLFELCTLQPPFQAKTHLQLQSKIKQGIIPDLPGIYSSQLRSIIKECITVDPELRPSCYDLLETLSIRFLRKEMELKEINTNLNEFQKQLLTKNDELKKKESLLNNIERKIFAQREDLENEYNNMQKKCNSQKKQLEEELIEEFEMRKKSMDQEAKEVRLGYQREFKMVVEHEVQLRLKDILGKQKHQQQQQQQQQHLQQHQQQHQHQNQHQHPQYQQPQPYQELSRKKSDPLSSPSPSKATTRNTLYLANHYAAPNEHVVLPNKPKGPKELQLDDQSKLLSPQLTRRIPLKTRNSENSDYDSNGYYSDQYKSSPTRFLGNNYKKRVTDELERLSLEKRNIPEFEELYIRKNRH

SEQ ID NO: 2224 - protein, 396 aa, Streptococcus pneumoniae TIGR4
MSTKYIFVTGGVVSSIGKGIVAASLGRLLKNRGLKVTIQKFDPYINIDPGTMSPYQHGEVFVTDDGAETDLDLGHYERFIDINLNKYSNVTTGKIYSEVLRKERRGEYLGATVQVIPHITDALKEKIKRAALTTDSDVIITEVGGTVGDIESLPFLEALRQMKADVGADNVMYIHTTLLPYLKAAGEMKTKPTQHSVKELRGLGIQPNMLVIRTEEPAGQGIKNKLAQFCDVAPEAVIESLDVEHLYQIPLNLQAQGMDQIVCDHLKLDAPAADMTEWSAMVDKVMNLKKQVKISLVGKYVELQDAYISVVEALKHSGYVNDAEVKINWVNANDVTAENVAELLSDADGIIVPGGFGQRGTEGKIQAIRYARENDVPMLGVCLGMQLTCIEFARHV

SEQ ID NO: 2225 - protein, 213 aa, Populus tremula
MKSTLLVWFSFLLFAFVLSVPSIEASTEPVLDIQGEELKAGTEYIISSIFWGAGGGDVAATNKTCPDDVIQYSLDLLQGLPVTFSPASSEDDVIRVSTDLNIKFSIKKACDRSSVWKIQKSSNSEVQWLVTTGGEEGNPGCDTFTNWFKIEKGAGILGYKLVYCPEDICPSVGLCRDVGIYFESNRGRILSLSDKLSPFLVLFKKVGPLSSSI

SEQ ID NO: 2226 - protein, 166 aa, Zea mays
MNALAATTRNFRRASKLLGLDSKLEQSLLIPFREIKVECTIPKDDGSLATFVGFRVQHDNARGPMKGGIRYHNEVDPDEVNALAQLMTWKTAVAAVPYGGAKGGIGCSPGELSRSELERLTRVFTQKIHDLIGTHTDVPAPDMGTNAQTMAWMLDEYSKFHGHSPA

SEQ ID NO: 2227 - protein, 118 aa, Brassica napus
MSLIRRSNVFDPFSLDLWDPFEGFPFGSGSSSSLFPSFPRTSSETAAFAGARIDWKETPEAHVFKADVPGLKKEEVKVEVEDGNVLQISGERNKEQEEKTDNWHRVERSSGRFLRRFR

SEQ ID NO: 2228 - protein, 215 aa, Populus tremula
MKSTLLAWFSFLLFAFVLSVPSIEADTEPVLDIQGEELKAGTEYIITSIFRGAGGGDVAATNKTCPDDVIQYSLDVFQGLPVTFSPASSEDDVIRVSTDLNIKFSIKKACDRSSVWKIQKSSNSEVQWLVTTGGEEGNPGCDTFTNWFKIEKGAGTFGYNYKLVFCPEDICPSVGLCRDVGIYFESNRGRILSLSDKLSPFLVVFRKVGPLSSSI

SEQ ID NO: 2229 - protein, 763 aa, Zymomonas mobilis
  misc_feature (463)..(463): Xaa can be any naturally occurring amino acid
  misc_feature (467)..(467): Xaa can be any naturally occurring amino acid
  unsure (1)..(763): unsure at all Xaa locations
MAETTTAEAKKNAGDAPLIDLNETSIRKFITQPKKTEYVTYDQLNEALPQDQDVFGTDRKYNVCPFVNGHQYRKNEDSGQDGQQEEENAAKKLQGQRWHFSGSGHYDQRKKHPTEQMIRCVCISAKWVRSSFWSREGEIAIAKRIEAGRDTMILGLCESPITFDNIIEWSNALNEGTLQLREIIDLDAMLTQGPSPDQFEEDGDDNDNEISERNAGPTFKEDDDEDDDSEGELDENGQRIQRENMDEEDENTLSLAQMEEQLKPASLEKFAKIADLYRQFSVLQNARMRALGANEEFPEDQENAYQQLREELTAEVESVKFHNARIEFLVEQLYNYNSRLRTLNGQMLRLAERYKVPRDSFLNAYLGNEMEEGWVERVFKNRQKMGNFTTSEAESIERIRSEVAEIAQVTGMTVKELRRIVTMVQKGRKRSPHSLKPEWLKPICVWLSLLPKNIPIAVCSSLXLFRXAISGLMKAVGKFEYRRGYKFSTYATWWIRQAITRSIADQARTIRIPVHMIETINKLVRTSRQILHEIGREPTPEELAERLSMPLEKVRKVMKIAKEPISLETPIGDEEDSHLGDFIEDKNAIIPVDAAIQANLKETVTRVLASLTPREERVLRMRFGIGMNTDHTLEEVGQQFSVTRERIRQIEAKALRKLKHPSRSRKMRSFPRPLENTAFSALSIKKPFETRCFSGVSKGFFDFRRRADDGGSLRLPIYESGLMFQPYPDQRSYGRLLTGDNKHEQKGASFLRRSSEFYALHHP

SEQ ID NO: 2230 - protein, 718 aa, Blumeria graminis
MRLSLWNLLGLSGLVVASCPYMSGEDQEYHISHIQARGTDSEFLDQFKVEDSNSYLTTDAGGPIQDDASLKAGERGPTLLEDFIFRQKIQHFDHERVPERAVHARGAGAYGTFTSYADWTNITAASFLNSKGKETPVFVRFSTVAGSRGSADTVRDVHGFATRFYTDEGNFDIVGNNIPVFFIQDAILFPDLVHAVKPSPDSEIPQAATGHDSAWDFFSQQPSTLHTLFWAMSGHGIPRSYRHMDGFGVHTMRLVTDDGKSKLVKWHWKTKQGKASLVWEEAQILAGKNPDFHRQDLWDDINAGNGPEWELGVQIVDEEDVQAFGFDLLDPTKFLPEELVPVTILGKMKLTDNPTNYFAETEQVMFQPGHIVRGVDFSDDPLLQGRIYSYLDTQLNRNGGPNFEQLPVNRPRTKVHNNNRDGAGQMFIHTNKAPYSPNSLSGGNPKQANQTKGRGFFTAPSRKVVGSLHRGTASSFADVWSQPRMFYNSLIPSEQQFLVNAIRFEISQLKSDLIKKNTLMQLNRVSNDLATRVAAVIGYKPLDPSPEFYTNATTDYVTIFGKPLPSVVGFTVGILASTSSSTSISQAAQLATSFSSRGIRAVIVGESLLSGTDQTYSSADATAFDAVVVTMGAETLFGPVAKPNTLFPSGRPSQILHDAYRWGKPVGAVSKASVVLEPLPGTKNQGGVYRVESVNELATSIAKGLETFRFVDRFPLDS

SEQ ID NO: 2231 - protein, 167 aa, Bifidobacterium longum NCC2705
MAMFPALMNDTMFSDLFDDPFFEGWRNTDNTMSAVMPANMMTTDVRETDKGYDVDIDMPGFKKEDINLELNNGYLTVSASRCSEHEDKAPAAEDEASDSKCACASDSGKWLRRERYMGSCSRSFYVGEDVKESDIHASYRNGTLCIQVPKMQAQPQVESKHQIAIEG

SEQ ID NO: 2232 - protein, 436 aa, Bacillus cereus ATCC 14579
MRDYLIKPLVGQPYPMISHGKGVYLYDQNGNKYFDGSSGAITAGIGHGVKEIADVIKKQAEEIAFVYRSQFTSEPAEKLAKKLSDLSVGDLNWSFFVNSGTEANETAMKIAIQHFQERGIQGKHKILSRWMSYHGIPMGALSMSGHPLRRQRFVSILEDYPTIPAPYCFRCPVQKVYPTCQLACATELERSIERIGAEHIAAFIAEPIIGAAGGAVVPPKDYYKVIKEICDHYDILFIADEVMTGLGRTGAWFAMEHWGVEPDIMTLGKGLGAGYTPMAATVVSDRVMEPILRGSRSVMSGHTLSANPLSAATALAVIEYMEKHNLPEKTAEKGEYLIKGLQKVQQQSTIIADVRGKGLLIGVELQPFTKASELISVAAKNGLLLYQAVSGQAGKEDSALLVAPPMTTTYSELDELLSIFSKSVEEMMQKGGHSIA

SEQ ID NO: 2233 - protein, 453 aa, Aquifex aeolicus VF5
MWELDPKTLEKWDKEYFWHPFTQMKVYREEENLIFERGEGVYLWDIYGRKYIDAISSLWCNVHGHNHPKLNNAVMKQLCKVAHTTTLGSSNVPAILLAKKLVEISPEGLNKVFYSEDGAEAVEIAIKMAYHYWKNKGVKGKNVFITLSEAYHGDTVGAVSVGGIELFHGTYKDLLFKTIKLPSPYLYCKEKYGELCPECTADLLKQLEDILKSREDIVAVIMEAGIQAAAGMLPFPPGFLKGVRELTKKYDTLMIVDEVATGFGRTGTMFYCEQEGVSPDFMCLGKGITGGYLPLAATLTTDEVFNAFLGEFGEAKHFYHGHTYTGNNLACSVALANLEVFEEERTLEKLQPKIKLLKERLQEFWELKHVGDVRQLGFMAGIELVKDKEKGEPFPYGERTGFKVAYKCREKGVFLRPLGDVMVLMMPLVIEEDEMNYVIDTLKWAIKELEKEV

SEQ ID NO: 2234 - protein, 167 aa, Blumeria graminis
MGPTTTLYDFMPKDKNGEPVPLEKYKGQVVLIVNTASKCGFTPQFEGLEKLYKSVSSTHPGKFTILGFPCNQFGGHDPGSNDEIQNFCRINYGVTFPMLGKVNVNGDTADPLFEWLKVEKPGIMGMKRVKWNFEKWLVSKDGKPIKRYSSTAGPEGFQSLIIEEIEK

SEQ ID NO: 2235 - protein, 380 aa, Zea mays
MRRNRKDSGYPTAAPGEEDEAEELTEEGDEEEEEQTEEGCGEEDEVEAETPAQEAVEPPKLAEGYFEIEAIRRRRLRKGQLQYLVKWRGWPESANTWEPLENLKACSDIVDAFNKRSRSPRSCGKRKRKTPTTPTSDPNPSRGKRGRPPRSEARSMHSIHASEVKKLPCRTSSRRANNNSNKTSPGGLGAAVNLLGQRIVQEGSSGVVSVGFPSQEAPLSVSLTDQQDAQHPANGSLKMDNEIRAITPQGGQVTGAKKRKSGCVRRFKQDEVTHEQGDIRDRTSDKPGNETVDSTEGDPGDKNKGEDSGNQIHMPKIIKIIKPVRYFATVMDGVQQVAITFKALRSDGEMVFVDDKQLKAKEPLVLIDYYEQHLRYNPTS

SEQ ID NO: 2236 - protein, 246 aa, Oryza sativa
  misc_feature (137)..(137): Xaa can be any naturally occurring amino acid
  unsure (1)..(246): unsure at all Xaa locations
MIRPRRPGSKSGVFQCILELTRIIRIPPLNAAHSPYKSGLPSRSAAQTKIESNSQIAIPCAHIPSFPSTHCFSVHKHSLPSRPNPSTMSLIRRGNAFDPFSLDLWDPVDGFPFGSGGSSSSSGSLFPRANSDAAAFXGARIDWKETPEVHVFKADVPGLKKEEVKVEVDDGNILQISGERSREQEEKSDKWHRVERSSGKFLRRFRLPENTKPEQIKASMENGVLTVTVPKEEPKKPDVKSIQISG

SEQ ID NO: 2237 - protein, 640 aa, Corynebacterium diphtheriae NCTC 13129
MCGLLGMLSSTGQASKYAAAIESALPCMHHRGPDEAGTWHDDHAVFGFNRLSIIDLEHSHQPLRWGPEGEPDRYAMTFNGEIYNYVELRKKLQDLGYTFNTSGDGETIAVGFHHWGADVVLHLRGMFGIAIWDTKEQRLFLARDQFGIKPLYFATTEAGTVFASEKKCILGMADAIGLDLGLDQRAIEHYIDLQYVPEPESLHQHIRRLESGCFAFVSVGGNVEQTRYFRPQFPAQEFPKDKEQDLFDRIAKALEDSVEKHMRADVTVGSFLSGGIDSTAIATLAKRHNPNLLTFTTGFEREGYSEVDVAAESAAAIGVEHIVKIVSPEEYANAIPQIMWYLDDPVADPSLVPLFFVAQEARKHVKVVLSGEGADELFGGYTIYKEPLSLAPFEKIPSPLRRGLGKVAEVFPDGMRGKSLLQRGSMTMEERYYGNARSFNFDQMKRVIPWAKKEWDHREVTAPIYAQSEHMDPVARMQHLDLFTWMRGDILVKADKINMAHSLELRVPFLDKEVFEVAETIPYDLKIANGTTKYALRKAMEQIVPPHVLHRKKLGFPVPMRHWLAGDELFGWAQDTINESMTDQYFDKAAVLAMLNEHKNGVSDHSRRLWTVLAFMIWHGIFVEHRIDPGIEKRDYPVYL

SEQ ID NO: 2238 - protein, 249 aa, Brassica napus
MNGFSDLNSSESKPSLSHLAPLEAILFDVDGTLCDSDPIHLIAFQELLQQIGFNNGVPIDEKFFIKNIGGKHNSQIALALFPNDVTRGLEFCEEKEALYRKLVAEKIKPLDGLIKLTKWIEERGLKRAAVTNAPKENAELMISKLGLTDFFQAVILGSECEYPKPHPGPYLKALEVLNVSKEHTLVFEDSVSGIKAGVAAGMPVVGLTTGNPASMLMQAKPAFLIENYADPKLWAVLEELDNKGTFQKS

SEQ ID NO: 2239 - protein, 414 aa, Escherichia coli
KLGVTALYLNPVFKAPSVHKYDTEDYRHVDPQFGGDGALLRLRHNTQQLGMRLVLDGVFNHSGDSHAWFDRHNRGTGGACHNPESPWRDWYSFSDDGTALDWLGYASLPKLDYQSESLVNEIYRGEDSIVRHWLKAPWNMDGWRLDVVHMLGEAGGARNNMQHVAGITEAAKETQPEAYIVGEHFGDARQWLQADVEDAAMNYRGFTFPLWGFLANTDISYDPQQIDAQTCMAWMDNYRAGLSHQQQLRMFNQLDSHDTARFKTLLGRDIARLPLAVVWLFTWPGVPCIYYGDEVGLDGKNDPFCRKPFPWQVEKQDTALFALYQRMIALRKKSQALRHGGCQVLYAEDNVVVFVRVLNQQRVLVAINRGEACEVVLPASPFLNAVQWQCKEGHGQLTDGILALPAISATVWMN

SEQ ID NO: 2240 - protein, 138 aa, Rubrobacter xylanophilus DSM 9941
MAQTPRKVQLSDEEWRRRLSPEEYRVAREGGTEPAFTGRYWDHKEEGVYRCVCCGTPLFSSETKYDSGTGWPSFWAPIEEANVAYREDRSLLMRRTEVLCAACDAHLGHVFDDGPPPTGRRYCMNSAALRFSPGPPPG

SEQ ID NO: 2241 - protein, 336 aa, Lactobacillus reuteri
MEALVLTGKKQLEIEDIKEPEIKPDEVLIHTAYAGICGTDKALYAGLPGSASAVPPIVLGHENSGVVTKVGSEVTNVKPGDRVTVDPNIYCGQCKYCRTQRPELCEHLDAVGVTRNGGFEEYFTAPAKVVYPIPDDVSLKAAAVVEPISCAMHGVDLLETHPYQKALVLGDGFEGQLFAQILKARGIHEVTLAGRSDEKLENNRKHFGVKTIDTTKEEIPADAYDIVVEAVGLPATQEQALAAAARGAQVLMFGVGNPDDKFSVNTYDVFQKQLTIQGAFVNPYTFEDSIALLSSGVVDPLPLFSHELDLDGVEDFVSGKLGKVSKAVVKVGGEEA

SEQ ID NO: 2242 - protein, 252 aa, Solanum tuberosum
MLGVFSSSIVSPPEELVAAGSRTPSPKITSDALVNRFVQRNSSAISMQIGDFVQLAYSHSNESAVLPRSFAVKDDIFCLFEGSLDNLGSLRQQYGLAKSANEVMLVIEAYKALRDRAPYPPNHVVGHLEGNFAFIVFDKSTSTLFVATDQVGKVPLYWGITADGYVAFANDADLLKGACGKSLASFPQGCFYSTTVGGLRSYENPKTRSPPFLLLRKKYGALSLWWKVQLLLQPLNRRFRFSSLSSEGKTRP

SEQ ID NO: 2243 - protein, 382 aa, Zea mays
  misc_feature (197)..(197): Xaa can be any naturally occurring amino acid
  misc_feature (280)..(280): Xaa can be any naturally occurring amino acid
  unsure (1)..(382): unsure at all Xaa locations
MAQLPPRIPTEVHHWPEGGQHGAAAAAWADDFAEFAAARRGAHRRSLSDSVAFVEVAPADGGAGEFDRLDDDQLLSMFPPDEAGGSGGGGGSSAAGSENGGSSDSDGDKRGARGGPAGGAPSTGSGGGEQNGVVDAQAPATGGQAAVVASTELIRDPKRVKRILANRQSAQRSRVRKLQYISELERSVTTLQLTCCXVHAEPCSRRLHSAAHVVLHVYWNLKPECKGGKKKNPDQSKNMHGDSFSFMVSSTVPRVKNFVGVACLLACYCSARCCVVVTLXPTVCLPCACLQNEVSVLSPRVAFLDQQRTILSVGNSHLKQRIAALAQDKIFKDAHQEELKKEIERLRRVYDQQNLRMSAGGAAASDHGPPPPVVRAEKELMS

SEQ ID NO: 2244 - protein, 495 aa, Vigna angularis
MVLQTNNVPHFVLFPMMAQGHIIPMMDIARILAQRGVIITVFTTPKNASRFNSVISRAVSSGLKIRLVQLNFPSKEAGLREGCENLDMVSSNDMSKIFQVIHMPQKPAEEFFQTLTPKPSCIISDFCIAWTLQLAEKYHIPRVSFHGFSCFCLHCRYVIHTSDFCRSITSESKYFTIPGIPDKIQVTKEQLPGSLATDLDDFKDQVRDAEKKSYGVIVNTFWRVGEGICEGFSRRLKNNKAWFIGPVSLCNKDGLDKAQRGKQASINENHCLKWLDVQQAKSVVYVCFGSICNLIPSQLVELALALEDTKRPFVWVIREGSQLQELEKWFSEEGFEERTKGRGLIIGGWAPQVMILSHPSIGGFLTHCGWNSTLEGICAGVPLVTWPLFGDQFLNEKPVSDVLRIGVSVGAEVPLKWGEEEKRGVMVKKDDIKRAICMVMDDEEGKERRERVCKLSEMGKRAVEEGGSSHLDVTLLIQDIMQQTNTKEDESLSDV

SEQ ID NO: 2245 - protein, 326 aa, Rhizobium leguminosarum
MTKFKLEYIWLDGYTPVPNLRGKTQIKEFDEFPTLEQLPLWGFDGSSTMQAEGSSDCVLKPVAIYPDPARTNGALVMCEVMMPDGHAHASNARATILDDEDAWFGFEQEYFFYQNGRPLGFPEQGYPAPQPYYTGVGYSNVGDVAREIVEEHLDLCLAAGINHEGINAEVAKGQWEFQIFGKGSKKAADQIWMARYLLQRLTEKYGIDIEYHCKPLGDTDWNGSGMHCNFSTKYLREVGGKEYFEALMASSDKNLMDHIAVYGPDNDKRLTGKHETAPWNKFSYGVADRGASIRVPHSFIKNDYKGYLEDRRPNSQGDPYQIVRRF

SEQ ID NO: 2246 - protein, 257 aa, Elymus repens
CELDNIMRLTGITGIINGMDVSEWDPTKDKFLAVNYDITTALEGKALNKEALQAEVGLPVDRKVPLVAFIGRLEEQKGPDVMIAAIPEIVKDEDVQIVLLGTGKKKFERLLKSVEEKFPGKVRAVVRFNAPLAHQMMAGADVLAVTSRFEPCGLTQLQGMHYGTPCACASTGGLVDTIVEGKTGFHMGRLSVDCNVVEPADVKKVATTLKRAVKVVGTPAYKEMVKNCMIQDLSWKGPAKNWEDVLLELGVEGSEPG

SEQ ID NO: 2247 - protein, 485 aa, Vigna angularis
MSSPDAKEKQHAVCVPFPAQGHINPMLKLAKLLHFNGFYITFVNTHYNHKRLLKSRGLNSLNGLPSFRFETIPDGLPEPEVEGTHHVPSLCDSTSTTCLPHFRNLLSKLNNESGVPAVSCIISDGVMSFTLDASQELGLPNVLFWTSSACGFMCYVHYHQLIQRGIVPFKDASDLTNGYLDTTIDWVAGIKEIRLKDIPSFIRTTDPEDIMLNFARDECIRAEKASAIILNTFDALEHDVLEAFSSILPPVYSIGPLSFLLNNVTDKRLNAIGSNLWREEPGCLEWLDTKEANTVVYVNFGSVTVMTNEQMIEFAWGLANSKKSFVWVIRPDLVVGERAVLPQEFVTQTKNRGMLSGWCPQEQVLGHPAIGVFLTHSGWNSTLESLCAGVPMICWPFFAEQQTNCRFCCKEWGIGVEIEDVERDHIERLVRAMMDGEKGKDMKRKAVNWKILAEKAASAPTGSSFVQFQKLIREVLKGRNGMTII

SEQ ID NO: 2248 - protein, 462 aa, Vigna angularis
LKLAELLVLQNLRVTFLTTNTIHSRLARFGEIQVLSESYPTLHFKTFSDCYDEGNHPGFGDRIWDLISSVTLHAKPFLRDILLSHTPQIPKLSCVIQDGIFGSLSSGVASELNISIPIIHFRTVSSCCFWAYMSATKLLQCQELPIRGDDDMDRIIKNLPGMENLLRCRDLPSFFRPNQEGNSTFESYADRSRQSLAADAVILNSFEDLEGPVLSQIRHNFSKVYTVGPLHHHLNMRKAESNKGKEIPRFKNSIFQVDRSCMTWLDAQPDGSVMYVSFGSSTIMNKEDLMEIWHGLVNSKKRFLWVKLPDIVAGKHNEEHVPTEVKEGTKERGFIVEWAPQEEVLTHKAIGGFLTHSGWNSTLESLVAGVPMICWPYFADQQINSRFVSEVWKVGLDMKDVCDRDVVEKMVNDVMVHRREEFLKSAQTMAMLAHQSVSPGGSSYTSLHDLIEYIISASRENN

SEQ ID NO: 2249 - protein, 513 aa, Oryza sativa
MQPDPSGSGGDGNANAKAKLAPPPVTAAGGRPVSVLPHKTANVRDHYRIGKKLGQGQFGTTYLCVDKASGGEFACKSIPKRKLLCREDYEDVWREIQIMHHLSEHPNVVRIRGAYEDALFVHIVMELCAGGELFDRIVAKGHYTERAAAQLIRTIVAVVEGCHSLGVMHRDLKPENFLFASAAEDAPLKATDFGLSMFYKPGDKFSDVVGSPYYVAPEVLQKCYGPESDVWSAGVILYILLCGVPPFWAETEAGIFRQILRGKLDFESEPWPSISDSAKDLVRNMLCRDPTKRLTAHEVLCHPWIVDDAVAPDKPIDSAVLSRLEHFSAMNKLKKMALRVIAESLSEEEIGGLKELFKMIDTDDSGTITFDELKEGLKRVGSELTEHEIQALMEAADIDNSGTIDYGEFIAATLHMNKLEREENLVSAFSFFDKDGSGFITIDELSQACREFGLDDLHLEDMIKDVDQNNDGQIDYSEFTAMMRKGNAGGAGRRTMRNSLQLNLGEILNPSNS

SEQ ID NO: 2250 - protein, 463 aa, Vigna angularis
MLKLAELLALHHLHVTFINTHSIHNRLTRYGDIQSLSASYPTLHFNTIADCYSHGNHTGSGDTSGDIILSTALHAKPLLRNILLAQSPEIPKVTCIIQDGILGSLSNDLASELGIRITIIHFRTSSPCCFWPYFWLPNLFKTNELPIRGDEDMDRIITNMPGMENLLRCRDLPSFCRPGAKGNMSIDWVSFQTQQSLAADALILNTFEELDRLVLSQIRLHFPKVYTLGPLHHHLNVRKAETNGANDAPSFRSSFFEVDRSCMAWLDAQAQGSVLYVSFGTSTIVTREELMEFWHGLVDSKKRFLWVMRPDLVVGRENDDRIPEEVEEGTKERGLMVEWAPQEEVLAHKAIGGFLTHSGWNSTLESLVAGVPMICWPYFADQQVNSRFVSEVWKVGLDMKDVCDRDVVEKMVNDLMVHRRDEFLKSAQAMAMLAHQSVSPGGSSHSSMQDLIHYIKSVSKENN

SEQ ID NO: 2251 - protein, 257 aa, Elymus repens
CELDNIMRLTGITGIVNGMDVSEWDPTKDKFLAVNYDITTALEGKALNKEALQAEVGLPVDRKVPLVAFIGRLEEQKGPDVMIAAIPEIVKDEDVQIVLLGTGKKKFERLLKSVEEKFPGKVRAVVRFNAPLAHQMMAGADVLAVTSRFEPCGLIQLQGMRYGTPCACASTGGLVDTIVEGKTGFHMGRLSVDCNVVEPADVKKVATTLKRAVKVVGTPGYHEMVKNCMIQDLSWKGPAKNWEDVLLELGVEGSEPG

SEQ ID NO: 2252 - protein, 250 aa, ASPERGILLUS NIDULANS FGSC A4
MARRPARCYRYCKNKPYPKSRFNRGVPDPKIRIFDLGRKKANVDDFPLCVHLVSNEYEQLSSEALEAARICANKYVLTATEPDFRDEKKDMRREETILTMDYRYLVKIAGKEGFHLRVRVHPFHVIRINKMLSCAGADRLQTGMRGAFGKPQGKVARVNIGQIILSVRTRDSHRATAIEALRRSMYKFPGRQKIIVSKNWGFTPVRREDYVQLRQEGKLKQDGAYVQFLRGHGQIEENMRRFPDAYSTEA

SEQ ID NO: 2253 - protein, 314 aa, Debaryomyces hansenii CBS767
MSEINILTIFRSTKVLKFYNGQEIPATGLGTWQSKDEEVYNAVLAALKIGYKHIDTAACYGNEEPIGRAIRDAGVKREDIFITTKVWGTDHTRVEQALNTSLQKLGLDYVDLYLMHWPVPLNPNGNHPLFPTLPDGNRDISQDWDFTKTYNLMQKLLDLGKTKSIGVSNFSVTNLKKLLNAPTTTVKPVVNQVELHPYLPQHKLLQFAKENDIVLESYSPLGSTDSPLLSDEVVVKIAEKNKVSPATILISWALWRGTVVLPKSVSAHRIESNFNVIDLPDADGKELDDLHKLRGIRRLVLPNWAPVVVFDSDE

SEQ ID NO: 2254 - protein, 491 aa, Arabidopsis thaliana
MSDIQAKEDAAPVDRQSSSSVVVPDEPSPLRKMISVASIAAGIQFGWALQLSLLTPYVQLLGVPHKWSSFIWLCGPISGLLVQPTVGYFSDRCKSRFGRRRPFIATGALLVALAVILIGFAADFGHTMGDKLDEAVKIRAVGFFVVGFWILDVANNTLQGPCRAFLGDLAAGDAKKTRTANAIFSFFMAVGNVLGYAAGSYTNLHKIFPFTVTKACDIYCANLKSCFIISITLLIVLTIIALWYVEDKQWSPNADSDNEKTPFFGEIFGAFKVMKRPMWMLLAVTALNWIAWFPFLLYDTDWMGREVYGGDSAGDDKMKKLYNHGIQVGSLGLMLNSIVLGVMSLVIGVISKKIGAKRLWGAVNIILAVCLAMTVLVTKKAEEHRKIAGRMALPTNAIRDGALSLFAILGIPLAITFSIPFALASIISSSSGAGQGLSLGVLNMAIVIPQMIVSFGVGPIDALFGGGNLPGFVVGAIAALISSVVALTVLP

SEQ ID NO: 2255 - protein, 347 aa, Rhodopseudomonas palustris CGA009
MPAFPLNAWYAAAWDADIKHALFPRTICGKHVVMYRKADGTVAALEDACWHRLVPLSKGRLEGDTVVCGYHGLKFNPQGRCTYMPSQETINPSACVRSYPVVERHRFVWLWMGDPVLADPALVPDMHWNDDPAWAGDGKTIYAKCDWRLVVDNLMDLTHETYVHGSSIGNEAVAEAPFDVTHGDRTVTVTRWMKGIEPPPFWAAQLGKPGLVDRWQIIRFEAPGTVTIDVGVAPAGTRAPEGDRSQGVNGFVLNTMTPETDTTCHYFWAFVRNYRLSEQRLTTEIREGVSGIFREDEIILEAQQRAMLENPDRVFYNLNIDAGAMWSRKLIDRMVAQESAPKLQAAE

SEQ ID NO: 2256 - protein, 257 aa, Elymus repens
CELDNIMRLTGITGIINGMDVSEWDPTKDKFLAVNYDITTALEGKALNKEALQAEVGLPVDRKVPLVAFIGRLEEQKGPDVMIAAIPEIVKDEDVQIVLLGTGKKKFERLLKSIEEKFPGKVRAVVRFNAPLAHQMMAGADVLAVTSRFEPCGLIQLQGMRYGTPCACASTGGLVDTIVEGKTGFHMGRLSVDCNVVEPADVKKVATTLKRAVKVVGTPAYKEMVKNCMIQDLSWKGPAKNWEDVLLELGVEGSEPG

SEQ ID NO: 2257 - protein, 234 aa, Matthiola incana
NQNEVIKPTVNGVLGIMKACVKTKTVRRVIFTSSAGTINVEEHQKNVYDEQNWSDLEFIISKKITGWMYFLSKTLAEKAAWDYAKENGIDFISIIPTLVIGPFITTSMPPSLITGLSPITRNEAHYSIIRQGQYVHLDDLCNAHIFLYEQAAAKGRYVCSSHDATILTISKILRQKYPEYNVPSTFEGVDENLKSVVFSSRKLIEMGFNFKYSLEDMYVESIETCRRKGFLPVS

SEQ ID NO: 2258 - protein, 455 aa, Staphylococcus aureus
MSQQDKKLTGVFGHPVSDRENSMTAGPRGPLLMQDIYFLEQMSQFDREVIPERRMHAKGSGAFGTFTVTKDITKYTNAKIFSEIGKQTEMFARFSTVAGERGAADAESDIRGFALKFYTEEGNWDLVGNNTPVFFFRDPKLFVSLNRAVKRDPRTNMRDAQNNWDFWTGLPEALHQVTILMSDRGIPKDLRHMHGFGSHTYSMYNDSGERVWVKLHFRTQQGIENLTDEEAAEIIATGRDSSQRDLFEAIEKGDYPKWTMYIQVMTEEQAKNHKDNPFDLTKVWYHDEYPLIEVGEFELNRNPDNYFMDVEQVAFASTNIIPGLDFSPDKMLQGRLFSYGDAQRYRLGVNHWQIPVNQPKGVGIENICPFSRDGQMRVVDNNQGGGTHYYPNNHGKFDSQPEYKKPPFPTDGYGYEYNQRQDDDNYFEQPGKLFRLQSEGAKERILQIQQMQWKA

SEQ ID NO: 2259 - protein, 1072 aa, Vibrio vulnificus YJ016
MTESISLTLTNNESSRFLIRQRLLSILQAFGYDACRCDIHMLRIGEFVRITLADIQRFTLSFELDDDSLKVILASSELDPQTCSFPACVHTFQREKAIGVSIPSLIPLSDEILNQLTQFLAKPSRDELMSELKAKNQELAVHQAGLEKEIELRTADLKASEELSRTIIDGAPSSVAIVNESLFISLWNSTAQNVYGYSSEEATGENILTLLNMSLPDALSHVLSAPLALQNQPDVEGGFFEVETTTKEGHMVPIDLGVSIFELNGACHAALFLRDVTSRKAVEKELNDAKAKAEEAVEVKSMFLANMSHEIRTPMNAIIGMSHLALKTDLTPKQHDYVSKIHSSATLLLGIINDILDFSKIEAGKLSIETTEFYLDDVFHNVSMVTGQKAFEKGLELIFDLPRETPRCLLGDPLRLGQIIINLVNNSVKFTEKGEITVSVHHIRNVEDLVELEFRISDTGIGMTDKQMKSLFTAFTQADGSTTRKYGGTGLGLSICRRLVELMGGQIRVESEAGKGSHFIFNVLVKADPANSSAPSIVPQSLEKIRILVVDDNEHALEIMQEMLSTLPGKVALANSGQQAVDCIRKASEQREKFDLIFMDWNMPEMDGIETSRLIRESFASEYQPQIVIVTAYDKEDVLDATNDLDIAGFLSKPVGQSYLFDLLVELFGRDRNPTTQIRKKELPTHDSKNDLKGLKVLLTEDNEINQQIAVELMEGNGLLVTVANNGQEALDHLEAMAKGESHFDIIFMDLQMPVMDGYEASHRIRANSSYDTIPLIAMTAHAMVEERERCLNLGMNDHISKPIDPEILFNTIRKWCPRTLNEKDESPVDAEQSQTQQLDSSIESAATPKSTERAAAEKRTLETLESLDYKNGLLRVAGNQTLYRRLLSQLMDKEISAPERLTIALDKQDTEQAIIIAHSLKGSASNLGAIRLSDIASRLEMAIQHGKERAEIDKLNKELDGYLEHFFQDLALALGRPKPSSDKRLELKDEELMIIHTLDSLLDSLDAYAIEFLDEHYVLLNTLLKSEDFEACCRCVNDCDFESASKSLRKAVSIYPLDLGKLSGEKNGRES

SEQ ID NO: 2260 - protein, 505 aa, Staphylococcus aureus
MSQQDKKLTGVFGHPVSDRENSMTAGPRGPLLMQDIYFLEQMSQFDREVIPERRMHAKGSGAFGTFTVTKDITKYTNAKIFSEIGKQTEMFARFSTVAGERGAADAERDIRGFALKFYTEEGNWDLVGNNTPVFFFRDPKLFVSLNRAVKRDPRTNMRDAQNNWDFWTGLPEALHQVTILMSDRGIPKDLRHMHGFGSHTYSMYNDSGERVWVKFHFRTQQGIENLTDEEAAEIIATDRDSSQRDLFEAIEKGDYPKWTMYIQVMTEEQAKNHKDNPFDLTKVWYHDEYPLIEVGEFELNRNPDNYFTDVEQAAFAPTNIIPGLDFSPDKMLQGRLFSYGDAQRYRLGVNHWQIPVNQPKGVGIENICPFSRDGQMRVVDNNQGGGTHHYPNNHGKFDSQPEYKKPPFPTDGYGYEYNQRQDDDNYFEQPGKLFRLQSEDAKERIFTNTANAMEGVTDDVKRRHIRHCYKADPEYGKGVAKALGIDINSIDLETENDETYENFEK

SEQ ID NO: 2261 - protein, 478 aa, Debaryomyces hansenii CBS767
MLLKGIYLFISLLVLSLARTVTVTSTRDYRVGLSTLFNEGNIQTTVTNSRASDSSDDLSSAAQTTAVTGCHLHGSEQFCIDGEGNEGSIIPGPSKTEDSPSSYTGCHSHEEDTFCLNSDGDEVQFVKDTESSSSSTSTSSGGKNCHFHAGVEHCVADGESEHGASAETCERVDRDYDIPLRIGLLFVILVTSAIGSFGPIVLTSFFKFKLDGVIITILKQFGTGIIISTAFVHLMTHADLMWGNSCITLGYESTATSITMAGIFLTFLIEYLGNRLIGWRSQKSSKRLIGRGNPEKANDITEETISPASTHNHDGPVLVNDEFSCVVMEAGIVFHSILLGITLVVAGDSYFITLFIVIMFHQMFEGIALSTRIVELPNTKLLKKLLMAGVYALVTPVGMAIGIGTLNKFNGNDPSTIIALGTLDSFSAGILIWTGLIEMWAHDWIFGNLATASFLKTSIALVSLIAGFIVMSVLGKWA

SEQ ID NO: 2262 - protein, 301 aa, Bordetella bronchiseptica RB50
MQHTKVLITGGGGFLGAWVAKRLLARGLPVRIMDIADDRRVVRGLLGDAADRLEWVVGDVSQAADVEAALSGCQQVVHLAGLLTPSCQLDPVKGAQVNLLGTLHVFEAAKRQGLRHVVYTSSVSVFGPDNGLQPEPSTHYGAFKLATEGCARTYWEYDGISSVGLRPGVVYGPGREVGLSAGPTLACRAAVRGEPYTVGYQGDTCLVYADDVAAAYEQALIARAPGAQVFNVSGRPTPMADILDAIRRHYPDARLGAEGPVLPFTADIPDEALYRAFPALPRTPLDVGIGQTLAHYRPAQA

SEQ ID NO: 2263 - protein, 379 aa, Cryptococcus neoformans var. neoformans JEC21
MSTELNPDNTSFVLHGVEDVRFDQRPIPEVHNDQVLIKVVKTGICGSDVHYLQHGRIGSFVLEEPMCLGHESAGVVVKLGPNVREDLGVEVGTRVAMEPGVCCRSCANCKAGLYELCPYMSFAATPPTIFGTLCRYYVLPADLVHPLPESVSFEDGAMMEPLSVGVHSVATLGGCKSDQTVIVFGAGPVGLLCMAVAKALGARRIIAVDINKERLEFAKSYAATDVCIPGSKLDGEDGEAYTARIAGELRQELGIPERGKGAIDLAIEASGAPTCVQIGLAVLKPAGTYVQVGMGAKMTVPVPLFHIISKQLHVVGSFRYGSGDYPLAISLVERGLIDLKPLVTQRFKFENAKEAFETTKVGKDKNGKGVIKCIIDGPE

SEQ ID NO: 2264 - protein, 158 aa, Rhodopseudomonas palustris CGA009
MASIYDFTAKSLVGKDVSLKQFEGKVLLIVNTASACGFTPQYKGLEALQEKYGPRGFSVLGFPCNQFGAQEPGDEAQIAQFCSTNYGVTFPMFAKIDVNGAGAHPLYKFLKDEKGGLLGSAIKWNFTKFLVDRSGRVVSRHAPTTTPEALSKEIETLL

SEQ ID NO: 2265 - protein, 641 aa, Schizosaccharomyces pombe
MLRFRKVAPSLKNGGNLKLFSTSSTLKKIASSQPLRAKQVSTSESVKYPVIDHTYDAIVVGAGGAGLRATFGLAEAGFNTACITKLFPTRSHTVAAQGGINAALGNMTKDDWRWHFYDTVKGSDWLGDQDAIHYMTKEAPKAVLELEHFGVPFSRTKEGKIYQRAFGGQSLEYGKGGQAYRCAAVADRTGHSILHTLYGQSLKHNTNFFIEYFAMDLIMEGGECRGVIAMNLEDGSIHRFRAHKTILATGGYGRAYFSCTSAHTCTGDGNAMVSRAGLPLQDLEFVQFHPTGIYGAGCLITEGCRGEGGYLLNSKGERFMERYAPTAKDLASRDVVSRAMTVEIREGRGVGPEKDHCYLQLSHLPAEILKERLPGISETAAIFAGVDVTKEPIPVLPTVHYNMGGIPTRFTGEVLTIDENGKDKIVPGLYAAGEAACVSVHGGNRLGANSLLDIVVFGRACALHIKDTLEPNTPHKPLAADAGLDSLKFLDQIRTSQGPKHTSEIRLDMQKTMQRDVSVFRMEETLQEGVKNIARVDGTYKDIGIRDRGLIWNTDLVEALELRNLLTCAVQTANAALNRKESRGAHAREDYPERDDKNWIKHTLTWQHKTGDPVTLKYRAVTRTTMDENEVKPVPPFKRVY

SEQ ID NO: 2266 - protein, 540 aa, Tropheryma whipplei
MAKKITFNEDARRGLERGLNTLADTVKVTLGPRGRNVVLEKKWGAPVITNDGVTIAKEIELDDPYEKIGAELVKEVAKKTDDVAGDGTTTSVVLAQAMVREGLKNVAAGADPISLRRGIEKSVAAVSKALLTSAKEVETEAEIAACASISAGDPQIGDIIAQALEKVGKEGVVTVEESNTFGTELEITEGMRFDKGYLSAYFVTDAERQETVFENPYILICDSKISSVKDLLPVVDKVIQSGKQLLIIAEDVDGEALATLVVNKIRGIFKSVAVKAPGFGDRRKMMLQDIAVLTGGQVISEEVGLKLENATLDLLGRARKVVVSKDETTIVDGAGSSDQIAGRVSQIRKELENSDSDYDREKLQERLAKLSGGVAVIRSGAATEVELKERKHRIEDAVRNAKAAVEEGIVAGGGAALLQSGTSALKDLQLTSEEAVGRNIVRSAIEAPLRQISLNAGLEPGVVVGKVSSLPQGHGLDASTGEYVDMLSRGISDPVKVTRSALENAASIAGLFLTTEAVVAEKPEPKPAPGPADPGAGMDF

SEQ ID NO: 2267 - protein, 575 aa, GIBBERELLA ZEAE PH-1
MSPAIQNINSPITAAWWKEASVYQIYPSSFKDTNGDGIGDIPGIIEKLDYFKQLGVDIIWLCPIYPSPQIDMGYDVADYRDIDPQYGTMADVERLIEGLHSRGLKLLMDLVVNHTSDQHKWFQESKSSRDNPYRNWYIWRKPRYDEDGQRHPPNNWLSYFRGSAWEYDPASDEYYLHLFAKEQPDLNWEHAPVREAVHEIIRFWLDKGVDGFRKSEGLPDAPITVLGSEYQFGHDHYACGPRLHEYLRDIGSILKEYDAFSVGEMPAVQDPEEIIKSVGESRGELNMIFNFEIVDMDHGDQGKFSAKKWEMKELKMIVNKWQTFMYNNKGWNALYLENHDQSRSISRWVSDKPVYREMSAKMLSTFLCFQSGTVFVYQGEELGMANMPPDWEMTEHRDVETLNHWEELKRTTGSDAKVLELARKEYQLKARDHARTPVQWDSSPNAGFTTGKPWIRVNDDYQQWNAATQTNTKGSVFDYWRSALSLRKELKDIVVYGDFELLDAENSDIFAYARSDGKQKLIVVCSFRDREIAWPVPASTGLQSSKVLLSNYPEIDLSQDVISIRPFEAFVCLVG

SEQ ID NO: 2268 - protein, 356 aa, Methanopyrus kandleri AV19
MNVDAVVLAGGFGTRLRPLTWDTPKPLVPILGKPLIEWVIRSLPRDVVHVHIAAGFSSEKLERYVESDPLPRKLHLKVEPKPLDTAGAIKFACRDSTADAFVAFNGDIVSSLDVRQMLKFHREHDGIATIALYPVPEDEVSRFGVVDLDDDDRILDFVEKPEPEEAPSNLINAGAYVLDREVLDYIPEGRPVSIEREIFPKLAEEGLLYGFKFEGYWVDVGLPETYLEAHRVLMEHECSGKSVVGARITDTDLKPPVVAAPMTELRSSEIGPYVYVGERTEINGSVIENSVILDDVEIIDSEVRNTIVAEGCKIENARLDGCVLGHDAEVCGCNLKGVRVAPGKEAERDLEDEWVI

SEQ ID NO: 2269 - protein, 211 aa, Oryza sativa (japonica cultivar-group)
MVMILKLSKQQFQTFLRLRVIESNAPNLSSLSFSGNVKLSLGDPLQVKRLSMIHPKVVCYARAELPSVMPNLETLAIYSNDEVVNTPMLPTKFLYLKHLTISVSSAASFNTSYDYFSLVSFLDASPSLETLILNVSQEHMKHESVLGDSSPLRQMPEHRHCYLKSVKMTGFSSAKNLIELTCYILKNAVSLECLTLDTLYERACSLVVTVT

SEQ ID NO: 2270 - protein, 201 aa, Thermococcus kodakarensis KOD1
MEEYLVPLDQYLAAGVHIGTQQKTKDMKKFIYRVRQDGLYVLDVRKTDERLRVAGKFLAKFDPESILAVSVRLYGQRPVKKFGEVTGAKAIPGRFLPGTMTNPQVKNFIEPDVLIVTDPRADHQALKEAVEIGIPIVALVDTENFLSYVDIAIPTNNKGRKALALIYWILAREVLYNRKEIESREDFKIPVEDFEMRIIRT

SEQ ID NO: 2271 - protein, 558 aa, Xanthomonas campestris pv. campestris str. ATCC 33913
MWEALGTVRDLGRLQEIASVLIRYGFGDVVRRIGLADVLERAGRLLHWTNAEGRLRMSAATRVRRALEELGPTFVKLGQVLATRVDLLPPDWIEELSELQNAVPALPFAHIRPQLVAALGMEPEQVFARLDEEPLAAASLAQTHRAWLADGTAVVLKIRRPGIGDTIDADLRLLARLAEIVETRAPDLKRYRPAEVVQQFTLSLRRELDFAAECRNAERIAANFANDPQILIPAVHWEWTCESLNVQDFVDGIPGRDLVAVDAAGLDRKALARTGAGIVLKMVLQDGCFHADPHPGNIFYLRDGRIAVIDFGMVGRISEQRRFQVAQLLHGMVSYDAESVIDVLLEWAGTSLDIDEPRLQQDIGAFVDAYRGVPLKELRIGAMLGDVTAILRDHGLTLPSDLALMIKAFLTLEGMGRQLDPDFDMASEARPYLERVVLQRYAPSAMLRRGRRTVTGAIDLIGDLPRDLKRLIQAARRGKLQLHVETRALREFGEQVDRAANRLTMGIVTAALVIGSSIVMNSVGGIASRWLLALGVSGFIGAALCGVWILFSIWRSRR

SEQ ID NO: 2272 - protein, 343 aa, ASPERGILLUS NIDULANS FGSC A4
MDIKFVLVTGATGFIGAHIVDALLGHGLRVRGATRSLAKGEEMLKARLHYKEQLEFVKINDFENPGGLAEAVKGVDGIIHTASPFTYDTKDNEKELVIPAINGVKAVFEAAAAADASTTKIKRIVLTSSFASVIDVNRRAGPGSGPDGYFTYTAADWNPLSYAEAIDTSTNAVVAYRGSKKFAELAAWEFIRDRKPSFDLVTLCPPMTFGPVVHPVPSVESLNESNAMLWKVAVGEPLPVARVPFWIDVRDLADAHIGALLKPGVGGRRYTVAAPERFSYGLAAGIIKEEFADLRERVTGTRQDVDESHGLDGETAGRELGISYRRFRETVRDLVRQGVERGW

SEQ ID NO: 2273 - protein, 210 aa, Arabidopsis thaliana
MVRGKIEMKKIENATSRQVTFSKRRNGLLKKAYELSVLCDAQLSLIIFSQRGRLYEFSSSDMQKTIERYRKYTKDHETSNHDSQIHLQQLKQEASHMITKIELLEFHKRKLLGQGIASCSLEELQEIDSQLQRSLGKVRERKAQLFKEQLEKLKAKEKQLLEENVKLHQKNVINPWRGSSTDQQQEKYKVIDLNLEVETDLFIGLPNRNC

SEQ ID NO: 2274 - protein, 609 aa, Magnetococcus sp. MC-1
MCGILAEVGQQSPAAARQRALDRLRHRGPDHGGQWSAQQPVPVWLGHRRLAIVDTSSAGNQPLHLHAADLHLVGNGEIYNAPALQKTLEALGHVFHSHSDNEAILHAYREWGSDCLAHLEGMFAFVLWDARQQTLLAARDRMGIKPLFYAATPAGGLVLASEASALVGLDGVAQQGYEPQALSHVLAYGHIPDPYAIWRGVNKLSPGQFLRWTPQQGLRLHTYWSPPSQSDAPSDDQAWGQRFEQVLQEHLLSDVPLSLFLSGGLDSTSVAVGVKRLGHQLKAFSLGFPGHPRDESALAQATAERLGHPFEAVVMDGRDLLQQVDAALLQQDEPHLFGSYLTMLNICSAVAKEYKVVLSGDGGDELFAGYNWYRDIPTALPTLAPWKAALAKPLLRHSPLPAALLERARLAFACCSPLHRHAWRTSQRFLPAEVEALLRPAAIRYDDEAFLAPLQRWFTPELPLVRALQRIDLMSFCSNHVCAKVDRASMAHALEVRVPYLDRRLVEWAISRPADPREAQGSKPLIRDYIAPHVPAQVLEQRKQGFSLRTTPPANLESTFVAWIEQSPLISQSILRRDWPRFLRADDRLRAQKLWHLALLARWMHHHPA

SEQ ID NO: 2275 - protein, 103 aa, Arabidopsis thaliana
MASRWLRPEVYPLFAATGVAVGICAFSLIRNITGNPEVRCTKENRAAGILDNHAEGEKYKENFLRKFVRNKKPEIMPGLNKFFTDPTYWNHLCTPLWRIGSWD

SEQ ID NO: 2276 - protein, 471 aa, Vigna angularis
MIPMMDIAKILAEQGVTVTVITTLQNASRFKSTFARSIDSGSQIKLLEIQFPYQEAGLPEGCENLDMLPSLGAGLDFFNAANSNTQKEQVEKLLEDLTPPPSCIVSDMCLHYTATIATRFNIPRISFLGQSCFSLFCMYSLGKSRVLSGITSNTEYFVLPGLPDKVEMTKAQLPAQQTDAEWRKFYARTGAAEGVSYGVVMNSFEELESDYASAYKKARKGRVWCIGPVSLSNRDELDKAERGNKASIDEHFCMKWLGLQKAGSVIYACLGSMCNITPQQLIELGLALEASNRPFIWVIREGSQLEEVEKWMKEEGFEERTKGRSLVIHGWAPQVLLLSHPAIGGFLTHCGWNSTLEAICAGVPMVTWPLFGDQFLNEKLIVQILKVGVKVGVEVPVEWGQEEETSILVKKEDVERAINELMDETMESEKIRERVKEFADMAKKAVEQGGSSHSNVTLLIQNIMQQSQRDA

SEQ ID NO: 2277 - protein, 140 aa, Thermococcus kodakarensis KOD1
MSEEQTTQVNIKKKEKWGVAHIYSSYNNTIIHITDLTGAETISRWSGGMVVKADRDEPSPYAAMIAARRAAEEAMEKGITGVHIKVRAPGGSKSKSPGPGAQAAIRALSRAGLRIGRVEDVTPIPHDGTRPKGGRRGRRV

SEQ ID NO: 2278 - protein, 492 aa, Triticum aestivum
  misc_feature (41)..(41): Xaa can be any naturally occurring amino acid
  misc_feature (302)..(302): Xaa can be any naturally occurring amino acid
  misc_feature (384)..(384): Xaa can be any naturally occurring amino acid
  unsure (1)..(492): unsure at all Xaa locations
MVVTVAATGSDTAEPLHSTTFASRYVRDQLPRYRMPSGSIXPKEAAYQIISDELMLDGNPRLNLASFVTTWMEPECGKLMMDSVNKNYVDMDEYPVTTELQNRCVNMIAHLFNAPIGEDETAIGVSTVGSSEAIMLAGLAFKRKWQNKRKEQGKPCDKPNIVTGANVQVCWEKFARYFEVELKEVKLSEGYYVMDPVKAVEMVDENTICVAAILGSTLTGEFEDVKLLNDLLVEKNKETGWNVPIHVDAASGGFIAPFLHPELEWDFRLPLVKSINVSGHKYGLVYPGVGWVVWRSKADLPXELIFHINYLGTDQPTFTLNFSKGASQIIAQYYQLIRLGFEGYKHIMENCKLNAAVLKEGIDATGRFDVLSKADGVPLVAIRXLKDSTNFSVFDISENLRRFGWIVPAYTMPADAEHVAVLRIVIREDFNRSLAQRLLADINKIVGELDAHAVHAIKLSTAAAAEGASKSTVDAVTEAFKGLPGNKKAGVC

SEQ ID NO: 2279 - protein, 423 aa, Arabidopsis thaliana
  misc_feature (151)..(151): Xaa can be any naturally occurring amino acid
  misc_feature (160)..(160): Xaa can be any naturally occurring amino acid
  unsure (1)..(423): unsure at all Xaa locations
MGLEEQGRAREDTPLLGKGRPLSGKFKTFANVFIAIVGAGVLGLPYAFKRTGWLMGLLTLFSVAALINHCMMLLVHIRRKLGVSNIGSFGDLGFAACGNLGRFVVDILIILSQAGFCVGYLIFIGNTLANLSKPTKSTTLMSLRHLMGVSXPKSLYIWGXCFPFQLGLNSIKTLTHLAPLSIFADVVDLGAMAVVIVEDIKITVVQRPQVVAFGGMSVFFYGMGVAVYAFEGVGMVLPLESETKDKDKFGKVLALSMLFIAVMYGSFGVLGYMAFGDDTMDIITANLGAGVVSSLVQLGLCINLFFTFPLMMNPVFEIVERRFWSGMYCVWLRWLLVLAVTLVALLVPNFADFLSLVGSSVCCALGFVLPSLFHLMVFKDEMEWKQRALDVGILLLGVILGVSGECYRPLQQPLYATPPCVIS

SEQ ID NO: 2280 - protein, 1274 aa, Oryza sativa (japonica cultivar-group)
MVFKGRFFSSRHKSSESSSPTDGSNSPRTPTSAPPAAGSPAAASSSSSSRSDKKKPKSETPRKRDKLFGGSASGSAASKGGAGAAPASASSSPSADGRKAAAAQLRDGGAGGASAAALSPILASSLGLNRIKTRSGPLPQEGHRIAAALGSSNLSRGQAQADPSAASAGGGGGGGRKAGSSWADSTSGSRGKGKAAEHPARGATATSLEGKSSAKDVLSYKEIGAHDFHFAAWCLDAKLGTTGANCAYDPCETPKESESPRFKAIMQATSAPRKRVPADIKSFSHELNSKGVRPFPFWKPRGIYNLKEVLKVIQVRFEKAKEEVNSDLAVFAGDLVGVMEKYADSHPEWKETLEDLLILARSCCVMTPGEFWLQCEGIVQDLDDHRQELPMGVLKKLYTRMLFILTRCTRLLQFHKESGFAEDEVVMDQRDKIIQSADRQILAQPGDDTTTRGSKSDVRKSYSQEQHNLKWKRSQEIKPVKFLSPLDTTDVKKEVESPTRERISSWKPFPSPVPKPPKDPTPIKEESPNKKTDTPPAVSSQAELNSPVESTSHQSLPPKHQHKTSWGHWSDQPNISEEGSIMCRICEEYVPTHYVENHSAICASADRCDQKGVSVDERLIRVAEALEKLVESYTQKDLPNAVGSPDVAKVSNSSINEESDGPSPKLSDWSRRGSADMLDYLQEADSTISLDDIKNLPSMTCKTRFGPKSDHGMATSSAGSMTPRSPLTTPRSNHIDMLLAGRSAINESDDLPQIVELADIARCIATTPLDEERALSLLVTCIEDLQEIVNRRKHEALTVQTFGTRIEKLHREKYLLLCDSVDMDKVDSASTVMDEEDDVVRSLRASPVHPVKDRTSIDDFEIIKPISRGAFGRVFLAKKRTTGDLFAIKVLRKADMIRKNAVESILAERDILITVRNPFVVRFFYSFTSRENLYLVMEYLNGGDLYSLLRNLGCLDEDVARIYLAEVVLALEYLHSMHIVHRDLKPDNLLIAHDGHIKLTDFGLSKVGLINSTDDLSGPAVSGSSLYGDDEPQMSEFEEMDHRARRQKRSAVGTPDYLAPEILLGTGHGTSADWWSVGVILFELIVGIPPFNAEHPQTIFDNILNRKIPWPHVPEEMSSEAQDLIDKLLTEDPHQRLGANGASEVKQHQFFKDISWDTLARQKAAFVPSSDSAFDTSYFTSRYSWNPSDENIYEAYEFEDSSDNGSLSGSSSCVSNHQDDMGDESSGFTEFESSSNVNYSFSNFSFKNLSQLVSINYDLLTKGLKDDPPTKSET

SEQ ID NO: 2281 - protein, 557 aa, Debaryomyces hansenii CBS767
MVSEYIQNTKKDPAVYSTSNGVPYANHPYGAQTAGPGGPLLLQDFNLMDDISHFDHERIPERVVHAKGGGAHGYFELTDSLSDLTYARPLQSPGYKCPVSVRFSTVGGERGTPDTIRDPRGFSIKLKTDIGNMDWVFNNTPIFFIRDPIKFSKFIHTQKRDPSTNLNQLTDPYHTWDYFIQNPECLHQITYMFGKRGIPKSWAEMHGYSGHTFKLINDKDEITYIQIHCLADGGFDGFSDKEGKELAGSSPEYNTKDLYERIAAGNYPSYSFYVQTMTPKQAEEFRYSINDLTKVWPHKEFPLRKFGRMVLDKNPVNYHDEIEQIAFSPAHLVPGIEPSNDPVLQSRLYSYSDTHRHRLGANYQQLPVNKPRTFDSNSGCPFLAGNFQREGIASIDNQGSRPNYLSSLLPINSVSNDPKSYKNGLPPVEEKKYLGVVPKRSTDKYEILQKERNLKAHEEKIWLKSYDYISGFSELDVEQPRALYKNIISKQDKGDFIEAIVGHASKISVPQIKERVPQLWGLIDGDLGSEVAKGLGVSYKHLTVDEYIEDLGIAPAN

SEQ ID NO: 2282 - protein, 251 aa, Elymus repens
CELDNIMRLTGITGIVNGMDVSEWDPTKDKFLAVNYDITTALEGKALNKEALQAEVGLPVDRKVPLVAFIGRLEEQKGPDVMIAAIPEIVKDEDVQIVLLGTGKKKFERLLKSVEEKFPGKVRAVVRFNAPLAHQMMAGADVLAVTSRFEPCGLIQLQGMRYGTPCACASTGGLVDTIVEGKTGFHMGRLSVDCNVVEPADVKKVATTLKRAVKVVGTPAYHEMVKNCMIQDLSWKGPAKNGTGGRGERAG

SEQ ID NO: 2283 - protein, 194 aa, Zea perennis
IVNGMDVSEWDPSRDKYIAVKYDVSTAVEAKALNKEALQAEVGLPVDRNIPLVAFIGRLEEQKGPDVMAAAIPQLMEMVEDVQIVLLGTGKKKFERMLMSAEEKFPGKVRAVVKFNAALAHHIMAGADVLAVTSRFEPCGLIQLQGMRYGTCNVVEPADVKKVATTLQRAIKVVGTPAYEEMVRNCMIQDLSWK

SEQ ID NO: 2284 - protein, 588 aa, ASPERGILLUS NIDULANS FGSC A4
MQRALSSRTSVLSAASKRAAFTKPAGLNLQQQRFAHKELKFGVEARAQLLKGVDTLAKAVTSTLGPKGRNVLIESPYGSPKITKDGVTVAKAVQLQDKFENLGARLLQDVASKTNELAGDGTTTATVLARAIFSETVKNVAAGCNPMDLRRGIQAAVEAAVDYLQQNKRDITTGEEIAQVATISANGDTHVGKLISTAMERVGKEGVITVKEGKTLEDELEVTEGMRFDRGYTSPYFITDAKAQKVEFEKPLILLSEKKISAVQDIIPALEASTTLRRPLVIIAEDIEGEALAVCILNKLRGQLQVAAVKAPGFGDNRKSILGDLGVLTNGTVFTDELDIKLEKLTPDMLGSTGSITITKEDTIILNGEGSKDAIAQRCEQIRGVMADPTTSEYEKEKLQERLAKLSGGVAVIKVGGASEVEVGEKKDRVVDALNATRAAVEEGILPGGGTALLKAAANGLENVKPANFDQQLGVSIVKSAITRPARTIVENAGLEGSVIVGKLTDEFSKDFNRGFDSAKGEYVDMIAAGIVDPLKVVRTALVDASGVSSLLGTTEVAIVEAPEEKGPAAPGGMGGMGGMGGMGGGMF

SEQ ID NO: 2285 - protein, 213 aa, Populus tremula
MKSTLLAWFTFLLFAFVLSVPSIEASTESVLDIQGEELKAGTEYIISSIFWGAGGGDVAATNKTCPDDVIQYSLDLLQGLPVTFSPASSEDDVIRVSTDLNIKFSIKKACDRSSVWKIQKSSNSEVQWLVTTGGEEGNPGCDTFTNWFKIEKGAGILGYKLVYCPEDICPSVGLCRDVGIYFESNRGRILSLSDKLSPFLVLFKKVGPLSSSI

SEQ ID NO: 2286 - protein, 396 aa, Gossypium hirsutum
MCGGAIISDFIPPARSRLVTANYLWPDLKKSGSKKRSGRKHSKKPAVGFEDDFEADFQVFKDEDSDVDDFNDDVDDVLADVKSFAFSATKKPSPAVSHGSNSIKSVEFSGQAEKSAKRKRKNQYRGIRQRPWGKWAAEIRDPRKGVRVWLGTFNTAEEAARAYDAEALRIRGKKAKVNFPDETPRTTPKHAVKMNSQKPLSGSNLSSVQSSLNPDFSYSNKLEQGYYDTVGFIEEKSLMDQFAYADPVRAAVDDGLKPFADPENTASFFISDPGSNNFDSSDLVWGDQGAKTPEISSSLEPTLEVNEFLDNANPTKKLKLSLNNVMPTGGDNSVKSLSDELLAMDNQVNYFQTPFIDENWNVSMDDFLNGDATQVGGNEMGFWSFDDFPSIDGGIF

SEQ ID NO: 2287 - protein, 509 aa, Zea mays
MVKAVVVGAAVVACAAVGVAVVLERRRRKRDADLLGSAEAERRRRAAAVIEEVESSLATPTALLRSIADAMVAEMERGLRGDIHAQLKMLISYVDSLPTGDEHGLFYALDLGGTNFRVLRVQLGGKEKRVVKQQYEEVSIPPHLMVGTSMELFDFIAAALAKFVGTEGEDFQLPEGRQRELGFTFSFPVNQTSISSGTLIKWTKGFSINGTVGEDVVSELSRAMERQGLDMKATALVNDTVGTLAGGRYMDTDVVAAVILGTGTNAAYVEHANAIPKWTGLLPKSGKMVINTEWGSFKSNKLPLSEYDKAMDFESLNPGEQIYEKMISGMYLGEIVRRILLKLAHEASLFGDVVPPKLELPFILRTPDMSAMHHDSSHDLKTLGAKLKDIVGVADTSLEVRYITRHICDLVAERAARLAAAGVYSILKKIGRDKVPSGGGKMPRTVVALDGGLYEHYKKFSSCVEATLTDLLGEEASSSVVAKLANDGSGIGAALLAASHSQYQYGASD

SEQ ID NO: 2288 - protein, 212 aa, Populus tremula
MKSTLLAWFSFLLFAFVLSVPSIEASTEPVLDIQGEELKAGTEYIISSIFWGAGGGDVAATNKTCPDDVIQYSLDLLQGLPVTFSPASSEDDVIRVSTDLNIKFSIKKACDRSSVWKIQKSSNSEVQWLVTTGGEEGNPGCDTFTNWFKIEKAGVLGYKLVYCPEDICPSVGLCRDVGIYFESNRGRILSLSDKLSPFLVLFKKVGPLSSSI

SEQ ID NO: 2289 - protein, 494 aa, Piromyces sp. E2
MKTVAGIDLGTQSMKVVIYDYEKKEIIESASCPMELISESDGTREQTTEWFDKGLEVCFGKLSADNKKTIEAIGISGQLHGFVPLDANGKALYNIKLWCDTATVEECKIITDAAGGDKAVIDALGNLMLTGFTAPKILWLKRNKPEAFANLKYIMLPHDYLNWKLTGDYVMEYGDASGTALFDSKNRCWSKKICDIIDPKLLDLLPKLIEPSAPAGKVNDEAAKAYGIPAGIPVSAGGGDNMMGAVGTGTVADGFLTMSMGTSGTLYGYSDKPISDPANGLSGFCSSTGGWLPLLCTMNCTVATEFVRNLFQMDIKELNVEAAKSPCGSEGVLVIPFFNGERTPNLPNGRASITGLTSANTSRANIARASFESAVFAMRGGLDAFRKLGFQPKEIRLIGGGSKSDLWRQIAADIMNLPIRVPLLEEAAALGGAVQALWCLKNQSGKCDIVELCKEHIKIDESKNANPIAENVAVYDKAYDEYCKVVNTLSPLYA

SEQ ID NO: 2290 - protein, 212 aa, Populus tremula
MKSTLLAWFTFLLFAFVLSVPSIEASTEPVLDIQGEELKAGTEYIISSIFWGAGGGDVAATNKTCPDDVIQYSLDLLQGLPVTFSPASSEDDVIRVSTDLNIKFSIKKACDRSSVWKIQKSSNSEVQWLVTTGGEEGNPGCDTFTNWFKIEKAGVLGYKLVYCPEDICPSVGLCRDVGIYFESNRGRILSLSDKLSPFLVVFKKVGPLSSSI

SEQ ID NO: 2291 - protein, 135 aa, Brassica napus
GGYTIRNVARCWCYETAVAVGVEPDNKLPYNEYFEYFGPDYTLHVDPGPMENLNTPKDMEKIRNTLLEQLSGLIHAPSVQFQHTPPVNRVLDEPEEDLEERPKPRIWSGTANYESDSDDDEKSPPLVGFSGINDP

SEQ ID NO: 2292 - protein, 412 aa, Debaryomyces hansenii CBS767
MDRLNQVLGHLSPSATNHITSKNPDDVVIVASYRTAIGKGFKGSFKDVGSDYILLKFLEAFLAKTQVNPNLIEDIACANVLKVRSGICEHRAAAISAGIPYTTPIIAINRQCGSGLVAIGDIANKIISGEIDCGLAVGVESMTKDFGLGQSVVSKALEDHPEMIKSKIPMGITNENIAIKYNISRKQQDEFAAKSFQKAEKALASGVFADEILPVESLIEEKDGQGNVSFKKIIVDKDEGVRKGVTAESLGKLRPSFKKDGLTHAGNSSQVSDGAAGVLLMRRSFAEENGFKIEGKFVRCVSVGVPPEIMGVGPAMAIPHILKKTNLVVDDIAAFEINEAFATQCLYSIKACNIPEEKVNINGGAIALGHPVGVTGARQYATILRLLKPGDIGLTSMCIGSGMGSASIVVKE

SEQ ID NO: 2293 - protein, 974 aa, Rhodopseudomonas palustris CGA009
MTSLDPRTEMRARPSSHRTSRQGTMNPVKALEKHGQAIWLDFLARGFIAKGDLKKLIETDGVKGVTSNPSIFEKAIGASDEYDGAIGEALKKGDRSVGDLYETLAVEDIQNAADVLRPVYDKLEHRDGFVSLEVSPYLAIDTKGTLAEAERLWRAVNRENLMIKVPATREGLPAIKQLVSKGISVNVTLLFSQKVYVQVAEAYIAGLEALIASGGDPAHVASVASFFISRIDSAVDAALDDKIAKANDPSEKERLEELKGKVAIANAKLAYQDYKRLFSGDRWAKLEACGAKPQRLLWASTGTKNKAYSDVMYIEELIGQNTVNTVPPATLDAFRDHGEPRNSLEKDLDEARAVIKGLASTGVSLDAITDKLVTEGVQLFADAFDKLLGAVAFKRETVLAGRVGKQTLSLPGELANSVKQHTEAWRSAGKIRKIWSRDESVWTDHDEGKWLGWLHAPSVAKTKLTEYQDFAKWVKSQGFTDAVVLGMGGSSLGPEVIAETFPQQDGFPKLHVLDSTDPAQVRALEASVKLASTLFIVSSKSGGTTEPNVMKAYFFARVTEAIGADQAGRHFVAVTDPGSSMEKVATEQKFAKIFHGDPTIGGRYSVLSPFGLVPAAAAGIDLAKLLDSALAMVRSCGTDVPPQQNPAVQLGLVMGCAGLEGRDKVTITSSKAIADFGAWAEQLIAESTGKEGKGLIPIDGEPLADPSAYGNDRLFIDLRTEAETDAAHEAKLAALEAAGHPVVRIVLKSTEAIGQEFFRFELATAVAGAVLGINPFDQPDVESAKIKTRELTAAFEKSGALPAETPALSTAEADLYTDAGNAAALRKAGADGTVASWLKAHLSRVSAGDYVALLAYIERNAAHIEALQDIRLKVRDHRKVATCAEFGPRFLHSTGQAYKGGPDSGVFLQITADDAADLPVPGQSASFGVIKAAQARGDFDVLTERGRRALRVHLKGDLGAGLKSLGTAIKQALE

SEQ ID NO: 2294 - protein, 466 aa, Pseudomonas syringae pv. tomato str. DC3000
MLGYFAKSGNLFQSFPYDFDLYVIGAGSGGVRAARFSAGFGAKVAVAESRYLGGTCVNVGCVPKKLLVYGAHFADDFENSRGFGWTPGEAKFDWATLIVNKDSEINRLNDIYRNLLVNSGVTLHEGHAKIIDPHTVEVNGERHTAQNILIATGGWPQIPDIPGHEHAISSNQAFFLKELPKRVLVVGGGYIAVEFAGIFHGLGAKTTLLYRGDLFLRGFDGAVREHLQVELTRRGMDLQFNSDIERIDKQADGSLKATLKDGRQLEADCVFYATGRRPMLDNLGLENTGVKLNKKGFIEVDELYQTAEPSVLALGDVIGRVQLTPVALAEGMAIARRLFKPEQYRPVDYRMIPTAVFSQPNIGTVGMTEEDSREAGHEVVIFETRFRPMKLSLTECQERTLMKLVVDAKTDKVLGCHMVGPDAGEIVQGLAIALKSGATKRDFDETIAVHPTSAEEFVTMRTPVGS

SEQ ID NO: 2295 - protein, 92 aa, Schizosaccharomyces pombe
DGDYSNLDLSVGEALLKRPANFDGVHTCRATDRLDGIFDAIKHSRVHRLFVVDENLKLEGILSLADILNYIIYDKTTTPGVPEQTDNFESAV

SEQ ID NO: 2296 - protein, 554 aa, Corynebacterium glutamicum ATCC 13032
MTSSRKVRPTKHIFVTGGVVSSLGKGLTAASLGQLLIARGLSVTMQKLDPYLNVDPGTMNPFEHGEVFVTEDGAETDLDLGHYERFLDRNLGLNANVTTGKVYSTVIAKERRGEYLGKTVQVIPHITDEIKARILSMGEPDAHGNAPDVVISEVGGTVGDIESQPFLEAARQVRHEIGRENCFFIHCSLVPYLATSGELKTKPTQHSVAELRGIGILPDALVLRCDREVPQGLKDKIAMMCDVDYEGVVSCPDSSSIYNIPDVLYREHLDTFIIRRLGLPFRDVDWSTWHDLLERVNNPRHELTVGIVGKYIDLPDAYLSVVEAVRAAGYANWTRTNIKWITSDDCETPSGAMKALSGLDAIVVPGGFGIRGIEGKIGAITFAREHKIPLLGLCLGLQCTVIEAARQAGLEQASSTEFDPAATQPVIATMEEQKAAVSGEADLGGTMRLGAYPATLEEGSLVAELYGTTEVSERHRHRYEVNNAYRAQIAEGSDLVFSGTSPDGHLVEFVEYPKEVHPYLVATQAHPEYKSRPTHAHPLFYGLVKTALELRVHP

SEQ ID NO: 2297 - protein, 482 aa, Burkholderia mallei ATCC 23344
MKVSARELRYEQGIDRLLELAGARDDTEYADVADEFASAPSSAFAHDLGEPDSLDHQASDESAGAGSFGDKPTRPAHGDTDVDTDWRDDDAPPSGSNDAAPVDTAASTDPLALFVRRMHAVPLLTHAQEIALAAEIEAGREQVLQALAEALDRLDLASLPADPALGRARAALQRARARGDEGARAFARARTAAYAALAAHGWPSAEVDAVRRAMRRLPTSPEKSDAGAQRAFADGEARISAATARMAEANLRLVLSIARKYASRGLDLADLLQEGNLGLLRAIEKFEHRRGFKFSTYATWWIRQAISRAIAERARTIRVPVHVGDEARRVRKAADRIERRSGVSASLAELSEATGLPAERLRAVLTLPREPRSLNAPLGDDDQAEFGDIVEDTSTPSLFDALAHGQMCDVVTSLLKTMSAQEADILRRRFGIGGDEPWSYEQIAARAGVSREQVRRIEKRALQTLRVTAEACNAHDFLDVQP

SEQ ID NO: 2298 - protein, 182 aa, Arabidopsis thaliana
YPYIAGMGVYCFKTEALLKLLTWRYPSSNDFGSEIIPAAIKDHNVQGYIYRDYWEDIGTIKSFYEASIALVEEHPKFEFYDQNTPFYTSPRFLPPTKTEKCRIVNSVISHGCFLGECSIQRSIIGERSRLDYGVELQDTLMLGADSYQTESESRLLAEGNVPIGIGRDTKIRKCIIDKNARI

SEQ ID NO: 2299 - protein, 245 aa, Rhodopseudomonas palustris CGA009
MRSDDHHLVVAADAEAQAQLAAQRLIARIELHHERPAICLTGGSGPQRLFALLAGEFESRIPWQRVHWFISDERFVPESDPLSNIGAAKHAFLDGRAPPQNIHAIPTDVATPEDAARRYEAELQAFYGDVLTPDRPLFDLVLGGVGPDGHTASLFPGRPQLAIQDRWVAGVGTAPVEPLVPRVTLTLPALASCAEMLFLVHGASKRDILARVFAGEDLPSARARSHGETVWLVTQDALPENAGVA

SEQ ID NO: 2300 - protein, 229 aa, Zea mays
MQIFVKTLTGKTITLEVESSDTIDNVKAKIQDKEGIPPDQQRLIFAGKQLEDGRTLADYNIQKESTLHLVLRLRGGMQIFVKTLTGKTITLEVESSDTIDNVKAKIQDKEGIPPDQQRLIFAGKQLEDGRTLADYDIQKESTLHLVLRLRGGMQIFVKTLTGKTITLEVESSDTIDNVKAKIQDKEGIPPDQQRLIFAGKQLEDGRTLADYNIQKESTLHLVLRLRGGY

SEQ ID NO: 2301 - protein, 479 aa, Bacteroides fragilis
MNIKTKLLFGIGILAGMIILLVTLSVVNLQILTATEPDSPVAMPALERALLWISVTGGICILTGLVLLIWLPRSINRPVKELTCGILEIANHNYEKRLDMRGYEEFREVSDSFNRMAEKLTEYRDSTLADILSAKKFLEAVVNSIHEPIIGLNTEREILFINNEALNVLNMKRENVIRKSAEELSLKNDLLRRLIRELVTPGEKNEPLKIYADNKESYFQASYIPIENAAAEEGEARNLGDVILLKNITEFKELDSAKTTFISTISHELKTPISAIMMSLQLLEDKRVGSLNGEQEQLSKNIRDNSQRLLDITGELLNMTQVEAGKLQMMPKITKPIELIEYAIKANQVQADKFNIQIEVDYPQEKIPKLFVDSEKIAWVLTNLLSNAIRYSKENGRVVIGVRHKKEYIELYVQDFGKGIDPRYHQSIFDRYFRVPGTKVQGSGLGLSISKDFVEAHGGTLTVQSEPGKGSCFVIRLKA

SEQ ID NO: 2302 - protein, 917 aa, Bifidobacterium longum NCC2705
MATPEEQITPADAAIVTTGTGRKGPEEHDLPESLKYDMDLCLEILRNVLGEYNPELLSTFDTVRHYAVEASAEHFAELKDPNPDQDGLKEAVNVIDNMTLHDAQLLARAFATYFHLANLSEENYRVSVLHERENNVSVDQAVDPINELTVAYHQLINETGPAKAKELLNQLEFHPVFTAHPTEARRKAVEGKIRRVSELLEEYKRLGGSDKKECLRRLYNEIDALFRTSPIALKKPTPVEEADTILDIFDNTLFNTIPKVYRRFDDWVLGDKAGLVEPACPAFFHPGSWIGSDRDGNPNVTAKVSRAVARKFSDHVIAALEQATRTVGRNLTMEAETTPPSAELKSLWSHQKEMSERLTDKAALISTKEMHRAVMLVMADRLHYTIERDADLMYHSCDDFLADLKVVQRSLAAAGAKRSAYGPLQDLIWQTETFGFHMVEMEFRQHSVVHARALADIREHGLHGERGELQPMTHEVLDTFRALGAIQKRNGLKAARRYIISFTKSAQNIKDVYELNRLAFSHPEDVPTIDVIPLFEQLEDLQNSVDVLEEMIKIPEVQARLKATGNKLEVMLGYSDSSKDAGPTSATLALHSAQERIAKWAESHDIDLTLFHGRGGAVGRGGGPANRAVLAQPVGSVKCRFKLTEQGEVIFARYGNPVLAIRHVESVAAATLLQSAPSVEKRNTEMTEKYADMAAQLDEAAHNRFLDLLNTDGFAPWFSIVTPLTEIGLLPIGSRPAKRGLGAKSLDDLRTIPWIFSWAQARINLAAWYGLGTACEKFGDLETMRQAYEEWPLFSTFIDNIEMSIAKTDERIARMYLALGDREDLNEKVLNEMELTRKWVLAIVGDKWPLQHRHVLGQAIRIRSPYVDALSVTQVLALKSLRKKVDKEELSQSQQAGFIYLILCTVSGVAAGLQNTG

SEQ ID NO: 2303 - protein, 572 aa, Saccharomyces cerevisiae
MCGIFAAFRHEDVHRYKPKALQLSKRIRHRGPDWSGNAIKNSTIFVHERLAIVGVESGAQPITSSDGEYMLCVNGEIYNHIQLREECADYEFGTLSDCEPIIPMYLKHDIDAPKYLDGMFAWTLYDAKQDRIVAARDPIGITTLYMGRSSASPKTVYFASELKCLTDDCDTITAFPPGHVYDSKTDKITRYFTPDWLDEKRIPSTPIDYMAIRHSLEKAVRKRLMAEVPYGVLLSGGLDSSLIASIAARETAKATNDVEPSTYDSKARHLAGIDDDGKLHTAGWTSLHSFAIGLPNAPDLQAARKVAKFIGSIHHEHTFTLQEGLDALDDVIYHLETYDVTTIRASTPMFLLSRKIKAQGVKMVLSGEGSDEIFGGYLYFAQAPSAAEFHTESVQRVKNLHLADCLRANKSTMAWGLEARVPFLDREFLQLCMNIDPNEKMIKPKEGRIEKYILRKAFDTTGEPDAKPYLPEEILWRQKEQFSDGVGYSWIDGLKDTAEAVISDEMFASPKAEWGSDIPTTKEAFWYRLKFDALFPQKTVADTVMRWIPKADWGCAEDPSGRYAQIHEKHIE

SEQ ID NO: 2304 - protein, 163 aa, Glycine max
NSARASMSNILLQSSSSEEDLQLLMEQRKKKRKQSNRESARRSRMRKQKHLDDLIAQVDHLKKQKSLTLMKVDITTKHYLEVKAENSILWAQKTELTQSLQSLNDIIDLINTTNGVYHTDCYDINNHNNHNNYYNNNNNFMNPMHMAYLNQPIVATADNMFLW

SEQ ID NO: 2305 - protein, 214 aa, Ipomoea nil
IRHEGKSDSKCKTVGIQGIAWAFGGMIFALVYCTAGISGGHINPAVTFGLFLARKVSLTRLVYYIVMQCLGAICGAGVVKGFGKTLYNSKGGGANVVNPGYTKGDGLGAEIVGTFVLVYTVFSATDAKRNARDSHVPVLAPLPIGFAVFLVHLATIPITGTGINPARSLGAAIIYNNEHAWNDHWIFWVGPFVGAALAALYHQVVIRAIPFKSS

SEQ ID NO: 2306 - protein, 153 aa, Limonium gibertii
MTMITPSSELTLTKGTSPAGLNEFALGGRVRCMQVWPPEGLKKFETLSYLPPLDREGLANEISYLMRMGWVPCLEFEVGEAYIHREYHNLPGYYDGRYWTMWKLPMYGCTDPAQVLKEVDECSQLYPHAHVRILGFDNKRQVQCISFIAYKPP

SEQ ID NO: 2307 - protein, 1151 aa, Saccharomyces cerevisiae
MSFSQLEQNIKKKIAVEENIIRGASALKKKTSNVMVIQKCNTNIREARQNLEYLEDSLKKLRLKTAQQSQGENGSEDNERFNSKEYGFLSTKSPNEHIFSRLDLVKYDCPSLAQRIQYMLQQLEFKLQVEKQYQEANTKLTKLYQIDGDQRSSSAAEGGAMESKYRIQMLNKALKKYQAINVDFDQFKHQPNDIMDNQQPKFRRKQLTGVLTIGITAARDVDHIQSPMFARKPESYVTIKIDDTIKARTKPSRNDRWSEDFQIPVEKGNEIEITVYDKVNDSLIPVAIMWLLLSDIAEEIRKKKAGQTNEQQGWVNASNINGGSSLASEEGSTLTSTYSNSAIQSTSAKNVQGENTSTSQISTNSWFVLEPSGQILLTLGFHKSSQIERKQLMGGLHRHGAIINRKEEIFEQHGHHFVQKSFYNIMCCAYCGDFLRYTGFQCQDCKFLCHKKCYTNVVTKCIAKTSTDTDPDEAKLNHRIPHRFLPTSNRGTKWCCHCGYILPWGRHKVRKCSECGIMCHAQCAHLVPDFCGMSMEMANKILKTIQDTKRNQEKKKRTVPSAQLGSSIGTANGSDLSPSKLAERANAPLPPQPRKHDKTPSPQKVGRDSPTKQHDPIIDKKISLQTHGREKLNKFIDENEAYLNFTEGAQQTAEFSSPEKTLDPTSNRRSLGLTDLSIEHSQTWESKDDLMRDELELWKAQREEMELEIKQDSGEIQEDLEVDHIDLETKQKLDWENKNDFREADLTIDSTHTNPFRDMNSETFQIEQDHASKEVLQETVSLAPTSTHPSRTTDQQSPQKSQTSTSAKHKKRAAKRRKVSLDNFVLLKVLGKGNFGKVILSKSKNTDRLCAIKVLKKDNIIQNHDIESARAEKKVFLLATKTKHPFLTNLYCSFQTENRIYFAMEFIGGGDLMWHVQNQRLSVRRAKFYAAEVLLALKYFHDNGVIYRDLKLENILLTPEGHIKIADYGLCKDEMWYGNRTSTFCGTPEFMAPEILKEQEYTKAVDWWAFGVLLYQMLLCQSPFSGDDEDEVFNAILTDEPLYPIDMAGEIVQIFQGLLTKDPEKRLGAGPRDADEVMEEPFFRNINFDDILNLRVKPPYIPEIKSPEDTSYFEQEFTSAPPTLTPLPSVLTTSQQEEFRGFSFMPDDLDL

SEQ ID NO: 2308 - protein, 903 aa, Ralstonia eutropha JMP134
MGLHIGRALFAGGLFLFLLDEAAQVMTERGGMLRAVWPLLLPFMFASGVLAIGYLRMRRLITQRTKAEAKLGHELALRKALLACLPEPVAAKDPDLRYIELNPAFEHFFGIAKADAMGRHALEVESLRERMTGDLLGLQDEAIRTMEPRQARLQMRNASGQSRRVNFWALPFRNPDGMPGGIVTVHFDVTDIDESRERAQAFERRLKDVVDSLPVTVFQSRLPQDASDRGWEVTYAAGDGVGRGIDTVAALGAAPSDSTAFCPQDRPRLRAAILESARTCQPLDVEGRLNRGPAPGWIRVRAMPRRDGNCTVWNGVVIDVTDVHRQAEALHEAKDAAEADLRAKEGFLAMMSHEIRTPMNGILGLVELLRNTALTPAQHRMLTLAHESGHALAQILDDILDYARIEAGRLAIVPAPVDLRELLDSVSSLLLPQAQQKGLQLRVHVSADVPATVRADGIRMRQILFNLLGNAIKFTDRGSVTLHASAETSDGETAALLLEVQDTGIGIASADMPRLFTPFMQGERSVTRRMGGTGLGLAISRSLAAMMGGSLVLTSEEGTGTTASLRVPCPVMPEESGPPMPMGQSEAISVGETEMSEMPACWRILVAEDHYISQEVIRQQLVVLGHSPTVVDNGEAALDALCAGTFDLLLTDFHLPRMDGFALTQALRNSRDATLRALPVVGITATTVREQHQRGFEAGMNACVLKPITLASLRQGLASAMHAEFSANVPVGSRRPQWEATDAPRFDATRVRRDDLLAVLVPGSGEAGLQACINALQADRKALLDGLATGATPVLRAWCHRMRGALSVFGQPHLDDIIDSLQRAVERGNGDRIRNASRPVLDAIAHLTQALAQDTRDAEARAQAPVNCRNCMLSRAECAMGDSHGGLESGEGRSNGNQGNSRG

SEQ ID NO: 2309 - protein, 154 aa, Limonium gibertii
MTMITPSSELTLTKGTSPAGLNEFALGGKVQCMQVWPPEGLKKFETLSYLPPLDREGLANEISYLMRMGWVPCLEFEVGEAYIHREYHNLPGYYDGRYWTMWKLPMYGCTDPAQVLKEVDECSKLYPHAHIRILGFDNKRQVQCISFIAYKPPS

SEQ ID NO: 2310 - protein, 340 aa, Moorella thermoacetica ATCC 39073
MAKIITFGEIMLRLSTPEYQRFVQAESFNVTYGGGEANVACSVVNYGAEAAFVTKVPANPLGQAAINHLRRYGVDTSHILQGGERLGIYFLETGASQRPSKVVYDRKYASIAGVQPGEFDWARIFSGASWFHFTGITPALGENVAAVTLEAARKAKEMGLTVSCDLNYRKNLWTPEQARATMTELMTYVDVAIGNEEDAEKVFGIKAAASDVTKGEINEEGYRQVARELLNRFNLQKVAITLRESFSAFDNGWSALIYDGQEFYRSRRYQIHIVDRVGGGDAFAGGLIYALTEGFAPAEALEFAVAASCLKHTIPGDFNHVTREEVLSLMRGDASGRVQR

SEQ ID NO: 2311 - protein, 257 aa, Elymus repens
CELDNIMRLTGITGIINGMDVSEWDPTKDKFLAVNYDITTALEGKALNKEALQAEVGLPVDRKVPLVAFIGRLEEQKGPDVMIAAIPEIVKDEDVQIALLGTGKKKFERLLKSVEEKFPGKVRAVVRFNAPLAHQMMAGADVLAVTSRFEPCGLIQLQGMRYGTPCACASTGGLVDTIVEGKTGFHMGRLSVDCNVVEPADVKKVATTLKRAVKVVGTPAYKEMVKNCMIQDLSWKGPAKNWEDVLLELGVEGSEPG

SEQ ID NO: 2312 - protein, 621 aa, Debaryomyces hansenii CBS767
MVQDHDCKEIPPIGRDEENTTKCTMDNEFKEVDEYEQSSSTKTHEPHVPLMRGVQLIENVKTAMDDSKRGNIVKAVYGTSILVCAWAASLDASTTNSLQPLATSSFGAHSSLATINIANGIIGAVSNPILAKFADLISRTFIYIISVFFYTVGYIIAASSQTATAFIVGLGIATVGKTGVDFVNTLIVIDFTPLKWRGFVTSILATPFIINCWFAGLIVGDLRVANWKWGYGMFAIIIPVVLLPAIALMTYFDKTVTLADSFSAGKSKTKKEELYNIVSIIKQGLIEVDAFGLLLLGFGFALLLLPFSLAGSADNGWRNPSLIAMIIVGGLLVIAFFVYEIYYAPFPAMPKRILNVTLVMSIIIDFFYYFAGYIGLLYFSSYVFVVKDWNYTNWTYFNNTLTLALCIFGVIAGILFRVTRRYKIWQLLGLAMRIISYGILILGKGSTIVTGALIAHPILAGGGGGLSVVASGVALQASVEHSQVALAIAMLSLWTRIGGSIGEAITSAIWNAKMPASLRKHLSSSVSDAQVAEFFGDITLLHEYPIKSEIRQGAIAAYQEVNYYFFCIALGLSFIPFICAFFQTNYFLNDKQNAVDQDVHDEKDITKGAPKNWKDKFARCF

SEQ ID NO: 2313 - protein, 212 aa, Populus tremula
MKSTLLVWFSFLLFAFVLSVPSIEANTEPVLDIQGEELKAGTEYIISSIFWGAGGGDVSATNKTCPDDVIQYSLDLLQGLPVTFSPASSEDDVIRVSTDLNIKFSIKKACDRSSVWKIQKSSNSEVQWLVTTGGEEGNPGCDTFTNWFKIEKAGVLGYKLVYCPEDICPSVGLCRDVGIYFESNRGRILSLSDKLSPFLVLFKKVGPLSSSI

SEQ ID NO: 2314 - protein, 217 aa, Zea perennis
IVNGMDVSEWDPSRDKYIAVKYDVSTAVEAKALNKEALQAEVGLPVDPNIPLVAFIGRLEEQKGPDVMAAAIPQLMEMVEDVQIVLLGTGKKKFERMLMSAEEKFPGKVRAVVKFNAALAHHIMAGADVLAVTSRFEPCGLIQLQGMRYGTCNVVEPADVKKVATTLQRAIKVVGTPAYEEMVRNCMIQDLSWKGPAKNWENVLLSLGVAGGEPGVE

SEQ ID NO: 2315 - protein, 464 aa, Triticum aestivum
  misc_feature (4)..(4): Xaa can be any naturally occurring amino acid
  misc_feature (25)..(25): Xaa can be any naturally occurring amino acid
  misc_feature (29)..(29): Xaa can be any naturally occurring amino acid
  misc_feature (36)..(36): Xaa can be any naturally occurring amino acid
  misc_feature (38)..(38): Xaa can be any naturally occurring amino acid
  misc_feature (49)..(49): Xaa can be any naturally occurring amino acid
  misc_feature (52)..(52): Xaa can be any naturally occurring amino acid
  misc_feature (62)..(62): Xaa can be any naturally occurring amino acid
  misc_feature (72)..(72): Xaa can be any naturally occurring amino acid
  misc_feature (363)..(363): Xaa can be any naturally occurring amino acid
  misc_feature (375)..(375): Xaa can be any naturally occurring amino acid
  misc_feature (382)..(382): Xaa can be any naturally occurring amino acid
  unsure (1)..(464): unsure at all Xaa locations
GWQXNAPPPPPDHVVKMNSHPSTKXPPPXVNVNSSXSXSHFSGGGENRXLQXPFGNALSFSXCTFTYEELAXATARGADANLLGQGGFGFVHKGVLPDGTEVAVKQLREGSGQGEREFQAEVEIISRVHHKHLVTLVGYCISEDKRLLVYEFVPNNTLEFHLHGRRGPTMDWPSRLRIALGSAKGLAYLHEDCHPKIIHRDIKASNILLDYRCEAKVADFGLAKLTSDNNTHVSTRVMGTFGYLAPEYASSGKLTEKSDVFSFGVMLLELITGRRPVSSKQAHMDDSLVDWARPLMTQALEDGNHDALVDPHLGIDFSDNEMARMIACAAACVPPPAPRRPRMSQVVRALEGDVSLDDLHEGXRPGHSRFMGSHXSSEYDTXQYNGGPEEFRKMALGTSSFQSSQLTPSSGEHGAGHPPSVPEQRTAIQQTQEVELGTSTEARRRRRREPGFHEMTTFPFLGES

SEQ ID NO: 2316 - protein, 318 aa, Silene latifolia
NFLFKSPKEDSPLKATDFGLSDFIKPSRKFTDIVGSAYYVAPEVLKRKSGPESDVWSIGVITYILLCGRRPFWDKTEDGIFKEVLRNKPDFRRKPWPSISNSAKDFVRKLLVKDPFVRPTAAQALSHQWVREGGSALDIPIDISVLHNMRQFVKYSRMKQFALRALASTLNDDELANLRDQFDAIDVDKSGTISLEEMRQALAKDLPWKLKDSRVMEIVEAIDSNTDGFVDFTEFVAATLHVHQLHELDNEKWQELSQRAFEKFDVDKDGYITPDELRMQTGLKGSMEPLLEEADIDKDGRISLAEFRRLLRSASMSS

SEQ ID NO: 2317 - protein, 213 aa, Populus tremula
MKSTLLAWFTFLLFGFVLSVPSIEASTEPVLDIQGEELKAGTEYIISSIFWGAGGGDVAATNKTCPDDVIQYSLDLLQGLPVTFSPASSEDDVIRVSTDLNIKFSIKKACDRSSVWKIQKSSNSEVQWLVTTGGEEGNPGCDTFTNWFKIEKGAGILGYKLVYCPEDICPSVGLCRDVGIYFESNRGRILSLSDKLSPFLVLFKKVGPLSSSI

SEQ ID NO: 2318 - protein, 318 aa, Silene latifolia
NFLFKSPKEDSPLKATDFGLSDFINRSRKFTDIVGSAYYVAPEVLKRKSGPESDVWSIGVIMYILLCGRRPFWDKTEDGIFKEVLRNKPDFRRKPWPSISNSAKDFVRKLLVKDPLVRLTAAQALSHQWVREGGNALDIPIDISVLHNMRQFVKYSRMKQFALRALASTLNDDELANLRDQFDAIDVDKSGTISLEEMRQALAKDLPWKLKDSRVMEIVEAIDSNTDGFVDFTEFVAATLHVHQLHELDNEKWQELSQRAFEKFDVDKDGYITPDELRMHTGLKGSMEPLLEEADIDKDGRISLAEFRRLLRSASMSS

SEQ ID NO: 2319 - protein, 213 aa, Populus tremula
MKSTLLAWFTFLLFAFVLSVPSIEASTEPVLDIQGEELKAGTEYIISSIFWGAGGGDVAATNKTCPDDVIQYSLDLLQGLPVTFSPASSEDDVIRVSTDLNIKFSIKKACDRSSVWKIQKSSNSEVQWLVTTGGEEGNPGCDTFTNWFKIEKGAGILGYKLVYCPEDICPSVGLCRDVGIYFESNRGRILSLSDKLSPFLVVFKKVGPLSSSI

SEQ ID NO: 2320 - protein, 288 aa, Arabidopsis thaliana
MLNSITLTRKPPLPFNSVGFSGNHSSSFGRRTITEGSSSKALSFGYKNVGSLKCGRSNWPGRSGTAFGHLVRVSAVPGGNSGGSGGLGGSGGGGGGSGGGGGDGSDGKGKKWSLLSWYQALLSNSPVLTKAVTAALLNLVGDLICQLTINKTSSLDKKRTLTFTFLGLGLVGPTLHFWYLYLSKVVTASGLSGAVIRLLLDQFVFAPIFVGVFLSAVVTLEGKPSNVIPKLQQEWTGAMIANWQLWIPFQFLNFRFVPQNYQVLASNVVALAWNVILSFKAHKEVVAK

SEQ ID NO: 2321 - protein, 475 aa, Zea mays
MDMALASKASPPPWNATAAEQPIPKRDKAAANDSTYLNPQAHDSVLGIILGGGAGTRLYPLTKKRAKPAVPLGANYRLIDIPVSNCLNSNISKIYVLTQFNSASLNRHLSRAYGSNIGGYKNEGFVEVLAAQQSPDNPNWFQGTADAVRQYLWLFEEHNVMEFLILAGDHLYRMDYEKFIQAHRETNADITVAALPMDEKRATAFGLMKIDEEGRIIEFAEKPKGEQLKAMMVDTTILGLDDVRAKEMPYIASMGIYVFSKDVMLQLLREQFPEANDFGSEVIPGATSIGKRVQAYLYDGYWEDIGTIAAFYNANLGITKKPIPDFSFYDRFAPIYTQPRHLPPSKVLDADVTDSVIGEGCVIKNCKINHSVVGLRSCISEGAIIEDSLLMGADYYETEADKKLLAEKGGIPIGIGKNSCIRRAIIDKNARIGDNVKILNADNVQEAAMETDGYFIKGGIVTVIKDALLPSGTVI

SEQ ID NO: 2322 - protein, 334 aa, Lycopersicon chilense
MNRAKDPVRVLVTGAAGQIGYALVPMIARGVMLGADQPVILHMLDIPPAAEALNGVKMELVDAAFPLLKGVVATTDAVEACTGVNVAVMVGGFPRKEGMERKDVMSKNVSIYKSQASALEKHAAPNCKVLVVANPANTNALILKEFAPSIPEKNITCLTRLDHNKGPWQISERLSVQVSDVKNVIIWGNHSSSQYPDVNHATVSTPAGDKPVRELVADDAWLNGEFISTVQQRGAAIIKARKLSSALSAASSACDHIRDWVLGTPEGTFVSMGVYSDGSYNVPSGLIYSFPVTCKNGEWSIVQGLPIDEFSRKKLDLTAEELSEEKALAYSCLA

SEQ ID NO: 2323 - protein, 546 aa, Xanthomonas campestris pv. campestris str. ATCC 33913
MAAKDIRFGEDARTRMVRGVNVLANAVKATLGPKGRNVVLEKSFGAPTITKDGVSVAKEIELADKFENMGAQMVKEVASKTNDNAGDGTTTATVLAQALIREGAKAVAAGMNPMDLKRGIDQAVKAAVIELKNISKPTTDDKAIAQVGTISANSDESIGNIIAEAMQKVGKEGVITVEEGSGLENELDVVEGMQFDRGYLSPYFINNQQSQSADLDDPFILLHDKKISNVRDLLPVLEGVAKAGKPLLIVAEEVEGEALATLVVNTIRGIVKVVAVKAPGFGDRRKAMLEDMAVLTGGTVISEEVGLALEKATIKDLGRAKKVQVSKENTTIIDGAGDSATIEARVGQIKTQIEDTSSDYDREKLQERVAKLAGGVAVIKVGASTEIEMKEKKARVEDALHATRAAVEEGVVPGGGVALVRALVAVGNLTGANEDQTHGIQIALRAMEAPLREIVANAGEEPSVILNKVKEGTGNYGYNAANGEFGDMVEFGILDPTKVTRSALQNAASIAGLMITTEAMVADAPKKDEPAMPAGGGMGGMGGMDF

SEQ ID NO: 2324 - protein, 479 aa, Gluconobacter oxydans 621H
MSSSQNRPAIVWFRDDLRMADHPALHEAAASGWPLICLYILDDVTPALHPLGAAARWWLRGALADLRRNLEKQGGTLLTLSGSAEKLLPQLAKQTDAASVHWHHRLHERERAQDNRIRRTLEEQECEVHAQWGTVLVDPDTVQTKQGGFYKVCGSFWKALQTHAVPEPLEAPSRLSFHAIPASVLSDARLNEDSLCPQAPDWAAGFRKTWEPGEAEGQEHLEDFLKNSVAGYPRGRDRVAEEGTSRLSPYLASGAVSPRQVWAALQKHGAHTDGPRIFLSELGWREFARYTLYHLPKLPFENLSPKFSGMHWRRSAADLKAWQRGQTGVPIVDAGMRQLWQTGWMHNRARMIVGSFLTKHLLIDWKEGDAWFRDTLVDADFANNAMNWQWVAGTGIEATPFFRIFNPTRQAEKFDPNGDYIRQWVPELRRLSGKALFEPWAAKDEELEKAGVRLGKSYPRPIVDLKEGRDRALQAFRSL

SEQ ID NO: 2325 - protein, 121 aa, Brassica napus
  misc_feature (25)..(25): Xaa can be any naturally occurring amino acid
  unsure (1)..(121): unsure at all Xaa locations
AKNEAFNCSNADVFKWKHLWKILAXQFGIEEYGFEEGKNVGLVEMMKGKESVWEEMVKENQLQEKKLDEVGVWWFADVVLGVDGMIDSMNKSKEYGFLGFRNSNNSFISWIDKYKAFKIVP

SEQ ID NO: 2326 - protein, 327 aa, ASPERGILLUS NIDULANS FGSC A4
MPSALLIGDITHARKEWEDLSSILTLKEFPSGNREDFIRNLKDGKYDDLVAIYRSNTSTKFTGPFDAELISLLPKSLKYICHNGAGYDNIDIPACSEKGISVSSTPVAVNNATADVGIFLMIGALRQAYVPLTAIREGKWHGQTTLGHDPKGKVLGILGMGGIGREMANRARAFGMTIQYHNRSRLSPELEQGAKYVSFDDLLATSDVLSLNLALNPSTRHIIGEKEFQKMKDGVVIVNTARGALIDEKALVAALESKKVMSAGLDVYENEPIVELGLLNNPRVMLLPHIGTMTYETQKEMEILVLDNLRSAVEKGELITQVPEQKK

SEQ ID NO: 2327 - protein, 482 aa, Thermococcus kodakarensis KOD1
MGVREVVYAIERWFPEVERPKRHVPLKEKFMWTGIALLLYFVLAEIPLYGIPQQVQDYFATLRFVLAGRSGSLLTLGIGPIVTASIIMQLLVGSEIVRLDLSNPEDRRFYQATQRVFAVFMSFFEAFIYVFAGAFGKVNTGIGAFQTVSIPNGPIYIGIGLALLIVLQLGLASTLLILLDELVSKWGIGSGISLFIAAGVSQTVIYRSLAPVQSNQYIDPLTGEPALIGAIPAFIQHILKGDISGAIYRGGTLPDIVKLIGTIVVFLVVVYLESMRVEIPLSYGRVTVRGRYPIRFMYVSNIPIILTMALYANIQLWARLLANYGHPILGQFDSAGNPVGGFVIYLYPPRDIFHVINDPVRALVYALMTIFWSLIFGFLWVELTGLDARSIARQLQNAGLQIPGFRRDPRILERVLQRYIPYVTFWGSFTIALVAVLADFLGALGTGTGILLTVGILYRFYEEIAREQATEMFPALRKFFAK

SEQ ID NO: 2328 - protein, 507 aa, Karenia mikimotoi
MCSRLLALTCAFCVCHARKMQTPSYQQQVKYVAEQMSAKDDKLDLNSLATLLLASIPRSAFAASGAGAHLPTPNRHDGIKMSTNPDAPIKLGVNGFGRIGRQVVRIAMDREAFVLKHINSPMSPEYMKYLLNHDTVHGRFDGTVEISDDGLIINGLPVSLSATRDPTEIPWKSAGVEYVCESTGAFTTTEGCLKHIESGAKKVIISAPAKDADTPTIVVGVNTDDYDPSMKVVSCASCTTNGLAPLVKVINEKFGIKQGLMTTVHAATASQLTVDGSMKGKDWRAGRAASANIIPSSTGAAKAVAKAYPVMKGKLTGMAFRVPTVDVSVVDLTCELEKETTYDDIKAEVKLASETYAKGVVGYTEDQVVSSDFIGETCSTVFDAEAGIMLTPTFVKLVSWYDNEWGYSTRLVDLVGLMAAADGVTTKEKALAYFTARAVEDTRQSKRSGDVRMEDWAQAMEEADEKLKKVIAAVLDVSESKIVPDATFESLGVQQDEIDPDEMFNPK

SEQ ID NO: 2329 - protein, 454 aa, Oryza sativa (japonica cultivar-group)
MVKGGREALLGGYEMGRTLGEGNFGKVKYARHLATGGHFAVKILDRGRVVSLRAGDQIRREIATLKLLRHPHVVRLHEVAASKTKIYMVLEFVNGGELFERIAVKGKLSEKEGRRLFQQLIDGVSYCHDRGVYHRDLKPENVLVDQKGNIKISDFGLSALPQHLGNDGLLHTTCGSPNYIAPEVLQNKGYDGSLSDIWSCGVILYVMLIGYLPFDDRNIVVLYQKIFKGDTQIPKWLSHSAQNLLRRILEPNPMKRIDMAGIKSHEWFQKDYIPVLPYDDDDEDVQFGARLPAKEQINDEPGDKNSHQINAFQLIGMASSLDLSGFFEDEEVSQRRIRFTSTHPPKDAFDKIESSATELGFQVQRGHSKLKLMRNCKGSKNPESFMVSAEVFELGPSVNVVELRKSNGDPALYRQLCERISSDMGARNTEQIFATASLEDDLQNSNAGTPLFAL

SEQ ID NO: 2330 - protein, 307 aa, Karenia mikimotoi
RIGRLVFRAAMSNPDVKVVGINEPFMDLTYIVYQLKYDSVHKRFAGTIAMKQDGDKDFLIVNGMEIAVFHEKDPTAIPWGACGACYICESTGIFTAKEKAELHIKGGAKKVIISAPPKDSVPIYVVGVNHTEYKTSDTVVSSASCTTNCLAPLAKVVHENYGIKEGLMTTVHAMTATQLTVDGPSRGGKDWRGGRCASQNIIPSSTGAAKAVGKCLPALNGKLTGMAFRVPTPDVSVVDLTCALEKGAKYDDIVAKVKEAAAGPMKGVLDWTDEEVVSTDFVTCPASSVFDVKAGISLNENFVKLVT

SEQ ID NO: 2331 - protein, 150 aa, Thermococcus kodakarensis KOD1
MIMLKTQRRIAAELLKCGENRIWIDPERIEDVAAAITREDIKRLIHDGVIKKKPIKGQSRARARAFQEARKKGRHRGPGSKKGKKTARMGKKEVWMMTIRALRKELRKLKAEGKLDAHTYRRLYIRAKGGQFKNKRQLYMFMQEHGILKE

SEQ ID NO: 2332 - protein, 439 aa, Oryza sativa (japonica cultivar-group)
MESKGKILMERYELGKLLGKGTFGKVHYAGNLESNQSVAIKMMDKQQVLKFGLSEQIRREITTMRLVAHKNIVQLHEVMATRNKIYFVMEYVKGGELFEKVAKRGKLTEVVAISTSSNSLSAVDYCHSRGVYHRDLKPENLLLDENENLKVSDFGLSALSESKRQDGLLHTTCGTPAYVAPEVISKIGYDGAKSDIWSCGVILFVLVGGYLPFQGPNLMEMYRKIQHGEFRCPGWFSRKLQNLLYKIMDPNPSTRISIQKIKESTWFRKGPEENRILKERTLNENPPKNVALVLGVRPKKNAHEDVKPMSVTNLNAFEIISFSKGFDLSGMFIVKEWRNEARFTSNKSASTIISKLEDVAKALNLRVRKKDNGVVKMQGRKEGRNGVLQFDIKIFEVTTSYHIIEMKQTSGDSLEYRQLLEEGIRPALKDIVLAWHGDE

SEQ ID NO: 2333 - protein, 331 aa, Zea mays
MATSTSQHALSSIKLLSTGCLHPDKRNCRVLSVSVGRRCPSARNLGLLCASNSQSSVIEPVQLPRSPKSGVTPKKSGESALILIRHGESLWNEKNLFTGCVDVPLTPKGVDEAIEAGKRICNIPVDVIYTSSLIRAQMTAMLAMMQHRRKKVPIILHNESEQAHMWSQIYSEETKKQSIPVITAWQLNERMYGELQGLNKQETADRFGKEQVHEWRRSYDIPPPNGESLEMCAERAVAYFKDQIIPKLVDGKHVMIAAHGNSLRSIIMHLDKLTSQEVISLELSTGIPMLYIFKEGKFIRRGSPAGPSEAGVYAYTKNLAQYRQKLDGIVQ

SEQ ID NO: 2334 - protein, 257 aa, Elymus repens
CELDNIMRLTGITGIINGMDVSEWDPTKDKFLAVNYDITTALEGKALNKEALQAEVGLPVDRKVPLVAFIGRLEEQKGPDVMIAAIPEIVKDEDVQIVLLGTGKKKFERLLKSVEEKFPGKVRAVVRFNAPLAHQMMAGADVLAVTSRFEPCGLIQLQGMRYGTPCACASTGGLVDTIVEGKTGFHMGRLSVDCNVVEPADVKKVATTLKRAVKVVGTPAYKEMVKNCMIQDLSWKGPAKNWEDVLLELGVEGSEPG

SEQ ID NO: 2335 - protein, 422 aa, Karenia mikimotoi
MAVRLGINGFGRIGRLVFRAAMENQSVTMAAINEPFMDLDYMKYLLAYDTVHNKFKGTVETKKDNSGEYLVVNGMSVRAFHEKDPGSIGWGAVGAAYICESTGVFTTQEKAALHLKGGAKKVIISAPPKDAVPMFVMGVNHEKYTADLTVVSNASCTTNCLAPLTKVIHDNYGLVEGLMTTVHAMTATQLTVDGPSRGGKDWRGGRAASENIIPSSTGAAKAVGKVIPEMNGKLTGMAFRVPTPDVSVVDLTCRIAKPAKMADICAKIKEASETTMRGIMGYTDKEVVSCDFTTDPRSSIFDASACIALNDTFIKLISWCDNEWGYSNRLVELASHMAMVDGVVPRPAKVVSVKAREIFDSRGNPTVEVDLLTDMHLFRAAVPSGASTGIYEALELRDGDKKRLLGKGVLKAVENVNTIIGP

SEQ ID NO: 2336 - protein, 538 aa, primary endosymbiont of Sitophilus oryzae
MAAKDVKFGNDARVKMLRGVNVLADAVKVTLGPKGRNVVLDKSFGAPVITKDGVSVAREIELEDKFENMGAQMVKEVASKANDAAGDGTTTATVLAQSIVNEGLKAVAAGMNPMDLKRGIDKAVIAAVEELKKLSVPCSDSKAIAQVGTISANSDETVGTLIAEAMAKVGKEGVITVEEGSGLQDELDVVEGMQFDRGYLSPYFVNKPETGAIELESPFILLADKKISNIREMLPVLEAVAKAGKPLLIIAEDVEGEALATLVVNTMRGIVKVAAVKAPGFGDRRKAMLQDIAILTAGTVISEEIGLELEKATLEDMGQAKRVVITKDTTTIIDGVGDKALIDSRVTQINQQRDEATSDYDREKLQERVAKLAGGVAVIKVGAATEVEMKEKKARVEDALHATRAAVEEGVVAGGGVALIRVANSIAELRGDNEDQNVGIKVARRAMEAPLRQIVANAGEEPSVIANKVKAGEGNTGYNAATEEYGNMIDMGILDPTKVTRSALQYAASIAGLMITTECMVTDQPKEDKPDLGGMGGM

SEQ ID NO: 2337 - protein, 257 aa, Elymus repens
CELDNIMRLTGITGIVNGMDVSEWDPTKDKFLAVNYDITTALEAKALNKEALQAEVGLPVDRKVPLVAFIGRLEEQKGPDVMIAAIPEIVKEEDVQIILLGTGKKKFERLLKSVEEKFPGKVRAVVRFNAPLAHQMMAGADLLAVTSRFEPCGLIQLQGMRYGTPCACASTGGLVDTIVEGKTGFHMGRLSVDCNVVEPADVKKVATTLKRAVKVVGTPAYQEMVKNCMIQDLSWKGPAKNWEDVLLELGVEGSEPG

SEQ ID NO: 2338 - protein, 302 aa, Karenia brevis
RIGRQVVRIAMDREAFVLKHINSPMSPEYMKYLLNHDTVHGRFDGTVEISDDGLIINGLPVSLSATRDPTEIPWKSAGVEYVCESTGAFTTTEGCLKHIESGAKKVIISAPAKDADTPTIVVGVNTDDYESSMQVVSCASCTTNGLAPLVKVINEKFGIKQGLMTAVHAATASQLTVDGSMKGKDWRAGRAASANIIPSSTGAAKAVAKAYPVMKGKLTGMAFRVPTVDVSVVDLTCELEKETTYEDIKAEVKLASETYAKGVVGYTEDQVVSSDFIGETCSTVFDAEAGIMLTPTFVKLVS

SEQ ID NO: 2339 - protein, 380 aa, Oceanobacillus iheyensis HTE831
MAEQKPSHMKEEVTEVTETTEVTTLEQAKNRLLEIGKKRGSLAYEEVADGLSNFELEPEQMDEFYEYLEEQGVDVIGESEDDPEMQKIAKEEEFNLNDLSVPLGIKINDPVRMYLKEIGRVNLLSAAEEIDLASSIEEGDEEAKRRLAEANLRLVVSIAKRYVGRGMLFLDLIQEGNMGLIKAVEKFDYRKGFKFSTYATWWIRQAITRAIADQARTIRIPVHMVETINKLIRVQRSLLQDLGREPTPEEIGEEMELGPDKVRDILKIAQEPVSLETPIGEEDDSHLGDFIEDQEAISPSDHAAYELLKEQLEDVLDTLTDREENVLRLRFGLDDGRTRTLEEVGKVFGVTRERIRQIEAKALRKLRHPSRSKRLKDFLD

SEQ ID NO: 2340 - protein, 257 aa, Elymus repens
CELDNIMRLTGITGIVNGMDVSEWDPTKDKFLAVNYDITTALEGKALNKEVLQAEVGLPVDRKVPLVAFIGRLEEQKGPDVMIAAIPEIVKDEDVQIVLLGTGKKKFERLLKSVEEKFPGKVRAVVRFNAPLAHQMMAGADVLAVTSRFEPCGLIQLQGMRYGTPCACASTGGLVDTIVEGKTGFHMGRLSVDCNVVEPADVKKVATTLKRAVKVVGTPGYHEMVKNCMIQDLSWKGPAKNWEDVLLELGVEGSEPG

SEQ ID NO: 2341 - protein, 318 aa, Silene dioica
NFLFKSPKEDSPLKATDFGLSDFIKPSRKFTDIVGSAYYVAPEVLKRKSGPESDVWSIGVITYILLCGRRPFWDKTEDGIFKEVLRNKPDFRRKPWPSISNSAKDFVRKLLVKDPFVRPTAAQALSHQWVREGGSALDIPIDISVLHNMRQFVKYSRMKQFALRALASTLNDDELANLRDQFDAIDVDKSGTISLEEMRQALAKDLPWKLKDSRVMEIVEAIDSNTDGFVDFTEFVAATLHVHQLHELDNEKWQELSQRAFEKFDVDKDGYITPDELRMHTGLKGSMEPLLEEADIDKDGRISLAEFRRLLRSASMSS

SEQ ID NO: 2342 - protein, 212 aa, Populus tremula
MKSTLLVWFSFLLFAFVLSVPSIEANTEPVLDIQGEELKAGTEYIISSIFWGAGGGDVSATNKTCPDDVIQYSLDLLQGLPVTFSPASSEDDVIRVSTDLNIKFSIKKACDRSSVWKIQKSSNSEVQWLVTTGGEEGNPGCDTFTNWFKIEKAGVLGYKLVYCPEDICPSVGLCRDVGIYFESNRGRILSLSDKLSPFLVVFKKVGPLSSSI

SEQ ID NO: 2343 - protein, 314 aa, Dunaliella tertiolecta
MDAYEKLEKIGEGTYGKVYKARDINTGKLVALKKTRLEMEEEGVPSTTLREVSLLLMLSESNHVVKLIAVEHVEENGKPCLYLVFEYLSTDMKKWMDRNGRGPAHPLPKPAIKSLTYQLIKGLAHCHKHGVMHRDLKPQNLLVDDSIMCCKIADLGLGRAFSIPIKSYTHEIVTLWYRAPEVLLGSTHYSTPVDMWSVGCIFAELVRKTPLFPGDCELQQLLHIFKLLGTPNEEVWPGVSKLRDWHEFPQWHPQDLSRIFPTLEPEGVDLLKRMIEYDPAKRISAKEALKHPYFDDPMIREVDQQENPEVRARD

SEQ ID NO: 2344 - protein, 696 aa, Neurospora crassa
MPAQTSFPSLAALRRLQTLNHVYAPLRRTGTGRITNGWTCASCRSQLSASSASSSSSSSSLSVSLYNSTLARRSFSSSSKRSSDQNSNGSSSSSSSSSSSNGNGKTNNNNNNNNNNGRRTVLLAAGGGAAAAGLLAVGDDVKYTYEAVERTGRVASTLAICVNDYRVTLNAREKIEDPEEKQRLLRECHQRCADRTLEVLEKSGGIFIKLGQHLSAMNYLLPPEWTTTFIPLQDKCPVSSFESIERMFLEDTGTSLWDYFSEFSREPIGAASLAQVHLATIKETGQRVAVKVQHPSLQRWAPLDMRLTSTTFKTLKYFFPEYDLEWLSSEVEISLPKELDFTCEAENARRTSRYFAEFAPSLPLVIPDVLWAKKRLLVMACESGHRLDDLAYMDAYGIDRDEVSATLARIFNEMIFGEGAPLHCDPHGGNIAIRYHDNSNKSKSKSNFDIILYDHGLYRDIPLPLRRSYAKLWLAIIDGDIPKMKRYVHEVAGIGEDKFPLFASAITGRDFINVVSATDSGGVLKPKEASEQKSMSTALQEGLIVDLVQMLGQVPRIILLILKTNDLTRALDESLHTKQGPVRQFLILARYCMRTVFYEQLEEIRGLGSIWSPANLVRLVGAWWGMARVEVKLEVFELWLRVKRTLGLGSGFGMGMGTGEEAQQQVVPVGKKGQKRLEREVEAAAAVSVAAAAAAA

SEQ ID NO: 2345 - protein, 462 aa, Mesorhizobium sp. BNC1
MSDFDLIVIGAGPGGYVAALRAAQAGMRVACIDERATAGGTCLNVGCIPSKALLSSTEHWAGLKSLADHGIETEAARVDLSRMMARKDKVVSDLTKSIAFLFNKAGVEFIHGRASIAAPGRVTVGVREISSQHILIATGSAPAVLPNVPFDEKLVLSSTGALSLAKVPDRLVVVGAGVIGLEIGQIWSRLGAKVTVVEYLDRILPGMDGETAKNAQRIFARQGIGFMLNAAVEAVVDNGETAEIKIKSRASGKVEKLQADAVLVAIGRKPHTGGLGLEALRVRRDARGFIEVDEQFRTSVPGILAIGDVVPGPMLAHKAEEDAVACIDALAGKPHCAPDYGLVPGVVYTTPEIAGVGLTEDDASAAGRAVLIGKASFLANGRARAIGTTDGFAKVIACAETGKLLGAHILGHGAGELLQELVLALRFGASLNDVAGTSHAHPGMGEAVKEACLSVLDARSLD

SEQ ID NO: 2346 - protein, 318 aa, Silene dioica
NFLFKSPKEESPLKATDFGLSDFINRSRKFTDIVGSAYYVAPEVLKRKSGPESDVWSIGVIMYILVCGRRPFWDKTEDGIFKEVLRNKPDFRRKPWPSISNTAKDFVRKLLVKDPLVRLTAAQALSHQWVREGGNALDIPIDISVLHNMRQFVKYSRMKQFALRALASTLNDDELANLRDQFDAIDVDKSGTISLEEMRQALAKDLPWKLKDSRVMEIVEAIDSNTDGFVDFTEFVAATLHVHQLHELDNEKWQELSQRAFEKFDVDKDGYITPDELRMHTGLKGSMEPLLEEADIDKDGRISLAEFRRLLRSASMSS

SEQ ID NO: 2347 - protein, 318 aa, Silene diclinis
NFLFKSPKEDSPLKATDFGLSDFIKPSRKFTDIVGSAYYVAPEVLKRKSGPESDVWSIGVITYILLCGRRPFWDKTEDGIFKEVLRNKPDFRRKPWPSISNSAKDFVRKLLVKDPFVRPTAAQALSHQWVREGGSALDIPIDISVLHNMRQFVKYSRMKQFALRALASTLNDDELANLRDQFDAIDVDKSGTISLDEMRQALAKDLPWKLKDSRVMEIVEAIDSNTDGFVDFNEFVAATLHVHQLHELDNEKWQELSQRAFEKFDVDKDGYITPDELRMHTGLKGSMEPLLEEADIDKDGRISLAEFRRLLRSASMSS

SEQ ID NO: 2348 - protein, 318 aa, Silene diclinis
NFLFKSSKEDSPLKATDFGLSDFINPGRKFHDIVGSAYYVAPEVLKRRSGPESDVWSIGVITYILLCGRRPFWDKTEDGIFKEVLRGKPDFGRKPWPTISNSAKDFVRKLLVKDPLVRLTAAQALSHQWVREGGNALDIPIDISVLHNMRQFVKYSRMKQFALRALASTLNDDELANLRDQFDAIDVDKSGTISLEEMRQALAKDLPWKLKDSRVMEIVEAIDSNTDGFVDFTEFVAATLHVHQLHELDNEKWQELSQRAFEKFDVDKDGYITPDELRMHTGLKGSMEPLLEEADIDKDGKISLAEFRRLLRSASMSS

SEQ ID NO: 2349 - protein, 276 aa, Oryza sativa
MHPSGGALSVPPGFRFHPTDEELLYYYLRKKVAYEAIDLDVIREIDLNKLEPWDLKDRCRIGTGPQNEWYFFSHKDKKYPTGTRTNRATTAGFWKATGRDKAIFLANACRIGMRKTLVFYVGRAPHGKKTDWIMHEYRLDQDNVDVQEDGWVVCRVFMKKSYQRGLNPADMAAVDDDDLLHHHHHPFPPAQLHGGAADHKHDGAGGHHHHHLMQPHHHYDDFPSFDPSMQLPQLMSADQPPPPPPSLLPGGTASSLQRLPLQYLGCEAADLLRFSK

SEQ ID NO: 2350 - protein, 318 aa, Silene vulgaris
NFLFKSSKEDSPLKATDFGLSDFINPSRKFTDIVGSAYYVAPEVLKRKSGPESDVWSIGVITYILLCGRRPFWDKTEDGIFKEVLRNKPDFRRKPWPSISNSAKDFVRKLLVKDPLVRLTAAQALSHQWVREGGSALDIPIDISVLHNMRQFVKYSRMKQFALRALASTLNDDELANLRDQFDAIDVDKSGTISLDEMRQALAKDLPWKLKDSRVMEIVEAIDSNTDGFVDFTEFVAATLHVHQLHELDNEKWQELSQRAFEKFDVDKDGYITPEELRMHTGLKGSMEPLLEEADIDKDGRISLAEFRRLLRSASVSS

SEQ ID NO: 2351 - protein, 396 aa, Protoopalina japonica
QCGNQIGAKFWEVIADEHGIDPTGTYHGDSDLQLERINVYFNEATGGRYVPRAILMDLEPGTMDSVRAGPFGQLFRPDNFVFGQTGAGNNWAKGHYTEGAELIDSVLDVVRKEAEGCDCLQGFQITHSLGGGTGSGMGTLLISKVREEYPDRIMETFSVFPSPKVSDTVVEPYNATLSVHQLVENADEVQVIDNEALYDICFRTLKLTTPTYGDLNHLVSAAMSGVTCCLRFPGQLNADLRKLAVNLIPFPRLHFFMIGFAPLTSRGSQQYRALTVPELTQQMFDAKNMMCASDPRHGRYLTASALFRGRISTKEVDEQMLNVQNKNSSYFVEWIPNNIKSAICDIPPKGLKMSVTFIENSTAIQEMFKRVAEQFTAMFRRKAFLHWYTGEGMDEM

SEQ ID NO: 2352 - protein, 217 aa, Oryza sativa (indica cultivar-group)
MPTPALPLVGGDRPMSPLPAPDVAAAPRTAEEVWKEITGAGVAAAAGVGLPPAAAAAAAPAVVAGAGAGTGAEMTLEDFLAREGAVKEDEAVVTDPSAAKGQVVMGFLNGAEVTGGVTGGRSRKRHLMDPMDRAAMQRQKRMIKNRESAARSRERKQAYIAELESLVTQLEEENAKMFKEQEEQHQKRLKELKEMVVPVIIRKTSARDLRRTNSMEW

SEQ ID NO: 2353 - protein, 434 aa, Desulfotalea psychrophila LSv54
MEFTDRVFLSRYSLDAIAAATPAAMANLVVLLFFIGIVSYTNVFIAQYSGAGKNERVGAVLWQSIWLSIFAAGVLASLWFIAPPLFSLVGHGQAVEELQITYFRILSLGSGSAILSSALSCFFSGRGLTRPIMIVNTVAVLINIPLDYALIFGIGPFPQLGIAGAGIATISAWTMQMFMFAYLVFTRKNDASFAVWRARSFKPALFKQMMTYGLPAGVNMFFELFTFTFFIFMVGKIGKVELAASNIVFAINSIFFIPLMGLGIAVSTLVGQAIGRGQKEDAIQVTTSCLHIALVWTASLCLLFLFIPETFINIFEPADGGADFVAIKEMGKVLLRFVVIYCAFDTLYIVYSGAVKGAGDTRFIMWAIGILGIFVLGLPLYLAVTVFSAGIWSAWLLISLYIASLGMLALWRYYRGAWQRMTVVKEENTELIDR

SEQ ID NO: 2354 - protein, 215 aa, Corynebacterium diphtheriae NCTC 13129
MTTATAGLAVELKQSTAQAHEKAEHSTFMSDLLEGRLGVAEFTRLQEQAWLFYTALEQAADAVRASGFAESLLDPALNRAEVLARDLDKLNDGSEWRSRITASPAVIDYVNRLEEIRDNVDGPALVAHHYVRYLGDLSGGQVIARMMQRHYGVDPEALGFYHFEGIAKLKVYKDEYREKLNNLELSDEQRENLLKEATDAFVFNHQVFADLGKGL

SEQ ID NO: 2355 - protein, 301 aa, Oryza sativa
MASTAAFLSTLAGSTSLGGATPASGGGSGRSKTARFLRRRRRGGAVRAAVSGTEQAPETTKKKGGGGGGGDERVVQVHSAEELDGALRAAKERLVVVEFAASHSVNSSRIYPCMVELSRTCGDVDFLLVMGDESDATRELCRREGITAVPHFTFYKGAEKVHEEEGIGPDQLAGDVLYYGDHHSAVVQLHSRADVESLISDHRGEGGKLVVLDVGLKRCGPCVKVYPTVVKLSRTMADTTVFARMNGDENDSCMEFLRDMDVVEVPTFLFIRDGDIVGRYVGSGRGELIGEILRYNGVKVT

SEQ ID NO: 2356 - protein, 386 aa, Glycine max
MQIFVKTLTGKTITLEVEASDTIENVKAKIQDKEGIPPDQQRLIFAGKQLEDGRTLADYNIQKESTLHLVLRLRGGMQIFVKTLTGKTITLEVEASDTIENVKAKIQDKEGIPPDQQRLIFAGKQLEDGRTLADYNIQKESTLHLVLRLRGGMQIFVKTLTGKTITLEVEASDTIENVKAKIQDKEGIPPDQQRLIFAGKQLEDGRTLADYNIQKESTLHLVLRLRGGMQIFVKTLTGKTITLEVEASDTIENVKAKIQDKEGIPPDQQRLIFAGKQLEDGRTLADYNIQKESTLHLVLRLRGGMQIFVKTLTGKTITLEVEASDTIENVKAKIQDKEGIPPDQQRLIFAGKQLEDGRTLADYNIQKESTLHLVLRLRGGKNCIDE

SEQ ID NO: 2357 - protein, 307 aa, Karenia brevis
RIGRLVFRAASANPAVKVVGINEPFMDLEYMVYQLKYDSVHNRFAGTIATKQEGGKDFLIVNGKEICIFHEKDPTQIPWGACGASYICESTGVFTAKEKAELHIRGGAKKVIISAPPKDAVPIYVVGVNHTEYKTSDTVVSNASCTTNCLAPLAKVVHENYGIKEGLMTTVHAMTATQLTVDGPSRGGKDWRGGRCASQNIIPSSTGAAKAVGKCLPALNGKLTGMAFRVPTPDVSVVDLTCALDKGASYDAIVAKVKEAAAGPMKGVLDWTDEEVVSTDFVTCPASSVFDIKAGISLNDNFVKLVT

SEQ ID NO: 2358 - protein, 114 aa, Thermococcus kodakarensis KOD1
MREIGLRVQPPAEVCNDPKCPWHGNLKIHGRYVEGIVVSDKGKKTVVVERQYYHYLKKYERYELRKSKVHAHNPECINAKVGDKVLIAETRPISKTKSWVVVAVLQRAERAEEV

SEQ ID NO: 2359 - protein, 465 aa, Mannheimia succiniciproducens MBEL55E
MQKITHWQEYKIEAKSLILLSLPILLAQIAQNSMGLVDTIMAGRVSAADMAAISVGASIWMPLVLFGQGLLLALPPTISYLNGSAQRHRIAHQVRQGIWIILFSIVPLALLIYHSDTVINRMGMEEHLAQITIKYLHAMLFGLPAYLLLVNFRCLNDGLAKTKPAMIITLIGLLLNIPLNYIFIYGKLGVPAFGAVGCGIATTIVNWIMCILMISYTKSARNQRDLKVFENIIELPNPATLKKLFKLGLPIAIAICSEVALFALTSLLLSPLGTNAVASHQIALNTSSFIFMLPMSLGMATTILVGQSLGERSPLKAKDISYVALFIGLATATLTAFLTVVLRYQIAGIFVKDTEVISLAASLLLLNALYQFSDAVQVVVGGALRGYKDTKAILYITLFCYWVLGMPIGYILSRTDLITAHMGPTGFWIAFVVSLTVAAVLLFYRMYKIQKQSDEQLLTKLEKLK

SEQ ID NO: 2360 - protein, 254 aa, Kluyveromyces lactis NRRL Y-1140
MSLPSTFDLTSEDAQLLLAARVHLGAKNVQVHQEPYVYKARPDGVNVINVGKTWEKIVLAARIIAAIPNPEDVVAISSRTYGQRAVLKYAAHTGATPIAGRFTPGSFTNYITRSFKEPRLVIVTDPRSDAQAIKESSYVNIPVIALTDLDSPSEYVDVAIPCNNRGKHSIGLIWYLLAREVLRLRGALPDRTQPWAIMPDLYFYRNPEEIEQQTAEEEAVASGEQTEEAVDATEEQTEAAEWAEEGQAQEEEWN

SEQ ID NO: 2361 - protein, 307 aa, Karenia brevis
RIGRLVFRAAMENQSVTMAAINEPFMDLDYMQYLLSYDTVHSRFKGTVSTKKAGGAEFLVVNGMSVRVFHEKDPASIGWDKAGAAFICESTGVFTTQEKAALHIKGGAKKVIISAPPKDAVPMFVMGVNHEKYTADLTVVSNASCTTNCLAPLTKIVHDNFGLVEGLMTTVHAMTATQLTVDGPSRGGKDWRGGRAASENIIPSSTGAAKAVGKVIPEMNGKLTGMAFRVPTPDVSVVDLTCRIAKPASMKDICAKVKEASETTMKGIMGYTDKEVVSCDFTTDPRSSIFDASACIALNETFIKLVS

SEQ ID NO: 2362 - protein, 217 aa, Zea perennis
IVNGMDVSEWDPSRDKYIAVKYDVSTAVEAKALNKEALQAEVGLPVDRNIPLVAFIGRLEEQKGPDVMAAAIPQLMEMVEDVQIVLLGTGKKKFERMLMSAEEKFPGKVRAVVKFNAALAHHIMAGADVLAVTSRFEPCGLIQLQGMRYGTCNVVEPADVKKVATTLQRAIKVVGTPAYEEMVRNCMIQDLSWKGPAKNWENVLLSLGVAGGEPGVE

SEQ ID NO: 2363 - protein, 140 aa, Oryza sativa
MRKYRVAGLVAALLVLHSLATPSAQAEAHRAGGEGEEKMSSDGGPVLGGVEPVGNENDLHLVDLARFAVTEHNKKANSLLEFEKLVSVKQQVVAGTLYYFTIEVKEGDAKKLYEAKVWEKPWMDFKELQEFKPVDASANA

SEQ ID NO: 2364 - protein, 217 aa, Zea perennis
IVNGMDVSEWDPSRDKYIAVKYDVSTAVEAKALNKEALQAEVGLPVDRNIPLVAFIGRLEEQKGPDVMAAAIPRLMEMVEDVQIVLLGTGKKKFERMLMSAEEKFPGKVRAVVKFNAALAHHIMAGADVLAVTSRFEPCGLIQLQGMRYGTCNVVEPADVKKVATTLQRAIKVVGTPAYEEMVRNCMIQDLSWKGPAKNWENVLLSLGVAGGEPGVE

SEQ ID NO: 2365 - protein, 308 aa, Karlodinium micrum
RIGRLVFRAALGNPEAKVVAINEPFMDLAYMVYQLKYDSVHKRFPGTVASKQDGGKDILIVNGEEIRVFREKDPASIPWGEAGAAYVCESTGIFTEKAKAELHIKGGAKRVIISAPPKDAVPIYVVGVNHTEFNPAADTVVSNASCTTNCLAPLAKVVHENFGIKEGLMTTVHAMTATQLTVDGPSRGGKDWRGGRCASQNIIPSATGAAKAVGKCLPALNGKLTGMAFRVPTPDVSVVDLTCKLEKPAKMDEIVAKVKEAAAGSMKGVLDFTDEEVVSTDFVTYPASSIVDISAGIALNDTFVKLVS

SEQ ID NO: 2366 - protein, 492 aa, Nicotiana tabacum
MDPYKYRPSSAFNSPFCTTNSGAPVFNNNSSLTVGARGPVLLEDYHLVEKLANFDRERVPERVVHARGASAKGFFEVTHDITHLTCADFLRAPGVQTPVIVRFSTVIHERGSPETLRDPRGFAVKFYTREGNFDLVGNNFPVFFIRDGMKFPDMVHALKPNPKSHIQENWRVLDFFSHVPESLHMFTFLFDDIGIPQDYRHMDGSGVHTFTLINKAGKSTYVKFHWKPTCGVKSLLEEEAARIGGANHSHATQDLYDSIAAGNYPEWKLFIQTMDPDHEDRFDFDPLDVTKTWPEDILPLQPVGRLVLNKNIDNFFNENEQLAFCPSIVVPGVYYSDDKMLQTRIFSYSDTQRYRLGPNYLQLPANAPKCAHHNNHYDGSMNFMHRDEEIDYFPSRYDPVRHAEKYPIPSTMCTGKREKCVIQKENNFKQPGDRYRSFTPDRQERFIRRWVEALSDPRITYEIRTIWISYWSQADKSLGQKLASRLNVRPSI

SEQ ID NO: 2367 - protein, 213 aa, Populus tremula
MKSTLLAWFTFLLFAFVLSVPSIEASTEPVLDIQGEELKAGTEYIISSIFWGAGGGDVAATNKTCPDDVIQYSLDLLQVLPVTFSPASSEDDVIRVSTDLNIKFSIKKACDRSSVWKIQKSSNSEVQWLVTTGGEEGNPGCDTFTNWFKIEKGAGILGYKLVYCPEDICPSVGLCRDVGIYFESNRGRILSLSDKLSPFLVLFKKVGPLSSSI

SEQ ID NO: 2368 - protein, 329 aa, Oryza sativa
  misc_feature (153)..(153): Xaa can be any naturally occurring amino acid
  unsure (1)..(329): unsure at all Xaa locations
MARHCHRLAAAAALLLLLLSSAAALSSSAAEGEEDPLIEQVVGGGEEEGAQLDAEAHFASFERRFGRTYRDAGERAYRMSVFAANLRRARRHQRLDPTATHGVTKFSDLTPGEFRDRFLGLRRPSLEGLVGGEPHEAPILPTDGLPDDFDWRXCDSSEPDSCDAGCNGGLMTNAFSYLLKSGGLESEKDYPYTGRDGTCKFDKSKIVTSVQNFSVVSVDEDQIAANLVKHGPLAIGINAAYMQTYIGGVSCPYICGRHLDHGVLLVGYGASGFAPIRLKDKAYWIIKNSWGENWGEHGYYKICRGSNVRNKCGVDSMVSTVSAIHTSKE

SEQ ID NO: 2369 - protein, 213 aa, Populus tremula
MKSTLLAWFTFLLFAFVLSVPSIEASTEPVLDIQGEELKAGTEYIISSIFWGAGGGDVAATNKTCPDDVIQYSLDLLQGLPVTFSPASSEDDVIRVSTDLNIKFSIKKACDRSSVWKIQKSSNSEVQWLVTTGGEEGNPGCDTFTNWFKIEKGAGILGYKLVYCPEDICPSVGLCRDVGIYFESNRGRILSLSDKLSPFLVLFKKVGPLSSSI

SEQ ID NO: 2370 - protein, 178 aa, Glycine soja
MASSMISSPAVTTVNRAGAGMVAPFTGLKSMAGFPTRKTNNDITSIASNGGRVQCMQVWPPVGKKKFETLSYLPDLDDAQLAKEVEYLLRKGWIPCLEFELEHGFVYREHNRSPGYYDGRCWTMWKLPMFGCTDASQVLKELQEAKTAYPNGFIRIIGFDNVRQVQCISFIAYKPPSF

SEQ ID NO: 2371 - protein, 213 aa, Populus tremula
MKSTLLVWFSFLLFAFVLSVPSIEANTEPVLDIQGEELKAGTEYIISSIFWGAGGGDVSATNKTCPDDVIQYSLDLLQGLPVTFSPASSEDDVIRVSTDLNIKFSIKKACDRSSVWKIQKSSNSEVQWLVTTGGEEGNPGCDTFTNWFKIEKGAGILGYKLVYCPEDICPSVGLCRDVGIYFESNRGRILSLSDKLSPFLVLFKKVGPLSSSI

SEQ ID NO: 2372 - protein, 213 aa, Populus tremula
MKSTLLVWFSFLLFAFVLSVPSIEANTEPVLDIQGEELKAGTEYIISSIFWGAGGGDVSATNKTCPDDVIQYSLDLLQGLPVTFSPASSEDDVIRVSTDLNIKFSIKKACDRSSVWKIQKSSNSEVQWLVTTGGEEGNPGCDTFTNWFKIEKGAGILGYKLVYCPEDICPSVGLCRDVGIYFESNRGRILSLSDKLSPFLVVFKKVGPLSSSI

SEQ ID NO: 2373 - protein, 485 aa, Oryza sativa
MFGGGGGGGRKPLDYEELNENVKKVQYAVRGELYLRASELQKEGKKIIFTNVGNPHALGQKPLTFPRQVVALCQAPFLLDDPNVGLIFPADAIARAKHYLAMAPGGLGAYSDSRGIPGIRKEVAEFIERRDGYPSDPELIYLTDGASKGVMQMLNTIIRNERDGILVPVPQYPLYSAAISLFGGSLVPYYLEEEANWGLDFVNLRQTVASARSKGITVRAMVIINPGNPTGQCLSEGNIKELLKFCFHENLVLLADEVYQQNIYQDERPFISARKVLFDMGPPMSREVQLVSFHTVSKGYWGECGQRGGYFEMTNLPPKTVDEIYKVASIALSPNVPGQIFMGLMVNPPKPGDISYLKFSAESKSILESLRRRARLMTDGFNSCRNVVCNFTEGAMYSFPQIRLPPKAIDAAKRAGKAADVFYCLKLLEATGISTVPGSGFGQKEGVFHLRTTILPAEEDMPAIMTSFKKFNDTFMDQYDGYSRM

SEQ ID NO: 2374 - protein, 650 aa, Anabaena variabilis ATCC 29413
MLALLKTIREAIANWWSEFTLQTKLLAAATLVVSLVMSGLTFWAVNTIQQDAQVNDTRFGRDLGLLLAANVAPLVADHNLTEVAQFSQRFYSSTSSVRYMLYADETGKIFFGIPFWEPEVENSLSIERRIQLPEEYPGEGEKPMVRQHMSPDGTVTDVFIPLIADKKYLGVLAIGINPNQTAVISTNFTRDVTIAVFITIWVMVILAGVVNALTITKPIKELLVGVKQIAAGNFKQRIDLPLGGELGELILNFNEMAERLERYEEQNIEELTAEKAKLETLVSTIADGAVLIDNNMQVILVNPTARHIFGWEGADDVVGSNVLHHLPPTVQMEITRPLYEMAAGECDSAEFRLTLNQPSNRTIRILLTTVLNLQRESIKGIAITVQDITREVELNEAKSQFISNVSHELRTPLFNIKSFIETLHDYGEDLSIEERQEFLQTVNHETDRLTRLVNDVLDLSKLESGRSYSFDGVDLAQAIEQTLRTYQLNAKDKGIELIQDVAPGLPLVLGNYDLLLQVLANLVGNALKFTPSGGKIAIRTYVLHTKPNSPNQPTQVRIEVSDTGIGIAPEDQQAIFDRFFRVENRVHTLEGTGLGLSIVRNIVERHRSKVNLVSEVGVGTTFWFDLILFEDEAPKKMAESGEEKAALPAN

SEQ ID NO: 2375 - protein, 982 aa, Bordetella bronchiseptica RB50
MAAYNAPVSNCQFRLTHILPIPQRQGAPTDPFQMNAIRQQSDSAEPLRHDIRLLGRCLGEVIQACEGKRVYDTIETLRRTAVRFRRAGDPADDKLLQARVKQLRGNDPNSVARAFSYFLHLSNIAEDRDQNRRQRDRALAGAGPERGSLRQAIESLKAQGVNNARIRRLLSEACVMPVLTAHPTEVQRKSTLDVHREISSLLVQRERELTADELSELDLALIGQVATLWQTRMLRYTRLTVADEIENALSYYRSTFLNVIPRVYGDLARLLNREPVKPFTPPPPPLEPFLRMGSWIGGDRDGNPNVDAATLERALLRQATVLFEHYLQEVHALGAELSASTLLIEADPALLALADAGGDDSPHRRDEPYRRALIGIYARLAATARHLTGQELARRATVPAAPYDTPDALAADLAVIAASLSAHHGAPIARLRLSGLQQAVTVFGFHLATVDLRQSSDVHERVLAELFARAGDGIDGQAVDYLALDEAARVAVLRRELAHARPLASPWIAYSEETASELAVLRAAAAGRARYGRQAVLQSIVSHTETLSDLLEVLVLQKEAGLIAPPGETIAPGDGLMVVPLFETIPDLQRGPEIMAAWLDLPEVRQRVRLAQGDTQEVMLGYSDSNKDGGFLTSNWSLYQAERALVDVFSARSVRLRMFHGRGGSVGRGGGSSYDAILAQPPGTVAGQLRLTEQGEVIQSKYKDAEVGRWHLELLVAATLESSLAPQAAATSAEDAHMQQHAPAMSFMSELAQRTYRGLVYDTPGFADYFFAATPISEIAGLNIGSRPASRKKGQHIEDLRAIPWGFSWAQCRLMLTGWYGMGSAIEAYLETGAQGAPRSRRARLAQLREMASDWPAFRTLLSNMEMVLAKSDLAIAAGYAQLVPRRGLRERVFGAITAEHGRTLAMLRLLTRRELLADNPGLMASLRERFAYIDPLNYLQIELIKRHRAAQRRAGDDADIRVPRAIHLTINGIAAGLRNSG

SEQ ID NO: 2376 - protein, 424 aa, Glycine max
MGNSEDEKSVKTGSPSSSPATTDQTNQPNIHVYPDWAAMQYYGPRVNIPPYFNSAVASGHAPHPYMWGPPQPMMPPYGPPYAAFYSHGGVYTHPAVAIGPHLHGQGVSSSPAVGTHSSIESPTKLSGNTDQGLMKKSKGFDGLAMSIGNCNAESAEHGAENRQSQSVDTEGYSDGSDGNTAGANQTKRKRCREGTLTTDGEGKTELQNGPASKETSSSKKIVSATPASVAGTLVGPVVSSVMATTLELRNPSTVDSKANSTSAPQPCAIVPNETCLQNERELKRERRKQSNRESARRSRLRKQAETEELARKVDMLTAENVSLKSEIIQLTEGSEQMRMENSALREKLRNTQLGQREEIILSSIESKRAAPVSTENLLSRVNNSSSNDRTTENENDFCENKPNSGAKLHQLLDTNPRADAVAAG

SEQ ID NO: 2377 - protein, 262 aa, Streptococcus thermophilus CNRZ1066
MKIALVQMDVAHGQPVENKKHVKEMLERALVANPDVIVLPEMWNTGYALDELDGLADKEGLESQEFLSQFAREHAVAILGGSVAIERDGKFYNTTYVYNKSGDLINIYSKVHLFGLMAEDRYMSAGAAESIFELDGVIAASVICYDIRFPEWVRTQMAQGAKVLFVVAQWPEPRVQQWEILLKARAVENQAFVVAVNRVGAGPDPDDIFSGHSMIIDPLGNVVLQAKEHEEGIFTAEINLEEVDRVRGQIPVFEDRRTDLYY

SEQ ID NO: 2378 - protein, 270 aa, Exiguobacterium sp. 255-15
MQYAKLSNGVTIPQIGFGVWQVDEETEAPAAVAEALRVGYRHIDTAAVYKNERGVAKGIKESGVNREDLFLTSKVWNDDIRAGRTKEAFAESLERLETDYLDLYLIHWPVEGYIEAWKAMVELYEAGKIKAIGVSNFKEHHLDTLAEEGLMTPMINQVELHPQLPQHELHEYLQDHSIQVEAWSPLMQGKFLEINDFKEIAEKHGKSPSQVVLRWHLDNGIVALPKSVTPERIAENFDVFDFQLDADDLEKIDRLATDVRLGPDPDEIDF

SEQ ID NO: 2379 - protein, 460 aa, Exiguobacterium sp. 255-15
MKEHPTELRRDLKTRQLTMIAMGCAIGTGLFLGSGLAISLAGPSVLVSYAIGAFIVLLLMGCLAEMTVAHPTSGSFGTIAEKYIGPYAGFLVRYSYWVANVLAIGVEVSAIAIYMKYWFPDVPGYIWIFVFAAALIYINATTVNTFATFEYWFSVIKISAILMFMILGAYLVFGSSSPEIGPQNFTNDGGFMPFGFSGLWIAVFISLFSFLGTELIAVTAGEAKDPDVAVPKALKATVFRLSTFYVITIALMLMIVPWQQAGGVDESPFVKVMEMLSIPGAAGIMNFIVLTAALSAMNSQLYASTRMMYSLSKATYAPRMFSRLNAKGVPLFALAVSTLGIFLAAVISSQSSVSYPFMMGISMFGAIFTWFMIFISHLYFRKAWERDGGRKLPVRMMGYPYLTALGALLLFALVITTWFTDFQIVLKFGIPWLIFLTIAYVFWKRNHPPQADQTNRSQSL

SEQ ID NO: 2380 - protein, 163 aa, Triticum aestivum
  misc_feature (152)..(152): Xaa can be any naturally occurring amino acid
  unsure (1)..(163): unsure at all Xaa locations
MAEVEAALPVAATETPEVAAEGDAGAAEAKGPHKLQRQWTFWYDIQTKPKPGAAWGTSLKKGYTFDTVEEFWCLYDQIFRPSKLVGSADFHLFKAGVEPKWEDPECANGGKWTVISSRKANLDTMWLETCMALIGEQFDESPGICGVVASVXRRGQDRLSLGT

SEQ ID NO: 2381 - protein, 495 aa, Arabidopsis thaliana
MRLIVPLRGVIQGRGGLFVGSLIPCCLFYFLQLYLKRRRPPPSDPTDLPRTFSRTNLFSRGNSIGRVRVSSRAVPVAKPSDSPYYIGLERVKTDPYDRITNTDGIIQLGLAESTLCFDLLQRWMSENLMESMMQSDDGEFDISSIAMYKPFEGLLELRVAFADFMSRIMGGNVSFDPSNMVITAGGTPAIEVLAFCLADHGNAFLIPTPYYPGFDRDIKFRTGVELIPVHCRSSDNFTVTVSALEQALNQARKRGSKVSGILFSNPSNPVGNILSRETLCDILRFAQEKNIHVISDEIFAGSVYGDKEFVSMAEIAGSGEFDKTRVHIIYGLSKDLSIPGFRAGVIYSFHEDVVNAAKKLMRFSSVPVLVQRILISLLSDVRFIEGYMAAHRQRIRDKHIRFVEGLKQLGIPCAESGGGLYCWVDMSSLLTSYSEKGELELFEKLLTVAKINATPGTACYCIEPGWFRCCFTALADEDIPVIMERIRQLAESFRS

SEQ ID NO: 2382 - protein, 326 aa, Solibacter usitatus Ellin6076
MRPQDFRMPAEWEPHLATWIAWPHNRADWPGRFAPIPWVYGEIVRKLSQVERVRILIQSPALEKQARRILEKVGANLDAVEFFECETDRVWTRDYCPLFVKNRRGETALTAWRFNAWAKYDNWQNDSAVPAHLGKRLKLPVFKPGMVLEGGSIDVNGAGVLLTTEECLLSPIQARNPELSRLEIERRLADYLGVDRVVWLRTGIAGDDTHGHVDDLARFVNPETVVLCAEADPADYATLRVAGLKVVKLPMPRPLVFAGQRLPASYANFYIANALVLVPTFNDPNDRAALTILAKQFPDREVVGINCTELIWGLGALHCMTQQQPA

SEQ ID NO: 2383 - protein, 213 aa, Populus tremula
MKSTLLAWFTFLLFAFVLSVPSIEASTEPVLDIQGEELKAGTEYIISSIFWGAGGGDVAATNKTCPDDVIQYSLDLLQGLPVTFSPASSEDDVIRVSTDLNIKFSIKKACDRSSVWKIQKSSNSEVQWLVTTGGEEGNPGCDTFTNWFKIEKGAGILGYKLVYCPEDICPSVGLCRDVGIYFESNRGRILSLSDKLSPFLVFFKKVGPLSSSI

SEQ ID NO: 2384 - protein, 175 aa, Triticum aestivum
MAATVMASSATSVAPFQGLKSTAGLPVSRRSNGASLGSVSNGGRIRCMQVWPIEGIKKFEILSYLPPLSTEALLKQVDYLIRSKWVPCLEFSKVGFIFREHNASPGYYDGRYWTMWKLPMFGCTDATQVINEVEEVKKEYPDAYVRIIGFDNMRQVQCVSFIGFKPPGCEESGKA

SEQ ID NO: 2385 - protein, 267 aa, Salmonella enterica subsp. enterica serovar Typhi Ty2
MTIPAFGLGTFRLKDDVVIASVKTALELGYRAVDTAQIYDNEAAVGQAIAESGVPRNELYITTKIWIENLSKDKLIPSLKESLKKLRTDYVDLTLIHWPSPGDAVSVEEFMQALLEAKKQGLTREIGISNFTIPLMEKAIAAVGADHIATNQIELSPYLQNRKVVDWAKAHGIHITSYMTLAYGKALKDEVIARIAVKHNATPVQVILAWAMGEGYSVIPSSTRRENLASNLLAQDLHLDAEDKNAIAALDCNDRLVSPEGLAPAWD

SEQ ID NO: 2386 - protein, 247 aa, Burkholderia sp. 383
MNLSQRLAAEVFGTFWLVLGGCGSAVLAAAFPGLGIGFAGVALAFGLTVLTMAFAIGHISGCHLNPAVSVGLTVAGRFPARDLVPYIVAQVVGATLGAFVLYLIATGKPGFDVVGSGFATNGFGERSPGHYSLSASFICEVVMTGFFLFVILGATDKRGVPAGFAPIAIGLCLTLIHLISIPVTNTSVNPARSTGPALFVGGDAIGQLWLFWVAPIIGAVLAGIIYPLVAGRDDAVDLLPASARTSE

SEQ ID NO: 2387 - protein, 206 aa, Triticum aestivum
  misc_feature (179)..(179): Xaa can be any naturally occurring amino acid
  unsure (1)..(206): unsure at all Xaa locations
MALAFDDFGRPFIILREQESKSRLRGLDAHKANVAAGKAVARSLRTSLGPKGMDKILQSPDGDVTITNDGATILEQMDVDNQIAKLMVELSRSQDYEIGDGTTGVVVLAGSLLEQAEKLLERGIHPIRIAEGYEMASKIAFDHLEHISTRFEFTAANIEPLVQTCMTTLSSKIVNRCKXRMLAEIAVRAVLAVADLKGGCKLDLLK

SEQ ID NO: 2388 - protein, 347 aa, Pseudomonas fluorescens
MARSPETNSAMPQQIRQLLYSQLISQSIQTFCELRLPDVLQAAGQPTSIERLAEQTHTHISALSRLLKALKPFGLVKETDEGFSLTDLGASLTHDAFASAQPSALLINGEMGQAWRGMAQTIRTGESSFKMYYGISLFEYFEQHPERRAIFDRSQDMGLDLEIPEILENINLNDGENIVDVGGGSGHLLMHMLDKWPESTGILFDLPVAAKIAQQHLHKSGKAGCFEIVAGDFFKSLPDSGSVYLLSHVLHDWGDEDCKAILATCRRSMPDNALLVVVDLVIDQSESAQPNPTGAMMDLYMLSLFGIAGGKERNEDEFRTLIENSGFNVKQVKRLPSGNGIIFAYPK

SEQ ID NO: 2389 - protein, 213 aa, Populus tremula
MKSTLLAWFTFLLFAFVLSVPSIEASTEPVLDIQGEELKAGTEYIISSIFWGAGGGDVSATNKTCPDDVIQYSLDLLQGLPVTFSPASSEDDVIRVSTDLNIKFSIKKACDRSSVWKIQKSSNSEVQWLVTTGGEEGNPGCDTFTNWFKIEKGAGILGYKLVYCPEDICPSVGLCRDVGIYFESNRGRILSLSDKLSPFLVLFKKVGPLSSSI

SEQ ID NO: 2390 - protein, 212 aa, Populus tremula
MLLPLSFLLLASTLLPEAVRASGNPVLDVKGLGLLPGVPYYMISSEWPIVGGVVSLGNDINGTCPLDVILLENFCVTGTPVTFSIASGNQELFITDSTDVYISFDSTSNCTNETMVWMHESINGSSTELLTIGGVEGDVNTIFRIVNVGGSFVSNYKLVAYKLSSYDLALTTSDVGAVFDFTTGIRHLALTEPPLIVGFEVAYDYDGLKAVV

SEQ ID NO: 2391 - protein, 277 aa, Arabidopsis thaliana
MLQFTPQPKQALDSRISRFNSGKAPVWARISDDGGGARAQVTVPIRGSGKGLSADAIEERLAGVPVYALSNSNEEFVLVSGTSSGKSLGLLFCKEEDAETLLKEMKSMDPRMRKEGSKVVALALSKVFQLKVNGVAFRLIPESTQVKNALKGIGLMDVILPRCTIMFLKTDCSIWKTAGIDDDDFHGVPVFQSKSLILRSENMSYRPVFFRKEDLEKSLIRASSQQNRLNPALKPGDIQVAVFEDIVKGMRESTTSNWDDIVFIPPGFEVSTEQTQE

SEQ ID NO: 2392 - protein, 347 aa, Zea mays
MAADQQPQLQEEMNDAAGGGLRLPPGFRFHPSDFEIVSFYLTNKVLNTRFTCTAITEADLNKIEPWDLPSKAKMGEKEWYFFYQKDRKYPTGLRANRATEAGYWKATGKDKEVYNAAEGVAVLVGMKKTLVFYRGRAPRGDKTNWVMHEYRLEGSGRLPAGLASATGSAAANAAAALKASAYKTTGIKKTTAAPAYQVAMAGAEMDQNQNNFPGIPFPMPMQFPMLPDFSLDPVPPYYPNAAGAGMSMLPMAAGIGGGAGGFQLNGAALFGNPMAAPQPMSFYHQMGAAGTACAGGFDVSAPESRPSSMVSQKDDQANGAEISSMMSVAGPGPATTTTIEMDGVWKY

SEQ ID NO: 2393 - protein, 447 aa, Acinetobacter sp. ADP1
MKYSKMSDFLDYVKTRDQYQPEFLQAVEEVMISLWPFIEKHPEYADYGLLERLIEPERVIQFRVAWMDDQGHTQVNRAFRVQYNSAIGPYKGGMRFHPSVNLSILKFLGFEQTFKNALTTLPMGGGKGGSDFNPKNKSEAEIMRFCQALMLELHRHLGADTDIPAGDIGVGAREVGYMAGMMKKLSNDTAAVFTGKGVSFGGSLMRPEATGYGTVYFAEEMLKTRGQNFLGKTVSISGSGNVAQYAAEKAMFLGAKVVTLSDSNGTVYLENGFTEVLLAELMELKNKKRGRISEFASKHGFEYFEGQTPWHIPVDIALPCATQNELNGDDAETLIKNGVICVAEGANMPSTLEAVEKFLHAKILYAPGKASNAGGVATSGLEMSQNSIRLNWSHAEVDERLHAIMKDIHANCVKYGTKQDGSINYVDGANIAGFVKVADAMLAQGIY

SEQ ID NO: 2394 - protein, 557 aa, Sulfolobus solfataricus P2
MRKMATATVATTPEGIPVIILKEGSSRTYGKEALRANIAAVKAIEEALKSTYGPRGMDKMLVDSLGDITITNDGATILDKMDLQHPTGKLLVQIAKGQDEETADGTKTAVILAGELAKKAEDLLYKEIHPTIIVSGYKKAEEIALKTIQEIAQPVTINDTDVLRKVALTSLGSKAVAGAREYLADLVVKAVAQVAELRGDKWYVDLDNVQIVKKHGGSVNDTQLVYGIVVDKEVVHPGMPKRIENAKIALLDASLEVEKPELDAEIRINDPTQMHKFLEEEENILKEKVDKIAATGANVVICQKGIDEVAQHYLAKKGILAVRRAKKSDLEKLARATGGRVISNIDELTSQDLGYAALVEERKVGEDKMVFVEGAKNPKSVSILIRGGLERVVDETERALRDALGTVADVIRDGRAVAGGGAVEIEIAKRLRKYAPQVGGKEQLAIEAYANAIEGLIMILAENAGLDPIDKLMQLRSLHENETNKWYGLNLFTGNPEDMWKLGVIEPALVKMNAVKAATEAVTLVLRIDDIVAAGKKSGSEPSGKKEKDKEEKSSED

SEQ ID NO: 2395 - protein, 182 aa, Thermococcus kodakarensis KOD1
MGLRPAKIDRDVDKPAYTRREYIRGAPGPKITIFDMGNLSAEFEYEVSLHAEQAMQIRQNALEAIRIQVNRYLQKNVGRSNYHFKIRVYPFQVLRENPMATGRKADRYGNGMRRPFGKPIGLAARVRKDQKILTVWVNGQHLKFALGAMHRAKMKLPYSAYYRIYDKEGNDVTTKVLSTMKL

SEQ ID NO: 2396 - protein, 298 aa, Caulobacter crescentus CB15
MSKMAVNSLSVMSPDGGLSRYLTEIRKFPMLSKDEEFMLAQRWKEHQDPQAAHKMVTSHLRLVAKIAMGYRGYGLPIGEVISEGNVGLMQAVKKFEPEKGFRLATYAMWWIRASIQEYILRSWSLVKMGTTAAQKKLFFNLRKAKSQIAAFQEGDLHPDQVSQIATKLGVLDSEVISMNRRLSGPDASLNAPLRADGESEWQDWLADEEQVSQETRVAEDEEKSLRMSLLEEAMVELTDRERHILTERRLKDDPTTLEELAAQYGVSRERVRQIEVRAFEKLQKTMREAAIAKNMVDA

SEQ ID NO: 2397 - protein, 306 aa, Tuber borchii
MQIFVKTLTGKTITLEVESSDTIDNVKSKIQDKEGIPPDQQRLIFAGKQLEDGRTLSDYNIQKESTLHLVLRLRGGMQIFVKTLTGKTITLEVESSDTIDNVKSKIQDKEGIPPDQQRLIFAGKQLEDGRTLSDYNIQKESTLHLVLRLRGGMQIFVKTLTGKTITLEVESSDTIDNVKSKIQDKEGIPPDQQRLIFAGKQLEDGRTLSDYNIQKESTLHLVLRLRGGMQIFVKTLTGKTITLEVESSDTIDNVKSKIQDKEGIPPDQQRLIFAGKQLEDGRTLSDYNIQKESTLHLVLRLRGGSL

SEQ ID NO: 2398 - protein, 385 aa, Thermococcus kodakarensis KOD1
MELHFDMTYEDAYREVYEMVKPKYKLFTAGPVACFPEVLAIMSVQMFSHRSAEAKAVHVDTLNRLKAFLEADKGEIILFPSSGTGFMEAAVRNTIPRGGKVLVTVIGAFGKRFADVVNANGREAVILEKEPGKAIKPEELDDALRKNPDVHAVTITYNETSTGVLNPLPELAKVVQEHDKLLFVDAVSAMGGADIKFDKWGLDMIFASSQKAFGVPPGLAVAAVSERVFEIAEKMPERGWYFDLPLYKKFNEKKKGTPSTPPLPQIFGLNVVLRIVEKMGGKEAWLDMYRKRSEMIREGVKEMGLGILAEPGYESPTITAVVVPEGMKGVDVYNAMRERGFELAKGYGSVAEKTFRIGNMGYMTFDDIREMLDNLREVIEELKKK

SEQ ID NO: 2399 - protein, 513 aa, Mannheimia succiniciproducens MBEL55E
MEIFKILTALADFRKEGIPSCLPVTLAGKSACSYIGKNMSKEIKTQVVVLGAGPAGYSAAFRCADLGLETVLVERYSTLGGVCLNVGCIPSKALLHVAKVIEDAKHVEHHGIVFGEPTIDLDKVREGKNAVVGRLTGGLAGMAKMRKVTVVEGLAEFADSHTLVAKDREGNPTTIKFDNAIIAAGSRPVQLPFIPHEDPRVWDSTDALALREVPKNLLVMGGGIIGLEMGTVYSALGSQIDVVEMFDQVIPAADKDIVKIFTKRIEQKFNLLLETKVTTVEAKEDGIHVSMEAKDGKVETRVYDAVLVAIGRTPNGKLIGAEKAGIEVTDRGFINVDKQMRTNVPHIFAIGDIVGQPMLAHKGVHEGHVAAEVIAGKKHYFDPKVIPSIAYTEPEVAWVGKTEKECKAENLNYEVATFPWAASGRAIASDCADGMTKLIFDKDSHRILGGAIVGTNAGELLGEIGLAIEMGCDAEDIALTIHAHPTLHESVGLAAEVFEGSVTDLPNPKAKKK

SEQ ID NO: 2400 - protein, 393 aa, Leptospira interrogans serovar Copenhageni str. Fiocruz L1-130
MKHTLTSNRMAELIRYRRQIHKHPELRYEENQTSDYVINHLKELGLSFQDKIAKTGVVSLIDSGKPGKTLLVRADMDALPIFEESNQEYKSVHEGVMHACGHDAHTSILMGLATEIKENIQFILPKGKVLLVFQPAEEGGQGADRMIEEGILEKYNVDAALALHVWNHIPIGKIGVVDGAMMAAVDEFTITISGISGHGAMPQHTVDPIVVGAQIVNSLQTIVSRNTDPLDSCVVTVGSFHSGNAFNVIPETAELKGTVRTYSKKMFEEVPGKLERVVKGIASALGATVSIRYERTNQPTINDPKMANIVRKASLNILGEGSLTEENTKSMGGEDFSAFLMKVPGCYFFVGSRNEEKGFVYPHHSSKFDIDEDSLSIGLSVLKEAIKIYLEEN

SEQ ID NO: 2401 - protein, 214 aa, Populus tremula
MLLPLSFLLLASTLTLLPEAVRASGNPVLDVKGLGLLPGVPYYMISSEWPIVGGVVSLGNDINGTCPLDVILLENFCVTGTPVTFSIASGNQELFITDSTDVYISFDSTSNCTNETMVWMHESINGSSTELLTIGGVEGDVNTIFRIVNVGDSFVSNYKLVAYKLSSYDLALTTGDVGAVFDFTTGIRYLALTEPPLIVGFEVAYDYDGLKAVV

SEQ ID NO: 2402 - protein, 214 aa, Populus tremula
MLLPLSFLLLASTLTLLPEAVRASGNPVLDVKGLGLLPGVPYYMISSEWPIVGGVVSLGNDINGTCPLDVILLENFCVTGTPVTFSIASGNQELFITDSTDVYISFDSTSNCTNETMVWMHESINGSSTELLTIGGVEGDVNTIFRIVNVGGSFVSNYKLVAYKLSSYDLALTTSDVGAVFDFTTGIRYLALTEPPLIVGFEVAYDYDGLKAVV

SEQ ID NO: 2403 - protein, 250 aa, Glycine max
MGKSYPTVSADYQKAVEKAKKKLRGFIAEKRCAPLMLRLAWHSAGTYDVSSKTGGPFGTIKHPSELAHGANNGLDIAVRLLEPLKAEFPILTYADFYQLAGVVAVEVTGGPEVPFHPGREDKPEPPPEGRLPDATKGSDHLRDVFGKAMGLSDRDIVALSGGHTIGAAHKERSGFEGPWTSNPLIFDNSYFKELLSGEKEGLLQLPSDKALLSDPVFRPLVEKYASDEDAFFADYAEAHQKLSELGFAEA

SEQ ID NO: 2404 - protein, 343 aa, Arabidopsis thaliana
MGEDAISGNLKNLTIDTRDSETLVVCFGEMLIDFVPTVGGVSLAEAPAFKKAPGGAPANVAVGVSRLGGSSAFIGKVGDDEFGRMLADILRLNNVDNSGMRFDHNARTALAFVTLRGDGEREFLFFRHPSADMLLLESELDKNLIQKAKIFHYGSISLIEEPCRSTQLVAMKIAKAAGSLLSYDPNLRLPLWPSEEAARKEIMSIWNLADVIKISEDEITFLTGGDDPYDDDVVLQKLFHPNLKLLVVSEGPNGCRYYTQEFKGRVGGVKVKPVDTTGAGDAFVSGLLNSLASDLTLLKDEKKLREALLFANACGAITVTERGAIPAMPSMDAVQDLLSSTRS

SEQ ID NO: 2405 - protein, 258 aa, Debaryomyces hansenii CBS767
MRRTALITGGARGIGEAISKRLAKDGLNVVICDLQNQNKAAMKTIQEINQFGGNAVFYPLDVRVKSQIEKTIDNAYEKFGTFDVMVNNAGICLVNSFADITEDELEKQWAVNVKGVLFGMQAAARKFKDVQNRTGRIINAASISGQLGMPNQGAYCSTKFAVKALTQTAAQELAADGITVNSYCPGTVETEMQRGILEKEVELGISKEESRKIHYDSSAIKGTIMPDDVAGLVSFLASSNSNFITGQSIIVDGGLVYR

SEQ ID NO: 2406 - protein, 132 aa, Mangifera indica
MASSSTKMLIIFMVVSSFMLASANFYQNFDITWGDGRAQILNNGDLLTLSLDKASGSGFQSKNEYLFAKIDMQLKLVPGNSAGTVTAYYLKSAGSAWDEIDFEFLGNLSGDPYTLHTNVFSQGKGDREQQFH

SEQ ID NO: 2407 - protein, 261 aa, Zea mays
IKPPDFAVLLPTTRACALPPRPEPPPPLTLRAPSCSSCYSSVARPSRSEEQPWAGHVLGGVKENPAAANSAESDGLGRFAVDEHNRRENALLEFVRVVEAKEQVVAGTLHHLTLEAVEAGRKKLYEAKVWVKPWLDFKELQEFSHKGDATAFTNADLGAKQGGHEPGWREVPVEDPVVKDAAHHAVKSIQERSNSLFPYELLEILRAHAQVVEDFAKFDILMKLKRGSKEEKIKAEVHKSLEGAFVLNQHQPAEHDESSSQ

SEQ ID NO: 2408 - protein, 214 aa, Populus tremula
MLLPLSFLLLASTLTLLLEAVRASGNPVLDVKGLGLLPGVPYYMISSEWPIVGGVVSLGNDINGTCPLDVILLENFCVTGTPVTFSIASGNQELFITDSTDVYISFDSTSNCTNETMVWMHESINGSSTELLTIGGVEGDVNTIFRIVNVGGSFVSNYKLVAYKLSSYDLALTTSDVGAVFDFTTGIRYLALTEPPLIVGFEVAYDYDGLKAVV

SEQ ID NO: 2409 - protein, 214 aa, Populus tremula
MLLPLSFLLLASTLTLLLEAVRASGNPVLDVKGLGLLPGVPYYMISSEWPIVGGVVSLGNDINGTCPLDVILLENFCVTGTPVTFSIASGNQELFITDSTDVYISFDSTSNCTNETMVWMHESINGSSTELLTIGGVEGDVNTIFRIVNVGGSFVSNYKLVAYKPSSYDLALTTSDVGAVFDFTTGIRYLALTEPPLIVGFQVAYDYDGLKAVV

SEQ ID NO: 2410 - protein, 212 aa, Candida albicans SC5314
MSAEDTKPKTEESTSIPKPPTSNVFSMFGAKKEKKPEQEDSDNKKESDKKEEKDTSKSTGDDNEVAEEEEADVEFTPVVQLDKKVDVKTNEEDEEVLYKVRAKLFRFHGDSKEWKERGTGDVKFLKHKTTGKVRILMRRDKTLKICANHLISADYELKPNIGSDRSWVYTVTADVSEGEPEAQTLAIRFGNKENADLFKEHFDNAKKEAKKD

SEQ ID NO: 2411 - protein, 505 aa, Shigella flexneri 2a str. 301
MCLDSFINVNGCFLFWRAKGETLMSAIDSQLPSSSGQDRPTDEVDRILSPGKLIILGLQHVLVMYAGAVAVPLMIGDRLGLSKDAIAMLISSDLFCCGIVTLLQCIGIGRFMGIRLPVIMSVTFAAVTPMIAIGMNPDIGLLGIFGATIAAGFITTLLAPLIGRLMPLFPPLVTGVVITSIGLSIIQVGIDWAAGGKGNPQYGNPVYLGISFAVLIFILLITRYAKGFMSNVAVLLGIVFGFLLSWMMNEVNLSGLHDASWFAIVTPMSFGMPIFDPVSILTMTAVLIIVFIESMGMFLALGEIVGRKLSSHDIICGLRVDGVGTMIGGTFNSFPHTSFSQNVGLVSVMRVHSRWVCISSGIILILFGMVPKMAVLVASIPQFVLGGAGLVMFGMVLATGIRILSRCNYTTNRYNLYIVAISLGVGMTPTLSHDFFSKLPAVLQPLLHSGIMLATLSAVVLNVFFNGYQHHADLVKESVSDKDLEVRTVRMWLLMRKLKKNEHGE

SEQ ID NO: 2412 - protein, 745 aa, Candida albicans SC5314
MGNNTSTGNFHSSGSNKRQGNSSDSIRKSSASVNYNNSVDSSSDNRVRKSTANKNANSLDEEFSDLILHQVVKNSRTLEAAPLQPSPKGEPTNPHHQQSNVYSTHYNQFSDDLIEDEFNELNEGIVETEMGSLQRNIIPDQGFGNDPTNTTSSSDSTGTYNYSSTLNDDMEIDAPFPHDDDDDNDSDGVNKVFPQSRSRTPTPDLTKVDFTKIISQAPPGYDGDTNMNGSGSVPPPTQMMSAASVARNAHSPLPNSDHHQKNLQQQRQPQQQQQLQSSFPDNSCGNTHAYPQQHGRPTKILKTNQQSQQFLIPIEIKWVNTTKEAIHKIAIIGSFSNWRDVIKMYPSTSHPNEFVTTINLPLGVHKLLYIINNEYRVSDQLPTATDQEGIFFNWFEVIDDTHLFNHSLNQPNHIGASTDYDANIIRYDNTTTTTSEMSTTTTATTTTTPKYVQPQTWAPRPAGKSDVDKINQKETDLLYKMSKEASGEFEHVEFIEDTDATGNGNGATAGTAGQSQDSSTPQGHNNHEAINSVDEIAFDNNPYQNYELSTSSSSFLQTTGQIIENPVEYSSEIPEMFINYDYFKMKPADYELPEPPQLPPHLNNVLLNKMTSSSSSGSGSGSGYSSTSHGSGSMTQHLSSIGNVSTISGSLPKSQSLSSTIGSGSSSSVSNTGSYLNNKRPPLRRADSSYYASNKDAYHLSIPNHVILNHLMTTSIKNDVLTVACITRYSGKFVTQIIHSPADTK

SEQ ID NO: 2413 - protein, 907 aa, Candida albicans SC5314
MFTKNHRRMSSTSSDDDPFDVAEKYYGEERKKKLNRVRTFSAFESTKYGAGPISPLRPTYEPPPVIKETSEPLSSSSSTSSPPTLTPQTSQVQFNLGVGKTKNGSAIHSDSEEEEEDEDPVSNTKKGEADEKDPFDTTDSKLENENSTPSSITGKEIIPHPTGFRGSSEESAIRRKPSIIPIYHDNISQESVIRNANTPTTYNREKFHLRRGSLDESTFIRPKKYYINDVQGTLRELLANEDTDNNCQITIEDTGPKVLRLGTANSLGINQSSIRGTYRLSNLLQELTIASRFGRHQIVLDEARLSENPVDRMKRLISTSFWNNLTRIITKENIVDMAKDTKIKESWIDDQGKLHENQESHRIYVPYNRKDQYEFFQLIKKQRSDIQLDVQYLPQKIDADYIKSINKKPGLLSIATRPDPQAPDSGSLISWPYVVPGGRFNELYGWDSYMETLGLLTDVKIDPSGNPRNLRHLELARGMAENFIYEIHHYGKILNANRSYYLGRSQPPFLTDMALRIFNKTIEVTPELMDEAIDFLKRATLAAIKEYETIWCAHPRLDDKTGLSCYHPEGKGIPPETEPTHFNALLKPYLAKYNDIDQLDFIEKYNSGEIKEPELDEYFLHDRAVRESGHDTSYRLEGKCAYLATVDLNSLLYKYENDIAFILQSFFNDNLQDPYDDNNSYKIHSSKIWLERSHQRKLNVDKYLWNEQDGIYYDYNVKLQQQTNYESATTFWPLYAKLASSNQAAKLIDQSLHKFEEHGGLVAGTLKSRGEVGLTRPSRQWDYPFGWAPQQILAWIGLVNYGYDGIARRLAYRWLFMMTKSFVDYNGVIVEKYNVTKGAVPHRVDAEYGNQGLDFKGVATEGFGWVNASYVFGLTFLNLYAQRALGSLTPPEIFLRNMHPEQRKQYK

SEQ ID NO: 2414 - protein, 473 aa, Malus x domestica
MRMLSRNATFNSHGQDSSYFLGWQEYEKNPYHEVHNTNGIIQMGLAENQLCFDLLESWLAKNPEAAAFKKNGESIFAELALFQDYHGLPAFKKAMVDFMAEIRGNKVTFDPNHLVLTAGATSANETFIFCLADPGEAVLIPTPYYPGFDRDLKWRTGVEIVPIHCTSSNGFQITETALEEAYQEAEKRNLRVKGVLVTNPSNPLGTTMTRNELYLLLSFVEDKGIHLISDEIYSGTAFSSPSFISVMEVLKDRNCDENSEVWQRVHVVYSLSKDLGLPGFRVGAIYSNDDMVVAAATKMSSFGLVSSQTQHLLSAMLSDKKLTKNYIAENHKRLKQRQKKLVSGLQKSGISCLNGNAGLFCWVDMRHLLRSNTFEAEMELWKKIVYEVHLNISPGSSCHCTEPGWFRVCFANLPERTLDLAMQRLKAFVGEYYNVPEVNGGSQSSHLSHSRRQSLTKWVSRLSFDDRSPIPGR

SEQ ID NO: 2415 - protein, 488 aa, Mycobacterium tuberculosis
MRAEIGPDFRPHYTFGDVTQQVSGLTFNWELSAPVWHTAQMGSTTHREVAKLDRVPLPVEAARVAATGWQVTRTAVRFIGRLPRKGPWQQKVIKELPQTFADLGPTYVKFGQIIASSPGAFGESLSREFRGLLDRVPPAKTDEVHKLFVEELGDEPARLFASFEEEPFASASIAQVHYATLRSGEEVVVKIQRPGIRRRVAADLQILKRFAQTVELAKLGRRLSAQDVVADFADNLAEELDFRLEAQSMEAWVSHLHASPLGKNIRVPQVHWDFTTERVLTMERVHGIRIDNAAAIRKAGFDGVELVKALLFSVFEGGLRHGLFHGDLHAGNLYVDEAGRIVFFDFGIMGRIDPRTRWLLRELVYALLVKKDHAAAGKIVVLMGAVGTMKPETQAAKDLERFATPLTMQSLGDMSYADIGRQLSALADAYDVKLPRELVLIGKQFLYVERYMKLLAPRWQMMSDPQLTGYFANFMVEVSREHQSDIEV

SEQ ID NO: 2416 - protein, 235 aa, Arabidopsis thaliana
MLKLWRWYQRCLTVHPVKTQVISSGFLWGFGDVTAQYITHSTAKRRLLRLTETNKDADADTEIKVKWKQDAEFKVNWKRVAITSMFGFGFVGPVGHFWYEGLDKFIKLKLRYVPKSTRFVAAKVAMDGLIFGPVDLLVFFTYMGFATGKNTAEVKEGLKRDFLPALALEGGAWPLLQIANFRYVPVQYQLLYVNIFCLVDSAFLSWVEQQKDAAWKQWFTSSFQPLKERGGQGGV

SEQ ID NO: 2417 - protein, 363 aa, Glycine max
MSDMDPSKKVADRYLKREVLGEGTYGVVYKAIDTHTGQTVAIKKIRLGKQKEGVNFTALREIKLLKELKDPNIVELIDAFPHKGNLHLVFEFMETDLEAVIRDRNIFLSPSDTKSYLQMTLKGLAYCHKKWVLHRDMKPNNLLIGSNGQLKLADFGLARMFGSPDRRFTHQVFARWYRAPELLFGAKQYGPGVDVWAAGCIFAELLLRRPFLQGTSDIDQLGKIFSAFGTPTASQWPDMVYLPDYVEYQYVPAPPLRSLFPMVTDDALDLLSKMFTYDPKARISVQQALEHRYFSSAPLPSDPDKLPRPAPKRESRTSDFNLQEGPTVLSPPRKSRRVMPGRDGFEGSSLQADKVDASFGDFN

SEQ ID NO: 2418 - protein, 511 aa, Oryza sativa (japonica cultivar-group)
MDGLAAPSPSHSGATSGGGASHRKRKLPPSSLSDATADEDDDTTAPSSPSTSPSSPSRPSSPSSSHSDDDDDDSLHTFTAARLDGAPPSSSGRPPKPESSTVSAAAAAAAAAAAPKPDSASAAAGDGKEDPKGLFTDNIQTSGAYSAREEGLKREEEAGRLKFLCYSNDGVDEHMIWLVGLKNIFARQLPNMPKEYIVRLVMDRTHKSMMVIRNNIVVGGITYRPYTSQKFGEIAFCAITADEQVKGYGTRLMNHLKQHARDADGLTHFLTYADNNAVGYFVKQGFTKEITLDKERWQGYIKDYDGGILMECRIDQKLPYVDLATMIRRQRQAIDEKIRELSNCHIVYSGIDFQKKEAGIPRRTMKPEDIQGLREAGWTPDQWGHSKSRSAFSPDYSTYRQQLTNLMRSLLKNMNEHPDAWPFKEPVDSRDVPDYYDIIKDPIDLKTMSKRVESEQYYVTLEMFVADMKRMFSNAKTYNSPDTIYYKCASRLESFFSNKVASQLAQASTKN

SEQ ID NO: 2419 - protein, 350 aa, Xanthomonas oryzae pv. oryzae KACC10331
MPKPFNLAVVGYGYVGRTFHAPLIASTPGLQLHSVVSSKPQQPQADFPGINVVADLDSALADPALDAVVLATPNQTHAPFALQALAAGKHVLVDKPFALDVAQAQQMVDAANAAGRIISVFQNRRWDADFLTVRRLIEEGQLGDVMEFHSHFDRYRPQIRDRWRESESPGAGLWYDLGPHLLDQALQLFGVPQGIGADLQRQRDQARSVDYFHVTLHYPRLRAILHAGSLVADSSLRFAVHGTRGSYLKHGLDTQEDQLRAGRRPGTVGWGVDPSAGTLTRVDDEGRIHTHQPDNLPGDYRQCYAAFRDALTGPGPVSGNDAVQLMQLVELAQRSAASGQVQWLDAARRL

SEQ ID NO: 2420 - protein, 339 aa, Shewanella sp. MR-7
MSRNLPPIQKQLEQKIGSVMLDTLLPFKRHFLSRNGNKLHYINEGQGEPVVMVHGNPSWSFYYRNLVSALKDTHQCIVPDHIGCGLSDKPDDSGYDYTLKNRIDDLEALLDSLKVNENITLVVHDWGGMIGMGYAARYPERIKRLVILNTGAFHLPDTKPLPLALWICRNTLLGTVLVRGFNAFSSIASYVGVKRQPMSKYIREAYVAPFNSWANRISTLRFVQDIPLKPGDRNYQLVSDIAASLPKFAKVPTLICWGLQDFVFDKHFLAKWREHMPHAQVHEFADCGHYILEDASDEVITHIKHFMAEVQTPEPEVQHVETAQVTEPEAETQAPQAAH

SEQ ID NO: 2421 - protein, 257 aa, Haynaldia villosa
CELDNIMRLTGITGIVNGMDVSEWDPTKDKFLAVNYDVTTALEGKALNKEALQAEVGLPVDRKVPMVAFIGRLEEQKGPDVMIAAIPEIVKEEDVQIVLLGTGKKKFEKLLKSIEEKFPSKVRAVVRFNAPLAHQMMAGADVLAVTSRFEPCGLIQLQGMRYGTPCACASTGGLVDTIVEGKTGFHMGRLSVDCNVVEPADVKKVVTTLKRAVKVVGTPAYHEMVKNCMIQDLSWKGPAKNWEDVLLELGVEGSEPG

SEQ ID NO: 2422 - protein, 461 aa, Corynebacterium diphtheriae NCTC 13129
MAQNNVIDTVVNLCKRRGLVYPCGEIYGGTRSAWDYGPLGMELKENIKKQWWRTFVQARADVVGLDSSIILPRQVWVASGHVATFTDPLVESLHTHKRYRADHLIEAYEAKHGHAPENGLADVPDPETGQPGNWTEPQMFSGLMKTYLGPVDNEQGLHYLRPETAQGIFVNFKNVMTTARMKPPFGIAQVGKSFRNEITPGNFIFRTREFEQMEIEYFVPEELADQKFNEWVDDCWNWFVDLGINPDNMRRFDVPEEDRAHYSKGTIDMEYKFGFQGNPWGELMGVANRTDYDLGCHIKESGEDLSYFDQTTGERYVPWVIEPSFGLTRALMAFLVDAYCEDEAPNAKGGVDKRVVLKLDPRLAPVKVAVLPLSKKDTLTPVAEEVAAKLRQFWNVDYDTSGAIGRRYRRQDEIGTPFCVTVDFDTLEDNAVTVRERDTMTQERVALADLQSYLAARLIGC

SEQ ID NO: 2423 - protein, 178 aa, Sulfolobus solfataricus P2
MPLRPGRCYRHFSGPAYTRKEYIPGIPQPKITKFTSGNPNGDYDYEVRLITTEIGQIRHNALEAVRTLTLKTLSKKTGSETSFFMWILKYPHHVLRENKMMAFAGADRLQDGMRLSFGTPIGTAARIEKLGETLIVIKVKKEHLEFAKEALKIASKKLPLRTRIEIIPLRLVRQEVQS

SEQ ID NO: 2424 - protein, 257 aa, Elymus canadensis
CELDNIMRLTGITGIVNGMDVSEWDPTKDKFLAVNYDVTTALEGKALNKEALQAEVGLPVDRKVPLVAFIGRLEEQKGPDVMIAAIPEIVKDEDVQIVLLGTGKKKFERLLKSVEEKFPGKVRAVVRFNAPLAHQMMAGADVLAVTSRFEPCGLIQLQGMRYGTPCACASTGGLVDTIVEGKTGFHMGRLSVNCNVVEPADVKKVATTLKRAIKVVGTPAYHEMVKNCMIQDLSWKGPAKNWEDVLLELGVEGSEPG

SEQ ID NO: 2425 - protein, 684 aa, Agrobacterium tumefaciens str. C58
MATKVKENEEAENERDGATDGPLLDLSDDAVKKMIKAAKKRGYVTMDELNSVLPSEEVTSEQIEDTMAMLSDMGINVIEDEDAEEAAPAEDDGDSDNEESEGGELAPSGGTALATAKKKEPTDRTDDPVRMYLREMGSVELLSREGEIAIAKRIEAGRETMISGLCESPLTFQALIIWRDELNEGTTLLREIIDLETTYSGPEAKAAPQFQSPEKIEADRKAAEEKEKTRRLRAPTGDEDVTDVGGDGLPPEEEEEDDDESNLSLAAMEAELRPQVMETLDTIADTYKKLRKLQDQQVEARLACTGTLSSGQERRYKELKDQLITAVKSLSLNQNRIDSLVEQLYDISKRLMQNEGRLLRLAESYGVKRDSFLEQYHGAELDPNWMKSITNLAARGWKEFAREESNTIREIRQEIQNLSTETGISIAEFRRIVSMVQKGEREARIAKKEMVEANLRLVISIAKKYTNRGLQFLDLIQEGNIGLMKAVDKFEYRRGYKFSTYATWWIRQAITRSIADQARTIRIPVHMIETINKIVRTSRQMLHEIGREPTPEELAEKLAMPLEKVRKVLKIAKEPISLETPVGDEEDSHLGDFIEDKNALLPIDAAIQANLRETTTRVLASLTPREERVLRMRFGIGMNTDHTLEEVGQQFSVTRERIRQIEAKALRKLKHPSRSRKLRSFLDS

SEQ ID NO: 2426 - protein, 325 aa, Aspergillus oryzae
MSNGKTFTLSNGVKIPGVGFGTFASEGSKGETYQAVTKALETGYRHLDCAWFYLNEDEVGDGIHDFLKKNPSVKREDIFVCTKVWNHLHRPEDVQWSVDNSLKRLRLDYVDLFLVHWPIASEKEDQEKPKIGPDGKYVILKELTENPEPTWRAMEKIYRDGKAKAIGVSNWTIPGLEKLFKFAEIKPHVNQIEIHPFLPNNELVQFCFKNDILPEAYSPLGSQNQVPTTGERVSENKTLNEIAQKGGNTLAQVLIAWGLRRGYVVLPKSSNPARIESNFKSIELTDEDFEAVNKVAEGRHFRFVNMKDTFGYDVWPEETAKNLSA

SEQ ID NO: 2427 - protein, 497 aa, Debaryomyces hansenii CBS767
MPKNPNQYSETDRLLEAQGWLEHEVLGSTSGSTMGSLSTLLTEFKYIFVNSPLIVITLLLQFSLNFISIYYVKQFGENKLAAASLSNTIYYVSGSAIFNGFATSLDTLCSQAYGAKNYYNVGLYCQRCFLLMLIVLVPLTFFHFNCATIFIKRFFIDDPEIIESCNAYLSILAIGSPGLVMFEVLKRFVQSQGIFHPPAIALVCLFPINLALNNFAVPRYGYLAVPSLVALNYWSMGIGLLVYIAFTNNIKNPRKCFQRISDAHELFHNVRGMVVLSCSGIIMVVSEAMAFQILTFMTCKLSIHEMAAQSIVSTIANGVFQMPFGVAICCCTRLANIIGTGNIANLNILKKTYFIIAFGLGIINFLFLISSASWLAQIFNPTDDPTNVVRVLTTKVLIIIGINQFADCFNIICAGILRAQGRQTTGSMLSFISFYFIALPLEVLLAFNLKMGIQGLWAGLAFGVFILASCEAFCVINLNWSKIISQFLARESKSLIT

SEQ ID NO: 2428 - protein, 465 aa, Agrobacterium tumefaciens str. C58
MSSSVVAETVPSGSGSWFSHFKATLVLGIPLIGAQLAQLGIHTTDMVIVGQLGAEKLAAMVLAGQFFFVVFIFGSGFSVAVVPMVAQAYGQGDATSARRSLRMGMWVAIAYWLLALPIFFNAERILVYLGQNPNVAALTGHYLAIAKFGLLPALLFYVLRGLVSAIGRAGIILYVTIIMLVMNGLMAYVLVFGHFGLPAMGMNGAAVVAVIVNAFSFIFIVAYVQTREETKKYELFVRFWRPDWHALFEVLRLGLPISITILAEVTLFAAASILMGQIGTVQLAAHGIALQLASIAFMIPLGLSQAATVRVGVARGQGDFKNLIRASIMIYAIACGIALCGGILFAAVPEFLAKWFLDPKLPEAAEVLAYASSLVVIAGIFQLVDGIQAVTAGLLRGLKDARIPAMLALISYWPIGLALAWTMAFPLGFGGRGVWFGFVIGLSTAAVLLTVRFVLLVKREMKTAR

SEQ ID NO: 2429 - protein, 277 aa, Yersinia pestis KIM
MTMQPLIKLYDGRLMPQLGLGVWQASIQETELAVSKALEVGYRSIDTAAIYKNEEGVGKALKAAAVARDELFITTKLWNDDQHNPQQALETSLQKLQLDYVDLYLIHWPDPKQDHYVSAWRELVTLKEQGLIRSIGVCNFHIPHLQRLIDETGIAPTVNQIELHPLLQQRQLHAWNATHHIATESWSPLAQGGKGVFDQEIIRKLAQQYNKTPAQIVIRWHLDSGLIVIPKSVTPARIRENFEVFDFKLQKEELLAITKLDCGKRLGPDPEVFGSDR

SEQ ID NO: 2430 - protein, 115 aa, Arabidopsis thaliana
  misc_feature (18)..(18): Xaa can be any naturally occurring amino acid
  misc_feature (24)..(24): Xaa can be any naturally occurring amino acid
  misc_feature (27)..(27): Xaa can be any naturally occurring amino acid
  misc_feature (30)..(30): Xaa can be any naturally occurring amino acid
  misc_feature (33)..(33): Xaa can be any naturally occurring amino acid
  misc_feature (37)..(37): Xaa can be any naturally occurring amino acid
  misc_feature (39)..(41): Xaa can be any naturally occurring amino acid
  misc_feature (43)..(43): Xaa can be any naturally occurring amino acid
  misc_feature (45)..(45): Xaa can be any naturally occurring amino acid
  misc_feature (47)..(47): Xaa can be any naturally occurring amino acid
  misc_feature (51)..(51): Xaa can be any naturally occurring amino acid
  misc_feature (54)..(54): Xaa can be any naturally occurring amino acid
  misc_feature (81)..(81): Xaa can be any naturally occurring amino acid
  misc_feature (93)..(93): Xaa can be any naturally occurring amino acid
  misc_feature (95)..(96): Xaa can be any naturally occurring amino acid
  misc_feature (102)..(102): Xaa can be any naturally occurring amino acid
  misc_feature (106)..(106): Xaa can be any naturally occurring amino acid
  misc_feature (108)..(108): Xaa can be any naturally occurring amino acid
  misc_feature (111)..(111): Xaa can be any naturally occurring amino acid
  misc_feature (113)..(113): Xaa can be any naturally occurring amino acid
  unsure (1)..(115): unsure at all Xaa locations
ADDREDLSVLHLVRPFLXFLPEVXSAXRKXPFXEKVXYXXXSXFXFXGCSXQLXLYGIHSTTGADPFYWMRVILASNRGTXMELGITPIATSXGXXCNVLAXSKIXEXDNXVXED

SEQ ID NO: 2431 - protein, 54 aa, Brassica napus
  misc_feature (23)..(23): Xaa can be any naturally occurring amino acid
  unsure (1)..(54): unsure at all Xaa locations
MGSETFVEILLAILLPPVGVFLXYGIGVEFWICLLLTILGYIPGIIYAVNVLVA

SEQ ID NO: 2432 - protein, 324 aa, Brucella suis 1330
MINAIRVHRTGGPDVLHYEQVEIGEPGPGEARVRHEAVGLNFIDVYFRTGLYKAAKMPFTPGNEGAGIVVAVGAGVENVRVGERVAYAATPGSYADERILPADRLVKVPDTIDLKTAASMMLKGMTAQYLLRRTFRVEPGQTILFHAAAGGVGLIAGQWAKHLGATVIGTAGSEEKIALARKHGYDHVINYRSENFVERVRELTNGEGVDVVYDSVGRDTYMGSLDVLKPLGMFACFGQSSGVIPPFDLGILAQKGSLFATRPTLFNYIARRADLEKTTAELFDVVESGAVKIEINQTYALKDACKAHEALEARKTTGTSILLP

SEQ ID NO: 2433 - protein, 258 aa, Oryza sativa
  misc_feature (159)..(159): Xaa can be any naturally occurring amino acid
  unsure (1)..(258): unsure at all Xaa locations
MAPLGDGAAAAAAEPNLVVSFGEMLIDFVPDVAGVSLAESGGFVKAPGGAPANVACAISKLGGSSAFVGKFGDDEFGHMLVDILKKNGVNAEGCLFDEHARTALAFVTLKSNGEREFMFYRNPSADILLTEAELKLDLIRRAKIFHYGSISLITEPCRXAHVAAMRAAKSAGILCSYDPNVRLPLWPSEDAARAGILSIWKEADFIKVSDDEVAFLTQGDANDEKNVLSPSRRSSSARQPTRAPRFRRRSPPLGASEF

SEQ ID NO: 2434 - protein, 337 aa, Bradyrhizobium japonicum
MTVLVTGGAGYIGSHMVHALVDAGESVVVIDNLSTGFSAFLPEGVPLFIGDAGDENLVEGVIAQHGIDSIIHFAGSVVVPDSMRDPLGYYRNNTMTTGSLLNAAVKGGVSRFIFSSTAAVYGNPDRVPVPEIAPTRPLSPYGSSKLMTEIMLHDVASAHGMSYVVLRYFNVAGADPKGRVGLATTGATHLLKIAVEAATGQRAKIDVFGTDYPTQDGSCIRDFIHVSDLVEAHRAALSYLRAGGQSVTLNCGYGRGYSVLETIEAVRRVSMRNFAVAYAARRPGDIMTMVADTTRIRSLLDWTPRFDDLETIASHALAWEEKLFRERAGSARQAESA

SEQ ID NO: 2435 - protein, 765 aa, Solanum tuberosum
MASHVVGYPRMGPKRELKFALESFWDGKSSAEDLKKVSADLRSSIWKQMSDAGIKYIPSNTFSYYDQVLDTTAMLGAVPSRYNWTGGEIEFGTYFSMARGNASVPAMEMTKWFDTNYHFIVPELGPDVNFSYASHKAVNEYKEAKAQGVDTVPVLVGPVSYLLLSKPAKGVEKSFPLLSLLDKILPIYKEVIAELKAAGASWIQLDEPTLVLDLESHKLEAFTKAYADLESSLSGLNVLVETYFADVPAEAFKTLTALKGVTAFGFDLVRGTQTLELIKSSFPSGKYLFAGVVDGRNIWANDLAASLALLQSLEGVVGKDKLVASTSCSLLHTAVDLINETKLDDEIKSWLAFAAQKVVEVNALAKALSGAKDEAFFSANAAAQASRKSSPRVTNEAVQKASAALQGSDHRRATNVSARLDAQQKKLNLPILPTTTIGSFPQTVELRRVRREYKAKKISEEEYVKAITEEIKKVVDLQEELDIDVLVHGEPERNDMVEYFGEQLSGFAFTANGWVQSYGSRCVKPPIIYGDVSRPKPMTVFWSSKAQEMTKRPMKGMLTGPVTILNWSFVRNDQPRFETCYQIALAIKDEVEDLEKAGITVIQIDEAALREGLPLRKAEHAFYLNWAVHSFRITNVGIEDTTQIHTHMCYSNFNDIIHSIIDMDADVITIENSRSDEKLLSVFREGVKYGAGIGPGVYDIHSPRIPSTEEIADRVNKMLAVLDTNILWVNPDCGLKTRKYTEVKPALQNMVSAAKTIRTQLASAK

SEQ ID NO: 2436 - protein, 119 aa, Penicillium marneffei
PFLLSLGMSKALLAIVWVAGPLTGTLVQPYIGILSDNCRIPWGKRKPFMIGGGLATIFCLMLLAWVREIIAGVLGIFGADAQSSGVKVTTLVFATIMMFCLDFAINTGMFWICLVLLHC

SEQ ID NO: 2437 - protein, 281 aa, Sulfolobus solfataricus P2
MGIDIVPMEKGGGSDGTPISIEELDKLRQVAEKARRNVIKMLFYDQTIHVGSSLSSIEILTTLIFKHIRTDSSLVNKDWLILSKGHAAPALYAVLAEKGYIKEEELWRIQDITGLLQGHPETFIPGVDMSTGSLGQGLSFGIGVATGIKMANGTGRVYVIMGDGEQDEGEIWEAMTHAVVRNLDNLIAFIEMNNFQLDGSTDEIKPKNFLPKVWEAVGWKVLNCDGHDFISITNAVNEAYKASKPVVIFAKTVRGKGFPPIENTHKQRSSPDDARKYLLNA

SEQ ID NO: 2438 - protein, 657 aa, Nicotiana sylvestris
MMAANLYYSQIEELMFELSMWRCNDDLRVRAAELYRSSRRDTKHYIEFWKTIPPSEPYRVILGDVRDKLYQTRERTRQMLAHGISDIPEDATYNNVEQFLEPLELCYRSLCECGDRPIADGSLLDFLRQVSTFGLSFVRLDIRQESDRHTDVLDAITQHLEIGSYREWSEERRQEWLLSELSGKRPLFGPDLPRTEEIADVLDTLHVIAELPSDCFGAYIISMATAPSDVLAVELLQRECHVKQPLRVVPLFEKLDDLESAPAAVARLFSIEWYRNRINGKQEVMVGYSDSGKDAGRFSAAWQLYKAQEELIKVAKEHGVKLTMFHGRGGTVGRGGGPTHLAILSQPPDTIQGSLRVTVQGEVIEQSFGEEHLCFRTLQRFTAATLEHGMHPPVSPKPEWRALMDEIAVIATEKYRSIVFKEPRFVEYFRLATPELEYGRMNIGSRPSKRKPSGGIESLRAIPWIFAWTQTRFHLPVWLGFGAAFKYAIEKDIKNLRMFHEMYNEWPFFRVTIDLVEMVFAKGNPGIAALYDKLLVSEDLLPFGELLRSNYEETRSLLLQIAGHKDLLEGDPYLKQRLRLRDSYITTLNLLQAYTLKRIRDPNYHVTLRPHISKDYMESKSAAELLQLNPTSEYAPGLEDTLILTMKGIAAGLQNTG

SEQ ID NO: 2439 - protein, 427 aa, Streptococcus thermophilus CNRZ1066
MILFNIKIISFDWSGFMDTGSTAFILICSAMVCLMTPALAFFYGGLGRRKNVINTMMMSVLPLAIASLLWVVAGYSLSFGGQGYFFGNISHLFLHGVSETTSSRGLAITDLLFSAFQMMFSIICVAILTGSVVGRMRFTPLVIFIVFWLLLVYYPFAHMVWGDGILVKWGTIDFAGGDVVHITSGVSALVLAIVVGKRRDYGILEHRPHNVPFVLLGASLLWFGWFGFNAGSALAPNGLAVHALVTTHFSAAAAMFSWLALEKYVTGHPTLVGASTGLVAGLVAITPGAGFVSIWSSILIGAMVSPVCFYAISVLKKRTNYDDALDVFGCHGVGGIFGGLCTAVFTTPNLALDKANFGLIYGNARLFVVTVLAIVFTVTWSGLVTYGIIEVIGHYIPLRVSDRDEAIGLDDCEHKETAYPTFMGMDS

SEQ ID NO: 2440 - protein, 510 aa, Oryza sativa
  misc_feature (363)..(363): Xaa can be any naturally occurring amino acid
  unsure (1)..(510): unsure at all Xaa locations
MWKGFLSKLPRKTSASGRGADLDSGQCSNGAGNGNPIQRTSSCGSIPSGRSTSTIKRMSSAIFPSSVVAGIEPLVSFKDVPNSEKQNLFVSKLNLCCAVFDFSDPNKSSAEKDIKRQTLLDLIDYVDSSSSRFSEAVIAASSRMFAVNLFRVFPPNYRSSSSGGGEGEEEEPMFEPAWCHLQLVYELLLKFIGSSSLDAKVGKKYFDHSFIVKLLNLLDSEDPRERDCLKTILHRIYGKFMVHRPFIRKAVSNIFYHFVFETDRHNGIAELLEVFGSVISGFALPLKEEHKIFLWRVLVPLHKPKSVGVYLQQLTYCVTQFIEKDPKLASSVIIGLLRYWPITNSQKEVMFLSEIEEILETIXTAEFQKCMVPLFRRIAQCIKSSHFQVAERALFIWNNDNVISLIAQNRQMIMPIIVPALEHNSQNHWNQAVLNLTDNVKKMFSEMDDVLFSACLVKYKEDEERQASLESKRRLTWEKLESAASFQPVTGHTAVLVGCQPSANLIATLI

SEQ ID NO: 2441 - protein, 339 aa, Arabidopsis thaliana
MEKYEMVKDLGFGNFGLARLMRNKQTNELVAVKFIDRGYKIDENVAREIINHRALNHPNIVRFKEVVLTPTHLGIVMEYAAGGELFERISSVGRFSEAEARYFFQQLICGVHYLHALQICHRDLKLENTLLDGSPAPRLKICDFGYSKSSVLHSNPKSTVGTPAYIAPGVFCRSEYDGKSVDVWSCGVALYVMLVGAYPFEDPKDPRNFRKTVQKIMAVNYKIPGYVHISEDCRKLLSRIFVANPLHRSTLKEIKSHVWFLKNLPRELKEPAQAIYYQRNVNLINFSPQRVEEIMKIVGEARTIPNLSRPVESLGSDKKDDDEEEYLDANDEEWYDDYA

SEQ ID NO: 2442 - protein, 82 aa, Wolbachia endosymbiont of Hypolimnas bolina jacintha
IKPITEEKQGGIVLPSSAEKKPTKGEVIAIGSGSRNSSGERIALTVKTGDKVFYRQWAGTEVEHDNEKYVVMKESDLLAVIK

SEQ ID NO: 2443 - protein, 211 aa, Carica papaya
MSYDYLFKYIIIGDTGVGKSCLLLQFTDKRFQPVHDLTIGVEFGARMVAIDGRPIKLQIRDTAGQESFRSITRSYYRGAAGALLVYDITRRETFNHLASWLEDARQHANPNMSIMLIGNKSDLSHRRAVSKEEGEQFAKEHGLLFLEASARTAQNVEEAFIRTAAKILQNIQEGVIDVSNESSGIKFGYGRPQGTAGARDGAVAQRSGCCG

SEQ ID NO: 2444 - protein, 177 aa, Debaryomyces hansenii CBS767
MPEPTKDKDNTNGPIPITLLSGFLGSGKTTLLEHILTTDHSLKIAVIINDVSKLNIDAALIKNHVVNRKEEKLIQLQNGCICCTLRGDLLEELILLAKNGDIQYIVIESTGISEPMQVAETFTTEFSEMLLESEGSIPEEDEKIIRDIIDMGGLNKLKKIEKCVNVIDEINLLYNFL

SEQ ID NO: 2445 - protein, 543 aa, Debaryomyces hansenii CBS767
MPEPTKDKDNTNGPIPITLLSGFLGSGKTTLLEHILTTDHSLKIAVIINDVSKLNIDAALIKNHVVNRKEEKLIQLQNGCICCTLRGDLLEELILLAKNGDIQYIVIESTGISEPMQVAETFTTEFSEMLLESEGSIPEEDEKIIRDIIDMGGLNKLTKLDTCVTVIDALNFLSNIETTQFLADRYGDNGQGEQERTITDLMIDQIEFSDVIIINKISTTKKRQQRKIEKMIKSLNPVAKILVADYCKIDINEVISTKKYDFEKASTSAGWLQSINEMTLREGFGDKHSTALTPKPETEEYGINNFVYTARRPFHPKRFYEMIRDKFFIIEQSGFEDDEEPEEEINNETGHESLVDESLDEEEEEEEYFEPTEKQILKNKKLSPFGPLLRSKGFFWLASRYIIRGEWSSAGPMLTIKGGIPWFGVAGPEMYPPEAAKLIEADMKGKHDDRRNELVFIGLNINLKKLSEALDLCLLTDDEFELFEEVVDKERNLFKVEKKLQGVFEDGFVDWITFDEGENKVDINTEIHSHIGDRNSTPTHKLR

SEQ ID NO: 2446 - protein, 303 aa, Brassica napus
  misc_feature (16)..(16): Xaa can be any naturally occurring amino acid
  misc_feature (24)..(24): Xaa can be any naturally occurring amino acid
  unsure (1)..(303): unsure at all Xaa locations
LSYREQAYNQCRRASXSASSSSSXSSTWERDYNLSPSDEPRSGSCSDFYHRPAMPDLLTERNRGLRASRPNAKSKMITYDQQDLLSKFRDAKFFVIKSYSEDNVYKSMKYCVWASTKNGNKKLDAAYREAKTKQVACPVFLLFSVNASAQFCGVAEMVGPVDFETSVEYWQQDRWSGHFPVKWVIVKDVPNSLFRHIIIEDNDNKPVTNSRDTQEVGVEQGIEMINIFNSCEMKSSILDDFSFYEERQRIQDRKARQRALLENLRASSLTSVPTHLASSLHEDYVREMSKSFGEALALQHKLN

SEQ ID NO: 2447 - protein, 358 aa, Streptomyces coelicolor A3(2)
MSAGERVPEEFVPGCVIHGAGDLRVTDVPVRPPGPGEALVAVRYGGVCGSDLHYWRHGGVGDFHLREPMLLGHEVVGTVVAYGSPDTPGPAAGTSVAVHPATPCGVCPECVDRRRNVCRDTRYLGSAARFPHVQGGFAARIVVPAGQLRPLPAGLDPRRAALAEPLSVALHAVRRAGDPAGRHVLVTGAGPIGCLVVAAAKAAGAAHVTVTDLLPAALEYARAAGADTLVRADDPDDAGWPVEVDTAVEASGVAAGLDTCLRLVRRGGVVVQLGMLPPGQSPFAGNLLVSREIELRGAFRFDGEFDDALRLLAAEPAFDALVSAVVPVRDAASAFELAADRSRSCKVLLDFGAAPAAV

SEQ ID NO: 2448 - protein, 342 aa, Desulfotalea psychrophila LSv54
MGALNILVTGGAGYIGSHTCLELLEAGYEVTVVDDLSNSCYEALARVETLTEKKITFHQVNVLDQQALDAVFVSSKKPFAAVIHFAGLKAVGESVAEPLRYYHNNVTGTLVLCDLMAKHGLKNIIFSSSATVYGDPATVPITEDFPLSCTNPYGRTKLMVEEILADLHGADHEWNACLLRYFNPVGAHKSGRIGEDPNGIPNNLMPYIAQVAIGRLDYLSVFGNDYPTVDGTGVRDYIHVVDLAKGHVCAVKKILEGRGITTYNLGTGHGCSVLEMASAFSRACGHDVAYKIVARRAGDVAVYCADATKALDELGWSTSLGLEDMCEDTWRWQKNNPTGYRQ

SEQ ID NO: 2449 - protein, 432 aa, Cordyceps bassiana
MGKEDKTHINVVVIGHVDSGKSTTTGHLIYQCGGIDKRTIEKFEKEAAELGKGSFKYAWVLDKLKAERERGITIDIALWKFETPKYQVTVIDAPGHRDFIKNMITGTSQADCAILIIAAGTGEFEAGISKDGQTREHALLAFTLGVKQLIVAINKMDTTKWSEARYQEIIKETSSFIKKVGYNPKAVAFVPISGFNGDNMLEASTNCPWYKGWEKETKAGKSTGKTLLEAIDAIEPPKRPTDKPLRLPLQDVYKIGGIGTVPVGRVETGIIKPGMVVTFAPANVTTEVKSVEMHHEQLVEGVPGDNVGFNVKNVSVKEIRRGNVAGDSKNDPPSGAASFNAQVIVINHPGQIGAGYAPVLDCHTAHIACKFSELLEKIDRRTGKSVENNPKFIKSGDSAIVKMVPSKPMCVEAFTDYPPLGRFAVRDMRSDR

SEQ ID NO: 2450 - protein, 456 aa, Oryza sativa
  misc_feature (240)..(240): Xaa can be any naturally occurring amino acid
  misc_feature (261)..(261): Xaa can be any naturally occurring amino acid
  unsure (1)..(456): unsure at all Xaa locations
MSTTKVKRRVGKYELGRTIGEGTFAKVKFARDTETGDPVAIKILDKEKVLKHKMVEQIKREISTMKLIKHPNVVRIYEVMGSKTNIYIVLEYVTGGELFDTIVNHGRMREDEARRYFQQLINAVDYCHSRGVYHRDLKPENLLLDSYGNLKVSDFGLSALSQQIKDDGLLHTTCGTPNYVAPEVLEDQGYDGAMADLWSCGVILFVLLAGYLPFEDSNLMTLYKKISNAEFTFPPCDVFXPAQRLLTRILDPNPMTRVTIXPEILEDEWFKKGYKRPEFDEKYDTTLDDVDAVFNDSEEHHVTEKKEEPEALNAFELISMSAGLNLGNLFDSEQEFKRETRFTSKCPPKEIVRKIEEAAKPLGFDVQKKNYKICSPCLTTICMNIPFKLRLEKVKAGRKGNLNVATEILQVAPSLHMVEVRKAKGDTLEFHKFYKNLSRTLKDVVWKSDDLQNQLS

SEQ ID NO: 2451 - protein, 418 aa, Cordyceps bassiana
MGKEDKTHINVVVIGHVDSGKSTTTGHLIYQCGGIDKRTIEKFEKEAAELGKGSFKYAWVLDKLKAERERGITIDIALWKFETPKYQVTVIDAPGHRDFIKNMITGTSQADCAILIIAAGTGEFEAGISKDGQTREHALLAFTLGVKQLIVAINKMDTTKWSEARYQEIIKETSSFIKKVGYNPKAVAFVPISGFNGDNMLEASTNCPWYKGWEKETKAGKSTGKTLLEAIDAIEPPKRPTDKPLRLPLQDVYKIGGIGTVPVGRVETGIIKPGMVVTFAPANVTTEVKSVEMHHEQLVEGVPGDNVGFNVKNVSVKEIRRGNVAGDSKNDPPSGAASFNAQVIVINHPGQIGAGYAPVLDCHTAHIACKFSELLEKIDRRTGKSVENNPKFIKSGDSAIVKMVPSKPMCVEAFTDYP

SEQ ID NO: 2452 - protein, 699 aa, Oryza sativa
MNLWTDDNASMMEAFMASADLPAFPWGAASTPPPPPPPPHHHHQQQQQQVLPPPAAAPAAAAFNQDTLQQRLQSIIEGSRETWTYAIFWQSSIDVSTGASLLGWGDGYYKGCDDDKRKQRSSTPAAAAEQEHRKRVLRELNSLIAGAGAAPDEAVEEEVTDTEWFFLVSMTQSFPNGLGLPGQALFAAQPTWIATGLSSAPCDRARQAYTFGLRTMVCLPLATGVLELGSTDVIFQTGDSIPRIRALFNLSAAAASSWPPHPDAASADPSVLWLADAPPMDMKDSISAADISVSKPPPPPPHQIQHFENGSTSTLTENPSPSVHAPTPSQPAAPPQRQQQQQQSSQAQQGPFRRELNFSDFASNGGAAAPPFFKPETGEILNFGNDSSSGRRNPSPAPPAATASLTTAPGSLFSQHTPTLTAAANDAKSNNQKRSMEATSRASNTNNHPAATANEGMLSFSSAPTTRPSTGTGAPAKSESDHSDLEASVREVESSRVVAPPPEAEKRPRKRGRKPANGREEPLNHVEAERQRREKLNQRFYALRAVVPNVSKMDKASLLGDAISYINELRGKLTALETDKETLQSQMESLKKERDARPPAPSGGGGDGGARCHAVEIEAKILGLEAMIRVQCHKRNHPAARLMTALRELDLDVYHASVSVVKDLMIQQVAVKMASRVYSQDQLNAALYTRIAEPGTAAR

SEQ ID NO: 2453 - protein, 609 aa, Corynebacterium diphtheriae NCTC 13129
MQEVTAEAKYTIGPNETCLTAMLDTAKARPFGVMFTRPKNYEWINVTSQEFVEEVFEVAKGLIQSGVEQGDRVALLSETRYEWSLLDFAIWAAGAVSVPIYGSSSLRQVEWIIEDSGAVFAITETREHSELMKNLVLGDDGHPPLKGSPSQLRRIVEINSSAISTLKFEGRDVPDSVVEERIANTSSSDLASLVYTSGTTGRPKGCCLTHYNWLSQVRGLLTNDIGAIAVPGNRVLTFLPLAHVLARAVSLAVAIGGATQSHWSDFSTISVEFQRARPNLILGVPRVFEKVRNGAAANAMAASPIKGKLFLEAEKVAQDYSRALDTSEGPSRALQLKHKAFDKLVYRKIREAMGNAVRYCISGGSAISPDLMHFFRGLGVPVYEGYGLTETTAAAAVDFSNQEIGTVGPPVGGTSIRINNDGEILVKGNIVFDGYWKNEEATAESMHDGWFNTGDLGEILESGHLVITGRKKDLIVTAGGKNVSPGPLEDSLRSHPLISQAMVVGDGKPFIGLLITLDEDMLKRWKLNRNIPEGKTVRDLSSDPVLRAEIQDAINLANSTVSHAEAIKKFYILDRDLSEEANELTPTMKVKRNVVARRYADAIDALYGH

SEQ ID NO: 2454 - protein, 230 aa, Zea mays
EPCFRNVIIYKVPETPLHRPTELSPLLNHSPVNDSTDQHSQEQGIPTLITWSQGGDEVFLEGSWDNWTSRRALERSGKDHAVLLVLPSGVYHYRIIVDGELRYIPELPHAADERGRVANVLDVHDYVPESLDSVAEFEAPPSPVHSYDLHCPGDEEFAKEPPTLPPQLLMSVLAGDVDSAGNQALKPQHVVLDHLFIEKGWGSQSLLALGVTHRFESKYVSFVLYKPLER

SEQ ID NO: 2455 - protein, 338 aa, Oryza sativa
MVLPGSKESQNYDSNNQKVHPQPIDENMNQNLLKTYEVMVKKFQSQIQTRDTEITHLQQQIDEAKLRKSKLEKKLKQRGLLNKESEESDDEDNYFSIELTPGCRNRHEDNAYQSIHDFSKPLINMMKAAGWDLDAAANAIEPAVVYTRRAHKKYAFESYICQRMFGGFQEESFSVKAANITVSNEAFFHQFLAVRAMDPLDVLSQNPDSVFGKFCRSKYLLLVHPKMEGSFFGNMDQRNYVMSGGHPRTPFYQAFLKLAKSIWLLHRLAYSFDPKVKVFQVKKGSDFSEIHMESVVKNIILDEGAERPKVGLMVMPGFLIGTSVIQSRVYLSGVKSAD

SEQ ID NO: 2456 - protein, 388 aa, Photorhabdus luminescens subsp. laumondii TTO1
MENVVIIDGIRTPMGRSKGGAFRQVRAEDLSAHLMKKLFKRNPAIQQHEIDDIYWGCVQQTLEQGFNIARNAALLADIPHSVPAVTVNRLCGSSMQALHDGARMIMTGEANVTLIGGVEHMGHVPMTHGVDFHPKMSLSVAKAAGVMGLTAEMLAKIHHISREMQDEFALRSHQRATQATQSGAFANEISPIYGHDADGILKRFDYDEVIRSDANLKDLAALRPVFDPVTGSVTAGSSSALSDGASAMLITSESYAKNLGLKPRARIRSMAAVGCDPSIMGYGPVPATQMALKKAGLVLGDIGVIELNEAFAAQSLACLKGLNLLDSMDDKVNLNGGAIALGHPLGCSGARITTTLLNLMERRDVQFGLATMCIGLGQGIATIIERMD

SEQ ID NO: 2457 - protein, 217 aa, Pisum sativum
MDKKPCNSSQDPEVRKGPWTMEEDLILINYIANHGEGVWNSLAKAAGLKRTGKSCRLRWLNYLRPDVRRGNITPEEQLLIMELHSKWGNRWSKIAKHLPGRTDNEIKNFWRTRIQKHIKQVDNPNQQNFQQKMSLEINDHHHHHPHQPSSSQVSNLVEPMETYSPTSYQGTLEPFPTQFPTINNDHHQNSNCCANDNNNNNYWSMEDIWSMQLLNGD

SEQ ID NO: 2458 - protein, 545 aa, Photorhabdus luminescens subsp. laumondii TTO1
MTPGELRRLYLIIRVFLSYGLDELIPRIRLTWPLRFGRYLLFWIPNRHKDKSLGERLRLALQELGPVWIKFGQMLSTRRDLFPPAIADQLALLQDRVASFDGALARQYIETALGGALETWFDDFEPIALASASIAQVHTARLKENGQEIVIKVIRPDILPIIKADIRLMYRLANWVPMLLPDGRRLRPREVVREYEKTLIDELNLLREAANAIQLRRNFENSSTLYVPEIYSDYCRENVLVMERVYGIPVSDIEALEAQNTNMRLLAERGVQVFFTQVFRDSFFHADMHPGNIFVSYEHPEDPFYIGIDYGIVGSLNKDDKRYLAENFIAFFNRDYRKVAELHVDSGWVPSDTNVEDFEFAIRTVCEPIFEKPLAEISFGHVLLNLFNTARRFNMAVQPQLVLLQKTLLYVEGLGRQLYPQLDLWKTAKPFLEEWLHSQVGLPAVIRALKEKVPYWAEKLPELPELVYDSLQQHKHLQVSIEKLSGHLRGQQIKQRQSQYLLGVGATLFLCGSLFLLSGLANIPWLFIGAGTVSWLFGWCRLCKI

SEQ ID NO: 2459 - protein, 452 aa, Legionella pneumophila str. Lens
MKTKHFDLIVLGGGSGGIASAVRAAQYGAKVAVIEQNHLGGTCVNLGCVPKKIMYNASSIAETLHKSPDYGFFLENNAKLDWKRLVNKRNAYIERLRENYAQRFSQHKITLIQGKGIFHDQSSITIDHTIYQAEHIIIATGGEPALPAINGIKHAIDSDGFFSLTKLPAKVAVIGSGYIGVELAGILNSLGSETHLLMRGTRPLSRFDHMIGDTLMEIMQKQGICIHQNHKAQAIHLHSDGRKSILCQSGSIIGNIDVIISAVGRKPRTGNLNLDKINVITDDKGLILVDAFQNTSVKGVYAIGDVTNAPALTPVAIAAGRRLADRIFGNQPDACLNYDNICSVVFSHPPSGSVGLTEYEAIEKYGKNKIKIYQTRFIPMYDALSIDKTPTAMKLVTLGKKEKIIGLHVVGYSADEMLQGFGVAIKMGACKKDFDNTIAIHPTSAEEFVTMV

SEQ ID NO: 2460 - protein, 634 aa, Desulfotalea psychrophila LSv54
MCGLAGFFNYQFIADNTILHLQSMGKSISHRGPDASGTWYDADTGIGLVHTRLAIVDLSSAGHQPMHSQCDRYVIAFNGEIYNHLMLRQKLEQANQAPAWRGHSDTETLLACFVAWGIEQTLKVTVGMFALALWDKQEQNLTLARDRAGEKPLYWGWQGDTLLFGSELKALKAHPDFKAKVSRDALAVYMRHNYISAPQSIYEGIYKLLPGHYVTLNSVSNIDTATPKAYWTMNQAIESGIAQPFSGTDIEAVDLLEHRLSQSIGGQMLADVPLGAFLSGGVDSSVVVALMQKQAQQSVKTYAIGFDDPRYNEAQYAAAVARHLGTEHTELYVSAQDALELVPQLPSIYCEPFADSSQLPTFLVTKMARQHVTVALSGDGGDELFGGYTPYLFTPRYWNLLKCYPQPLRAALAASMSRLPLPDKFLKLAEVMGASNKESFYRSIMSHWGQPEDVVIGAKEPASVLNSSDLWPETDSFEHWMMAMEAQMYMPDDILVKVDRAAMANSLETRVPLLDHRVIELAWQLPLSMKIRDGKGKWVLREVLYRHVPRELIERPKKGFSIPLANWLRGPLRDWAEALLDEKRLRGEGYFYPAPIREAWQQHVQGKRDNASKLWSVLMFQAWLDEQDANSITL

SEQ ID NO: 2461 - protein, 463 aa, Brucella suis 1330
MEFTLMPMLITNPHLPDNPIVFANPAFLKLTGYEADEVMGRNCRFLQGHGTDPAHVRAIKSAIAAEKPIDIDIINYKKSGEAFWNRLHISPVHNANGRLQHFVSSQLDVTLELSRLVELEKERKTLSIETARSKDQLDYIVEVANIGFWTREFYSGKMTCSAECRRIYGFTPDEPVHFDTILDLVVLEDRMTVVQKAHQAVTGEPYSIEYRIVTRLGETRWLETRAKALTGENPLVLGIVQDVTERKKAEANKALVSREIAHRFKNSMAMVQSIANQTLRNTYDPEQANRLFSERLRALSQAHDMLLKENWAGATIQQICATALAPFNSTFANRIHMSGPHLLVSDRVTVALSLAFYELATNAVKYGALSNEKGVINITWAIMEDKGEKKFHMRWAESRGPEVMQPARRGFGQRLLHSVLAEELKAKCDVEFAASGLLIDVLAPITPEVFPGMGHNVPEQRIA

SEQ ID NO: 2462 - protein, 463 aa, Acinetobacter sp. ADP1
MLDSAAPLKRAMSTRHLVMLSLGGAIGTGLFLGSGEVITQTGPIGAVIAYMLGGLIAYMVMLCLGELAVHMPVSGSFGAYAKKYIGPGTGYMISWVYWLTWTATLGTEFTAAALLMQEWFPHTSMWIWTIIFALTIFGLNLSSTHIFAESEFWLSLVKVLTVISFIILGLLAIFGIIHFEGHASAPLFSNLTSHGWFPQGLMPIFATMLIVNFAFSGTELIGVAAGETKDPSINVPKAINAAIWRLLIFFVGTIVVISALLPYDQTGLGGHNVSNSPFVTVFQYIGIPYADHIIRFVIITALLSAANSGLYAASRMMWSLSNQRQLPSVFSKLTASGTPIIALVVTMFGAIPGLLSEQFAPETIFKNLLGVAAFTMVIVWMSICLSQFNFRRHWYKQGYHAKDLKFAAPLFPILPILGFLFCLITGLSMAKDPEMLPGFIGCLIFVACCYLSHYIFYREKSKL

SEQ ID NO: 2463 - protein, 150 aa, Capsicum annuum
MADQLTDDQISEFKEAFSLFDKDGDGCITTKELGTVMRSLGQNPTEAELQDMINEVDADGNGTIDFPEFLNLMARKMKDTDSEEELKEAFRVFDKDQNGFISAAELRHVMTNLGEKLTDEEEVDEMIREADVDGDGQIQYDEFVKVMMAK

SEQ ID NO: 2464 - protein, 329 aa, Schizosaccharomyces pombe
MSNLLVQVSKTGPSSVLQVITKEIPKPAPNGLVIKNAYAGLNYIDTYLRTGLYTAPLPYIPGKEAAGVVAAVGDKVEADFKVGDRVVYLTPFGAYAQYTNVPTTLVSKVSEKIPLKIASAALLQGLTAYTLIEEAYPVKTGDTVVVHAAAGGVGLLLCQMLRARNVHVIATASTAAKRRIAIKNGAEIACSYEDLTKVVADYTNGKGVDAAYDSVGIDTLSSSLDALRNGGTMVSFGNASGAIDAIPLKFLSARCLKFVRPSLFGYITGHAVFEGYVSRLWKEILDNNLNIAIHHIFKLSEAKEAHDAIESRATTGKLLLLCNEDLADA

SEQ ID NO: 2465 - protein, 543 aa, Pseudomonas syringae pv. phaseolicola 1448A
MTRYIFVTGGVVSSLGKGIASASLAAILEARGLKVTMLKLDPYINVDPGTMSPFQHGEVFVTHDGAETDLDLGHYERFIRTTMTQNNNFTTGRVYEHVLRKERRGDYLGATIQVIPHITDEIKRRIIKGAGDADVALVEIGGTVGDIESQPFLEAIRQLRFEVGARRAMLMHLTLVPYIATAGETKTKPTQHSVKELRSIGLQPDVLVCRSDHPIDVSSRRKIAQFTNVEERAVIALEDADTIYKIPGILHSQGLDDFVVERFGLQCEGADLSEWDKVVDAKLNPEHEVTIAMVGKYMELLDAYKSLIEAMSHAGITNRTKVNLRYIDSEDIENQGTGLLEGVDAILVPGGFGLRGVEGKITAVQFARENKVPYLGICLGMQVAVIEFARNVLGWKDANSTEFNRTSAHAVVGLITEWEDATGAVETRTESSDLGGTMRLGAQDCQLEAGSLVHDCYRKDVIVERHRHRYEVNNNLLPQLIEAGLKISGRSGDGALVEVVEAPDHPWFVACQFHPEFTSTPRDGHPLFSGFVKAALAQHQKNS

SEQ ID NO: 2466 - protein, 101 aa, Nicotiana tabacum
MASSVLSSAAVATRSNVAQANMVAPFTGLKSAASFPVSRKQNLDITSIASNGGRVQCMQVWPPINKKKYETLSYLPDLSQEQLLSEVEYLLKNGWVPCLEF

SEQ ID NO: 2467 - protein, 479 aa, Oryza sativa
  misc_feature (294)..(294): Xaa can be any naturally occurring amino acid
  misc_feature (320)..(320): Xaa can be any naturally occurring amino acid
  unsure (1)..(479): unsure at all Xaa locations
MAMAMAMRRAAALGARHILAASSTSSSGVLLRRHMSVDAGAAMEKVRAAGLLRTQGLIGGKWVDAYDGKTIEVQNPATGETLANVSCMGSKETSDAIASAHSTFYSWSKLTANERSKALRKWHDLIISHKEELALLMTLEQGKPMKEALVEVTYGASFIEYFAEEAKRIYGDIIPPTLSDRRLLVLKQPVGVVGAVTPWNFPLAMITRKVGPALACGCTVVVKPSEFTPLTALAAADLALQAGIPAGAINVVMGNAPEIGDALLQSTQVRKITFTGSTAVGKKLMAGSANTVKXGIYEKFASAFIKAVQSLKVGNGLEEXHSQGPLINEAAVQKVEKFINDATSKGANIMLGGKRHSLGMSFYEPTVVGNVSNDMLLFREEVFGPVAPLVPFKTEEDAIRMANDTNAGLAAYIFTKSIPRSWRVSEALEYGLVGVNEGIISTEVAPFGGVKQSGLGREGSKYGMDEYLELKYICMGNLN

SEQ ID NO: 2468 - protein, 450 aa, Bacillus clausii KSM-K16
MNTGMEPTLAKKDGQYVWHAMQRPGAAPLIADSGEGSWFTDTNGNRYMDGVSGLWCLNLGHGQTEIIEAATEQMNKLAYFPLSLGHQPAIALAEKLAALLGGGFRTFFANGGSDANETAFKIARQYHKQTGSPEKQKIISRYRGYHGNSLGALAATAQANRKIKYDAALPGFLHIPPPYAYRSSFGSAAEDDQQAADFLEQTILWEGPETIAAFIMEPIISGGGVIYPQSNDYYKRVRDICDRYQVLLILDEVVSGFGRTGKLFGFMHGDDDFKPDIITLAKGLTSGYLPLGATCVAENVYQAFDGKGETSHFRHISTYGGHPASCAVALKAIDIIEREQIVNRVETLGHTVLGKLKQLEQLSIVGEVRGIGFLYGIELVQDKQTKEPADDDTMKAVVTACQKQGLIIGKNSDTIPGGGNVLIIAPPLTSSEEDLAFLVDTVSSVLRTFA

SEQ ID NO: 2469 - protein, 361 aa, Sulfolobus solfataricus P2
MVSAIVLAGGYATRLRPLSLTKPKALFPILNKPILGYILESLINSDVSDIYLSLRVMADKIIDYLKDTSMLDKVKIEVESEPLGDAGPLKLISQKYNLDDDVLVIYGDIYSEINIKSLLDFYYKKSCDAVVVGTEVEDPRRYGVLYTENDVLVELIEKPKKPISNLINGGVYIFKKDLFKLVETPSSISKDFLPKLLRTKSISVYKYHGIWADIGVPDDYLRLNFEVLVQKYPKGYINSSAKVSEKSTLIPPYYIGSKNVIGEDAYITSNTILGNDVEIGKGTYISESILMNKVQVKEYTYISGSIIADKTKIGRWNHILDGSILGEEVITSDGVLINRRTIILPNKEVKEHVYDKGKIIL

SEQ ID NO: 2470 - protein, 151 aa, Helianthus tuberosus
MAASDIGVQAGPWGGNGGKRWLQTAHGGKITSIIIKGGTCIFSIQFVYKDKDNIEYLSGQFGVQGDKAETITFADDEDITAISGTFGAYYQMTVVTSLTFQTNKKVYGPFGTVAGSRFSLPLTKGKFAGFFGNSGDVLDSIGGVVVLNHNA

SEQ ID NO: 2471 - protein, 420 aa, Brucella suis 1330
MRRVVITGLGLVSPLASGVEETWKRLLAGESGARRVTEFEVDDLACQIACRIPVGDGTNGTFNPDLHMDPKEQRKVDPFIVYAVGAADQALDDAGWHPENDEDQVRTGVLIGSGIGGIEGIVEAGYTLRDKGPRRISPFFIPGRLINLASGHVSIKHKLRGPNHSVVTACATGTHAIGDAARLIAFGDADVMVAGGTESPVSRISLAGFAACKALSTKRNDDPTAASRPYDEDRDGFVMGEGAGIVVLEELEHALARGAKIYAEVIGYGMSGDAFHITAPTESGEGAQRCMVAALKRAGIVPDEIDYINAHGTSTMADTIELGAVERVVGEAAAKISMSSTKSSIGHLLGAAGAAEAIFSTLAIRDNIAPATLNLDNPAAQTRIDLVPHKPRERKIDVALSNSFGFGGTNASLVLRRYTA

SEQ ID NO: 2472 - protein, 467 aa, Caulobacter crescentus CB15
MNAPIRNHDVAELKRLDLAHHLPAQADHKVIAELGGSRIVTRADGCYITDGDGHRILDGMAGLWCVNVGYGRKELADAAYEQMLELPYYNTFFKTATPPTVKLAAKIAEKMGGHLTHVFFNSSGSEANDTVFRLVRHYWKLKGQPNRTVFISRWNAYHGSTVAGVSLGGMKHMHVQGDLPIPGVEHVMQPYPFGEGFGEDPAAFRDRAVKEIEDKILEVGPENVAAFIGEPVQGAGGVIIPPDGYWPAVEAVCRKYGILLVCDEVICGFGRLGQWFGHQHYGIKPDLIAMAKGLSSGYLPISAVGVADHIVAELREKGGDFIHGFTYSGHPTCAAVALKNIEIIEREDLITRTREDTGPYLAKALARLNDHPLVGETRSLGLIGAVEIVREKGTNHRFLDKEGEAGPIVRDICIRNGLMVRAIRDSIVCCPPLIVSHAEIDELVGIIEKSLTEAEPILRALKPEAVS

SEQ ID NO: 2473 - protein, 838 aa, Magnaporthe grisea 70-15
MNGDLSLSQALGGLRIANPDDAIPSPKSGSLVENTSFAQSSTNQQDRQILADPYSPARAEQTNQSVQGAVNKTDPNLSLNDPADQPFHQPYASESRSPAATPRPSSAIYNSYAYTDPEQILHRTNTDSSAAYRVPSRSASNAGSRPYDPHRISREPSVKDHNGPRQPSSIPSTGAPVPPRRTASKGMGGGYASIPGIPMAAPSSNPELPLPTSSVEWQERGAAVSVKREVDANGRTVMKSVRKGVRDFSFGRVLGEGSYSTVYLATDKQNLKEYAIKVLEKKHIIKEKKIKYVNIEKNTLNRLTEHPGIVRLYYTFQDETSLYYVLDLCSGGELLGVLKKTGTFDIECTRFYGAQILDAIDYMHSRGVIHRDLKPENVLLDDRMHVKITDFGTAKLLPDPRAATAQQMLERGPASARGSDDGRAASFVGTAEYVSPELLTDKSASKASDIWAFGCIIYQLLAGRPPFKGGSEYLTFQKIVGLEYEFPHGFPSTARDLVERCLVLDPNRRLTVEHIRNHEFFDGQYIGKDLWRTKAPRLRPYAPPAQEPDIIRLNGVSSASQQSMNPRGAHPQNHHHNNGAQKASQQPQQPQARRIITELPPPTQLDLDWSPVLTRSNERILKLGDLMVITSPISNSPHGKGEEGHKKLSRFFGGSTTKKRQRLVMVTTSGRIVLAPAGGDEKKTKTEISLLAPDCMWKSQVDVKGQPVWTVDTGGVHYVFEEPKGSQSTDMGKISVDDWIESLERARDYALSQDTLGNHERDNGGFGDMSSSLSSPASTLGGRATYPEYGDGFTVSDRSGRSAVLSKSQASLDQDPVPERKRNRFSKRASKNGLGAAF

SEQ ID NO: 2474 - protein, 104 aa, Bradyrhizobium japonicum USDA 110
MKFRPLHDRVVVKRIDAEEKTAGGIIIPDTAKEKPSQGEVVAVGPGGRDEAGKLIPIDLKVGDRVLFGKWSGTEVKIDSVDLLIMKESDIMGVLDVPASKKKAA

SEQ ID NO: 2475 - protein, 546 aa, Bradyrhizobium japonicum USDA 110
MAAKEVKFSVDARDKMLRGVDILANAVKVTLGPKGRNVVLDKSFGAPRITKDGVTVAKEIELEDKFENMGAQMVREVASKSADAAGDGTTTATVLAQAIVREGAKSVAAGMNPMDLKRGIDLAVEAVVADLVKNSKKVTSNDEIAQVGTISANGDAEIGKFLADAMKKVGNEGVITVEEAKSLETELDVVEGMQFDRGYISPYFVTNADKMRVEMDDAYILINEKKLSSLNELLPLLEAVVQTGKPLVIVAEDVEGEALATLVVNRLRGGLKVAAVKAPGFGDRRKAMLQDIAILTGGQAISEDLGIKLENVTLNMLGRAKKVMIDKENTTIVNGAGKKADIEARVSQIKAQIEETTSDYDREKLQERLAKLAGGVAVIRVGGATEVEVKERKDRVDDAMHATRAAVEEGIVPGGGVALLRASEQLKGLRTKNDDQKTGVEIVRKALSAPARQIAINAGEDGSVIVGKILENKTYAYGFDSQTGEYVNLVTKGIIDPTKVVRTAIQNAASVAALLITTEAMVAELPKKGGAGPAMPPGGGMGGMDF

SEQ ID NO: 2476 - protein, 181 aa, Paenibacillus polymyxa
MSIYDYSAIAMNGKEIVLSDYKDKVVLIVNTASQCGFTFQYQDLQRLYDQFKDRGLVILGFPCNQFADQEPDSNESVQTFCTLNYGVAFPMFQKVNVRDEQAHPLFTYLASSLPFEGFDETHSVAKILIPLIHERHPEYLPGDSIKWNFTKFLIDRNGKVIKRFEATTDPLDMEEYIEALL

SEQ ID NO: 2477 - protein, 348 aa, Mannheimia succiniciproducens MBEL55E
MLKKIIQSAVIGLACAGFILAVLPRFSSTGQPFYSGEDVVLSFKNAVRAASPAVVNVYNQSLSSSSVDEKFQVNNLGSGVIMSKDGYILTNMHVIQNADQIVVALQNGALFEATLIGTDKLTDLAVLKIRADNLTTIPQNPDRSIHVGDVVLAIGNPYNLGQSVSQGIISATGRNAIGDSVGRQNFIQTDASINRGNSGGALINSVGELVGISTLSFGKDPSDVAEGLNFAIPMNIANDVLQKIIRDGRVIRGFFGVQSDIIFNDGSDSEPGVKVKSVVSNGPAAKAGIQPNDVILEFNGEKANSPAQMMQVISNVRPGSVVKVLIERAGNQLELPVKIEEFPDTLPQ

SEQ ID NO: 2478 - protein, 211 aa, Brassica napus
MLGSSLASPLATLGPAKCFRHSAGDSVTCTSSVLPLRLNLSYHGVAGGVRTSRGPRNKWIVVCSPTQVETSGDEPKTWEECKEALSRFDFSVEEQDKILGKAFGHIHSPYWTEERVKENPKVEALNHVLEFLRGLGLSDEDVHKVLKKFPEVLGCSLEEEMKPNIGILENQWGITGKSLRSLLLRNPKVLGYNVDCKGDCIAQCTRCWVRF

SEQ ID NO: 2479 - protein, 237 aa, Ipomoea trifida
MEFSQEISYVQSPTCSAEEDEDMAANCLILLAQGGCRVKQVAAAAGKISSRKFSEMAGGAGVYECKTCNRSFPSFQALGGHRASHKKPKLMDHHEQHHYDHYHYELKKQSPPPPQAPLSAAQSSGGSSKLAKIHECSICRAEFSSGQALGGHMRRHRPPAPINTAAAAKASVSNSNEEEATESSYGEGENPRGALYSLDLNLPAPQEEEEGCNKFEFSGKQQQSLVFSVPALVDCHY

SEQ ID NO: 2480 - protein, 333 aa, Arabidopsis thaliana
MADVENLNSVPASEDTEYGFKRPEMYSTNIANSITSYARHVFVLYKTPEAWLSHVEEEGLPQRFATLLKDRKSDLLVQTKLNVCEGGGSDGDVLIFPDMIRYKGVKDTDVEGFFEDVLVNGKPWSSGIQEEISGTFVFVCTHASRDKRCGVCGPVILERFKQEIGSRGLSDQITLKRCSHVGQHKYAGNLIIFCPDSAGKITGNWYGYVTPDDVPELLDQHIAKGEIIQRIWRGQMGLPGGEAEKVHEQKVIPNGHGVVKEESKGFTGGCCQGSNGVSCCQDETPKPEPIKKEVKKCTIWFQPLDKEELYIGAAVVGAIATIAMAFTFFKRSG

SEQ ID NO: 2481 - protein, 254 aa, Oryza sativa (indica cultivar-group)
MEAATRARRRNGAAADGNGGAQQAAAAPAIREQDRLMPIANVIRIMRRVLPAHAKISDDAKETIQECVSEYISFITGEANERCQREQRKTITAEDVLWAMSRLGFDDYVEPLGVYLHRYREFEGESRGVGVGVGAARGDHHHGHVGGMLKSRAQGSMVTHHDMQMHAAMYGGGAVPPPPHPPPHHHAFHQLMPPHHGQYAPPYDMYGGEHGMAAYYGGMYAPGSGGDGSGSSGSGGAGTPQTVNFEHQHPFGYK

SEQ ID NO: 2482 - protein, 758 aa, Photorhabdus luminescens subsp. laumondii TTO1
MTTINHTLGFPRIGLKRELKKAQENYWAGKISQQELLETGRELRARHWEQQKQAGVDLVPVGDFAWYDHVLTTSLLLGNVPPRHQNPDGTIDLDTLFRIARGRAPTGEPAAAAEMTKWFNTNYHYIVPEFQQGQEFKLSWTQLLEEVDEALSLGHQVKPVLLGPITYLWLGKVKGQVFDRLSLLQDILPVYQQVLAELAKRGIEWVQIDEPALVLELPAEWLTAYPIAYQALQGQVKLLLTTYFDSIGHNLETIKSLPVQGLHVDLVAGQDDIAQLHESLPKEWVLSLGVINGRNVWRADLTAKHQLIKPLVGSRTLWIGSSCSLLHSPIDLSDETALDAEVKSWFAFALQKCEELALLTAALNQPDGSKQAELDAYSAPIRARRESKRVNNQAVTERLAAINPQDSERNQPYLQRAEIQRQRYNLPLWPTTTIGSFPQTTEIRGLRLDFKKGRVDGTSYRTNICEHIKQAINEQERLGLDVLVHGEAERNDMVEYFGEHLDGFVFTQNGWVQSYGSRCVKPPVIIGDVSRPEAITVEWAKYAQSLTEKPVKGMLTGPVTILCWSFPREDVSRETIAKQIALALRDEVDDLQEAGIGIIQIDEPALREGLPLRREEWQSYLDWAVEAFKLNAAIAKDDTQIHTHMCYCEFNDIMPSIAALDADVITIETSRSDMELLDSFENFSYPNEIGPGVYDIHSPNVPSVEWIEALLRKAADRIPVERLWVNPDCGLKTRGWTETRQSLANMVQAAKRLRESVK

SEQ ID NO: 2483 - protein, 416 aa, Legionella pneumophila subsp. pneumophila str. Philadelphia 1
MSNTEYQTIDNKTQYINGKEKHQNHAYPEYINHSMEKYYEGRVNKSWQGKHILKGKTPTANSLIFSSNDYLNISQHPQLIKAQIAAMQKYGNGQMQSAVFLNNSSFLLSQCEKKFSSFLNYSAALLTQSGWSANVGLIQTLAKYNTPVYLDFYAHMSFWSGVKAARAKSIPFLHNSVDSLKKRIEHHGPGIIAVDSIYSTLGTISPLADYADIARKFKCLLIVDESHSLGTHGSQGKGMVAKLGLSSQIDIITASLAKALSGRGGIITGDRQLIEYIRYSSLPSIFSSALMPHDLAGFSASLEIITQEEWRRAKLQTNADFLREALSCEGINIGSSGSQIVPLVTGSEANTLWLRDELEKEDIFGAVFCSPATPKNKCLIRLSISAHHEKSDLLRVIECLVRLARKRPDIPLFKGN

SEQ ID NO: 2484 - protein, 153 aa, Triticum aestivum
  misc_feature (26)..(26): Xaa can be any naturally occurring amino acid
  misc_feature (35)..(35): Xaa can be any naturally occurring amino acid
  misc_feature (63)..(63): Xaa can be any naturally occurring amino acid
  unsure (1)..(153): unsure at all Xaa locations
MSSPSRRSSSPESNIDGGSGSGLRRXDERKRKRMXLSNRESARRSRARKQQRMEELIAEASRXLQAENKRVEAQIGAYTTELTKVDGENAVLRARHGELAGRLQALGGVLEIFQVAGAPVDIPEIPDPLLRPWQSPFAPQLATAGGMPDAFQF

SEQ ID NO: 2485 - protein, 357 aa, Glycine max
MEANCNMINMDDTCELVANNNVGFPTDAANNGIHKPSLLGANKTTLGHHVARRLVEIGIKDVFTVPGDFNLILLDYLVAEPELNLIGCCNELNAGYAADGYARYKGVGACVVTYNVGGLSILNAIAGAYCEDLPIICIVGGPNSNDYGSNKILHHSIGLPDYTQELRCFQPVTCHQVVVNNLDDAHERIDTAIATALRESKPVYISIACNLSAIPHHSFIDQPLPFYLTPKLTSERCLEIAVEITSEFLNKAVKPVMVGGPRLRMAKASDAFMEMVDASGYAFAMLPTAKGMVEESHPNFLGTYWGPASTPFCAEIVESADAYLFAGPIFNDIVSFGFTLPIKKDKAIMVLPNRVMI

SEQ ID NO: 2486 - protein, 109 aa, Hordeum vulgare subsp. vulgare
MDFRSSNGGSSSERRPAAEGASLTRQGSIYSLTFEEFQSTLGGGAGVGGGDLGKDFSSMNMDELLRSIWTAEESQAMAASASGAGADAPPMSLQGQGSLTLPRTLSAKT

SEQ ID NO: 2487 - protein, 2406 aa, Oryza sativa (japonica cultivar-group)
MGRSPCCEKAHTNKGAWTKEEDQRLIAYIKANGEGCWRSLPKAAGLLRCGKSCRLRWINYLRPDLKRGNFTEEEDEFIIKLHELLGNKWSLIAGRLPGRTDNEIKNYWNTHIKRKLLARGVDPQTHRPLNAAADHHQQQQLQAPRRFAAAPAGHHHHHPDHFAVLSNSPEACSHSSDDEPSSATPPPPPRHLGIDLNLSISLAPYQPQDQTSEPMKQEEDDEASATANGAGNAAMTTTATTAAVCLCLNRLGLHGGEVEMDRQWMYADRRSKEFIDGVHYFLRVAEANRQRGFICCPCNKCKNQKEYSASRTIHFHLFESGFMPSYNCWTSHGEQGVEMEEDEVEDDNIPDFAQYVGFEGNQTGEEEIAADGNDVADDLGQMLQDAREDCESEKEAHKLDKMLEDHRNSLYPGCEQGHKKLDTTLELLQWKAKNGVSDKAFGDLLKLVKNILPGGNKLPETTYEAKKIVCPLGLEVHKIHACPNDCILYRGEEYENLEACPVCKALRYKIRRDDPGEVNGQLTKKRIPAKVMWYFPIIPRLRRLFRNKGNARMLRWHAEERQQDGMLRHPADGSQWRNIDRKFKEFGKDARNIRFGLSTDGMNPFGEMSSGHSTWPVTMCIYNLPPWLCMKRKYIMMPIIIQGPKQPGNDIDVYLRPLVEDLKQLWKKEGVPVWDEDKQEEFNLRALLFVTINNWPALSNLSGQSNKGYKACTHCMDETESTYLKHCRKVVYMGHRRFLAANHPVRKKGKHFEHKADHRTKPKHRSGKTVFAMVKDLKVVFGKGPGSQHIESEDGHAAMWKKNSIFWELPYWEFLDVRHAIDVMHLTKNLCVNLLGFLGVYGKSKDTLEARNDLKHMEQRGDLHPEPKEKGSHYLSPASYTLSKAEKESMFECLESIKVPSGYSTNIKRIISTKEKKFTNLKSHDCHVLMTQLLPVVIRGILPDNVRATITKLCAFMNAISQKVIDPDRLEALQNEVVQCLVSFELIFPPSFFNIMTHLLCHLVKEIRILGPMYLHNMFPFERYMGVLKKYVRNRARPEASIAKGYGTEEVIEFCVEFIEDLRPIGVPESRHEGRLRGKGTLGRKAIMTVDNNLFRKAHFTVLQHSSLVAPYIEEHLALVRARNIGKSDAWITRHHIDTFPAWLRQHLMGNESINQQLAFLARGPSGSIATFQGYEINGYTFYTRAQDMKSTNQNSAVRVDAMGHDGTTATYYGAIEDIWELDYGPLKVPLFRCQWVRLTGGGVMIDDSGMTTVDLNKVGYSDEPFVLANDVTQVFFVKDMSSKGKKGRGPDEPKRQVVLPGKRKIVGVEDKTDEDYDQLDGQPPFTVTIDPSILLSNEDTPYSRSDHKEGTIMADRDEEQILYDTIAEGSSQYWNEEEGNEDPNQYLNEEGNVERDAEGNQQGHVERDVEGNQEEEASGSQPSVGQKRARGQRGAAKKLEGRHIITEVEEDGRPSAPAEAAKNYVRHSGWVVRDNVPVSTVYWRRTRARGDHESFVQDSEKEMLWTTMLETFTLPAGTEDKVKRWTLKKMAEQFQSFKGDLYQKYILKGQTPNFDTFPKLRDHWDEFVAYKTGEQGKAMMERNKENAAKKKYHHHLGSGGYSVAMPKWEQMEASLIERGIEPATANWPERSKFWYYAHGGTLNPADGSLVFGYQIQEAVRRLTDAVEASSQGTFRPDRDRDELTLALQTPEHPGRTRGKGVIPWKIGFKEDIHTYRSRIRSKRDTEAKIADLEFRVSSYELNMQEEVARKVDERMAAHRSHDPQPTIPPAMVSPSGNRSSCASTGQVGSQSMDAMQTQDESTCPVDDITQRTPCELHIPFKNLSIKVASGMAIPTDPSGTYHCRPIPAGYSKVEVELVEGAYEDLELDYPGGDGETHLRDTCHAIILWRRRYIILPGRQAASRAPSPPAPPSPPQDPAPSPPHAPPAPSPPQAPASTPQDPAPTPPRAPTPTPPQAPVPAPSKSRAPPAPPLAHTRATKKAKVDAAKNKDPGYDCTQEELDAYVASEVKRQFKPRSPEKKIPIDPSVRNFFRGMSASVKEAIKLSDYEQTLKKASSGKSKPVPQLGEQPNQEIEPLVTGKEMTIEQFITDTGLTTDQLLGVAPIEKAEVKYMYELGKPLVKPELLQSLPTQMYKFHQLYMEMSATGREMIGARIRDTDFLQGDDILWINFRGIYELYQLDALDVSIMSCWILMEIQRARRRRVFDTGFIDPRKVNVAMLDQYPQETEDNLVHLLKAQHYKTFILLPYNTEFHWVLLLIDLEACTVNVYDSMDKKESTFDKVFELIDRAWYRFRHLVRGKWRERLRRKFKFPCAKQKQGTNLCGYYVCEYCHCLADQIITTRELDFIRMRDNLTTHKEFIAAVQEQLMGFINEEILDPKGEFYYDGNTIHRSLASELAASTTTSKS

SEQ ID NO: 2488 - protein, 385 aa, Triticum aestivum
MTPALKLSPAAFSVTNQRSKSALVPSVSILNTNFFASCSLRPLYLTRLDDPHTFELKPRRQLLDFRCAASAADDKESKAEVLPASSEAAQKLKISIYFATWWALNVIFNIYNKKVLNAFPYPWLTSTLSLACGSAMMLFSWVTCLVEAPKTDLDFWKALFPVAVAHTIGHVAATVSMSKVAVSFTHIIKSAEPAFSVLVSRFILGESFPMPVYLSLLPIIGGCGLAAATELNFNMIGFMGAMISNLAFVFRNIFSKRGMKGKSVSGMNYYACLSIMSLVILTPFAIAMEGPQMWAAGWQKALADVGPNVLWWIGAQSVFYHLYNQVSYMSLDQISPLTFSIGNTMKRISVIVSSIIIFRTPVRPVNALGAAIAIFGTFLYSQAKQ

SEQ ID NO: 2489 - protein, 188 aa, Sulfolobus solfataricus P2
MEIFLSLSFSFLIIRCGGGLFMDKVKEYKKENIASLFAEHIQSIVTGIKYFVKPQRITLQYPEDSLTLPTGYRGMIRLYKDVCIGCTLCALICPADAMKMVTESGKKFPQINYGRCVFCGFCVDVCPVDALKETKVHDLVFNNRKQLIFDPDRFNVDIDDVPMQDKPVRKVKAIIDEKRGIKYVPADE

SEQ ID NO: 2490 - protein, 283 aa, Triticum aestivum
  misc_feature (219)..(219): Xaa can be any naturally occurring amino acid
  misc_feature (236)..(236): Xaa can be any naturally occurring amino acid
  unsure (1)..(283): unsure at all Xaa locations
AYLGDTLEQVCTKKQSATGPEFPGYRRPTRPEKAASLPNVQLEQGTVTSLLEENGTVKGVQYKIKSGEELKAYAPLTIVCDGCFSNLRRALCSPKVEVPSCFVGLVLENCELPHANHGHVILANPSPILFYPISSTEVRCLVDVPGQKVPSIASGEMANYLKTVVAPQIPPQIYDSFIAAIDKGSIRTMPNRSMPAAPHPTPGALLMGDAFNMRHPFNXVGGMTVALSNIAVLRNXFSKPLRNLHDGLCPSGKYPRVISYTSARKAGLLSTIKQHLAWGALIK

SEQ ID NO: 2491 - protein, 197 aa, Nicotiana tabacum
MSASRFIKCVTVGDGAVGKTCLLISYTSNTFPTDYVPTVFDNFSANVVVNGSTVNLGLWDTAGQEDYNRLRPLSYRGADVFILAFSLISKASYENVSKKWIPELKHYAPGVPIVLVGTKLDLRDDKQFFIDHPGAVPITTAQGEELRKTIGAPAYIECSSKTQQNVKAVFDAAIKVVLQPPKQKKKKGKAQKACSIL

SEQ ID NO: 2492 - protein, 460 aa, Acinetobacter sp. ADP1
MSQHSTLQRGLNTRHIRFLALGSAIGTGLFYGSATAIKMAGPSVLLAYMVAGIAIYIVMRALGEMAVHNPVSGSFSHYASQYIGLLAGFTTGWTYVFEMIIVALADVTAFGIYMGFWYPDVPRWIWILSLIMFLGAINLIHVKVFGELEFWLSMVKVTAIVAMILGGLGLMFYGFHTDHASFTPGIQNLWIHDGFMPNGIAGLVACLSVVVFAFGGIEIIGITAGESQDPKTTLPKAINAVPVRILLFYVLTIFVLMSIFPWNQIGSQGSPFVQIFENLGIGSAATVLNIVVITAAISAINSDVFGAGRMLYGMSNRGQAPQIFQKLSKNGVPWMTIVVMAGVLLVGVVLNYLIPENVFIIIASIATFATVWVWLMILVSQVAMRRKLSKAEIKALDFPVVGWPYAPAFAIVFMLFILAMMGYFPDSRPAIYVGAIWLILLWIAYMVWVKPNTIKTDMEL

SEQ ID NO: 2493 - protein, 336 aa, Bordetella bronchiseptica RB50
MTAPGSMPLTVIGGFLGAGKTTLLNYLLKVQHSERVLVMVNDFGSINIDAELLDQGRHDRPGVVRLQNGCVCCSIGGDLMQAFLQVMSMPDRPDRIIVEASGVADPTRIAQIGRVSGGLSDEGVITLVDASAVRTLAADKYVGDIVRQQILSADIVLLNKLDLSSDAEIVETRAWLRDLAPRTRVVSCIHGEVDAVSVLGIGAGKVAPDAAGGPVDVPVPDLRRASTRHADTFHSSTLATAHRFDRRRIEYALDALPQTVLRGKGFVELEGEATPALLQLCGSRWTLDPVSTPAPPAGTHLVFIATGGRGVPRFDAPSHFEQALASRDAASADTSN

SEQ ID NO: 2494 - protein, 762 aa, Triticum aestivum
MAILGELGTEILIPVCGVVGIVFAVAQWFIVSKVKVTPGAASAAGGGKNGYGDYLIEEEEGLNDHNVVVKCAEIQTAISEGATSFLFTMYQYVGMFMVVFAAVIFVFLGSIEGFSTKGQPCTYSTGTCKPALYTALFSTASFLLGAITSLVSGFLGMKIATYANARTTLEARKGVGKAFITAFRSGAVMGFLLSSSGLGVLYITINVFKMYYGDDWEGLFESITGYGLGGSSMALFGRVGGGIYTKAADVGADLVGKVERNIPEDGPRNPAVIADNVGDNVGDIAGMGSDLFGSYAESSCAALVVASISSFGINHDFTAMCYPLLVSSVGIIVCLLTTLFATDFFEIKAASEIEPALKKQLIIFTALMTIGVAVINWLALPAKFTIFNFGAQKDVSNWGLFFCVAVGLWAGLIIGFVTEYYTSNAYSPVQDVADSCRTGAATNVIFGLALGYKSVIIPIFAIAVSIYVSFSIAAMYGIAMAALGMLSTTATGLAIDAYGPISDNAGGIAEMAGMSHRIRERTDALDAAGNTTAAIGKGFAIGSAALVSLALFGAFVSRAGVKVVDVLSPKVFIGLIVGAMLPYWFSAMTRRVCESAALKMVEKVRRQFNTIPGLMKGTAKPDYATCVKISTDASIREMIPPGALVMLTPLIVGTLFGVETLSGVLAGALVSGVQIAISASNTGGAWDNAKKYIEAGNSEHARSLGPKGSDCHKAAVIGDTIGDPLKDTSGPSLNILIKLMAVESLVFAPFFATYGGVLFKYI

SEQ ID NO: 2495 - protein, 229 aa, Zea mays
MEIFVKTLTGKTITLEVESSDTIDNVKAKIQDKEGIPPDQQRLIFAGKQLEDGRTLADYNIQKESTLHLVLRLRGGMQIFVKTLTGKTITLEVESSDTIDNVKAKIQDKEGIPPDQQRLIFAGKQLEDGRTLADYNIQKESTLHLVLRLRGGMQIFVKTLTGKTITLEVESSDTIDNVKAKIQDKEGIPPDQQRLIFAGKQLEDGRTLADYNIQKESTLHLVLRLRGGQ

SEQ ID NO: 2496 - protein, 436 aa, Streptococcus thermophilus CNRZ1066
MYRVFKEYFDIVNNVKYDVNDMPKVGLLVGLSFQHLFAMFGATVLVPILVGIDPAIALFSSGLGTLAHLTVTKYKIPAYMGSSFAYIAAMQMLMKTDGIGAVAQGAMAGGLVYLIVALVVKYVGNAWIDRVLPPIVVGPIIIVIGLSLAANAVKDATMVNDTYSIFSLVISMVTLFSVILFNMYGKKIIGVIPILLGLIVGYIFSVVLGWLTGHEFVQFSKVAAAHWFQVPSFDIPFVNYDFKLYPSAILTMAPIAFVTMTEHFGHVMVLNSLTGRDYFKDPGLDRTLTGDGLAQIIAGFFGAPPVTSYGENIGVMALSKVYSVYVIAGAAVIAVLMSFIGKVSALLSSIPTAVLGGISIALFGVIAASGLKILVEHKIDFDNKKNILIASVILVSGIGGLMIDLGGFQITGVASSTILGILLYQILPDPNKGSKN

SEQ ID NO: 2497 - protein, 181 aa, Coffea arabica
MASSMISSAAVATTTRASPAQASMVAPFNGLKAASSFPISKKSVDITSLATNGGRVQCMQVWPPRGLKKYETLSYLPDLTDEQLLKEIDYLIRSGWVPCLEFELEKGFVYREYHRSPGYYDGRYWTMWKLPMYGCTDATQVLNEVGECLKEYPNCWVRIIGFDNVRQVQCISFIAAKPKGF

SEQ ID NO: 2498 - protein, 187 aa, Oryza sativa
MSDVVAMAGQAYMRQLQAHPLRTKAITSGVLAGCSDAIAQKISGVPNLQRRRLLLIMLYGFAYAGPFGHFLHKLMDRFFKGKKGKETTAKKVLVEQLTASPWNNMMFMMYYGLVVEGRPFSQVKSKLKKDYASVQLTAWKFWPIVSWINYEYMPLQLRVLFHSFVASCWAVFLNLKAARSIATSKKA

SEQ ID NO: 2499 - protein, 71 aa, Triticum aestivum
  misc_feature (55)..(55): Xaa can be any naturally occurring amino acid
  unsure (1)..(71): unsure at all Xaa locations
LFNAEINKQLNQDEFDALLQEFKTDYNQTHFHPETPMFREAADEMQGPLRQIFVXMFLERSCTAEFSGFLL

SEQ ID NO: 2500 - protein, 324 aa, Mannheimia succiniciproducens MBEL55E
MGMKLGIVGTGMIVRDLMQTLHKVRLEQLAIWGRDQAKTAQFAAEQGILQVFSDYAAMLNSDLDTIYIALPNHLHFSFAKQALEAGKNVIMEKPITSNTDEFNQLRQLAQTQGVILIEAVTVHYLPAYLAIREKVAELGEIKIVSLNYSQYSSRYDRFKAGETLPVFDPQKSGGALMDLNVYNVHFAVGLFGKPQSCTYAANIQRGIDTSGILLLDYPQFKAVCIGAKDCAAPVMLSIQGDKGNITVPMPANAMNRFTYTPNQGEAQHFEFGDVHRMLPEFERFVDIVDRKDFAQAEKMLDISAAVSEVIEQARKGAGIRFAGE

SEQ ID NO: 2501 - protein, 271 aa, Saccharomyces cerevisiae
MKRFNVLKYIRTTKANIQTIAMPLTTKPLSLKINAALFDVDGTIIISQPAIAAFWRDFGKDKPYFDAEHVIHISHGWRTYDAIAKFAPDFADEEYVNKLEGEIPEKYGEHSIEVPGAVKLCNALNALPKEKWAVATSGTRDMAKKWFDILKIKRPEYFITANDVKQGKPHPEPYLKGRNGLGFPINEQDPSKSKVVVFEDAPAGIAAGKAAGCKIVGIATTFDLDFLKEKGCDIIVKNHESIRVGEYNAETDEVELIFDDYLYAKDDLLKW

SEQ ID NO: 2502 - protein, 307 aa, Legionella pneumophila subsp. pneumophila str. Philadelphia 1
MSKHSHDGAHHHEHGEVTYDRAFIIAITANGLFVVMQIIFAYLANSTSLLADAFHNLGDVLGLILAWVATGLMKRKPTHKATYGFKKTSILAALANGALLVFTCGIIATDAMYKLFSPTEIQAVSVMIVAAIGIVVNFSTALLFLRGSDDLNIRGAYLHLFYDALISVGVVLSAGVLYLTGWLWIDPVVGLLIALVILKGTWSLFADSFRLIIDGVPRDISWIKVSDFLLAIPGVKSIHDLHIWAISTKENALSVHLFMPEESLSDDLRRELVEKLKHDFSIQHVTIQVEKTETECNDACHNPRIII

SEQ ID NO: 2503 - protein, 461 aa, Shigella flexneri 2a str. 2457T
MADNKPELQRGLEARHIELIALGGTIGVGLFMGAASTLKWAGPSVLLAYIIAGLFVFFIMRSMGEMLFLEPVTGSFAVYAHRYMSPFFGYLTAWSYWFMWMAVGISEITAIGVYVQFWSPEMAQWIPALIAVALVALANLAAVRLYGEIEFWFAMIKVTTIIVMIVIGLGVIFFGFGNGGQSIGFSNLTEHGGFFAGGWKGFLTALCIVVASYQGVELIGITAGEAKNPQVTLRSAVGKVLWRILIFYVGAIFVIVTIFPWNEIGSNGSPFVLTFAKIGITAAAGIINFVVLTAALSGCNSGMYSCGRMLYALAKNRQLPAAMAKVSRHGVPVAGVAVSIAILLIGSCLNYIIPNPQRVFVYVYSASVLPGMVPWFVILISQLRFRRAHKAAIASHPFRSILFPWANYVTMAFLICVLIGMYFNEDTRMSLFVGIIFMLAVTAIYKVFGLNRHGKAHKLEE

SEQ ID NO: 2504 - protein, 367 aa, Oryza sativa
MDEGGGAGAAAAAAGNAAGAAVHHNARSAEDVFRDFRARRAGIVKALTTDVEKFYRQCDPEKENLCLYGLPNETWDVTLPAEEVPPELPEPALGINFARDGMIEKDWLSLVAVHSDAWLLSVAFYFGARFGFDKEARRRLFTMINGLPTVYEVVTGIAKKQTKVSNGSSKSNKSNPKPSKQSNSNSKPAKPPQPKDEEDSGPEGTEDEDQAYMCGACGETYANGEFWICCDVCEKWFHGKCVRITPAKAEHIKQYKPDSKRAGTTHRILLPLGLSCWCVCVAVRVEERERERRRRRRAAAAMAGKGLNATGEFFRRRDDWRRHPMVGNQLRHATPGLGIAIVAFGIYLVGEAAYNRLYRPSGDHHHH

SEQ ID NO: 2505 - protein, 159 aa, Corynebacterium glutamicum
MTSIHDISVTLNDGTETTMADWAGHLLLIVNVASKCGLTPQYEGLQKLYEEYQDRGFFVIGVPCNQFNGQEPGTDAEVCAFAQNQYDVTFPLLSKTEVNGEGTHPLYKVLKEATDGSEIEWNFEKFLVDAEGNTIKRFAPRTEPSAAEVVEAIEENLPI

SEQ ID NO: 2506 - protein, 168 aa, Glycine max
  misc_feature (72)..(72): Xaa can be any naturally occurring amino acid
  unsure (1)..(168): unsure at all Xaa locations
MAKKAKGSHSASSASASSRKLVLRIKSNEGIKRSVRQTNSRKKPKAKQKKNKQMFDAMKPKKPPTAFFYFLXCHLKSRWDSFYLVHFYFSREDFRKEFQEQNPDVKSMRDIGKACGEKWKTMTYEEKVQYYDIATKKREEFDSAMAEFNKKMENGEFDETDDESEFDE

SEQ ID NO: 2507 - protein, 147 aa, Geobacter sulfurreducens PCA
MAIVKYSPFRDMMNMQEQMNRLLDLAWSKQGGEELREGAWQPPVDIFEDENAVIIKAELPGIDQKDIEVRIEDNTLTIRGERKHEEEVRKENYHRVERYYGSFQRSFSIPATIDQEKVRASSDKGVLTITLPKREEVKPKQITVEVT

SEQ ID NO: 2508 - protein, 669 aa, Oryza sativa
MEGGTKKVFTVQVEDGKPRKDGRPAVGPVFRSALSKDGFPPLEPDMKTSWDVFRVAAGKYPDNRMLGWRPVKDGVIGPYIWKSYREVYEEVLQVGSALQQLGVKPGSRIGIYGSNCPQWIVAMQACNGYSLICVPLYDTLGAGAVDFIIDHAEIDVIFVQDKKIKEILSANCKSAKRVKGLVAFTSGTSEEITSADQIGMKLYSWKDFLKMGKENPAQPCAPKPNDTCTIMYTSGTSGEPKGVMLSHESHAIYVKGVDLFMEQFDDKMTTDDVFLSFLPLAHILDRMIEEFFFHKGASVGYYHGDLNALRDDLMELKPTLLVGVPRVYEKIYEGILKALSELRPLRRLIFNALYNRKLANMKAGCTHKTASPFADMLAFRKVKARLGGRLRLLISGGAPLSNEIEEFLRVTSCAYFIQGYGLTETLGPSTVCYPDDMSLVGTVGVAATYTELRLEEVPEMGYNPLGTPSRGEICVRGNFFTGYYKNPELTNEVMADGWFHTGDIGEMNSDGILKVIDRKKNIFKLSQGEYVAVEYLEKVYVFPPTVEDVWVYGDSFRSMLVAVVNPHEENTMKWAESNGCKGSFAEICKSEGLKEHILKELQSVAAKNKLRGFEYVKGVILDPIPFDLERDLVTATMKKKRNNMLKYYKPEIEKVYQKLEEQRVAAKSK

SEQ ID NO: 2509 - protein, 94 aa, Zea mays
MRGTHSLLGRKKHDDDQEKKKQTDELATGMEKVTVSEPEKHGHKEEEHEVVGEKKEGLLAKLHRTSSSSSSSSDEEEEAIDENGEIIKRKKKKM

SEQ ID NO: 2510 - protein, 247 aa, Leptospira interrogans serovar Copenhageni str. Fiocruz L1-130
MNDLFNVKNKTVLVTGSTRGIGRYFAEGFKNAGAIVYGTGSSQESIKKFDGSGIKGFAADIRQPDVMTPIIESIVKEHGRLDVLVNNAGIASNKPAAFLKEDEIESIIQTNFTGVFRACTAYYKIHKKKGGNIINIASILGMRGTKLASVYSGTKGAVINMTRALAVEWIGSGYRVNAICPGFIDTDMTEMIKEKPDVLEQMTNAIPMGRLGKPEDLVGAAIFFASDASSYVTGQTIVVDGGITAGL

SEQ ID NO: 2511 - protein, 233 aa, Acinetobacter sp. ADP1
MTYSHHAEDHYIHRTGWLRASVLGANDGIISVTSLVMGMAASGASSHTLFIACLAGLISGATSMAAGEYVSVQSQKDIEHADLKFEARELEKNPHLELDELTIIYIRRGLAPELAREVAIQLTEKDALEAHARDEIGILEQTAARPIQAALSSALSFSLGALCPMLAILFSPESSVSTVVLTVGIISLACMGALSSYFAGTSLWKGSLRITVWGIIAMLFSSWIGSFFNVTPL

SEQ ID NO: 2512 - protein, 594 aa, Triticum aestivum
  misc_feature (530)..(530): Xaa can be any naturally occurring amino acid
  unsure (1)..(594): unsure at all Xaa locations
MESTMKEIRGGGAPCVLDMDDAATVGGGVEDTYGEDRATEEQLVTPWTVSVASGYNLLRDPRYNKGLAFTEKERETHYLRGLLPPTVISQELQERKIMHNIRQYQLPLQRYMAMMDLQEGNERLFYKLLIDNVEELLPIVYTPTVGEACQKYGSIFSRPQGLYISLKEKGKILEVLKNWPERSIQVIVVTDGERILGLGDLGCQGMGIPVGKLSLYTALGGVRPSACLPITLDVGTNNEELLNDEFYIGLRQRRAIGQEYADFLHEFMAAVKQNYGEKVLIQFEDFANHNAFDLLARYGTTHLVFNDDIQGTASVVLAGLVAALKLVGGTLAEHTYLFLGAGEAGTGIAELIALEMSRQTKTPIDECRKKIWLVDSKGLIVSARKESLQHFKKPWAHEHEHVGNLLDAVNAIKPTVLIGTSGKGQTFTQEVVEAISSFNEMPIILALSNPTSQAECTAEQAYTWSKGRAVFATGSPFDPVQYNGKIYVPGQANNAYIFPGFGLGVVMSGAIRVHDDMLLAASEALAQQVXTQENFDKGLIYPPFSNIRKICAHIAANVAAKAYELGLASRRPRPKDLVKYAESCMYSPIYRNYR

SEQ ID NO: 2513 - protein, 162 aa, Zea mays
MSLIRRGSAFDPFSLDLWDPFQGFPFGSGSSSSSSLFPSFGGTTTSSETAAFAGARVDWKETPEAHVFKTDVPGLKKEEVKVELEDGNVLQISGERSKEQEEKTDTWHRVERSSGKFLRRFRLPENARTEQISASMENGVLTVTVPKEEAKKADVKSIQISG

SEQ ID NO: 2514 - protein, 322 aa, Paenibacillus popilliae
MKNIGITIYGCERDEAEVFNELSPRFGVIPAITSSAVSETNAMLAPGNQCISVGHKSEISESILLALKESGVKYISTRSIGCNHIDVKAAESMGIAVGNVAYSPDSVADYTLMLMLMAIRNAKSIVSRAEKYDFRLDTVPGKELREMTVGVLGTGQIGKAVIERLRGFGCHVLAYGHSKEAAANYVSLNELLQKSDILTIHVPLGTDTYHMIGHEQIEAVKQGAFLINTARGGLVDTGALIKALENGRLGGAALDVLEGEEGLFYFDCTQKPIDNQLLLKLHKMPNVIITPHTAYYTGRALYDTVEKTILNCLEFERRETLE

SEQ ID NO: 2515 - protein, 153 aa, Arabidopsis thaliana
  misc_feature (108)..(108): Xaa can be any naturally occurring amino acid
  misc_feature (114)..(114): Xaa can be any naturally occurring amino acid
  misc_feature (124)..(124): Xaa can be any naturally occurring amino acid
  misc_feature (137)..(137): Xaa can be any naturally occurring amino acid
  misc_feature (145)..(145): Xaa can be any naturally occurring amino acid
  misc_feature (149)..(149): Xaa can be any naturally occurring amino acid
  unsure (1)..(153): unsure at all Xaa locations
VVAVSDITGAIRNPEGIDINALIKHKDATGSLNDFNGGDAMNSDELLIHECDVLIPCALGGVLNKENAGDVKAKFIVEAANHPTDPDADEILSKKGVIILPDIYANAXGVTVSXFEWVQNIQGXMWEEEKVNLELQXYMTRAFHXIKTXCHTH

SEQ ID NO: 2516 - protein, 157 aa, Dunaliella tertiolecta
MAEQTEKAFQKQVGVTGCFKSKEKKAPGKSGHRFFKNVGLNFKTPKEAIDGNYVDKKCPFTGNVSIRGRILTGVVKSSKMMRTIIVRRDYLHFIPKYARYEKRHTNIPAHVSPCFRVRDGDTVIIGQCRPLSKTIRFNVLRVIPQAGATGKKSFSGF

SEQ ID NO: 2517 - protein, 218 aa, Sulfolobus solfataricus P2
MQIVDRSNLEASLKLALSPENNPKRNFVQSVEIIVTFKEVDMKKGDLKLREIVVLPKPPEKTKKVLVVPTIQQLEYAKKAEPNTILTKEELQKLQGNKRAIKKIARQNDWFLIAPDSMALVGRILGPALGPRGKFPTPLPNTADISEYILRFKRSTLVKTKDQPQTQVFIGTESQQIADLAENALAVLNVIESKGYAQKVRNIYVKTTMGKVVKVELR

SEQ ID NO: 2518 - protein, 186 aa, Zea mays
MEDERSTQSYQGGEAAEQVEVTDRGLLGNLLGKKKAEEDKEKQEELVTGMEKVSVEEPEVKKEEHEDGEKKETLFSKLHRSSSSSSSSSDEEEEEVIDDNGEVIKRKKKKGLKEKLKEKLPGHKDTEGEHVTGLPAPAAPASVQTHHDTDVVVEKIDGDVKTEAAPAVPEEEKKGFLEKIKEKLPG

SEQ ID NO: 2519 - protein, 535 aa, Oryza sativa (japonica cultivar-group)
MEEGRRGDREGKSAAGWTALSTTKTTLEEKRRLQANGSVGGDAGTSGFRRIVRLFFACMVAGGIQYGWALQLSLLSPYSQTLGISHSYVSLTWICGPIAGFVVQPIVGYYSDRCTMKMGRRRPFILVGCLIICISVMIIGFSADIGRHLGDTKEHCSTYTGPRWSAAMVYIVGFWFLDFANNTVQGPARAMMADLSAGHHGPNVGQSIFSLWMAIGSVLGYLSGANGKWHEWFPWLKTAACCDACANLKGAFFTAVLLIVVSMTVTMYLADEMPLDKQDVDTSGGGGCAVFVDLFKSLRNLPPAMFKVLAVTAVTWLSWFPFIQYNTDWMGREIYHGEPQGTAAKADVYDAGVREGAMGLLFCSVALGVTSFVIPKLCRRLTSKVVWSISNFLVFALMAVMVAVGMVSMRGYRPSLAAGLTGPDPTLKAVALVVFALIGIPQAVLFSVPWAVASEVTAEEGGGQGLAIGVLNIAIVVPQLVIALTAGPIDGAFNKGNTPAFGIGGAFAFICGVLALIWLPKTRGVSNAAVVAGGH

SEQ ID NO: 2520 - protein, 589 aa, Mycoplasma genitalium G37
MEGSWSYKLLYVFLCIVLGILYGIANPILLAQGLGFIFPITSSNGRAVDSIYSLIYPTNLNVFIRLTIVSVTVFVAYALIFVFNVAQNYVGIKLYQQTCATLRWKAYLKMQSMSTSFFDTQNNGDLMSRLTNDMYNIDNLFTQAGGQAIQSLFNILTTSVLIFLLSPVIALISLSILATLITFSFAFLKKSKTSYSQVQNNLGDMSGYIEEVLTNHKVVHVLKLQEIMIKDFDQYNKSMIKPTVRGNTYSIFLFSWFGFISNITYLVSISIATAFSVNSIPSFGISVINYSFMLSYIASLRQITLALDQIFTLWNLVQLGVVSAERVFKVLDLNVEKDTATIDKLPDIKGNIRFENVAFGYNKDKPTLTGINFSVKHGDVVAIVGPTGAGKSTIINLLMKFYKPFEGKIYMDNFEISDVTKKAWREKISIVLQDSFLFSGTIKENIRLGRQDATDDEIIAACKTANAHDFIMRLPKGYDTYISNKADYLSVGERQLLTIARAVIRNAPVLLLDEATSSVDVHSEKLIQESIGRLMKNKTSFIISHRLSIIRDATLIMVINDGKVLEMGNHDQLMKQNGFYARLKQSSVR

SEQ ID NO: 2521 - protein, 652 aa, Ipomoea trifida
MAPAGKVTSFYRQGNDWFCNASLPSDISLIVDGVNFHLHKFYSGVIYDTLNSNLTTKKMLTVQFPLISKCGRIFKALEEAEGTNGQTSTTRLEDFPGGADIFLVTVKYCYGCRVEFTPRNIVMVYCAADYLEMTDEYGENNLLSKSDDYFHKNVLTNWKDCILALQSCNSMIPRAIKLQIIGKCLNALSVMVCTDPSLFGWPMLMYGSLQSPGGSILWNGINTGARIQSTASDWWFEDISYLSVPLFERLIQTMETKGIKPESLAGAIMHYCRKYLPGLGRWQSGQIVTSRTVASFSMTPATVDQKDLLESIVKLLPTKKGKSFCRFLLGLLRVALILGINHSCQETLERRIGMQLHLATLDSLLIPSYSDSDTLYNTDCVERMIHHFISEPAVTTVSPSSFDLGTSPSSEPLCRVAKLMDSYIAEIASDVNLKPERIRALAEALPDSSRSLHDGLYRAVDIYFKAHPWLPDRDKEQLCNIIDFQKLSIDACAHASQNERLPLRIILQVLFFEQLQLRTALAGCLHVLDTESANAAPAAGPSDMAGHIVQRDGWVTVVRENQVLRVDLERMRSRVRELEEEFSKIKQEMRKVSKSHSHLSSPRFLARRMGCKLLPRSSDAQPDVIGSTGPTPRASVEHPRTSGGHRKSFSLF

SEQ ID NO: 2522 - protein, 163 aa, Anabaena variabilis ATCC 29413
MELKSGSTETPMEKATFGAGCFWGVEAAFRQVKGVVSTSVGYMGGHFPNPCYLDVLSRITGHAEVVQIEYDPQLVSYEDLLAVFWDIHDPTTLNRQGPDKGEQYRSVIFFHNEQQAEAARQSKAKLQVSGRFERDIVTEIKHKSEYYLATEEHQQYFEKQAKR

SEQ ID NO: 2523 - protein, 380 aa, Pichia angusta
MKGLLYYGTNDIRYSETVPEPEIKNPNDVKIKVSYCGICGTDLKEFTYSGGPVFFPKQGTKDKISGYELPLCPGHEFSGTVVEVGSGVTSVKPGDRVAVEATSHCSDRSRYKDTVAQDLGLCMACQSGSPNCCASLSFCGLGGASGGFAEYVVYGEDHMVKLPDSIPDDIGALVEPISVAWHAVERARFQPGQTALVLGGGPIGLATILALQGHHAGKIVCSEPALIRRQFAKELGAEVFDPSTCDDANAVLKAMVPENEGFHAAFDCSGVPQTFTTSIVATGPSGIAVNVAVWGDHPIGFMPMSLTYQEKYATGSMCYTVKDFQEVVKALEDGLISLDKARKMITGKVHLKDGVEKGFKQLIEHKENNVKILVTPNEVS

SEQ ID NO: 2524 - protein, 645 aa, Triticum aestivum
MIEQVCTKKQAGTGPEFPGYRRPTRPDASRPPRLLSPFAAAATTGTRSDPVSCTSLLCLTMVDEPLYPIAVLIDELKNEDIQLRLNSIRRLSTIARALGEERTRKELIPFLSENNDDEDEVLLAMAEELGVFIPYVGGVEHAHVLLPPLETLSTVEETCVRDKAVESLCRIGAQMKENDIVDYFIAVVKRLAAGEWFTARVSSCGLFHIAYPSATDPLKTELRTIYGQLCQDDMPMVRRAAASNLGKFAATVEQSHLKTEIMSIFDDLTQDDQDSVRLLAVEGCAALGKLLEPQDCVAHILPVIVNFSQDKSWRVRYMVANQLYELCEAVGPEPTRADLVPAYVRLLRDNEAEVRIAAAGKVTKFCRILSPQLAIQHILPCVKELSSDSSQHVRSALASVIMGMAPVLGKDATIEQLLPIFLSLLKDEFPDVRLNIISKLDQVNQVIGIDLLSQSLLPAIVELAEDRHWRVRLAIIEYIPLLASQLGVGFFDDKLGALCMQWLEDKVFSIREAAANNLKRLAEEFGPEWAMQHIIPQVLEKINNPHYLYRMTILQAISLLAPVMGAEITCQKLLPVVINSSKDRVPNIKFNVAKVLQSLVPILDQSVAEKTVKPCLVELSEDPDVDVRYYANQALQACDQIMMSS

SEQ ID NO: 2525 - protein, 82 aa, Brassica napus
MALSRRMAASALLLLVLLVATEMGATTVKLAEARDCLSQSHKFKGACLNSSNCAAVCRTENFPDGECHTHNFARKCFCKRAC

SEQ ID NO: 2526 - protein, 461 aa, Brucella suis 1330
MTARILVVDDVDSNVKLLEARLLSEYYEVVPAYSGAEAIEICLDGQIDIVLLDVLMPGLDGFEVCRRLKANPRTANIPVIMITCLTSPEDKVRGLEAGAEDFLSKPVNDLELLSRLKSLTRLKMMSDELFQRAGRIADAEVDALLARKMAGKDGNKDEIARILVVDEDELAAARLRHILDENYRVDVASDAETALIRAIETDYDTIIVSASFTYYDPLKLCTQLRTIQRTRLIPIILMVWEDEGALVVRALELGVNDYLMRPLEKIELFARLRTQIKRKCYNDILRQSMERTITQSVTDGLTGLHNRRYIDMHMPLLLTRAIERKQPLSIIMIDLDHFKQVNEQYGHGAGDHVLREFSGRLRRNIRGMDLISRYGGEEFVVVLPDTDRQAAFNVAERVRGIVAEAPFVLDDGKRRASLTVSVGVAALRPAGDSLEALFTRATDALIQAKQSGRNRIVLSAA

SEQ ID NO: 2527 - protein, 934 aa, Mycobacterium leprae TN
MVEFSDAILEPIGAVQRTRVGREATEPMRADIRLLGTILGDTLREQNGDEVFDLVERVRVESFRVRRSEIDRADMARMFSGLDIHLAIPIIRAFSHFALLANVAEDIHRERRRHIHLDAGEPLRDSSLAATYAKLDLAKLDSATVADALTGAVVSPVITAHPTETRRRTVFVTQRRITELMRLHAEGHTETADGRSIERELRRQILTLWQTALIRLARLQISDEIDVGLRYYSAALFHVIPQVNSEVRNALRARWPDAELLSGPILQPGSWIGGDRDGNPNVTADVVRRATGSAAYTVVAHYLAELTHLEQELSMSARLITVTPELATLAASCQDAACADEPYRRALRVIRGRLSSTAAHILDQQPPNQLGLGLPPYSTPAELCADLDTIEASLCTHGAALLADDRLALLREGVGVFGFHLCGLDMRQNSDVHEEVVAELLAWAGMHQDYSSLPEDQRVKLLVAELGNRRPLVGDRAQLSDLARGELAVLAAAAHAVELYGSAAVPNYIISMCQSVSDVLEVAILLKETGLLDASGSQPYCPVGISPLFETIDDLHNGAAILHAMLELPLYRTLVAARGNWQEVMLGYSDSNKDGGYLAANWAVYRAELALVDVARKTGIRLRLFHGRGGTVGRGGGPSYQAILAQPPGAVNGSLRLTEQGEVIAAKYAEPQIARRNLESLVAATLESTLLDVEGLGDAAESAYAILDEVAGLARRSYAELVNTPGFVDYFQASTPVSEIGSLNIGNRPTSRKPTTSIADLRAIPWVLAWSQSRVMLPGWYGTGSAFQQWVAAGPESESQRVEMLHDLYQRWPFFRSVLSNMAQVLAKSDLGLAARYAELVVDEALRRRVFDKIADEHRRTIAIHKLITGHDDLLADNPALARSVFNRFPYLEPLNHLQVELLRRYRSGHDDEMVQRGILLTMNGLASALRNSG

SEQ ID NO: 2528 - protein, 298 aa, Bacillus cereus E33L
MPNIAVIGSISMDLVAVSKKRPKAGETVIGEAFHTIPGGKGANQAVAAARLGANVAMVGAVGDDNYGTVVKKNLENERVFIDYVVPVTDTATGIAHIVLAEEDNSIVVVQGANALVNESIVNRSKDLLIKADMVVLQLEIPLETVKYVLAICEEHKIPVMLNPAPAQVLSEDILEKATYITPNEHECRIVLDDFTSPIEDLLAKYPNKLLMTEGSNGVRFHNGAEIVHVPSIAVDVVDTTGAGDTFNGALAVALSEGETLQKAIRFANIAGGLSVTKLGAQGGMPTRDRVREVQVIVG

SEQ ID NO: 2529 - protein, 247 aa, Mycobacterium leprae TN
MSASVEIFSDSKTMVGAAGKRLASTIQSAVAARERALIVLTGGSSGIGLLRDLATRGQQIDWSRVHLFWGDERYVPKDDDERNEKQARVALLDHIDIPPSQVHPMPAGDGEFGNDLEAAALAYEQLLAAYAAPGYPTPNFDVHLMGMGPEGHINSLFPNTVAVRETSRMVVGVRNSPKPPPERITLTLNAIQRSREVWLMVSGTAKADAVAAAMGGAPSASIPAAGAVGLETTLWLLDEEAAAKIPG

SEQ ID NO: 2530 - protein, 377 aa, Nicotiana sylvestris
VKTLTGKTITLEVESSDTIDNVKAKIQDKEGIPPDQQRLIFAGKQLEDGRTLADYNIQKESTLHLVLRLRGGMQIFVKTLTGKTITLEVESSDTIDNVKAKIQDKEGIPPDQQRLIFAGKQLEDGRTLADYNIQKESTLHLVLRLRGGMQIFVKTLTGKTITLEVESSDTIDNVKAKIQDKEGIPPDQQRLIFAGKQLEDGRTLADYNIQKESTLHLVLRLRGGMQIFVKTLTGKTITLEVESSDTIDNVKAKIQDKEGIPPDQQRLIFAGKQLEDGRTLADYNIQKESTLHLVLRLRGGMQIFVKTLTGKTITLEVESSDTIDNVKAKIQDKEGIPPDQQRLIFAGKQLEDGRTLADYNIQKESTLHLVLRLRGGF

SEQ ID NO: 2531 - protein, 576 aa, Desulfotalea psychrophila LSv54
MTVGPWLSFLPVRWCSMNAGEELSMTLNHLVDMSCEKFAALPAIGMAMAHPLTYEEMQRRIIALAASLQAEGIKKGGRIAILAENSDRWGVVYLAAVRIGAIVVPILPDLPESDVHHILSEMKVGALFITHRQLEKVYDFSGSFPELVVTLDDSDSFAEVFTVTSYSTYLENALEGLQGQEGAPHFPEVEEDDIASILYTSGTSGYSKAVMLSHGNFSANAHAASELAEIEPGAVWLSILPISHTYEFTCGFILPLLCGARIAYAGKTPTPAILQKLCQHERPFAIFAVPLVLEKIYKKRVLPQIEKSKLLTLICKTSLGRNFIYKRIGRKLIEFFGGNLGIMGIGGAALNPEVAQFLTDAQFPYLIGYGMTEAAPLIAGGPLGDKTIATGSTGKPLPGVQVKIVDGDAETGVGEILARGPNVMQGYYNDREESGRVLSEDGWLSTGDLGRLDAAGNLHISGRLKNVIVMANGENVYPEVIEHKINSFLWVVESLLLEKENGLEASVYPDYEYVDEQTNGQSGEERRRFIEHLLEEMRIEVNATLSRSSHIARIFERREPFTKTATHKIKRYLYDT

SEQ ID NO: 2532 - protein, 480 aa, Rosa hybrid cultivar 'Kardinal'
MKRHRSNSNPPTPPPSPDSDSDHHPAGQLVEVPVLPRSMSRSHLSPRNPGPVHVSGRANSVLKGGEPPYYVGLRKVAEDPYDELGNPDGVIQLGLDENKLALDLVRDWLLENAKDAILGGEELGISGIACYQPSDGLMELKLAVAGFMSKAIGNSVTYNPSQIVLTAGATPAIEILSFCLADSGNAFLVPAPYYPGLDRDVKWRTGVEIIPVPCRSADKFNLSITALDRAFNQAKKRGVKVRGIIISNPSNPGGSLLTRESLYNLLDFAREKNIHIISNELFAGSTYGSEEFVSMAEIVDLEDLDQNRVHIVYGISKDLSLPGFRVGAIYSFNKNVLTAAKKLTRFSSISAPSQRLLISMLSDTKFMHKFIEINRERLRGMYLRFVTGLKQLGIECTKSNGGFYCWADLSGLIRSYSEKGELELWDRLLNVGKLNVTPGSSCHCIEPGWFRFCFTTLTEKDIPVVIERIRNIAETCKSHS

SEQ ID NO: 2533 - protein, 457 aa, Yarrowia lipolytica CLIB122
MKWSVLSVLGSCVLVSASLELDIRPVEPAEADRISLQRRTVVGVQVDRQQAYYEAQIALGSPPQNLTVLLDTGSSDLWVLSKNVSCLPKGYHAADSWKGVNCSNGGMFDSAASSSFRLNASANAGYQPGNKKTWPFQIAYGDSSAANGLWASDTISIGGQSVAEFDFGFAQNASSGLAVLGIGPAGNEASTDDTPPWTYQNLPHKLKSAGITSSTAYSLWLNNQHSTKGSIMFGGYDRAKIQGGKLFTLPLVPTVDKESVTEFAVQLEAVRVDGKNYGERSNVVLDSGTTMTILPKEQIDPIIQLTGANYSQEVSSYIFNCSDSPTSGTVDFVFMDKSAITVQLTDLISVLSYSDGSPDTYVDGTLVCVVNVQVAGKKQPSILGASFLRSAYVVYDIDNEQISLGNAKFNVTDSDVVDLGPMGLGNTSRTREHKSEAAKVPYGSWWMAATLLLFAFL

SEQ ID NO: 2534 - protein, 477 aa, Acinetobacter sp. ADP1
MNQLIWFRNDLRLNDHAALWHATQAGSTIAFVALSPLQWQQHDDAIIKIDFYMRQLTQLKQELNTINIPLIVQIIPLWKDIATEIISISDRYHIQDVYANIETGINEIERDHAVQEALSKIGKNLILFHDKTLFPLGSIRNKSQAPYQVFTPFKKTCYERLNIDIPKCFPYPHKQKQQPEIAKKEAAIPSLKQLGYSQIDQHIQNEWPIGETFALNLLEDFTQDKINRYHESRDYPAQDGTSHISAYLTIGILSIRQCIQAIFQKQHGQFFLNNKGQEIWLNELLWREFYQQLLFDFPKLSRHQPFQDHTKNIPWNENDEHFEAWIQGKTGIPIVDAGMRQLKATGWMHNRVRMICAMFLSKNLLIDWRKGEKWFMQHLIDGDLAANDGGWQWSASTGTDASPYFRIFNPVTQSQKFDPEGVFLKKWIPELKHLDSKHIHDPYAYQHKTELNYPKPIIDLKATRKNAIEVFKKSSSL

SEQ ID NO: 2535 - protein, 339 aa, Vitis vinifera
SARAMFHGRGGTVGRGGGPPILLYCLSPPDTIHGSLRVTVQGEVIEQSFGEEHLCFRTLQRFTAATLEHGMHPPVSPKPEWRALMDEMAVIATKEYRSIVFQEPRFVEYFRLATPELEYGRMNIGSRPSKRKPSGGIESLRAIPWIFAWTQTRFHLPVWLGFGGAFKHVIGRDPRNLPMLQQMYNEWPFFRVTIDLVEMVFAKGDPGIAALYDRLLVSEELWLFGKRLRTNYEETKRLLLQIAGHRDLLEGDPYLKQRLRLRDAYITTLNVCQAYTLKRIRDPNYHVMERPHLSKEIMESSKPAAELVKLNPTSEYAPGMEDTLILTMKGIAAGLQNTG

SEQ ID NO: 2536 - protein, 403 aa, Rhodopseudomonas palustris
MNYEAYFKRQIEGLHREGRYRVFADLERHAGSFPRATHHRPEGTSEVTVWCSNDYLGMGQHPAVLSAMHEALDTCGAGAGGTRNIAGTNHYHVLLEQELAALHGKEAGLLFASGYVSNWATLSTLASRMPGCVILSDELNHASMIEGIRHSRSETRIFAHNDPRDLERKLADLDPHAPKLVAFESVYSMDGDIAPIAEICDVADAHNAMTYLDKVHGVGLYGPNGGGIADREGLSHRLTVIEGTLAKAFGIVGGYITGSAALCDFVRSFASGFIFSTSLPPAVAAGALASVRHIRSSSAERDRHQDRVARLRMRLDQVGVAHMPNPSHIVPVMVGDAVLCKQISDELINRYGIYVQPINYPTVPRGTERLRITPSPQHTDADIEHLVQALSEIWARVGLAKAA

SEQ ID NO: 2537 - protein, 1212 aa, Candida albicans SC5314
MNNQDPDSQYHNKKVYPPNLPSIPPPPQQPLSGRPATPRMLRSISGTLKSKTELAHSDKGQESNNETKNSNSPHYVPDTHTRQPPPESLKSNIQAPTAVHGNQQKGSLLPPPSIPNPNTMKPAPTPTGVDQPPAKQKPSPAPKQPQPQQQQQQQQQQQFHRKSIGDWNFVKTIGAGSMGKVKLAQHNATHEICAVKIIPRAAKLYQRAHANDPPPQTTQEAAQRHKEFEKEVARDRRTIREGALGRLLYHPFICRLYEMVPMTNHYYMLFEYIEGGQMLDYIVAHGSLKERHARKFARGIASALDYCHRNNVVHRDLKIENIMINEKGDIKIIDFGLSNLYAPKNLLKTYCGSLYFAAPELLSAKPYIGPEVDVWSFGVVLYVLVCGKVPFDDQSVSVLHEKIKKGNVEYPAFLSRECVSLLSRMLVVDPTKRASLYEVCSHPWMNKGYDYKVNNYLPRREPLRLPLDPEIIKTIANFELGTVQGVADELTSILTSVEYQMSCENWYKITETGREYASSQNAQILPDPTGGFHPLVSIYYLVDEMRKRKKAKEEALKAQRRAQVPTIAVPTPKQQQQQQPQPAQPQPQPQPEVSQPLPEPKPVPPEEIINPAVATQAQANMTAPKIVETFSETPQRTLDPSKQSVDEKPSAPGPSIAVPEQAHTTSVPSSFVKTQTSIDEDQLSIPEQQSPRTSTPQTLDPAKVVGGSSGSAISAPNAGSGAGFNSLLRRLSSKKYKGASSPKRSTSPSPNVEGLSPQPTKADPMVRRGVSMKVTAKEKQTNTRPPKSELIKKKPQHGRSSSTSNKMQGFIPVEYLPPLPTIDTNTNTIVSDGAKQQNLTVPSTARHMHPTARAKSVGGGHMRKDSYGRVSHGSQNPLPPLPTSMASQNSQEVVGKDTSEGFFDDVQLDDVGYQEVPQLTESEIIEQYNISKPNSMPSIEHCKTLFLKGFFSVQTTSAKPLPVIRYNIINVLSKLGVKFQEVKGGFVCMHTPSVQPSHSNELDEENKLYGDAFKSKSSDSFEAAEPEGSKTPSRQPSLQLPSHTPTTPSGPKSHKSSNSIGSIGGNVPRRKFSIGNAFNTYRKKNGSQVMMPPNTPATAKVIHGLYDDDDKERNGEDDDDEDDYGYDDSADSLNGYGGGSDMLISSRIEQRAKHQRTVSSSSQKASKSPLKFEIHIVKVPLVGLYGVQFKKILGNTWNYKTLASQILNEMNL

SEQ ID NO: 2538 - protein, 400 aa, Magnaporthe grisea 70-15
MSARGFSKALRPMARQLATPAVQRRTFVAASSMVRATRKAAVAPTQQQIRGVKTMDFAGHKEQVWERADWPKEKLLEYFKDDTLALIGYGSQGHGQGLNLRDNGLNVIIGVRKDGKSWKDAVQDGWVPGKNLFEVDEAISRGTVIMNLLSDAAQSETWPALKPQITKGKTLYFSHGFSPVFKDLTKVEVPTDVDVILCAPKGSGRTVRSLFREGRGINSSFAVYQDVTGEAEEKAIALGVAIGSGYLYKTTFEKEVYSDLYGERGCLMGGIHGMFLAQYEVLRERGHSPSEAFNETVEEATQSLYPLIGANGMDWMYEACSTTARRGAIDWSPRFKDALKPVFNQLYDSVKDGSETQRSLDYNSQPDYREKYEAEMEEIRNLEIWRAGKAVRSLRPENQK

SEQ ID NO: 2539 - protein, 569 aa, Rhodospirillum rubrum
MTAKLAPRGPDDGGILVHGPVALGHRRLSIIDLSPKAAQPMVDSDLGLSIVFNGCIYNYPALRSELEALGYRFFSGGDTEVILKAYHAWGTACVKRFNGMFAFAIHERDSGKVVLARDRFGIKPLYLAEVDGGLLFASSLPALLATGRVDKAIDPLALRFYISFHAVVPAPRTILKGVRKLPPATLRVVSADGSSFDEVYWRLDFRALPGEDGRSAKDWEDGLFEAVRAAVARRIIADVPVGVLLSGGLDSSLIVGLLAEAGQRDVETFSIGFEEANGEKGDEFFYSDLIAERYATRHHKIFIPEADMIAALPGAIAAMSEPMVSYDNVAFYLLAREVSKRVKVVLSGQGADEIFGGYHWYRPLVGSTDPVADYAAHFFDRTPERLARHLSPAWLGTTDEARAFVAAHFAEDGAPDPVDKALRLDSTVMLVEDPVKRVDNMTMAFGLEARVPFLDHQLAEFAGRIPSSLKLAQNGKGILKEVARRVVPAAVIDREKGYFPVPGLKYIEGSRLDYVRDGLSSRAARQRGLFREDYLASLYENPRDAITPLRGSELWQVGLLELWLQEHGI

SEQ ID NO: 2540 - protein, 414 aa, Rubrivivax gelatinosus PM1
MSRRRVVVTGLGLVTPLGNTVDESWSRLVAGQSGIATVTKFDATKLACHIAGEVKGFQIEDYIPAKEARHMDTFIHYGLAASLQAVKDAGLPTGDALNEEQAERIGCLVGSGIGGLPLIEETHAEYAARGARRISPFFVPASIINMISGHLSIQCGFTGPNLAIVTACTTGLHCIGQSARMIEAGDADAMIAGGAESTVSPLGIGGFAAARALSTRNDDPATASRPWDRDRDGFVLGEGAGVMVLEEYEHAKARGARIYAELAGFGMGADAFHMTAPNVDGPKRAMKAALRSAGIEAGQVQYLNAHGTSTPLGDLNESNAIKLAFGDHAKKLVVNSTKSMTGHLLGGAGGIESVFTVLAIRDQVSPPTINIFNQDPECDLDYCANTAREMKIEHAVKNNFGFGGTNGTLVFKRV

SEQ ID NO: 2541 - protein, 694 aa, Yarrowia lipolytica CLIB122
MAPQFSKTDETAINTIRTLAIDAVAKANSGHPGAPMGLAPVAHVLWNYYMNFTSSNPEWINRDRFILSNGHACMLHYSLLHLFGYDITIDDLKNFRQLNSKTPGHPEAETPGIEVTTGPLGQGVSNAVGFAIAQAHLGATYNKPGYDIINNYTYCIFGDGCMMEGVASEAMSLAGHLQLGNLITFYDDNHISIDGDTNVAFTEDVSQRLEAYGWEVIWVKDGNNDLAGMAAAIEQAKKSKDKPTCIRLTTIIGYGSLQQGTHGVHGSPLKPDDIKQFKEKVGFNPEETFAVPKETTDLYAKTIDRGANAEKEWNELFAKYGKEYPKEHSEIIRRFKRELPEGWEKALPTYTPADNAVASRKLSEIVLTKIHEVLPELVGGSADLTGSNLTRWKDAVDFQPPVTHLGDYSGRYIRYGVREHGMGAIMNGMNAYGGIIPYGGTFLNFVSYAAGAVRLSALSGHHVIWVATHDSIGLGEDGPTHQPIETVAWLRATPNLSVWRPADGNETSAAYYKAITNYHTPSVLSLTRQNLPQLEGSSIEKASKGGYQLISEDKGDIYLVSTGSEVAICVAAAKLLKEKKGITAGVISLPDWFTFEQQSLEYRKSVFPDGIPMLSVEVYSDFGWSRYSHQQFGLDRFGASAPFQQVYDAFEFNAEGVAKRAEATINYYKGQTVKSPIQRAFDPIDVNTRPGHGV

SEQ ID NO: 2542 - protein, 277 aa, Bacillus cereus G9241
MNLTSLKDYTTLHNGVKMPWFGLGVFKVEDGSEVIESVKAAIKNGYRSIDTAAIYQNEEGVGQAIRESGISREELFITSKVWNSDQGYETTLQAFETTLEKLGLEYLDLYLVHWPVKGKYTESWKALEKLYKDGRVRAIGVSNFHIHHLQDVFEIAEIKPMVNQVEYHPRLAQEELHAFCKEHNIQLEAWSPLMQGQLLDNPTLQDIATKYNKSTAQIILRWDLQNEVVTIPKSIKEHRIIENANIFDFELSADDMKAIQALNEDRRVGPDPDNFNF

SEQ ID NO: 2543 - protein, 629 aa, Yarrowia lipolytica CLIB122
MSTWKKIKEGHLSAFSSRPSSNSTATIKESPTNTKRDTLSLPSVSTNAPGGYEKLTPTSSTSSKAPSGEWSRESTHSYTPRDSRDSRDTASSATSTSCATPAAPPAPHLSHSFKPGLLTVNIVETKGLSLPPSYAKYASLFAPEKQLVKDSNTMSSARRMTPPPVYLVLEFDKTQLVLEATGGTLENPIWKAQSSFDVSRPEPLSINLYAKLSAGLVKPSEMEGLGLSSSIGGNGSMSSVNSSSKRSSATPKYIDIFLGSVKLTPNFTPASSFDGYQALSSGTGKIHLKLDYKPTRNEPLSMKDFELLKVIGKGSFGKVMQVRKKDTQQIYAIKTIRKARIVSRSEVTHTLAERTVLAQIDNPFIVPLKFSFQNPDKLYLVLAFVNGGELFHHLQNEKVFDLNRSRFYTAELLCALECLHEYNVIYRDLKPENILLDYVGHIALCDFGLCKLNMEGQEKTNTFCGTPEYLSPEILLGHGYTKTVDWWTLGVLLYEMLTGLPPFYSENTNEMYQRILNDPLRFPDDMDREARSILTGLLNRDPKKRLGVNGAAEIKAHPFFNEIDWKRLMAKKYTAPFKPSVRSATDTSNFDREFTSEVPSDSVANDYLSESVQKQFGGWTFTEKNEHMH

SEQ ID NO: 2544 - protein, 197 aa, Arabidopsis thaliana
MSASRFVKCVTVGDGAVGKTCLLISYTSNTFPTDYVPTVFDNFSANVVVNGSTVNLGLWDTAGQEDYNRLRPLSYRGADVFILAFSLISKASYENVSKKWIPELKHYAPGVPIVLVGTKLDLRDDKQFFIDHPGAVPITTAQGEELRKQIGAPTYIECSSKTQENVKAVFDAAIRVVLQPPKQKKKKSKAQKACSIL

SEQ ID NO: 2545 - protein, 228 aa, Brucella suis 1330
MAAPSLIIFDCDGVLVDSEIIAAEVESALLTESGYPIAADEMAERFAGLTWQDILLTVEREAGIPLSASLLDKSERILDEKLKNEVNAVEDIVEVVSALKLPKCICSNSTSLRLENMLKRVGLYELFAPNIFSAKEVGSGKTKPAPDVFLHAARHFGVDPANVLVIEDSVHGVHGARAAGMRVIGFTGGAHTYPGHADKLTDAGAETVIHRHKDLQSVIDALSIWTDA

SEQ ID NO: 2546 - protein, 501 aa, Rubrivivax gelatinosus PM1
MPRSSWRARSWVWVAAASIAGASTLGGLLMSPHASHAQPAVAAARGLPDFTDLVEQVGPAVVNIRTTERTRGGQRGGGGAGPEMDEEMQEFFRRFFGVPPGQLPGQRQDPRRQAPDEEQQRGVGSGFIFTTDGYVMTNAHVVDGADEVYVTLTDKREFKAKLIGADKRTDVAVVKIEAAGLPSVKIGDVSKLKVGEWVMAIGSPFGLENTVTAGIVSAKARDTGEFVPFIQTDVAINPGNSGGPLINLRGEVVGINSQILSRSGGFMGISFAIPMDEATRVADQLRAGGRVVRGRIGVQIGEVTKDVAESLGLGKAAGALVRSVEAGGPADKAGVEAGDIITRFDGKPVEKSSDLPRLVGGTKPGSKASLQVFRRGSARDLGVTVAELEPEPGRRAAAPESKQAPTPSVVSGLGLTLANLSEEQKRELKLRGGVRVEATEGAAARAGLREGDVILSVGNVEIVDVKQFEAVIAKVDKSKPINVLFRRGEWAQYALIRTATR

SEQ ID NO: 2547 - protein, 491 aa, Escherichia coli O157:H7 EDL933
MANYFNTLNLRQQLAQLGKCRFMGRDEFADGASYLQGKKVVIVGCGAQGLNQGLNMRDSGLDISYALRKEAIAEKRASWRKATENGFKVGTYEELIPQADLVVNLTPDKQHSDVVHTVQPLMKDGAALGYSHGFNIVEVGEQIRKDITVVMVAPKCPGTEVREEYKRGFGVPTLIAVHPENDPKGEGMAIAKAWAAATGGHRAGVLESSFVAEVKSDLMGEQTILCGMLQAGSLLCFDKLVEEGTDPAYAEKLIQFGWETITEALKQGGITLMMDRLSNPAKLRAYALSEQLKEIMAPLFQKHMDDIISGEFSSGMMADWANDDKKLLTWREETGKTAFETAPQYEGKIGEQEYFDKGVLMIAMVKAGVELAFETMVDSGIIEESAYYESLHELPLIANTIARKRLYEMNVVISDTAEYGNYLFSYACVPLLKPFMAELQPGDLGKAIPEGAVDNAQLRDLNEAIRSHAIEQVGKKLRGYMTDMKRIAVAG

SEQ ID NO: 2548 - protein, 347 aa, uncultured archaeon GZfos9D8
MKRRKEGYFDFEHHPNAYLERKRNVEQGLHARTKILEALAMSTPTAAATAAVSNSEEMREDGTELTIKAISKSAAMSYSSSFHHLRLLEEEKIVKREGPRPYKWVVTGKGQRSLDELDLELGVTKMREELLMIPGPVPVLPRIREAMTKPMIFHRGDEFGAMYEEIVETLKDIYQTKNDLFVLSGSGTCAMEAAIGNLVGNETKMVCITIANGKFGERFGEIAVRYKADAVTPVNVNVNFEWGHSIELEAVKVALENSSSSDPKSKIVTMVHNETSTGILNPAKEVGKLAKKHDAVFVLDCITSIGGDKVPVDELGADIAIVGSQKCLGAPPGLSALSVSEHAWEMS

SEQ ID NO: 2549 - protein, 364 aa, Saccharomyces cerevisiae
MAGNANSVDEEVTRILGGIYLGGIRPIIDHRPLGAEFNITHILSVIKFQVIPEYLIRKGYTLKNIPIDDDDVTDVLQYFDETNRFIDQCLFPNEVEYSPRLVDFKKKPQRGAVFAHCQAGLSRSVTFIVAYLMYRYGLSLSMAMHAVKRKKPSVEPNENFMEQLHLFEKMGGDFVDFDNPAYKQWKLKQSIKLDPSGSELVSNSGMFKDSESSQDLDKLTEAEKSKVTAVRCKKCRTKLALSTSFIAHDPPSKESSEGHFIKRAANSHRIIDIQESQANCSHFFIEPLKWMQPELQGKQELEGKFSCPGCSSKVGGYNWKGSRCSCGKWVIPAIHLQTSKVDQFPLQSTALPNMVNFESEKVNR

SEQ ID NO: 2550 - protein, 316 aa, Triticum aestivum
MKRQIKRPTRSQESPEPGEKLAFAEKEHLLAAYMEHDEPELEEADEEEEEEERAMSCGLGGKKRRLALEQVRALERSFETDNKLDPERKARIARDLGLHPRQVAVWFQNRRARWKTKQLERDFNALRARHDALRADCDALRRDKDALAAEIHELREKLSIKPETAVKAEATGNVDAAEERLQQATMVGATVCKDGSSDSDSSAVFNDEASPYSSAVFEQQGFMGFGASFLDSASAAAATTGCSSLPMLEPKWPGAYPYDANRSGGYGFTEEWLAGSDAIVNDGSSAFFSEEHVSNLNFGWCSSGAEGFDLQSYCKK

SEQ ID NO: 2551 - protein, 1687 aa, Ipomoea trifida
MEQELLYGPGLNPKRRVFGEWEPAFGCAGANACPSKGGFAAGECSGAGLGMNAGFGENSRNCGVGDPEKMSFMELLGLAASGAAIPAGATPAKNSGRIPDNNGISVPPTPMEKEQISRKTKVKTPRQPKVKRKKHRPKIFDESKPKKVPKSTPKRENGKRKYARRSSTGQPPGSAMRSGMVADTSLNPETPGPLVEGRKRKCTLKASKHPLKSCKRGINFDPSVEDDTDVETVNNTAEEKINKFGDCSIEFNANSSQYVDHKALEENKTANIYATSIISADTTSIISAENNLYEKRLTVGNNSVESLKPVQSSPNHGCKESMDVLNHNSGQTNTLQVYQRTLLVYHRKFRANEIIKNSRKLGPNCPTFAKKKRSKRRRANKYNFWLLEEGREQMVIAPKYALRSKKKHDLDVNNSILPGLPKSQIKAAIADPKSFICLYSLFPLVKSKRKRSKRFSQSNLSHSSVTHSDMGKKNSNVEFLCHALDSIPKGKRSKNLMRRQGLPSSSTITHNSPDNIKLEAPAEIPAYPPQWVVQPHGYDNFMEKDRRLLDTAIIPTESSQAKVELRFHPPHPRTSQSTSPQHHRTSHQHPRTSQSTSHQHPTTSQSISDITLFHPIAAVYPPPPRPGESLKEYLWSSNSKVEIRIHPPYPHPDPQRYLLPTAASTSGLQSKYKVEKRHLRHGTTMSKRNNMLSDIEFCRQDHFPIAQGSLGQLSKHLMEIIQKLQRLQISDEHGQLVVRDLNLHGAVIPFNNKFDGAIIPYNNKLEKKRKMPMPKVDLDPESLRRWNLLMETDASELPEDEDEKKKKDWEEQKEIFCSRLKEFITCMHVLQGDRRFSPWKGSVVDSVVGVFLTQNVSDYLSRFFYSNAFMYLAAKYGVTSTSCDIQVDSPCSQESTSNPTGPNNVQSHETFISSAEKEPGSLGDDRVVKHPPVNHDFCCSSPDKHPIVTQGPFPFENSISLKETLEFCNSEKIHLPEEGHQSEDGTRLCGCESGIITSSTERLEDMNGVGAPVHNGCTLPFDGNLGFGCNCGERKNKNLAVNRNCGSKSGCACVGGMLEEVAKASANSNTFLNELEVAMEDNTVLLNNTLLEENTSSKSTEKKGKVTKMMPKPDVDWEELRRTYYNPNRTPGTLMDSIDWNAVRCAPVGEIAKVIENRGMNNVLAEKIKAFLDRLVEDHGSIDLEWLKDVPPEKAKEFLLSIRGVGLKSTECVRLLTLGHHAFPVDTNIARIVVRLGWVPLEPLPGDLQIHLLDQYVLHYQLITFGKVICTKKNPNCNACPMRAECKHFASAFASSRLRLRGAPEKPGMSNSQPMLPHIPDIEDFPYKFKDSHIRQQPSALAIEIASQDADPTRGLVRDIEDFPYELGNKYEILASQEFPYELDNKDEKSYTQTCEPIIEVPASLEPESQTCEPIIEVPASPEPEPESTVSLERDISNILHETEDDDDEIPHIKLDTEEFKRNLKTFLNSEFEDEEVSNALVALTPQDTTIPAPKIKSVERLRTRHRVYIVPDSHPLLIGFERRELDDPCPYLLAIWPQESLNVKESCSQDSLICSGDLDSAFQETNNQTVCGTILIPCRTANKGSFPLNGTYFQVNEVFADHESSVCPINIPRKWIWNLTQRYLYCGSTASAIARGMQMDEIQHCFWNGFVCVRAFDRQTRNPIHLSKRFHELPSLAGKKKVVNDD

SEQ ID NO: 2552 - protein, 463 aa, Sulfolobus tokodaii str. 7
MGFVDFLATLGEYLPAVTKPKDRPSLATKLLWSFIAVIVYLVMASIPLYGVTSANSFLSNFLAEEIIFASTQGTLAQLGIGPIITSGLIMQILVGSKLIQMDLAKEEDQARFTEAEKGLAFVFILVESALFGYVFTRTAGNIELSAIVTIQLIVATYIILLLDEMIQKGWGLGSGISLFILAGVTKIMFWDMFGIAAVSNQNLPVGFFPVLISDIVSGKNILSLIVNTSTTTPFQPDLVGLISTIGLIILIIYLTNINIQIPVTTQRLRGIKTTIPLNFLYVSSIPVIFVSVLGADFQLFASLASYISSPASTVLTDIANAFFFPPANVPHSVFALVVDPIGAVIYAVVFIVLSIIFGILWIDVAGLDPATQAQQMVEAGMEIPGMRNSPKVIEGILARYIYPLGFYSSLIVGVIAVLATFLGVYGTGVGILLAVTIAIQYYNLLAYERTLEMYPLLKRIIGE

SEQ ID NO: 2553 - protein, 375 aa, Mycobacterium leprae TN
MTSKIQNPNLAALSAAGVSVWLDDLSRDRLQSGNLQKLIDTKSVVGVTTNPSIFQKAFANGHAYDAQIAELAKRGANVDVTVRTVTTDDVRHACDVLACEWEASHGKDGRVSIEVDPRLAHDTDKTIAQAVELWRIVDHPNLFIKIPATKAGLPAITAVLAEGISVNVTLIFSVQRHREVIDAYLAGIEKAAEAGRDLSKIVSVASFFVSRVDTEIDKRLEKLGSEQALALRGQAGVANARLAYAAYQKAFEGGQRYQTLMARGAQVQRPLWASTGVKNPDYADTLYVTELVAPNTVNTMPETTIDAVADHGVIRGDTISGTTLSSQKVFDSLVAVGVDLIDVFAVLEHEGVQKFVKSWNELLKETQEQLDSVAK

SEQ ID NO: 2554 - protein, 1027 aa, Magnetococcus sp. MC-1
MKSLLSINHIFGLFTLAGMLLLSLFFGGLMLSGFNEVFDHHVERTMDARLTGFAQQLTDYVSLHDAMLHDLASNPLLVQGVMQQESGKANAVDFLERYRIMGAQRRLTLYGFDGHLLHDTAKQPRRPPLSENLVQILLRGHNKHIWRFQAQDKDQSSLWMAVPISWNAVPEGVLAMEIPSLEMPQLKRHYGQGEEDDIELFKDGERIFGVDGHLNGRQAQLYMPTLGITLRYTAHLGEIYSHRDRLLARIKMIGLAALLLAGSGVFWMGRVLFVRPLQRLKERTTHLANGEVRDLLNEVRRRVMVRELQELTDQFDVMALQVSSARTSLEEKVHERTAQLEWELEERHKTEHRLRQVLTLQTAILDSANSSIISTDRTGIVQTFNKGAERMLGYKAVAVVGQYTLDMFYNSNELRQHSLQLSATLDKRVDPGIESLFVLAREGKVDEREWMILHQDGHQVPVLMTVTPIYNSSGLLVGYLNMGTEISERKRLAAELKETNWRLQRALDSAQAGTFYYAVVHDHMQWNRRALEMFGLNDATFNGHLQDWLQRVVAVDRHRIDTLFAEVLATPNVETLDISYTILRQGDEAQRVIRTQGWIHRDPHGKATHLSGLFLDITEQMQAQQVLEEARQAAEEASQAKSDFLASMSHEIRTPMNAVIGLSDVLAETPLNPEQQHYVTTLQRASHTLLDLINAILDLSKIESGRFELIERPFDLSDMAHGVCSVLRVQAEQKGLSLALEMDETLPPFVVGDSPRLRQILINLIGNAIKFTEQGFVKVSVQARDQQRTLWFGIADSGVGIAPTQVEQIFEKFTQVDSSVVRRFAGSGLGLAISKQLVGLMGGHIGVESRLGEGSLFYFSLPLRPGETLFEAPLRAPIYQESPAESVPIRLLVVEDSVDNRMLVRTYFKKYHCELRFAVDGQEGVEMFQEGGCDLVFMDVQMPRMDGYTATRLIRNWERSHGMQPTPILALTAHALESDVKKSRQAGCNEHLTKPVSKRTLVDAVERQLNIKLMLRSLPAVSLPQTV

SEQ ID NO: 2555 - protein, 699 aa, Mycobacterium leprae TN
MTTLDQISTLTQPRHPDDWTEIDSAAVDTIRVLATDAVQKAGNGHPGTAMSLAPLAYTLFQRTLRHDPNDTAWLGRDRFVLSAGHSSLTLYIQLYLGGFGLELSDIESLRTWGSTTPGHPEFRHTKGVEITTGPLGQGLASAVGMAMASRYERGLFDPDAEPGASPFDHYIYVIASDGDIEEGVTSEASSLAAVQQLGNLIVFYDHNQISIEGDTKITLCEDTAARYRAYGWHVQEVEGGENVVGIEEAIANAKAATDRPSFISLRTIIGYPAPTLINTGKAHGAALGEDEVAATKRILGFDPDKTFAVREDVITHTRGLIARGKEAHERWQLEFEAWAQREPERKALLDRLLAQQLPDGWDADLPNWEPRSKELATRAASGAVLSAIGPKLPELWGGSADLAGSNNTTIKDVDSFGPPSISTDEYTAHWYGRTLHFGVREHAMGAILSGIVLHGPTRAYGGTFLQFSDYMRPSVRLASLMDIDTIYVWTHDSVGLGEDGPTHQPIEHLAALRAIPRLSVVRPADANETAYAWRTILARGANSGPVGLILTRQSVPVLEGTNTEGVARGGYVLGDGGSSEAKEPDVILIATGSEVQLAVAAQKLLADKDIIVRVVSMPCVEWFESQPYEYRDSVLPPSVSARVAVEAGVAQCWHKLVGDTGKIVSIEHYGESADYQTLFREYGFTPEAVVAAAEQVLDN

SEQ ID NO: 2556 - protein, 160 aa, Arabidopsis thaliana
  misc_feature (147)..(147): Xaa can be any naturally occurring amino acid
  unsure (1)..(160): unsure at all Xaa locations
SRSRTSRTIEAAKSLPTSHFSSVVVKITAICPISLLKRVSDLLRWEYKSPNFKLSWKLKSFPVFSDSSPLYHTNSEPEPLTAEEERELEAAHGRIQEICRKCQESNVPLLIDAEDTILQPAIDYMAYSSAIMFNADKDRPIVYNTIXAYLRNAGESCIQM

SEQ ID NO: 2557 - protein, 151 aa, Sulfolobus tokodaii str. 7
MPEFALQRRLAAELTNVGENNVKFNTNYLDDIASAITRDEIRKLIKEGKIIIEKKKGISSGRLKEKKEKRRKRGEKRKSGSRKGPAGARRGKKEQWVLKIRKIRTYLKWLRDNDVIDKKTYRLAYRKAKGNSFRNLSDVKNYLKQLGVKVE

SEQ ID NO: 2558 - protein, 492 aa, Vitis vinifera
MDPYKYRPSSAYNSPYFTTNAGAPVYNNDSSLTVGSRGPVLLEDYHLVEKLANFQRERIPERVVHARGASAKGFFEVTHDVSDLTCADFLRAPGVQTPVIVRFSTVIHERGSPETIRDPRGFAVKFYTREGNFDMVGNNFPVFFIRDAMKFPDVIHAFKPNPKSHIQEYWRVVDFLSYHPESLSTFAFLFDDVGIPQDYRHMEGFGVHTFTLLNKAGKANYVKFHWKPTCGVKCLLEDEAIRVGGTNHSHATQDLYDSIKAGNYPEWKLFIQTMDPEHEDKFDFDPLDVTKTWPEDILPLQPVGRLVLNKNIDNFFAENEMLAFNPALVVPGIYYTNDKMLQGRIFAYSDTQRHRLGPNYLQLPVNAPKCAFHNNHHDGSMNFMHRDEEVDYFPSRFDPVRHAETFPIPSTICHGKREKVVIEKENNFKQPGERYRSFAPDRQERFINRWVETLSDPRVTYEIRSIWISYWSQADRSLGQKLASRLNVKPKY

SEQ ID NO: 2559 - protein, 99 aa, Triticum aestivum
  misc_feature (46)..(46): Xaa can be any naturally occurring amino acid
  misc_feature (79)..(79): Xaa can be any naturally occurring amino acid
  unsure (1)..(99): unsure at all Xaa locations
MRKRKRENPCGIWGHYQKYEEAEPRVWCGHRPTALEPTGAESDPRXETTVPSEILKDCLLLGGCDNADRCELIMTVGIXHVHDCADVCVNLYRGSLTEL

SEQ ID NO: 2560 - protein, 485 aa, Lycopersicon esculentum
MGFEIAKTNSILSKLATNEEHGENSPYFDGWKAYDSDPFHPLKNPNGVIQMGLAENQLCLDLIEDWIKRNPKGSICSEGIKSFKAIANFQDYHGLPEFRKAIAKFMEKTRGGRVRFDPERVVMAGGATGANETIIFCLADPGDAFLVPSPYYPAFNRDLRWRTGVQLIPIHCESSNNFKITSKAVKEAYENAQKSNIKVKGLILTNPSNPLGTTLDKDTLKSVLSFTNQHNIHLVCDEIYAATVFDTPQFVSIAEILDEQEMTYCNKDLVHIVYSLSKDMGLPGFRVGIIYSFNDDVVNCARKMSSFGLVSTQTQYFLAAMPSDEKFVDNFLRESAMRLGKRHKHFTNGLEVVGIKCLKNNAGLFCWMDLRPLLRESTFDSEMSLWRVIINDVKLNVSLGSSFECQEPGWFRVCFANMDDGTVDIALARIRRFVGVEKSGDKSSSMEKKQQWKKNNLRLSFSKRMYDESVLSPLSSPIPPSPLVR

SEQ ID NO: 2561 - protein, 421 aa, Pseudomonas aeruginosa UCBPP-PA14
MTESVLDYMSRLGRDARAASRLLARAATAQKNRALLAAADALDAARAELSHANEQDLAAGRANGLEPAMLDRLALTPARIDDMIEGLRQVATLPDPIGEIRDMRYVPSGIQIGKMRVPLGVVGIIYESRPNVTIDAASLCLKSGNATILRGGSEAIHSNQAIARCIQQGLAEAGLPAAAVQVVETTDRAAVGALISMPEYVDVIVPRGGKGLIERISREAKVPVIKHLDGICHVYIDVAADLDKAIRVADNAKTQRYAPCNTMETLLVHAGIAERALPPLATIYREKGVELRGDAATRALLGADVLEATEEDWRTEYNAPILSIRIVDGLDAAIEHINTYGSQHTDAIITENFSDARRFLAEVDSASVMVNASTRFADGFEYGLGAEIGISTDKLHARGPVGLEGLTSEKYVVFGDGHVRT

SEQ ID NO: 2562 - protein, 225 aa, Bacillus cereus E33L
MIDILLVDDEPRMLELLTLYLTPIGYNCICARSGEEAISHIENQNFKFILLDIMMPTMDGWETCKKIRSFSNVPIIMVTARDQTIDVVQGLKLGADDYVTKPFHEEELFARIEAVLRRTNQHAQIQYHGILWDETRHFVSVDNEELLLTPIEFSLLGLFLRHVNYVLSRDQLIERIWGLNTNTEDRTVDSHIRNLRDKLRKVNFPIDHHLKTVYGVGYRWIDTLD

SEQ ID NO: 2563 - protein, 338 aa, Bacillus clausii KSM-K16
MSILVTGGAGYIGSHTCVELLTEGYDVIIVDNFSNSGPDTVNRIEEITSKKVKTYDINLLDSSRLETVFAENNIEAVIHFAGLKAVGESVEKPLHYYETNIGSTIQLCKTMEKYGVYKLVFSSSATVYGLPEQVPIEENAPLKAVNPYGNTKIIIEDMLRDLATSNNNWRISLLRYFNPIGAHKSGLIGEEPSGIPNNLMPYITQVAAGVREQLSVFGDDYPTKDGTCIRDYIHVVDLALGHLQALKKIETYTGVQAYNLGTGTGYSVLEVVDAFEKATGITIPKKIGPRRPGDAPVSYADPTKARTELQWEAKRTLIEMCEDSWRWQVHRKAQLESK

SEQ ID NO: 2564 - protein, 1022 aa, Cryptococcus neoformans var. neoformans JEC21
MPSSANAHDGAARQATVTRKRTNGSSTRDEKQYIGQWRIGRTIGKGSSGRVKIAKHAVTGKYAAIKIVPKGLILNSRMSMSEAGAKADKVLLGIEREIVIMKLIDHPNVLNLYDVWETSSELYLIMEYVPGGELFDYLVKRGRLPVSEALHYFQQIIYAVDYCHRFNICHRDLKPENLLLDKDKNIKVADFGMAAWEAGERMLETSCGSPHYASPEIVAGKAYHGSSSDIWSCGIILFALLTGRLPFDDDNIRSLLQKVKIGIFEMPDEIKDPARDLLRRMLERDPERRITMPEILSHPFFISRPPRPIPGRSLVSPPSLDEVERPVNSVDEIDPDIMGNLKTLWSGVSDEEIIKALMCKDKTWEKTIYHLLIKYRNKHLENYNMEEEEYAEARERRQARKQLQSSSSPARRKGVPAQDQSARLAPLGENETVANTPVKRPQAPTPNKASRKAPPECPTPTKQVSQARSPAGPRPANSRGNSGASNSSQAPAIVLQGATPTKELPPPHTTSSHPRPEMITTPTSPAPLSVPRVEDANLQTFLNQIADQMNRFSVRSSVASQSSTSSSAVLGSDYQACLAFAAGVTPSANPSSSVTESVIEEQGQFEDAADDQTDTEVASIHSGFTASIAPQSPLAGLGLGAPSAAVRPGLHPVAGPNQQRWSYASSAGSSYQGSSVGSYAPVESPQYIHSPLEVQAPVLQAERSAPRPPPRATRPAPPPISRPLPFSPAQQTYSEPTESLLPRDTSYVIIDNSELPSDASLSSWGSKSSGFKAHRGLDGFGMLKKKKLNVEPVPYSYGNLGSSATSPLNSPKRSWFNNLFNFKPATCTLLSRDNVANTRERVRKILLSIGVRTAVTEIDGHKALKCRLDEVRDNGNVTTKGVRFRVEFTRASTSQTYSTLVTLTQEKGAESSFRACFAELKHFMDSQPSAPTTLSLNRPSVEQSRSVNSSNLLPAHSYQQQRYSSTSADTPAGAPTSPLLSAPPIRYTASAPTTPVIESSPRFTSPYLQLPVSPQSLQMPSY

SEQ ID NO: 2565 - protein, 521 aa, Haloarcula marismortui ATCC 43049
MSGLFRRYLVVLVRFFPFALAFLRDRRRFILFGSRRQVPDEAHRQRAEQIRDTMLELGPAFIKVGQVLSTRPDIVPPVYADVFGTLQDEVPEGAGGDPKHVIAQELGDELDQSTLEPVAGGSLAYVYTATYRGERIALKVRRPELKPMITRDLRVVRGLVPLIRPFATERQQYSIENAADDFEDIILDELDFDREATVMADIRENFHGDERVVIPAVYEDLCSERVLAMEYLTGQKVTDGNAFDGIDMTPHEMATRIINVYLEMGLVDGVFHADPHPGNLAVTDDGRLLLFDFGMNERLPPTVQEDIVALYRALVRRDVDDLVDVLVALDVLEPHVNRAEVGRVLALVIENLEGRSEITWRMIITELTTNLRAFPFRIPPDVMLLIRVGTVGEGVCRQLDPEFDFLAAVRSFLVEQGLIENELNALIEETRADIRRSLPALARVPSRVDRTLSRLERGELVVRTDPVEGRGTGAQKLGYAVVAGALIVAAAILTFHERPYEIPVGAAAAGFLLFYLVDIGS

SEQ ID NO: 2566 - protein, 373 aa, Bacillus licheniformis ATCC 14580
MADKQAHETETEFTFEQVRDQLTEAGKKRGVLTYEEIAERMSSFDIESDQMDEYYEFLGEQGVELISENEETEDPNIQQLAKAEEEFDLNDLSVPPGVKINDPVRMYLKEIGRVNLLSAKEEIEYAKKIEEGDEESKRRLAEANLRLVVSIAKRYVGRGMLFLDLIQEGNMGLMKAVEKFDYRKGYKFSTYATWWIRQAITRAIADQARTIRIPVHMVETINKLIRVQRQLLQDLGREPTPEEIAEDMDLTPEKVREILKIAQEPVSLETPIGEEDDSHLGDFIEDQEATSPSDHAAYELLKEQLEDVLDTLTDREENVLRLRFGLDDGRTRTLEEVGKVFGVTRERIRQIEAKALRKLRHPSRSKRLKDFLE

SEQ ID NO: 2567 - protein, 1058 aa, Yarrowia lipolytica CLIB122
MTFKYLVLEYIEGGELFDYLIKKGRLEEYEAASYFLQIINGVDYCHRFNICHRDLKPENLLLDKNRNIKIADFGMAALETDRMLETSCGSPHYASPEIVAGKTYHGAPSDIWSCGIILFALLTGHLPFDDDNIRRLLLKVQTGKFNMPSELSPYAKDLIWRMLRTDPTTRITMDEIFQHPFVRKYSGGVTPTHIHAPSYEHVARPVASVQDIDIEILKNLQILWHGEDAEIIMQKLLSPDANPEKTFYCLLMKYRHDHAAAVAATAPPTLQQQQSQEMQPAMHKSHSHSSRKQHKRKTSHNSHRLGSRGSLVSVSSAHKRGVSFTHVKKRSQQSIRSMRGSASNSVVASPRKQTASAPVSAGTAPIPFNVNVPYTEAPATAPAAPTTAAATSTATRAPAQPLAPTQAVQSPPRQSQPVHQQPPTSRRAPISSAPSWLTRSPPASKDADFEAFLDSAFNKPVKTKKSYGSLLGSPVDARRHVTDPANTSIASRTAAGATAANTSKRAVTMAYNDEFEFERPMSLFDPREVGGDTGRAQQPSVSRAQTISHTHTHSRERVANAHSDTPNYLPMIFEEGDRFADAIEEEFHLNISDNTLSAPSTNHTTPMLGGDRKSSEWENLFDFTERGDQVVVGEDSLLDISFHRDNANEATPVAPAATHVGRESTELYKDLQFPEIPVVDRDETAVESMPRTQSKMKISGQMQTDNFMKRPSSINLNGHLSQSNLSRQTTSASQRRPLVSRDMNTHAASPREAAKPVRQLQAAAELHERRPVEVLQKQQPQQQQQHHHQQQQQTQHQLQPAPVFREKPVVSAPRRPAPAPPVQSVADTMVLPMHQQQQNNSQFTIPAPVQTQPPQSKSSRTKSFIRRFGFAPKREAPVAPTSKVTMIQSSDYGAAPGVNANAHMNAQKDPAAPAAHAAAHAAHTSGTAPATGDPWNVTQSWFMKMFSRPNVAPRQPPQTLYSTLTSQQLEDEIVALLASWRKYGISNLSVSHSSIKCQISSRNALKIKSAKLHIDIGPLKHTNSFAHFFHDRGSQGSFTQLYDQIKAHLVSQGLLINN

SEQ ID NO: 2568 - protein, 662 aa, Yarrowia lipolytica CLIB122
MPTTTMNIEELKHKNKDTLDKLDKHAKYVFDFKDRQAEKFFGAMSPKTRSIMTFFFSPEYDYNSATETFDPNDEVEDLQLTHSEIVRKVWSRNQLIMAWCFLIFMSLASTIMSSSFSSYIVYASSEFSQMGALASVQIVQSCIFLIARALCGKLADNFGRFEAMTISVVCLAVGSGLYMGIHNIVTYFAALAFYSVGDIGIQMMYEIFAADTVTLRDRTFFQTITLIANLFTPWVSGPMVAAVLKNSTWQWGMGMWCIIVPGCSLPFLFTLLYFRIKAYRMGLRIRRGDPNRTWFKNTVTGIIRMDLPGLVFLCAGLILFFVPISFCTGTDNWKLGENIAMLTVGTFLLYVVFPLWEFFFTKHPFLKYKLMYNRFVTVPGCIIGLYNMAFAIYHPYFQTWLLLAKGLPQARATNIHMAMFVALTGTTLVFSPLMRWRAKLKSVLTWGTILYFIGMGLTYEFRRPEKPLSTMILAQVFEGVGAGLLVIPVMVYIQVVCKQSDSAAAITIYYFFTSSGTILGNVISAAVYRNHFPKILRETGLFSEKEIQTIFSSIYAGLGYKIGTPQRAAIGASLNTVMRSLLVGPFVLCAIMFCLALTNADINLNVAQRIKRASEQRKMDENEGSTEENGDAGLVVTNSFEEKSAGSSDDKKQVNEKVVQAV

SEQ ID NO: 2569 - protein, 855 aa, Ralstonia metallidurans CH34
MAKAKATEGVAVKAPSKAPQSGSGKASVKTTAAKTSTASVRTTSARSAPAKSARSATAPAGSTSARNRTSENTKPSTSARESGKSANTSGKSAAAPVKGKSITVAKQQNTEVESKRAATTAGTRSGGAKAGTTATATPKARAATPAPVASERPAAPAVKPEPKKRGRKPKAEMQQDDSTIEDVTEEFYDNDAPATPAAAPKTEKQKAKDRKAKEKALLKEFASSNQAGSEEELEIRRQKLKALIKLGKSRGYLTYAEINDHLPDDMVDSETIDTLVATLNDIGIAVYEQAPDAETLLLNDNAPSATSEEEAEEEAEAALSTVDSEFGRTTDPVRMYMREMGTVELLTREGEIEIAKRIEAGLKDMVMAISACPVTISEILASAERVANEEIKIDEFVDGLIDPNAEEVQDNSPAQAVAADDEDEDSDEDGDDGEEEDDESGGGAGASARQLEELKVAALEKFRVIAEQFDKMRRAFEKEGYKSKPYVKAQEAIQAELMSIRFTARNVERLCDTLRGQVDEVRKLERAILNIVVDKCGMPRADFVARFPGNETNLDWIQTIVADNKSYSTIVERNVPAVHELQQKLIDLQSRVVLPLKELKDVNRKMSEGEKRAREAKREMTEANLRLVISIAKKYTNRGLQFLDLIQEGNIGLMKAVDKFEYRRGYKFSTYATWWIRQAITRSIADQARTIRIPVHMIETINKMNRISRQILQETGNEPDPATLAEKMEMPEDKIRKIMKIAKEPISMETPIGDDDDSHLGDFIEDTNTLAPAEAALDGSMRDVVKDVLDSLTPREAKVLRMRFGIEMSTDHTLEEVGKQFDVTRERIRQIEAKALRKLRHPSRSDKLKSFLEGN

SEQ ID NO: 2570 - protein, 319 aa, Thiobacillus denitrificans ATCC 25259
MTTKKPAKTTVARPKGAQVKKLAPQPGAVRVAAIQMASGPSVPANLAEAERLIELAVQAGARLVVLPEFFCIMAMKDSYVVKAREAEGDGPIQTFLARMAKKHKVWLIGGSVPLEASVPNKVRNSCLVYDERGKQIARYDKIHLFGLDLGNERYQEAKLIEPGDKVVVVNSPFGRIGLSVCYDLRFPELYRAMPDVDIIVVPSAFTATTGRAHFETLVRARAIENLAYVIAPAQGGYHLSGRETHGDSMIVDPWGVVLDRLPRGSGVVIANINPAYQASLRKSLPALQHRFIPCQQIAVDVVERRAVAKREPTSKQDKP

SEQ ID NO: 2571 - protein, 268 aa, Vibrio vulnificus CMCP6
MDRYQATFERLAAQKQGAFVPFVTVCDPNPELSLKIMDTLVKAGADALELGIPFSDPLADGPTIQGANIRALDSGATPDICFDLIGQIRAKYPDLPIGLLMYANLVYSRGIENFYQRCAQAGIDSVLIADVPTNESAEFVAAAEKFGVHPIFIAPPTASDETLKQVSQLGGGYTYLLSRAGVTGAETKANMPVGDMLAKLEQFNAPPALLGFGISEPEQVKQAIDAGAAGAISGSAVVKIIESHLNEPDAMLTALANFVSNMKSATQK

SEQ ID NO: 2572 - protein, 288 aa, Arabidopsis thaliana
MLNSITLTREPPLPFNSVGFSGNRSSSFGRRTITEGSSSKALSFGYKNVGSLKCGRSNWPGRSGTAFGHLVRVSAVPGGNSGGSGGLGGSGGGGGGSGGGGGDGSDGKGKKWSLLSWYQALLSNSPVLTKAVTAALLNLVGDLICQLTINKTSSLDKKRTLTFTFLGLGLVGPTLHFWYLYLSKVVTASGLSGAVIRLLLDQFVFAPIFVGVFLSAVVTLEGKPSNVIPKLQQEWTGAMIANWQLWIPFQFLNFRFVPQNYQVLASNVVALAWNVILSFKAHKEVVAK

SEQ ID NO: 2573 - protein, 364 aa, Magnaporthe grisea 70-15
MQMASASRQILRAASRASTRTAFAPAASRGLAARTIAGRRFYSSSSEPAKASSSNLGWIAGALAAAAAGAGYWYTQNGGAATLTKPEFKDYQTVYNDIASRLEENPDYDDGSYGPVLVRLAWHASGTYDKETGTGGSNGATMRFSPEGGHGANAGLKAARDFLEPIKAKYPWITYSDLWILGGVCAIQEMLGPKIPYRPGRSDKDAAACTPDGRLPDAAQRQDHVRNIFYRMGFNDQEIVALAGAHALGRCHTDRSGFDGPWTFSPTVLTNDYFKLLLNEKWEYKKWDGPKQYVDSKTKSLMMLPADMCLIEDKKFKEWTKKYADDNDLFFKDFSAAVLKLFELGVPFAEGTENQRWIFKPTSE

SEQ ID NO: 2574 - protein, 258 aa, Mycoplasma genitalium G37
MYFQNSTQLGWWFLAELIGTFILIIFGNGAVAQVNLKKMATSETKAKFLTVALTWGIGVLFGVLTANAIFKGSGHLNPAISLFYAINGSIKSPTALIWPGFVIGILAQFLGAMIAQTTLNFLFWKQLSSTDPQTVLAMHCTSPSVFNITRNFLTEFIATLILIGGVVAASHFLHNNPNSVPPGFMGLWLVAGIIIAFGGATGSAINPARDLGTRIVFQLTPIKNKDANWKYSWIPVIAPLSAGLVLSIIIGFSPAPVL

SEQ ID NO: 2575 - protein, 604 aa, Francisella tularensis subsp. tularensis SCHU S4
MERREKRIRKLRNKSGKVFAIETNLTGRQLLNNRVLNKDVAFSQEERVAFDLIGYLPEKVESLEEQAIRVRRQLDLKPNSLEKYVFLNRLHDLNTTLFYHFVRENLEEIMPIIYTPTVGEAVQKYSSSFRKQSGLFISISHKKHIARILERYEYNSIDLVLVTDGEAVLGIGDQGIGGMNISIGKIMVYVAASGIDPARVLPVQLDMGTNNDALLNAPGYLGVRLPRVSGETYDEFIEEFVTQVKARFPNVFLHWEDLGRDNATRILEKYKDKLCTFNDDIEGTGIVATANCIAGVKTASTIRINAGEITVEEALSGICDIKVVIFGAGSAGCGIARQLADVIADRAGVSIEKARSSIYLVDRYGLVCDRLRAKRITPEQKLFVKTREEIDKWKVEDFNYITLEETVKNTKCDILIGTSGQPGSFTKEIIKTMAKNNNYPIIMPLSNPTSLCEALPEDIIKWTNGKALIAAGSPFPDVTYNGRDYRISQGNNAFIFPGLGLGSVAVHARVLTKGMIRAASYRLSELSPMVINEDITQPLLARITDLVDVTKEITKAVAKQAILEGVHGVDIDLEDLTETELDEEIERLINLSSWTPTYAPYMPI

SEQ ID NO: 2576 - protein, 438 aa, Ipomoea trifida
MRSKDRISYFYDGDVGNVYFGPNHPMKPHRLCMTHHLVLAYGLHNKMEIYRPHKAYPMELAQFHTADYVEFLHRITPDTQHLFGSDLKRYNLGEDCPVFDNLFEFCQIYAGGTIDAARRLNNQLCDVAINWAGGLHHAKKCEASGFCYINDLVLGILELLKYHPRVLYIDIDVHHGDGVEEAFYFTDRVMTVSFHKYGDKFFPGTGDMKDIGERDGKFYAINVPFKDGIDDSSFIRLFRTIISKVVETYIPGAIVLQCGADSLAGDRLVLFGHHSTFCKDISVVYLFPSTNLSCNFLGDFYMGMFYLMLLAGHAECVRFVKKFNIPLLVTGGGGYTKENVARCWTYETGILLDSELPNVFFFPPEIPDNDYIKYFGPDYSLKIPGGHIVPPDFYIPDFDEDTQNPDERLDQHTQDKQIQRDDEYYEGDNDNDHSMDDA

SEQ ID NO: 2577 - protein, 163 aa, Saccharomyces cerevisiae
MSEFYKLAPVDKKGQPFPFDQLKGKVVLIVNVASKCGFTPQYKELEALYKRYKDEGFTIIGFPCNQFGHQEPGSDEEIAQFCQLNYGVTFPIMKKIDVNGGNEDPVYKFLKSQKSGMLGLRGIKWNFEKFLVDKKGKVYERYSSLTKPSSLSETIEELLKEVE

SEQ ID NO: 2578 - protein, 286 aa, Ipomoea trifida
FYVAEVLLALEYLHMLGVVYRDLKPENILVREDGHIMLSDFDLSLRCAVNPKLLKSSSPVGQPPKKMSSPCSDSSCIEPFCLHPSWQVSCFTPRFLSAAAKTRKLKADIAAQVTPLPQLVVEPTSARSNSFVGTHEYLAPEIIKGEGHGSAVDWWTFGIFMYELLYGRTPFKGTTNEDTLGNVVSQCLKFPETPMISSHARDLIRRLLQKEPENRLGSSKGATEIKNHSFFEGLNWALIRCATPPEMPRIFDLGNLISDTNSQKKQGGKCQKEGTSGEENIEFEMF

SEQ ID NO: 2579 - protein, 147 aa, Saccharomyces cerevisiae
CVLNVKQSESTYMLGDAFLVDAYVVYDLENYEISIAQASFNNQEEDIEVISDTVPGATPAPGYFSTWVYKPGSPIGTGDFINVSWTSYSEFSQYKSLLATAAQSDDASSFSSSGGSSESTTKKQNAGYKYRSSFSFSLLSFISYFLL

SEQ ID NO: 2580 - protein, 575 aa, ASPERGILLUS NIDULANS FGSC A4
MGVHPLIRRTRTVLRRMSADKTEGTESDIIEQSSSYGSAGPQEKTPTPNTQHGVQDAEAVTLSWSKGTLIAVFINIWFLYFVNAFQISVTSSLNPYVTSSFNAHSLSALPTAIGDAFAAATYLPMAKLMDVWGRAEGFLFMVICLTIGLVLMASCNAFETYCAANVFYYVGFYGMEYAVDVVTADASSLRNRAFAYAFTSSPYIITAFAGPKVAKDFYYQVSWRWGFGAWAIATPIIALPLYGMLKRPSGRTVLESIRHWSVEFDLLGVCIFTAGLVLFQLPFDIADYAPEGWASDYIIAMLVVGFSMLFFFAIWEKWLAPVPLFEWRLLTNRTIIGAVLLDATYQLSNYCWSYYFTSWLQVNNNLTIATANYINNIFDVVSGVLLLFLGWVIRRVGKYKWTLYISIPLYIFTQGLMIHFRKPNMSVGYQVMCQIFLAIAGSVFILVEQIAILAAVDHQHVATVLAILNVVGTIGNSAGLTISTSIWQHTYRNALIRYLPESAMSNFSSIYDDLRTQIGYPVGSPIRTAIQMAYAYAELRLLAVGCGIMMLAIPWCILIRDIDLKRKMQVKGTVL

SEQ ID NO: 2581 - protein, 531 aa, Arabidopsis thaliana
MGCFSSKHRKTQNDGGEKSIPINPVQTHVVPEHRKPQTPTPKPMTQPIHQQISTPSSNPVSVRDPDTILGKPFEDIRKFYSLGKELGRGQFGITYMCKEIGTGNTYACKSILKRKLISKQDKEDVKREIQIMQYLSGQPNIVEIKGAYEDRQSIHLVMELCAGGELFDRIIAQGHYSERAAAGIIRSIVNVVQICHFMGVVHRDLKPENFLLSSKEENAMLKATDFGLSVFIEEGKVYRDIVGSAYYVAPEVLRRSYGKEIDIWSAGVILYILLSGVPPFWAENEKGIFDEVIKGEIDFVSEPWPSISESAKDLVRKMLTKDPKRRITAAQVLEHPWIKGGEAPDKPIDSAVLSRMKQFRAMNKLKKLALKVIAESLSEEEIKGLKTMFANIDTDKSGTITYEELKTGLTRLGSRLSETEVKQLMEAADVDGNGTIDYYEFISATMHRYKLDRDEHVYKAFQHFDKDSSGHITRDELESAMKEYGMGDEASIKEVISEVDTDNDGRINFEEFCAMMRSGSTQPQGKLLPFH

SEQ ID NO: 2582 - protein, 313 aa, Amelanchier bartramiana
GGLGDVLGGLPPAMAANGHRVMTVSPRYDQYKDAWDTGVPVEIEVGGRVETVRFFHCYKRGVDRVFVDHPSFLERVWGKTGSKIYGPSAGQDYKDNQFRFSLLCQAALEAPRVLNLNSNKYFSGPYGDDVVFIANDWHTALLPCYLKAIYKPKGIYENAKVVFCIHNIAYQGRFPISDFSVLNLPENLKGSFDFIDGYNKPVKGRKINRMKAGILESDRVVTVSPFYAQELVSGEDKGVELDNIIRKTGITGIVNGMDVQEWNPATDKYLDTKYDNTTVLDAKPLVKEALQAEVGLPVDRNIPVIGFIGRLEE

SEQ ID NO: 2583 - protein, 313 aa, Amelanchier bartramiana
GGLGDVLGGLPPAMAANGHRVMTVSPRYDQYKDAWDTNVLVEIEVGGRVETVRFFHCYKRGVDRVFVDHPLSLEKVWGKTESKIYGPRTGVDYMDNQFRFSLMCQAALEAPRVLNLNSNEYFSGPYGDDVVFIANDWHTALLPCYLKTIYKPKGIYKNAKVVYCIHNIAYQADFLFRDFSLLDLPENLKGSFDFFDGHDKPVKGRKINWMKGGILESDRVVTASPYYAQELVSGEDKGVELDNIIRKTGITGIVNGMDVQEWNPATDKYLDIKYDNTTVLDAKPLLKEALQAEVGLPVDRNIPVFGFIGRLEE

SEQ ID NO: 2584 - protein, 116 aa, Sulfolobus tokodaii str. 7
MVIMGKKGALVKNIGIEGVNPPSKTCDDINCPFHGNLRVRGIILEGRLIRYRAEKTGVVERDYLFYDTKYKRYERRRSRIHVHIPPCLDVKEGDNVIIAECRPIAKSVSFVVIGKR

SEQ ID NO: 2585 - protein, 653 aa, Magnetococcus sp. MC-1
MCGISGFYQPAASEQELAHNITRMTATLQRRGPDDGGFWLEPSCGLALGHRRLAIQDLSPLGHQPMADASGRYQIVFNGEIYNFLELKQNLERHYGPQPWRGHSDTEVLLALIGHSGLEAALAQCRGMFALALWDRQQRILTLARDRLGEKPLYYGRQGDSLLFASELKALRAHPHWQGGVDRHALTLFMRHSTVPAPYTIHPGIHKLQAGCYQRFQWHPEQGMQDLGMIHYWSMSQVVAHANAHPFDGDETAALQAVEQQLMAIIGRQMVADVPLGAFLSGGIDSSLITAMMQAQSSRPVQSFTIGFAEASHDESAYAQAIARHLGTQHTTLQVTPQDALALVPSLPLIYDEPFSDASQLPTTLLAGLTRQHVTVALSGDGGDELFGGYDRYGESMALWRLRGRVPSPLRRPLARAGRALPSGVWSALLRPVAACLPAKARDNPGDIVHKMMDLLVQPDFAHLYRHMLSHWSDPGNLVVGGHEPPTNLTRGWTQPWRQDPVAQMMYWDTLLYLPDDILVKVDRAAMWSSLECRIPLLDHRLVELVWSMPMHFKRRDGVPKWLLQRLLGKRVPEALFERPKMGFGVPLERWLRGPLKGWAQDLLAPALLQRQGYLNPEPIARIWRQHQQGSHNWHHLLWDLLMWQAWLAEHEG

SEQ ID NO: 2586 - protein, 313 aa, Amelanchier bartramiana
GGLGDVLGGLPPAMAANGHRVMTISPRYDQYKDAWDTEVTVELKVGDKTETVRFFHCYKRGVDRVFVDHPLFLEKVWGKTASKVYGPVTGVDFKDNQLRFSLLCQAALEAPRVLNLDSSKDFSGPYGEEVVFIANDWHTALLPCYLKAVYKPRGIYSTAKVAFCIHNIAYQGRFAFADFALLNLPDEFKSSFDFIDGNEKPVKGRKINWMKAGILESDKLLTVSPYYAEELVSAVEKGVELDNIIRKTGIFGIVNGMDVQEWNPSTDKYTTIKYNASTVADAKPLLKETLQEEVGLPVDRDIPVIGFIGRLEE

SEQ ID NO: 2587 - protein, 392 aa, Shewanella sp. MR-4
MSKATLNTDTVHRVGFLDKASLHIPILRILQADGTTYETAVLPVIDEALATKIYDTCVFTRVLDERMLGAQRQGRISFYMTCTGEEAAIVGSVAALDAEDVILAQYREHAALRYRGFTTEQFMNQMFSNEKDLGKGRQMPIHYGCAALNYQTISSPLATQIPQATGVGYSLKMQGKRNVAVCYFGEGAASEGDFHAGLNMAAVLKCPVIFFCRNNGYAISTPTEEQFAGNGIASRGVGYGMHTIRVDGNDMLAVLAATQQARAYAIEHNAPVLIEAMTYRLGAHSSSDDPSGYRSKEEEAKWQQHDPVKRFKLWLINKGWLAEADDALRYEKYREEVLAAVKVAEKLPIPMLDEIIEDVFDKPTPALKKQLSELKEHIKKYPQSYPKSAGRL

SEQ ID NO: 2588 - protein, 166 aa, Legionella pneumophila subsp. pneumophila str. Philadelphia 1
MKKVYHYIIHYVRTYLLLELLAGLWLTVKYFFRKKITVQFPEEQTPLSPRFRGLLALRRYPNGEERCIACKLCEAVCPALAITIESEQRDDGSRRTTRYDIDMFKCINCGLCEESCPVDSIVVTPIHHYHISERGQNIMTKEKLLAVGDLMESQLAADRAADEKYR

SEQ ID NO: 2589 - protein, 313 aa, Amelanchier bartramiana
GGLGDVLGGLPPAMAANGHRVMTISPRYDQYKDAWDTEVTVELEVGDKTETVRFFHCYKRGVDRVFVDHPLFLEKVWGKTASKIYGPTAGVDFKDNQLRFSLLCQAALVAPRVLNLNSSKYFSGPYGEEVVFVANDWHTALLPCYLKAIYKPKGIYKTAKVAFCIHNIAYQGRFVFADFALLNLPDESKSSFDFIDGYDKPVKGRKINWMKAGILESDKVLTVSPYYAEELVSSVEKGVELDNIIRKTGIQGIVNGMDVQEWNPLTDKYTTVKYDASTVADAKPLLKEALQAEVGLPVDRDIPVIGFIGRLEE

SEQ ID NO: 2590 - protein, 316 aa, Arabidopsis thaliana
MATMKIPMTVPSPRVDADQLFKAFKGTGCDTSVIINILAHRNATQRALIEQEYETKFSDDLRKRLHSELHGHLKKAVLLWMPEAVERDASILKRSLRGAVTDHKAIAEIICTRSGSQLRQIKQVYSNTFGVKLEEDIESEASGNHKRVLLAYLNTTRYEGPEIDNASVENDARTLKSAVARKHKSDDQTLIQIFTDRSRTHLVAVRSTYRSMYGKELGKAIRDETRGNFEHVLLTILQCAENSCFYFAKALRKSMKGLGTDDTALIRIVVTRAEVDMQFIITEYRKRYKKTLYNAVHSDTTSHYRTFLLSLLGPNV

SEQ ID NO: 2591 - protein, 259 aa, Zea mays
MLNMMTDLSCGPSSKVKEQVAAAPTGSGDRQGQGRGKIEIKRIENTTNRQVTFCKRRNGLLKKAYELSVLCDAEVALVVFSSRGRLYEYANNSVKSTIERYKKANSDSSNSGTVAEVNAQYYQQESSKLRQMIHSLQNANTRNIVGDSIHTMGLRDLKQMEGKLEKAISKIRARKNELLYAEVDYMQKREMDLQTDNMYLTSKIAESNETGQPAMHMMGVPPPTSEYDHMAPFDSRNFLQVSMPQHYSHQLQPTTLQLG

SEQ ID NO: 2592 - protein, 206 aa, Glycine max
MSLRRRTLLKVIVLGDSGVGKTSLMNQYVHKKFSQQYKATIGADFVTKELQIDDRLVTLQIWDTAGQERFQSLGVAFYRGADCCVLVYDVNVMKSFDTLENWHEEFLKQANPPDPRAFPFILLGNKIDIDGGNSRVVSEKKAKDWCAAKGNIPYFETSAKEDYNVDAAFLCIAKAALANEHEQDIYFQGIPEAAVPENEQRSGCAC

SEQ ID NO: 2593 - protein, 473 aa, Bacillus cereus E33L
MQQPTNEKLHRTMKSRHLFMIALGGVIGTGFFLGSGYTINQAGPGGAILSYLVGGFIMYLTMLCLGELTVAMPVSGSFQKYATKFIGPGTGFMIGWLYWLGWAVTVGLELTSIGLMMKRWFPNVDVWVWCLVFGVILYASNAISAKSYAELEFWFSSIKVVTILAFVVLGGSALLGFISYDGKEAAPLFSNFVSDGGLFPNGLAAVLLTMITVNFSFQGTELIGIAAGESENPEKTIPRAIRNTVWRIMLFFILTMTILVGLISWKEAGVIESPFVVVFDKIGIPYAADIMNFVIITALLSVANSGLYAATRILWSLANEGMAPKSFQKVNKRGIPITALVVTIAVAALSLLTSFLAEDTVYMYLLSIAGLSAVSSWIIIALSQLRFRSQYIKGGGKLEDLKYRTPLYPIVPILALITNSIVVISLAFIPEQRMALYCGIPFIIFCYIYYYINKKRQKPMKVETTNETNNQTR

SEQ ID NO: 2594 - protein, 708 aa, Picea abies
MRVDPAVTHMDGGSGDDQDAADNPPRKKRYHRHTPQQIQELEALFKECPHPDEKQRLDISKRLNLETRQVKLWFQNRRTQMKTQLERHENSILRQENEKLRSENLSIRDAMRNPICTNCGGPAVLGEMSFEEQQLRIENARLKKELDRLCALAGKFFGRPVPSMPSVPLMPKSSLDLGVGGMPTSLPSGCADLMHGPAGGRTGNIIGIERSMLAELALASMDELFKMAQADETLWIPNLDAGKETLNYEEYMRQFPSTITPKLIGLATEATRETGMVITNSLNLVETLMDVDRWKEMFPCMISRAAMVDVISSGMSGTRNGALQLMYAELQVLSPLVPAREVYFLRFCKQHAEGVWAVVDVSVDSLRDNSPAGFMKCRRLPSGCLIQDMPNGYSKVTWVEHAEYDDRGVHRLYRSLLNSGMAFGAQRWLATLQRQCECLAILMATANVTARDPTAIRTPNGRRSMLRLAQRMTDNFCAGVSASTVHTWNKLSGNIDDDVRVMTRKSVDDPGEPPGVVLSAATSVWLPVSPQRLFDFLRDERLRSEWDILSNGGPMQEMAHIPKGQDPGNCVSLLKASAMNSNQSSSMLILQKTCTNASGSLVVYAPVDIPAMHVVMSGGDPPYVALLPSGFAILPNGPKCRPLALNPSGNGVGVNSPRVGGSLLTVAFQILVNSLPTAKLTVESVETVNNLISCTVQKIKAALHCEDA

SEQ ID NO: 2595 - protein, 274 aa, Glycine max
MGIQTVGSLGNGQQSHLQPSSLSRQGSWYSLTLDEVNCQLGDMGKPLGSMNLDELLQNVWTAEASKSSVVVGVESENMSSSSSSLQRQASLTLARALSGKTVDDVWREIQQGQKKKYGEDVRSQEGEMTLGETTLEDFLVQAGLFAEASISPAVGLDAMDSLATQGFQQKTGLLSSSPSIGSLSDTRLGRKRDASDAYEKTLERRLRRKIKNRESAARSRARKQAYHNELVGKVSRLEEENVKLKKEKEFEERLLPDPLPERKYQLRRHNSAFF

SEQ ID NO: 2596 - protein, 391 aa, Mycobacterium avium subsp. paratuberculosis K-10
MNRDAVIVGAVRTPIGKGKASGALHDVLPADLLAHSLRELVARTGVDPAQIDDVIAGAVTQVGDQAVNIARNALLGAGFPESVPGVTIDRQCGSSQQAINFAAQGVIAGAYDVVIAAGVESMGRVPMGSQVLPGSNPFGEAMNARYPEGLVPQGISAELIAAKWGFSRTQLDEFSAASHEKAARATKDGLFDNELIPIAGLATDEFIRPGTTVQTLAGLQPAFYSEATEARFPQINWEITAGNSSPLSDGSAAVLITSSETAARLGLRPLARIHTTAVVGSEPLYMLTGVIPATEKVLSKAGLTLADIDLFEVNEAFAPVVLAWAQDTGADLDKTNVNGGAIAIGHPLGASGARIITTLVNALEQRGGRYGLQTMCEGGGMANATIIERLS

SEQ ID NO: 2597 - protein, 432 aa, Acinetobacter sp. ADP1
MSLSPKQVQLFEQASKHIPGGVNSPVRAFNGVGGTPVFIKKAQGAYLWDEDDKRYVDYVGSWGPMILGHAHPDIIQAVQTAAVDGLSFGAPTVHETTLADIICDIMPSIEMVRMTNSGTEATMTAIRLARGYTGRDKIVKFEGCYHGHSDSLLVKAGSGLLTLGEGEPTSKGVPVDFAKHTLTLPYNNIEALKECFAKFGHEIAGVIVEPVAGNMNLVTPIDGFLQAIRDVCDEYGSVFIIDEVMTGFRVALGGAQSVYQVKPDLTTLGKIIGAGLPVGAFGGKREIMECIAPLGGVYQAGTLSGNPLAMRAGITMFKHLREPDFYSKLEAKLQKLLTGLQAAANEAGIAFKTQQVGGMFGLYFTDQEDITSFDSMLACDTDAFKKFFHGMLERGVNLAPSAFEAGFISSAHSDEDIELTIQAAKETFAEMK

SEQ ID NO: 2598 - protein, 475 aa, Silicibacter pomeroyi DSS-3
MSTFDYDLIIIGSGPSGRAAAIQAGKLKRRVLVIDRKDRLGGVSVHTGTIPSKTLRETVLNLSGWRERSFYGRSYRVKDRISAEDLKARLHMTLDYEVDVLEHQFNRNHIDTLNGLARFVGPHEIEVATEAGDTTRLTAAKFLIATGTKTYRPDYVPFNGKTVVDGDDFLEMERIPRSLAVIGAGVIGVEYASMFSALDVRVTLIEPRETFLDFIDRTLIQEFTHQIRENGVDLRLGSAVEKIEDTGSHIEISLANGRHIRAEMLLFAAGRMGATSALNLDAVGLETDHRNRITVDRKTYQTSVPHIYATGDVIGHPSLASTSMQQGRVAACHALETPTLPESPWFPYGIYSVPEMSTCGMSEEELQERGIPYEVGVARFRETSRGHIMGLEHGMLKMLLSLKTRRVLGVQIVGEGATELIHIGQAVMNLKGTVDYFVQNTFNYPTLAEAYRTAGLDAFNRMPIPEEFKVKKPKK

SEQ ID NO: 2599 - protein, 370 aa, Oryza sativa
MASKAGGGGVARRGGGRMRSLGRQGSMYSLTLDEVQSQLGEPLHSMNLDELLRSVFPDGLAIADGAGAGAGATTSSQQHQPGSGLLRQGSITMPPELSKKTVDEVWKGIQAAPKRNAETGGGGGGGRRRRERQPTLGEVTLEDFLVKAGVVTQGSLKELSDVGNVDPVGRGVTATGTVDLAPGSHWIEQYKQQIASTDAHHHGQQGVQGAYFPNRLVPQPLNVGPGAILEPSYSDGQTSSGMIGGMSDSQTPGRKRGMSGDVADKLMERRQKRMIKNRESAARSRARKQAYTNELENKVSRLEEENVRLKRQKESDYLHYTRSNLVMENIEIHRSLINSNIIIWYDELYYFIGSVSSYNQEVFVMVIVCV

SEQ ID NO: 2600 - protein, 294 aa, Saccharomyces cerevisiae
MKTLVHVASVEKGRSYEDFQKVYNAIALKLREDDEYDNYIGYGPVLVRLAWHISGTWDKHDNTGGSYGGTYRFKKEFNDPSNAGLQNGFKFLEPIHKEFPWISSGDLFSLGGVTAVQEMQGPKIPWRCGRVDTPEDTTPDNGRLPDADKDAGYVRTFFQRLNMNDREVVALMGAHALGKTHLKNSGYEGPGGAANNVFTNEFYLNLLNEDWKLEKNDANNEQWDSKSGYMMLPTDYSLIQDPKYLSIVKEYANDQDKFFKDFSKAFEKLLEDGITFPKDAPSPFIFKTLEEQGL

SEQ ID NO: 2601 - protein, 274 aa, Candida glabrata CBS138
MDPSLLLDQMLQDVSNLPAEFRYMLEEVGLEDEQCLELRKRYQQKEGILHKYIKQNGSLAANPKEDELLAEVEQSMAQVRELQEEKCQRANTILFLVSRHLNKLQQNIIMLEEDGLLAPAEDEMESGPDFSRESSVVGSTVSERKRKAASEDHPRRKKQSRSMSNTHREKSYNKGDDTADVKSPASTEREGTLDLQNYQEELFSSMNDNEKEDQNLYCFCQRVSFGEMVACDGPNCKYEWFHYECVNLTEPPKGTWYCPDCKQEMSKKLKKKKQ

SEQ ID NO: 2602 - protein, 250 aa, Xanthomonas oryzae pv. oryzae KACC10331
MGFATAVGWGLDGPGGVPGDTQLTTDVAAADFPRVVLFDLDGTLLDSAPDMLATVNAMLDARGRAPIALASLRPVVSKGARAMLGVAFAELDAEACVALVPEFLQRYEDVIGTQSQLFDGVEELMVRLENAGCVWGIVTNKPEYLARLILPQLGWEQRCAVLIGGDTLAERKPHPLPLLAAAERIGVAPAQCVYVGDDARDILAARAAAMPSVAVLWGYRLDDDDPLRWQADVLVEQPQALWNPATWPQT

SEQ ID NO: 2603 - protein, 316 aa, Vibrio vulnificus CMCP6
MGKLIEGVWHDVWYDTKQTKGKFVREDAGFRDWIENKPQAPFQPESGRYHLYVSLACPWAHRTLIFRKLKGLEEHIDVTVVCPDMLSDGWKMGLPEPLFGHTKLHQIYTQAKPDYTGRVTVPVLWDKKTNTIVSNESSEIIRMFNSAFNQLTGNQDDYYPDSLREVIEEWNAFIYPNINNGVYRCGFATTQEAYEEAYNALFSALDRVEHHLATHRYLAGSQMTEADWRLFTTLIRFDAVYVGHFKCNQKRIADYPHLNGYMKELYQIEGIAETTDFYHIKRHYYFSHIGINPTQVVPLGPNLDLDSDHGREGIGR

SEQ ID NO: 2604 - protein, 388 aa, Rhodospirillum rubrum
MAPPSPPLMLTTGPVTAYPEVSEALSRPILYDGDDAFRGYYAQVLAMLGRVMGLSTPPVILQGEAILGIEAAAAGLIGPKDVVLNLVSGVYGQGFGRYALRAGAEVIELAVPFDAAIDPADVARSLRARPDIGVVAVCHHDTPSGTLNPLADIGAVVAAHGALLIVDAVSSFGGMEVFPEAVAADLFITSPAKCLGGTPGLSLLGVSDRAWAKMRANPQAPRGSFLSLLDWQDVIEDGRTFPVTPSIAEIYGLEAALARHLAEGERAVWARHALTARATRAGILALGLALWPTSEALCSPTTTAIRIPDGLSDKALRDHARDRSGVLLSLGRGATAGKVLRIGHMGPAAQPDHALRAVAALAAAASAQGLAVDRPAGESAVRAVIDGM

SEQ ID NO: 2605 - protein, 475 aa, Thermus thermophilus HB8
MAWYEGAFFYQIFPDRFFRAGPPGRPAPAGPFEPWEAPPTLRGFKGGTLWGVAEKLPYLLDLGVEAIYLNPVFASTANHRYHTVDYFQVDPILGGNEALRHLLEVAHAHGVRVILDGVFNHTGRGFFAFQHLMENGEQSPYRDWYHVKGFPLKAYTAHPNYEAWWGNPELPKLKVETPAVREYLLAVAEHWIRFGVDGWRLDVPNEIPDPTFWREFRQRVKGANPEAYIVGEIWEEADFWLQGDMFDAVMNYPLARAVLGFVGGEALDRDLAAQTGLGRIEPLQALAFSHRLEDLFGRYRPEVVRAQMNLLTSHDTPRLLSLMRGSVERARLALALLFLLPGNPTVYYGEEVGMAGGKDPENRGGMVWEEARWQKDLRETVKRLARLRKEHPALRTAPYLRIYAQDGHLAFARGPYLAVVNASPHPFRQDFPLHGVFPRGGRAVDLLSGEVCTPQGGRLCGPVLPPFSLALWREA

SEQ ID NO: 2606 - protein, 72 aa, Castanea mollissima
VGGVSDVKGHENSLQIDDLARFAVDDHNKKANTLLQFKKVVNAKQQVVSGTIYILTLEVEDGGKKKVYEAKI

SEQ ID NO: 2607 - protein, 221 aa, Zea mays
  misc_feature (12)..(12): Xaa can be any naturally occurring amino acid
  unsure (1)..(221): unsure at all Xaa locations
MSAAAAAAASSXVTKFIKCVTVGDGAVGKTCMLICYTCNKFPTDYIPTVFDNFSANVSVGGSIVNLGLWDTAGQEDYSRLRPLSYRGADVFILSFSLVSRASYENVLKKWMPELRRFSPTVPVVLVGTKLDLREDRSYLADHSAASIISTEQGEELRKQIGAVAYIECSSKTQRNVKAVFDTAIKVVLQPPRRREVTRKKMKTSSNQSLRRYLCGSGCFTS

SEQ ID NO: 2608 - protein, 431 aa, Francisella tularensis subsp. tularensis SCHU S4
MENKSNSQILFAEAQQYIPGGVNSPVRAFKSVGQEFPRFIKFAKGAYLYDVDWNKYIDYIGSWGPMILGHCDDDVLEAIQCQVKNGLSYGAPCKQEVDLAKKIIELMPNIEQVRFVNSGTEATMSAIRLARAYTCRNKIIKFEGCYHGHADEFLVAAGSGALSLGQPNSPGVPEDVVKDTLVASFNDMESIQALFEKYKDEIACIIIEPIAGNMNMIFPQDDFLAKLRAICDQNSSLLIFDEVMTGFRVALGGAQSIYNVKPDLTTLGKVIGGGMPVGAFGGRKEIMQKVSPAGPVYQAGTLSGNPIAMTAGIKTLEKISQPGFFDELGAKAQKLVDGLNEAAKAYDFNFHAKCLGGMFGLFFCSDKIAVNTFVDLGKTNLKMFNQFFAYMLDNGVYLAPSAYEAGFISIAHSDEDIEKTIYLAKKFFQEN

SEQ ID NO: 2609 - protein, 323 aa, Brassica napus
PDNFVFGQSGAGNNWAKGHYTEGAELIDSVLDVVRKEAENSDCLQGFQVCHSLGGGTGSGMGTLLISKIREEYPDRMMMTFSVFPSPKVSDTVVEPYNATLSVHQLVENADECMVLDNEALYDICFRTLKLSNPSFGDLNHLISATMSGVTCCLRFPGQLNSDLRKLAVNLIPFPRLHFFMVGFAPLTSRGSQQYSALSVPELTQQMWDAKNMMCAADPRHGRYLTASAVFRGKLSTKEVDEQMMNIQNKNSSYFVEWIPNNVKSSVCDIAPKGLKMASTFIGNSTSIQEMFRRVSEQFTAMFRRKAFLHWYTGEGMDEMEFT

SEQ ID NO: 2610 - protein, 307 aa, Ralstonia eutropha JMP134
MKRVAIYRWISAGLALAAVAVLAFAWHLRPSQRVITQADIDAAVLHTLQTKSLPSRTARAAEAIRESVVEIRSFSPADPSEEAASAPRARRDAPATRPKSSQPSRRKPHDELAKAAPPAGTDVPTEKREASHIGSGVVITESGLVLTSYHVVADAKRVEVMFHDGQTSEASVLQAIPEKDLAVVKPKSIPDDLPAATLGSSRNLAPGAEVVAVGFPFGIGPSVSAGVVSGLDRQFISPDARQSLDNLIQFDAAANPGNSGGPLINMDGEVVGIVTAILNPNKSGTFLGIGFAVTIESAGVSIGSSPF

SEQ ID NO: 2611 - protein, 235 aa, Sandersonia aurantiaca
MSGYLPFDEPNILALYKKIWKANFSFPSWFSSGAKKLIKRILDPNPHTRITIPEILEDEWFKKGYMPPHFQQGEEVNLDDIDAVFNDSKEHLVTEKKEKPESMNAFALISRSQVFDLGNLFEKQRGLIKRETRFTSQCPPNEILSKIEETAKPLGFNVRKHNYKMNLQGDKTGRKGHLSVATEVFEVAPSLHMVELRKTGGDTLEFHKFYKNFSSGLKDIVWKAEALPEQEETRS

SEQ ID NO: 2612 - protein, 469 aa, Arabidopsis thaliana
MSSRSDLKIKRVSLIIFLLSVLVEFCYGGFTSEYVRGSDLPDDMPLDSDVFEVPPGHNSPQQVHVTQGNHEGNGVIISWVTPVKPGSKTVQYWCENEKSRKQAEATVNTYRFFNYTSGYIHHCLIDDLEFDTKYYYEIGSGKWSRRFWFFIPPKSGPDVPYTFGLIGDLGQTYDSNSTLSHYEMNPGKGQAVLFVGDLSYADRYPNHDNNRWDTWGRFVERSVAYQPWIWTAGNHEIDFVPDIGEIEPFKPFMNRYHTPHKASGSISPLWYSIKRASAYIIVMSCYSSYGIYTPQYKWLEKELQGVNRTETPWLIVLVHSPFYSSYVHHYMEGETLRVMYEQWFVKYKVDVVFAGHVHAYERSERVSNIAYNIVNGLCEPISDESAPIYITIGDGGNSEGLLTDMMQPQPKYSAFREASFGHGLLEIKNRTHAYFSWNRNQDGNAVAADSVWLLNRFWRAQKKTWLDAF

SEQ ID NO: 2613 - protein, 239 aa, Zea mays
MDSDLWISRLTAAKRQFALQRAQRQHAAPASHHDRFGYDDIEPEDDLHSDFPCPDCYEDHDVASLCAHLEDEHPFESKIVSCPVCSARISKDLVDHITLQHGYLFKLQKHQRVRRVTGNGNHNLSYAGRDLQLQETYLKVLLGNSSRSSSTNASSTVTDSLLPSLVVNLSSPEVEDASKFSAPAVVENNWFKRSLPSKTWKLRTVDSTLSHEERERRRRRAAVRSAFVQHLLVTTIFED

SEQ ID NO: 2614 - protein, 729 aa, Arabidopsis thaliana
MRIFSTFVFHRRQQIFNLRQFQTTTILRNPISIAPIQIPMDATEQSLRQSLSEKSSSVEAQGNAVRALKASRAAKPEIDAAMEQLNKLKLEKSTVEKELQSIISSSGNGSLNREAFRKAVVNTLERRLFYIPSFKIYSGVAGLFDYGPPGCAIKSNVLSFWRQHFILEENMLEVDCPCVTPEVVLKASGHVDKFTDLMVKDEKTGTCYRADHLLKDYCTEKLEKDLTISAEKAAELKDVLAVMEDFSPEQLGAKIREYGITAPDTKNPLSDPYPFNLMFQTSIGPSGLIPGYMRPETAQGIFVNFKDLYYYNGKKLPFAAAQIGQAFRNEISPRQGLLRVREFTLAEIEHFVDPENKSHPKFSDVAKLEFLMFPREEQMSGQSAKKLCLGEAVAKGTVNNETLGYFIGRVYLFLTRLGIDKERLRFRQHLANEMAHYAADCWDAEIESSYGWIECVGIADRSAYDLRAHSDKSGTPLVAEEKFAEPKEVEKLVITPVKKELGLAFKGNQKNVVESLEAMNEEEAMEMKATLESKGEVEFYVCTLKKSVNIKKNMVSISKEKKKEHQRVFTPSVIEPSFGIGRIIYCLYEHCFSTRPSKAGDEQLNLFRFPPLVAPIKCTVFPLVQNQQFEEVAKVISKELASVGISHKIDITGTSIGKRYARTDELGVPFAITVDSDTSVTIRERDSKDQVRVTLKEAASVVSSVSEGKMTWQDVWATFPHHSSAAADE

SEQ ID NO: 2615 - protein, 149 aa, Phaseolus vulgaris
MADQLTDEQISEFKEAFSLFDKDGDGCITTKELGTVMRSLGQNPTEAELQDMINEVDADGNGTIDFPEFLNLMARKMKDTDSEEELKEAFRVFDKDQNGFISAAELRHVMTNLGEKLTYEEVDEMIREADVDGDGQINYEEFVKVMMAK

SEQ ID NO: 2616 - protein, 135 aa, Agrobacterium tumefaciens str. C58
MSDLTSPKVNKSDADWREQLTPEQYHILREHGTERPFTGPYWNSTEKGLYRCAACDEPLFLSDTKFDAGCGWPSYFEPVKPGAVTEHRDSTHGMVRTEIRCANCGGHLGHVFPDGPPPTGLRYCINGHSMVFEPV

SEQ ID NO: 2617 - protein, 274 aa, Glycine max
  misc_feature (214)..(214): Xaa can be any naturally occurring amino acid
  unsure (1)..(274): unsure at all Xaa locations
LGYTTTSAKKAPKGSSHDDTTGPYITQYGGPGPKNDPKESSNLDHTEAFKTGFFALDDLYVGNVMTLQFPIQDVSQFLPRKEAESIPFSISQLPSVLQLFSISEDSPEANAMRDTLEQCEAEPITGETKICATSLESMLEFIGTIIGSETKHNILTTTLPTASGVPLQKFTILEVSEDINAAKWVACHPLPYPYAIYYCHFIATGSKVFKVSLXARNGDDKIEALGICHLDTSDWSPNHIIFRQLGIKPGKDSVCHFFTIKHLMWVPQPLQATM

SEQ ID NO: 2618 - protein, 325 aa, Capsicum annuum
GTGTALYTAFTSSRISAAQILKAYKAFITACPFKLLSNIFANKYIRKLIAGEPKIHIIDFGILYGFQWPCLIQGLSMRPGGPPELRITGIDLPQPGFKPAERVEETGRRLEKYCKRFKVPFVFKAIAKKWESITVEELEIQRDEVLIVNSLYRLGNIPDETVVQNSPRDAVLDLIRRIRPDMFIHGVLNGTFNTPYFVTRFREALFHYSSLFDMFEASLPREDEDRKLFEEEVFARDAMNVIACEGTERVERPETYKQWQLRCVRAGFKQLPLDQEIVKTVSNKVRSEYHKDFSVHEDGRWMLQGWKGRVFYALSCWKPTRLSAN

SEQ ID NO: 2619 - protein, 481 aa, Rhodobacter sphaeroides 2.4.1
MRRLRNVKIVATLGPASNDYATIRALFEAGADVFRLNMSHGSHDDIRARHQMLRQIEADTGTPVCILADLQGPKLRVGTFANGSEELVERGRFRLDLDPAPGTAERVNLPHPEIFAALEPGSSLLVNDGKIRLEVADCGPDFADCIVTVGGTISNRKGVNVPDVVLPLAALSEKDRRDLEFVCELGVDWLALSFVQRPEDVEEARSLARGRAAILSKIEKPAAVKAYDAILAVSDGIMVARGDLGVELPVQAVPPIQKRLVRGARAAAKPVIVATQMLESMIDSPMPTRAEVSDVATAIYEGADAVMLSAESAAGSYPIEAVMTMNNTAISVESDPVYRDIIEASRAAKRASVADAIVAAAREIAETTPIKAICCFTQTGKTVSLVARERPRVPILALTPLVETARRLSLTWGTHCVVTAPQERFKGAVICAARAALSDGFAQEHEQIAVVAGVPFNVRGTTNILRVAPCDERLIYSGDPE

SEQ ID NO: 2620 - protein, 427 aa, Arabidopsis thaliana
MDPYKYRPSSAYNAPFYTTNGGAPVSNNISSLTIGERGPVLLEDYHLIEKVANFTRERIPERVVHARGISAKGFFEVTHDISNLTCADFLRAPGVQTPVIVRFSTVVHERASPETMRDIRGFAVKFYTREGNFDLVGNNTPVFFIRDGIQFPDVVHALKPNPKTNIQEYWRILDYMSHLPESLLTWCWMFDDVGIPQDYRHMEGFGVHTYTLIAKSGKVLFVKFHWKPTCGIKNLTDEEAKVVGGANHSHATKDLHDAIASGNYPEWKLFIQTMDPADEDKFDFDPLDVTKIWPEDILPLQPVGRLVLNRTIDNFFNETEQLAFNPGLVVPGIYYSDDKLLQCRIFAYGDTQRHRLGPNYLQLPVNAPKCAHHNNHHEGFMNFMHRDEEINYYPSKFDPVRCAEKVPTPTNSYTGIRTKVRFLPCLL

SEQ ID NO: 2621 - protein, 140 aa, Oryza sativa
PLQFHSIFISISSPPRVGSYLLVDNGVVVVVVGGDVVDGGGGGGVVRGIYFQGFRVVLPGRSKNARCQQGSYPIKLFYTLNMPIILHSALITNLYFISQLIYRRYTGNFLVNLIGKWKESEYSGHPVPVGGLAYYETAPS

SEQ ID NO: 2622 - protein, 553 aa, Bacillus cereus E33L
MKDWHKSVVYQIYPKSFNSYYNKETGDIKGVTEKLDYLKELGVDYIWLTPIYQSPQNDNGYDVSDYYSIDSSYGTMEEFEELLEEAKARNIEIMLDIVVNHSSTEHKWFKEAKKDKNSPYRNYYIWRDEKNNWQSKFGGSAWKYDEKTKQYFLHLFDETQADLNWENEKLREEVYDMMRFWLDKGVTGFRLDVINLISKDQQFLNDDGSTATSDGRKYYTDGPRVHEYLQEMNRNVFEGKDVLTVGEMSSTTIDNCIKYSNPDRNELSMTFSFHHLKVDYPNGDKWTKADFDFIKLKEIMSNWQIEMQKGGGWNALFWCNHDQPRIVSRFGNDEKYRNESAKMLATAMHMLQGTPYIYQGEEIGMTNPNFESIEQYRDVESLNIYDIKLEEGLSKEEIIGILKQKSRDNSRTPMQWNEDVNSGFTTSTPWISVAENFKEINVEKVLEDKDSVFYHYKKLIELRKTYDVITEGEYAILDENDPKIWAYTRTTESEVLLVINNFYGEEITYSVPAHVQLDGMKQEVLLSNYKDSSKDITKLNLRPYESIVYRYTK

SEQ ID NO: 2623 - protein, 508 aa, Mycoplasma pneumoniae M129
MIHHLKRTKIIATCGPALTKKLWTLAMLDDPAYAAMKAEAYANIENIIKNGVTVIRLNFSHGNHEEQAVRIKIVRDVAKKLNLPVSIMLDTNGPEIRVFETAPEGLKILKDSEVVINTTTKEVAKNNQFSVSDASGTYNMVNDVKVGQKILVDDGKLSLVVKRIDTKNNQVICVAQNDHTIFTKKRLNLPNADYSIPFLSAKDLRDIDFGLTHQIDYIAASFVNTTENIKQLRDYLASKNAKHVKLIAKIESNHALNNIDGIIKASDGIMVARGDLGLEIPYYKVPYWQRYMIKACRFFNKRVITATQMLDSLEKNIQPTRAEVTDVYFAVDRGNDATMLSGETANGAFPLNAVYVMKMIDKQSETFFDYQYNLNYYMANSKARHSEFWKQVVLPLAQKTAPKRKLINSDFKYDFVVHATNNLNEIYALSNARLAAAVIILTNDPQVYTGHGVDYGIFPYLIDQKPQSLSKAEFKSLANVAIKHYQQHGEISQLKQCLGVFHNKIISL

SEQ ID NO: 2624 - protein, 375 aa, Francisella tularensis subsp. tularensis SCHU S4
MLNLQDKYTQYQRDNLLRELTPFIKDDSIIDFTTSDYLNLSSAHNLKHAIVNGFDKYGFGSKGSNIVCGYTDETQQFEHEFAKFINYPRAIFFSSGFMANLAIYSTLFSKHDSIFADKYIHASIIDGIKLSQAKLRRYKHQQLSQLQDIYDGKSFITTEGVFSTSGSITQLDKLAKITPEKLIVDEAHSFGVLGKNGRGAINSFRISYKNCLICVFPLGKAFGGVGAVVCTTEAIAEYLIQFARNYIYTTALPPMILKAALIQLKNLENANDNRARLQQNITFFNELCDAKDLELVSKDLSPIRSIQLNNANLAIRLKDKLFENKIIVSCFRYPTVPKDQAILRFSLHSNNTFDQIQQALEIISKEVKYEYIRSN

SEQ ID NO: 2625 - protein, 424 aa, uncultured archaeon GZfos9E5
MKNYKSRITNEGTGEAEQEGVEENKQAPVKILVCDDDPAFRKLVQTYLRSADKGFVLEEAGQKKEIQDALDKGGIDLVLMDILMPEKSGIEWLDEIVEKRIAPVVMVTGFGSEEIAVQSIHEGAIDYIPKDHLTKDRLLSTIKITLETWKRKRAEEEKRRLMEELETKNAELKKAMEHMADLEEVTRMKTDFLSITSHELRTPLTPMKSQLQMLQEGYMGKLDKKQEKSIEVVLRNLTRLENLIGDILDLSRIEAGRIKLSFDSMNLNDAVKEAIKMQEAFAKGKNIEISAKLAEMPNIIGDAERLRQAIGNLLNNAIKFSEKTGKVIIETKRLGKNVQFSITDYGIGISKADQKKLFKPFTQIDSSMGREHVGTGLGLAITKGIIQAHNGKIWAESELGKGSTFYFVIPTKQKITEKEASYIG

SEQ ID NO: 2626 - protein, 392 aa, Zea mays
MALRLHDVALCLSPPLAARRRSGGSFVAVASMTSAAVSTRVENKKPFAPPREVHVQVTHSMPSHKIEIFKSLDDWARDNILTHLKPVEKCWQPQDFLPDPASEGFHDEVKELRERAKEIPDDYFVCLVGDMITEEARATYQTMLNTLDGVRDETGASPTAWAVWTRAWTAEENRHGDLLNKYMYLTGRVDMRQIEKTIQYLIGSGMDPRTENNPYLGFIYTSFQERATFISHGNTARHAKDFGDLKLAQICGIIASDEKRHETAYTKIVEKLFEIDPDGTVVALADMMKKKISMPAHLMFDGQDDKLFEHFSMVAQRLGVYTARDYADILEFLVDRWKVADLTGLSGEGNKAQDYLCTLASRIRRLDERAQSRAKKAGTLPFSWVYGREVQL

SEQ ID NO: 2627 - protein, 443 aa, Francisella tularensis subsp. tularensis SCHU S4
MYNLCQLNILQKVYNMYSSNIWHPCTQMKDFEKSPPLNVYRTEGRYIYTKDNRKLFDATSSWWCKSLGHRHPYIIDKLKKQLDKYEHTIFANATNDEIDRFSQRICNLTGMDKTLYASDGSCAVEIALKMTIHLRSFQNQTKKIKFVCLENSYHGETLATMSVSDCGLYSDPYKPLLFDSFKLKNIPYVTGKNDPLWANAERYWNKSQQYLEQHKEFINALIVEPICQGAGGMLIYSKDYLNILCKWCKENDIYIIFDEIMTGLGRLGKLFAYEYLDITPDFLCVSKGLTSGIIPFSIVLTKNQYYEMFYDDQLTKAFLHSHTHSGNVLGAVVANAVLDIFEEENILTNVKDLEKQFSESFLELQEQLPIIKNVRGIGAVIAADLNIDKKRAGLDVYREAIKLGALLRPLGNTIYWLPPFNSTYQEIDLLKQITKQSIINAFK

SEQ ID NO: 2628 - protein, 538 aa, Glycine max
MVTDMLGLVVCTTKKTHEPLVNQSRAPANQPYHLHEKHAASTAQTVPQNMPWKPPGPALSPKPVVGVRQDTILGKQFEDVKQFHTLGKELGRGQFGVTYLCTENSTGLQYACKSISKRKLASKSDKEDIKREIQIMQHLSGQPNIVEFKGAYEDRSSVHVVMELCAGGELFDRIIAKGHYSEKAAASICRQIVNVVHICHFMGVMHRDLKPENFLLSSRDENALLKATDFGLSVFIEEGKVYRDIVGSAYYVAPEVLRRRCGKEIDIWSAGVILYILLSGVPPFWAETEKGIFDAILEGHIDFESQPWPNISDSAKDLVRKMLIQDPKKRITSAQVLEHPWIKDGNASDKPIDSAVLSRMKQFRAMNKLKKLALKVIAENMSAEEIQGLKAMFTNMDTDKSGTITYEELKSGLHRLGSKLTEAEVKQLMEAADVDGNGSIDYIEFITATMHRHKLERDDQLFKAFQYFDKDNSGFITRDELESAMKEYGMGDDATIKEIISEVDTIISEVDTDHDGRINYEEFSAMMKSGNQQQGKLF

SEQ ID NO: 2629 - protein, 424 aa, Thermus thermophilus HB8
MKSEPLSYLGKDGGPWEIFTEQVDRVVPYLGRLAPLAESLKRPKRVLIVDVPVRLDDGSVAYFEGYRVHHNTARGPAKGGVRYHPEVTLSEVMALAGWMTIKNAAVGLPYGGGKGGIRVDPRKLSPGELERLTRRYTSEIGILLGPDRDIPAPDVNTGEREMAWMMDTYSMNVGRTVPGVVTGKPIALGGSLGRRDATGRGVFITAAAAAEKIGLQVEGARVAIQGFGNVGNAAARAFHDHGARVVAVQDHTGTVYNEAGIDPYDLLRYVQEFGGVRGYPKAEPLPAADFWGLPVEFLVPAALEKQITEQNAWRIRARIVAEGANGPTTPAADDILLEKGVLVVPDVIANAGGVTVSYFEWVQDFNSYFWTEEEINARLERVLRNAFGAVWQVAQEKKIPLRTAAYVVAATRVLEAQALRGLYP

SEQ ID NO: 2630 - protein, 802 aa, Zea mays
MAAKLTRLHSLRERLGATFSSHPNELIALFSRYVHQGKGMLQRHQLLAEFDALFDSDKEKYAPFEDILRAAQEAIVLPPWVALAIRPRPGVWDYIRVNVSELAVEELSVSEYLAFKEQLVDGQSNSNFVLELDFEPFNASFPRPSMSKSIGNGVQFLNRHLSSKLFQDKESLYPLLNFLKAHNYKGTTMMLNDRIQSLRGLQSSLRKAEEYLLSVPQDTPYSEFNHRFQELGLEKGWGDTAKRVLDTLHLLLDLLEAPDPANLEKFLGTIPMMFNVVILSPHGYFAQSNVLGYPDTGGQVVYILDQVRALENEMLLRIKQQGLDITPKILIVTRLLPDAAGTTCGQRLEKVIGTEHTDIIRVPFRNENGILRKWISRFDVWPYLETYTEDVSSEIMKEMQAKPDLIIGNYSDGNLVATLLAHKLGVTQCTIAHALEKTKYPNSDIYLDKFDSQYHFSCQFTADLIAMNHTDFIITSTFQEIAGSKDTVGQYESHIAFTLPGLYRVVHGIDVFDPKFNIVSPGADMSVYYPYTETDKRLTAFHPEIEELIYSDVENSEHKFVLKDKKKPIIFSMARLDRVKNMTGLVEMYGKNARLRELANLVIVAGDHGKESKDREEQAEFKKMYSLIDEYKLKGHIRWISAQMNRVRNGELYRYICDTKGAFVQPAFYEAFGLTVIESMTCGLPTIATCHGGPAEIIVDGVSGLHIDPYHSDKAADILVNFFDKCKADPSYWDKISQGGLQRIYEKYTWKLYSERLMTLTGVYGFWKYVSNLERRETRRYIEMFYALKYRSLASQVPLSFD

SEQ ID NO: 2631 - protein, 68 aa, Phaseolus vulgaris
SEEELKEAFRVFDKDQNGFISAAELRHVMTNLGEKLTDEEVDEMIREADVDGDGQINYEEFVKVMMAK

SEQ ID NO: 2632 - protein, 146 aa, Arabidopsis thaliana
MGSLQMQTSPESDNDPRYATVTDERKRKRMISNRESARRSRMRKQKQLGDLINEVTLLKNDNAKITEQVDEASKKYIEMESKNNVLRAQASELTDRLRSLNSVLEMVEEISGQALDIPEIPESMQNPWQMPCPMQPIRASADMFDC

SEQ ID NO: 2633 - protein, 419 aa, Thermus thermophilus HB8
MPLKAYRPPEDPGLWDTYLEWLERALKVAEAHPTTLEYLAHPKRLVTLSLPVVMDDGKVRIFQGYRVVHDIARGPAKGGVRLDPGVTLGQTAGLAAWMTLKAAVYDLPFGGAAGGIAVDPKGLSPQELERLVRRYTAELVGLIGPDSDILGPDLGADQQVMAWIMDTYSMTVGSTVPGVVTGKPHALGGSEGRDDAAGLGALLVLEALAKRRGLDLRGARVVVQGLGQVGAAVALHAERLGMRVVAVATSMGGMYAPEGLDVAEVLSTYEATGFLPRLDLAPEEVFGLEAEVLVLAAREGALDGDRARQVQAQAVVEVANFGLTPEAEAYLLGKGALVVPDLLSGGGGLLASYLEWVQDLNMFFWSPEEVRERFETRVARVVDAVCRRAERGGLDLRMGALALALERLDEATRLRGVYP

SEQ ID NO: 2634 - protein, 328 aa, Oryza sativa
MPTYSPAALFLPMLIPILSCLVKMQIFVKTLTGKTITLEVESSDTIDNVKAKIQDKEGIPPDQQRLIFAGKQLEDGRTLADYNIQKESTLHLVLRLRGGMQIFVKTLTGKTITLEVESSDTIDNVKAKIQDKEGIPPDQQRLIFAGKQLEDGRTLADYNIQKESTLHLVLRLRGGMQIFVKTLTGKTITLEVESSDTIDNVKAKIQDKEGIHQTSKRLIFAGKQLEDGRTLADYNIQKESTLHLVLRLRGGMQIFVKTLTGKTITLEVESSDTIDNVKAKIQDKEGIPPDQQRLIFAGKQLEDGRTLADYNIQKESTLHLVLRLRGGL

SEQ ID NO: 2635 - protein, 67 aa, Phaseolus vulgaris
EEELKEAFRVFDKDQNGFISAAELRHVMTNLGEKLTDEEVDEMIREADVDGDGQINYEEFVKVMMAK

SEQ ID NO: 2636 - protein, 283 aa, Brassica napus
MREILHIQGGQCGNQIGAKFWEVVCAEHGIDPTGRYTGDSDLQLERINVYYNEASCGRFVPRAVLMDLEPGTMDSLRSGPYGQTFRPDNFVFGQSGAGNNWAKGHYTEGAELIDSVLDVVRKEAENCDCLQGFQVCHSLGGGTGSGMGTLLISKIREDREYPDRMMLTFSVFPSCRVSDTVVEPYNATLSVHQLVENADECMVLDNEALYDICFRTLKLTTPSFGDLNHLISATMSGVTCCLRFPGQLNSDLRKLAVNLIPFPRPHFFMVGFAPLTSRGSQQY

SEQ ID NO: 2637 - protein, 396 aa, Nicotiana benthamiana
MSCTVAISNLPAFWPVARVPLTKSLLCKSASFSSSSSPNSSKTLTKFPSFTSSSSSSSSPSLQFHILRFQKPLPVPAPAPINLIRNSTECSTSTPNSTSPTVLKRKRPAKLDIPIVSTTFGNFPALPAAAAADFVEVEGDGYYVCCKRGRRGPMEDRFSALVNLQGGSKEGIFGIFDGHGGAKAAKFAAENLNKNIMDEVVTRKDENVMEAVKNGYLKTDSEFLNQEFRGGSCCVTALIRNGDLVVSNAGDCRAVVSRDGIAEALTSDHKPSRKDEKDRIETLGGYVDYCNGVWRIQGYLAVSRGIGDRYLKQWIIAEPETMVLRLNPELEFLVLASDGLWDKVSNQEAVDAARPLCARISKPQLLSASKSLVDLAVSRGSVDDISVMIIQLQQFC

SEQ ID NO: 2638 - protein, 754 aa, Salmonella typhimurium LT2
MTILTHTLGFPRVGLRRELKKAQESYWAGNTTREALLAVGRELRARHWEQQKQAGIDLLPVGDFAWYDHVLTTSLLLGNVPARHQNNDGSVDIDTLFRIGRGRAPTGEPAAAAEMTKWFNTNYHYIVPEFSKGQQFRLTWTQLLEEVDEALALGHKIKPVLLGPVTYLWLGKVKGEPFDRLTLLKDILPVYQHVLAELAKRGIEWVQIDEPALVLELPQAWLDAFKPAYDALAGQVKLLLTTYFEGVTPNLDTIIALPVQGLHVDLIHGKDDVAELHQRLPVDWLLSAGLINGRNVWRADLTEKYAQINAIVGKRALWVASSCSLLHSPIDLSVETRLDTEVKSWFAFALQKCGELALLRDALNSGETAALEEWSAPIQARRHSRRVHNAAVEKRLAAITAQDSQRENPYEVRAEAQRARFKLPAWPTTTIGSFPQTTEIRGLRLDFKKGNLDANHYRTGIAEHIKQAIIEQERLGLDVLVHGEAERNDMVEYFGEHLDGFVFTQNGWVQSYGSRCVKPPVVIGDISRPAPITVEWAKYAQSLTDKPVKGMLTGPVTILCWSFPREDVTRETIAKQIALALRDEVADLEAAGIGIIQIDEPALREGLPLRRSDWDAYLEWGVEAFRINAAVAKDETQIHTHMCYCEFNDIMDSIAALDADVITIETSRSDMELLESFEAFDYPNEIGPGVYDIHSPNVPSVEWIEALLKKAAQRIPAQRLWVNPDCGLKTRGWPETRAALANMVKAAHNLRQAK

SEQ ID NO: 2639 - protein, 247 aa, Glycine max
  misc_feature (41)..(41): Xaa can be any naturally occurring amino acid
  unsure (1)..(247): unsure at all Xaa locations
MVFEETELRLGLGLCLPGNGTTATTEAAAAELGVRKRGFSXETETDETATVDLMLNLSPKEAAAADGADPREKPKTSPKEKTLLLPDPAKPPAKAQVVGWPPVRSFRKNMFAAQKSSGGEESEKSSPNASFVKVSMDGAPYLRKVDLKMYKSYPELSDALGKMFSSLTIGNCESQGFKDFMNESKLMDLLNSSDYVPTYEDRDGDWMLVGDVPWEMFVESCKRLRIMKGKEAIGLAPRAVEKCKNRS

SEQ ID NO: 2640 - protein, 349 aa, Glycine max
MAKLPVEYNGDCATTASASASAAAESQRSIPTPFLTKTFQLVDDQSIDDVISWNDDGSTFIVWNPTVFARDLLPKYFKHNNFSSFVRQLNTYGFRKVVPDRWEFSNDYFRRGEKRLLCEIQRRKISSPAPSPTAPTTVTVPMPLTAIPIISPSNSGEEQVISSNSSPLRAPAELLDENERLRKENVQLTKELAEMRSLCNNIYSLMSSYGNKNGNSNGSYQTDGGAGGAQGSRESGMTAVKPLDLMPVKRSSGEDAADTVPKEINLIPNPKLFGVAIGAKRAREGGGGSGSGRDCGGGGGGGEEDTLLRLHHVGSADVKSEPLDCQNHRENQETPWLSPCHRTNQRVCN

SEQ ID NO: 2641 - protein, 338 aa, Yersinia pestis biovar Medievalis str. 91001
MYVLVTGGSGYIGSHTCVQLIEAGYKPVILDNLCNSKSSVLARIHSLTGYTPELYAGDIRDRTLLDSIFAAHPIHAVIHFAGLKAVGESVNRPLEYYNNNVFGTLVLLEAMRAAQVKNLIFSSSATVYGDQPQIPYVESFPTGSPSSPYGRSKLMVEQILQDVQLADPQWNMTILRYFNPVGAHPSGLMGEDPQGIPNNLMPFIAQVAVGRRESLAIFGNDYPTPDGTGVRDYIHVVDLADGHVAAMKTLHGKPGVHIFNLGAGVGHSVLQVVAAFSKACGKPLAYHFAPRREGDLPAYWADATKAAEQLGWRVSRSLDEMAADTWHWQSKNPQGYPD

SEQ ID NO: 2642 - protein, 404 aa, Idiomarina loihiensis L2TR
MRRAVITGLGIVSSIGNNQEEVLESLRTGKSGITRSESFAEMGLRCQVWGEVKLDPKDHIDRKALRFMGDSAAYAYIAMAQAIEDSGLTEEQVSHPRTGLVVGSGGASGEHQVAAADILRERGVKKVGPYMVPRCMASTTSACLATPFKIKGVNYSISSACATSAHCIGHALELIQFGKQDRVFAGGGEELHWTLGMEFDAMGALSTKYNDTPEKASRTYDQGRDGFVPAGGGGILVIEELEAAKARGAKIYGEIVGYGATSDGYDMVAPSGEGAVRCMKMAMETVDTPIDYLNTHGTSTPVGDVKELEAIREVFPEKTPMISATKAMTGHALGAAGVHEAIYSLLMLKNGFVTPSINIEALDEKADGMNIIQQTTEAPLRTVMSNSFGFGGTNASLVMRQYSE

SEQ ID NO: 2643 - protein, 457 aa, Cryptococcus neoformans var. neoformans JEC21
MQIFVKTLTGKTITLEVESSDTIDNVKAKIQDKEGIPPDQQRLIFAGKQLEDGRTLSDYNIQKESTLHLVLRLRGGMQIFVKTLTGKTITLEVESSDTIDNVKAKIQDKEGIPPDQQRLIFAGKQLEDGRTLSDYNIQKESTLHLVLRLRGGMQIFVKTLTGKTITLEVESSDTIDNVKAKIQDKEGIPPDQQRLIFAGKQLEDGRTLSDYNIQKESTLHLVLRLRGGMQIFVKTLTGKTITLEVESSDTIDNVKAKIQDKEGIPPDQQRLIFAGKQLEDGRTLSDYNIQKESTLHLVLRLRGGMQIFVKTLTGKTITLEVESSDTIDNVKAKIQDKEGIPPDQQRLIFAGKQLEDGRTLSDYNIQKESTLHLVLRLRGGMQIFVKTLTGKTITLEVESSDTIDNVKAKIQDKEGIPPDQQRLIFAGKQLEDGRTLSDYNIQKESTLHLVLRLRGGQ

SEQ ID NO: 2644 - protein, 473 aa, Mycobacterium leprae TN
MMRVKARMNNECSRLIIDCHITSMARFTVMDDRRVADIKRGQAARNAKLASIPVGLAGRAVLGLGKRLTGKSKDEVNTKLIEKTAHQLFSVLGELKGGAMKVGQALSVMEAAIPEEYGEPYREALTKLQKDAPPLPVNKVHRVLDAQLGTKWRDRFSSFNDTPVASASIGQVHKAVWSYGREVAVKIQYPGADEALRADLKTMQRMVGILKQLSPGADIQGVVDELVERTEMELDYRLEADNQRAFAKAYQGDPRFVVPNVVASAPKVIIQEWIDGVPMAEIIRNGTAQQRDRMGKLLLELTFDSPRRLEMLHGDAHPGNFMLLSDGRMGVIDFGAIAPLPGGFPVELGMSIRLARDKNYNLLLQTMEKAGLIQKGRQVSVRDIDEMMHQYVEPIKVEVFHYTRKWLQQISLDRSVSHIKTARQLDLPATLALPMRVIASVGAILCQLDAHVPTKALTEKLVPGFAEPDTAIV

SEQ ID NO: 2645 - protein, 336 aa, Bacteroides thetaiotaomicron VPI-5482
MIKVGINGFGRIGRFVFRAAMKRNDIQIVGINDLCPVDYLAYMLKYDTMHGQFDGTIEADVENSKLIVNGQAIRITAERNPADLKWDAVGAEYVVESTGLFLSKDKAQAHIEAGAKYVVMSAPSKDDTPMFVCGVNEKTYVKGTQFVSNASCTTNCLAPIAKVLNDKFGILDGLMTTVHSTTATQKTVDGPSMKDWRGGRAASGNIIPSSTGAAKAVGKVIPALNGKLTGMSMRVPTLDVSVVDLTVNLAKPATYAEICAAMKEASEGELKGILGYTEDAVVSSDFLGDTRTSIFDAKAGIALTDTFVKVVSWYDNEIGYSNKVLDLIAHMASVNA

SEQ ID NO: 2646 - protein, 528 aa, Arabidopsis thaliana
  misc_feature (422)..(422): Xaa can be any naturally occurring amino acid
  unsure (1)..(528): unsure at all Xaa locations
MENQEEDEVVLAKVTSEVEDNFEDEGLVSNSTLEKVAAAKKYIENHYNRRMRHIQQRKERRWVLEQKIASLDVSEKEQLELLEDLQRKETEYTRLMRNRLCVDDFDLLSIIGRGAFGEARLCREKKTGNIYAMKKLKKSEMLSRGQVEHVRAERNLLAEVASDCIVKLYYSFQDPEYLYLIMEYLSGGDVMTLLMREETLTETVARFYIAQSVLAIESIHKHNYVHRDIKPDNLLLDKYGHMKLSDFGLCKPLDCRNISAMNVNEPLNDENINESIDGDENCSIGRRGRRWKSPLEQLQHWQINRRKLAYSTVGTPDYIAPEVLLKKGYGVECDWWSLGAIMYEMLVGYPPFYSDDPVTTCRKIVSWRTHLVFPEGARLTPEARDLICRLLCDSEHRLGSHGAGAEQIKAHTWFKDVEWEKXLYEMDAAFKPVVNGELDTQNFMKFDEVECPKPARTGSGPSWKVSITPQNINFVGYTYRNFDAVRGSRHSLDIKGSVSPPRSSTDSTRSDSAIDYTKLSTGGDGSQQ

SEQ ID NO: 2647 - protein, 585 aa, Thermoactinomyces vulgaris
MLLEAIFHEAKGSYAYPISETQLRVRLRAKKGDVVRCEVLYADRYASPEEELAHALAGKAGSDERFDYFEALLECSTKRVKYVFLLTGPQGEAVYFGETGFSAERSKAGVFQYAYIHRSEVFTTPEWAKEAVIYQIFPERFANGDPSNDPPGTEQWAKDARPRHDSFYGGDLKGVIDRLPYLEELGVTALYFTPIFASPSHHKYDTADYLAIDPQFGDLPTFRRLVDEAHRRGIKIILDAVFNHAGDQFFAFRDVLQKGEQSRYKDWFFIEDFPVSKTSRTNYETFAVQVPAMPKLRTENPEVKEYLFDVARFWMEQGIDGWRLDVANEVDHAFWREFRRLVKSLNPDALIVGAIWHDASGWLMGDQFDSVMNYLFRESVIRFFATGEIHAERFDAELTRARMLYPEQAAQGLWNLLDSHDTERFLTSCGGNEAKFRLAVLFQMTYLGTPLIYYGDEIGMAGATDPDCRRPMIWEEKEQNRGLFEFYKELIRLRHRLASLTRGNVRSWHADKQANLYAFVRTVQDQHVGVVLNNRGEKQTVLLQVPESGGKTWLDCLTGEEVHGKQGQLKLTLRPYQGMILWNGR

SEQ ID NO: 2648 - protein, 228 aa, Mycobacterium avium subsp. paratuberculosis K-10
MDSMRQRILVVDDDASLAEMLTIVLRGEGFDTAVIGDGTQALTAVRELRPDLVLLDLMLPGMNGIDVCRVLRADSGVPIVMLTAKTDTVDVVLGLESGADDYIMKPFKPKELVARVRARLRRNDDEPAEMLSIADVEIDVPAHKVTRNGEQISLTPLEFDLLVALARKPRQVFTRDVLLEQVWGYRHPADTRLVNVHVQRLRAKVEKDPENPTVVLTVRGVGYKAGPP

SEQ ID NO: 2649 - protein, 321 aa, Malus x domestica
ILPFKLPAIGPNDVRIRIKAVGICGSDVHYLRTMKCADFEVKEPMVIGHECAGIVDKVGSEVKHLVPGDRVAVEPGISCSRRQQCKGGQYNLCPDMKFFATPPVHGSLANQIVHPADLCFKLPENVSLEEGAMCEPLSVGVHACRRANVGPETTVLIVGAGPIGLVSVLAARAFGAPRIVIVDMDDRRLAMAKSLGADGTVKVSIKMEDLDDEVAKIKEAMGSEVDVTFDCVGFNKTMSTGLNATRPGGKVCLVGMGHGVMTVPLTPAAAREVDVVGVFRYKNTWPLCLEFLRSGKIDVKPLITHRFGFTEKEVEEASLEF

SEQ ID NO: 2650 - protein, 405 aa, Arabidopsis thaliana
MNSILSSVLPAPEDPVLSVIFACRDDPSPVKLNLSAGTYRTEEGKPLVLDVVRRAEQQLANDLSRDKEYLPLNGLPEFNKLSTKLILGDDSPALKENRVVTTQCLSGTGSLRVGAEFLATHNKESVIFVPNPTWGNHPRIFTLAGLSVQYFRYYDPKSRGLDFKGMLEDLGAAPPGAIVVLQACAHNPTGVDPTFEQWEKIRRLVRSKSLLPFFDSAYQGFASGSLDADAQAVRMFVADGGECLIAQSYAKNMGLYGERIGSLTIVCTSEDVAKKVENQVLLVVRPMYLTPPIHGASIVATILKNSDMYNDWTIELKGMADRIISMRQQLYAALEARGTPGDWSHIIKHIGMFTFTGLSEEQVRLMAKEYHIYMTYDGRISMASLSSKTVPQLADAIHAVVTRIA

SEQ ID NO: 2651 - protein, 596 aa, Yarrowia lipolytica CLIB122
MNNNAPAIVRSLALLNSLRDRTDLLSRQLEDLTSKCSSDPDAYPLSSLSVRREISSIYNQLTMLQHNSAVKAADVARLVEGELAKGRQALRVLASGEDGDQVVREADTSDTRDNHDIHGVRAQRQDTQGAIPQVAFELPPEVLNGDTNGVLEEDDRGHVEKELQASSEQELEEAEETATAAAQSEQTNGSVQEVDEPVEGVGADEEPVEEPVEEPVEEPVEEPVEEPVEQVTETPITEEVRSPKKKKSGKSLKKKEKRSEALPESPPDSIPASLSVNSPPPADVSATTASEEAIPLIPSTPPDDEDKKQHSKNSRRRKRDNRILHELSSLDIVNVNEEASKRRKRRRSEVEVEEKESVGGENKQEHEEEEENEEEEENKEEEENKEEEENKEEEENEEEEENEEEEEATEEGEVETTPEVDTEAQDETVPSQSKVPPVADDVVASPPAKRRRTRSQSSSKEKPLNPIKEVVEEAVEEDTKEEDKEGLGEAKSTANRRLPPPTPPVEDVFCTCRKGSQGRMIACDSPKCKTEWFHMKCVGLKHPPRGDWYCDACAKIRADRKARKKELGAKNKMSKQAKKAQEEGTEASRPRRTRKR

SEQ ID NO: 2652 - protein, 319 aa, Malus x domestica
ILPFKLPAIGPNDVRIRIKAVGICGSDVHYLRTMKCADFEVKEPMVIGHECAGIVDKVGSEVKHLVPGDRVAVEPGISCSRCQQCKGGQYNLCPDMKFFATPPVHGSLANQIVHPADLCFKLPENVSLEEGAMCEPLSVGVHACRRANVGPETTVLIIGAGPIGLVSVLAALAFGAPRIVIVDMDDKRLAMAKSLGADGTVKVSTKMEDLDDEVAKIKEAMESEVDVTFDCVGFNKTMSTGLNATRPGGKVCLVGMGHGMMTVPLTPAAAREVDVVGVFRCKNTWPLCLEFLRSGKIDVKPLITHRFGFTEKEVEEASL

SEQ ID NO: 2653 - protein, 465 aa, Bacillus anthracis str. A2012
MTIVTFSKSTTDKPSYTYEELSVKNKAYVWHPFTQMKDYLEEDPVIIERGEGRKLYDVNGNEYWDGVSSIWLNVHGHQVPELDEAIREQLNKIAHSTMLGLANVPSILLAEKIIEVVPEGLKKVFYSDSGSSAVEIAIKMAFQYWQHKGKPKKQRFVTLKEAYHGDTIGAVSVGAIDLFYQVYSSLLFEAIKMPYPYTYRSPYGNDKAEIVKKHLEEMEELLKDKHEEIAAIIVEPLMQGAGGMITMPKGYLRGLRNLCTKYNVLFITDEVATGFGRTGKMFACEHENVTPDILTAGKGLTGGYLPVAITVTTDEIYNAFLGSYEEQKTFFHGHSYTGNPLGCAVAIANLELYEKTNLIEEVARKTEYVATQLEELFACKHVGDIRQCGLMVGIELVKNKETKEAFEWTERVGVQVCKRSRELGMILRPLGNTIVFMPPLASTIDEIDEMLRILYKAISDITEGE

SEQ ID NO: 2654 - protein, 395 aa, Thermus thermophilus HB8
MSLDLRARVREELERLKREGLYISPKVLEAPQEPVTRVEGREVVNLASNNYLGFANHPYLKEKARQYLEKWGAGSGAVRTIAGTFTYHVELEEALARFKGTESALVLQSGFTANQGVLGALLKEGDVVFSDELNHASIIDGLRLTKATRLVFRHADVAHLEELLKAHDTDGLKLIVTDGVFSMDGDIAPLDKIVPLAKKYKAVVYVDDAHGSGVLGEKGKGTVHHFGFHQDPDVVQVATLSKAWAGIGGYAAGARELKDLLINKARPFLFSTSHPPAVVGALLGALELIEKEPERVERLWENTRYFKRELARLGYDTLGSQTPITPVLFGEAPLAFEASRLLLEEGVFAVGIGFPTVPRGKARIRNIVTAAHTKEMLDKALEAYEKVGKRLGIIR

SEQ ID NO: 2655 - protein, 1021 aa, Arabidopsis thaliana
MAKRGYKLQEFLAHSANVNCLSIGKKTSRLFITGGDDYKVNLWAIGKPTSLMSLCGHTSPVDSVAFNSEEVLVLAGASSGVIKLWDLEESKMVRAFTGHRSNCSAVEFHPFGEFLASGSSDTNLRVWDTRKKGCIQTYKGHTRGISTIEFSPDGRWVVSGGLDNVVKVWDLTAGKLLHEFKCHEGPIRSLDFHPLEFLLATGSADRTVKFWDLETFELIGTTRPEATGVRAIAFHPDGQTLFCGLDDGLKVYSWEPVICRDGVDMGWSTLGDFCINEGKFIGCSYYRNSVGIWVSDISELEPYGAVSEDKNECMVKRFSVLNDQSERMGSGPRGSVSPDYETREIKNIYVDSTGGNLNVAQNPGSLKATLPLESGKVATMVSEKQNAAYFGPAGDKYSSTSRDSDSGEESSYSERESIPFSRTKSGMLLRPAHVRKTLAKFEESKQSAVVQSATRKKSGLAVEEEPQTQNAFLSEQNASKPFDAEDSIIKGITNKFEKALSSEPPTDEANRMFLKPPRIHRSSNSKYNDTRRAMSADPATFGKGGMENSGDVEDIPSKTERVLSREKPGDEQKNTEYPSGSRELNPVKIVEGVNVVSGRTRSLVEKFERGEKTTHTEGASTTIEQNNNAVQEDPRKTSRQTGETPVISTRRARSTPARVMPIVLNRDSNVTSDEPPLTQPARTSSFPVMPVILNQASNVTYDEPSVALTQESRTSHARILPVTFNQATNITSEEASVTLRRQRRNSAARVRPVLLSQATSHECPVTSVRPLRTSPARVMPTKLNQSVNMTSDTSHIASMHRVSPTQMLATPTVIDQVADMTLDETHATQIQPACDNMPQKEEPNISGREDDGDIWEILMRTHSEVLNTLQSRLTKLQIVRHFWERSDIKGAIAALRKLSDHSVQADVINILTDKTEILTLDLFSQLAPVLTGLLGSKTERPVNVSLEMLLKLVAVFGTVIQSTVSARRVVGVDLHAEERLQICQSCSAELQKVQKILPLLTRRGGLIARKAQELNLVLQTP

SEQ ID NO: 2656 - protein, 862 aa, Rhodospirillum rubrum
MRDGLRQGLGSTLGRRVTRSLLIGIVVLEILVVAPSAILHRRSLLDDLEADARALGLAAAAPPEASLGEWGRRLGVLLGDERITGAQLLRNDFAVAGIGDRPDSHPGSQGRHADDGHSLDIAIPLTASETLTLRLDKHTITKKLWTEIGWLALMTLVMAAAVILIAAIVAGRLVLLPLLDLRRLVVDIRPGEGRGPSSEAIGRTDELGDLFRAVEDLRRRIEMSLLEAATQARFPSENPNPVIRTSDSGGLLYANASARLRPGFLDGETLHPTIIALVRETTGRGEIMTSEIRLGTRIYLLTAVPITHDRYVNIYASDVTDRVKAEIALRSLNESLEAQVLTRTRDLAESEARTRAIIATMVDGLIVMDDQGRIDLFNAAAQRIFGYDESEVVGQNAALLMSAEDAAGHAEPFGLHLWDGRSPLLNGTRKVIGRRKNGASFPLAVAISALPAPPPGGAPARRLFTGVVRDISDQIRHESDLRKVKDEAEVANRAKSDFLAVMSHELRTPLNGVLGMADLLCDTPLDAEQRRYTRTIAISAEALLVIINDILDLSKIEAGHLDLESRPFDPATLLEGVRTLMEGPARDKAIALRTSIEGAKPPLRLGDEGRLRQILLNLANNGVKFTEKGSLTLRLKAGTGGALRFEVEDTGIGIPKEKQDTLFHDFTQVSASTARRFGGSGLGLSICRRLVGLMGGRLGFDSTPGVGSLFWFEVDLPEVVASQSPPPPPFQGPPLSILVVEDNEINRQVALGLLTKLGHRVTCVDDGAAAVRVVDTMPFDLILMDVQMPGMDGYEATRLIRGKPAPVGGLPIVAMTANATSGDVAAAMAAGMTGYLSKPITRKRLAEALMAHGPGATVSTTG

SEQ ID NO: 2657 - protein, 350 aa, Polaromonas sp. JS666
MACWGNEVKSGEMFHRKLLNEMVVFYRKEDGTAVALQDRCPHRFIPLHLGKIVGDSIECAYHGLTFDCSGKCVKNPHGDGKVPAAARVRSYPVAEKHGMLWIWMGSQAADPVTIPDYSVLESEAGFATSRGYLHIEANYELMGENLLDLSHITYLHDGYLGSPEQVGADQVLKEEGGKIHCDRWMPNISVPPIFDMVYRRDGKPVDMWTHMTWIPPSCFLLDSGVHEVGGKREDHGWYYGVHILTPESEKTVHYHFAAAMPPGTRMTPDETAKFSALRRHAFEAQDKPIINAQQAAIGDNDFWEMKPVLLSVDAGPVRMRRAIERMTKEDAAIETPAVPIKVVRAAPASV

SEQ ID NO: 2658 - protein, 394 aa, Ashbya gossypii ATCC 10895
MFRAAGRQMIAGTRAAAWRALSGARARAAMRPVRSARAAPLVQSRGVKQISFGGTPETVYERADWPREKLLEYFKNDTLALIGYGSQGHGQGLNLRDTGLKVVVGVRKGGASWKAAVEDGWVPGENLFDVVEAVERGTIVMNLLSDAAQSETWPTLRPLLTPGKTLYFSHGFSPVFKDLTHVEPPKDIDVILVAPKGSGRTVRSLFLEGRGINSSYAVWNDATGRAHEKAQALAVAVGSGYVYETTFEKEVNSDLYGERGCLMGGIHGMFLAQYEVLRENGHSAFEAFNETGEEATQSLDPLIGKHGMDYMYDACSTTARRGALDWYPIFKNALKPVFRDLYESTRNGSETKRSLEFNSQPDYRDKLEAELQTIRDMEIWKVGKEVRKLRPENN

SEQ ID NO: 2659 - protein, 453 aa, Francisella tularensis subsp. tularensis SCHU S4
MSNNHFDVISLGGGSGGIASAVQAAKFGKKVAIIEKRELGGTCVNRGCVPKKAMWYGANLAEILKHDVAGYGFDVEVKGFNWAKLKEKRATYIGNIHGFYDRLLDKWNITHFNNWGKFKDNKTIVLDDGAELTADHIFISPGAYPIVPKNIEGAELGITSDEFFELEETPKKAVIVGGGYIGVEIAGVLNAHGTDTTIMVRRDKPLMEFDNCISDALVECMQMTDLNIMNHTNITKVEKTGSTLKITTDTDKVLEDVDTLIWATGRAPNTHNLGIENTDIRITDKGVIPANEWSETNVAGVYSLGDASGVPQLTPVAIKTGRYLARRLFNGETNLKANLEYIPTVIFSHPAIGTVGLTEKEARDKYGDENVKVYKSRFTALYCAISGHRMPTVMKLVVTGDNEKIVGCHMIGLNVDEMLQGFAVAINMGATKRDFDDTIAIHPTSSEELVTLV

SEQ ID NO: 2660 - protein, 253 aa, Borrelia burgdorferi B31
MLGDFMYKLVLVRHGESEWNKENLFTGWTDVKLSDKGIDEAVEAGLLLKQEGYSFDIAFSSLLSRANDTLNIILRELGQSYISVKKTWRLNERHYGALQGLNKSETAAKYGEDKVLIWRRSYDVPPMSLDESDDRHPIKDPRYKHIPKRELPSTECLKDTVARVIPYWTDEIAKEVLEGKKVIVAAHGNSLRALVKYFDNLSEEDVLKLNIPTGIPLVYELDKDLNPIKHYYLGDESKIKKAMESVASQGKLK

SEQ ID NO: 2661 - protein, 419 aa, Sulfolobus solfataricus
MEEVLSSSLYTQQVKKLYKVGELLGLDNETLETLSQPERIIQVKIQIRGSDGKLKTFMGWRSQHNSALGPYKGGVRYHPNVTQDEVEALSMIMTWKNSLLLLPYGGGKGGVRVDPKKLTREELEQLSRKYIQAIYKYLGSELDIPAPDVNTDSQTMAWFLDEYIKITGKVDFAVFTGKPVELGGIGVRLYSTGLGVATIAKEAANKFIGGVEEARVIIQGFGNVGYYAGKFLSEMGAKIVGVSDSKGGVINEKGIDVGKAIEIKEKTGSVINYPEGRKVTNEELLISDCDILIPAALENVINKFNAPKVKAKLIVEGANGPLTADADEIMRQRGIAVVPDILANAGGVVGSYVEWANNKMGEIISDEEAKKLIVDRMNNAFNTLYDYHQKKLEDHDLRTAAMALAVDRVVRAMKARGIL

SEQ ID NO: 2662 - protein, 461 aa, Ralstonia eutropha JMP134
MVESNNDGTLKRGLKNRHIQLIALGGAIGTGLFLGIAQTIKMAGPSVLLGYAVAGIVAFFIMRQLGEMVVDEPVAGSFSYFANKYCGHFAGFMSGWNYWVLYILVSMAELSAVGIYVQYWWPGIPTWISALAFFLIINAINLSSVKSFGEMEFWFSIIKVAAIIGMIGFGGYLLMSGNAGPQASITNLWQHGGFFPNGLGGLVMAMAVIMFSFGGLELVGITAAEADQPEKSIPKATNQVIYRILIFYVGALAVLLSLYPWENVVTGGSPFVLIFHALNSNWVANVLNVVVLTAALSVYNSGVYCNSRMLFGLAQQGNAPKSLLKVSKRGIPLTALGVSAAATGLCVLINYFMPGKAFELLMGLVVSALIINWAMISIIHLKFRADKRKAGQETRFKSFGYPLTNYLCLAFLGGILVVMYLTDGLRISVYLIPVWLAVLGISYRLRQKNAVPALQGSVSAQ

SEQ ID NO: 2663 - protein, 368 aa, Magnetococcus sp. MC-1
MSVHPLSLRHWIVWALLFLLAGMLFGPAVERVFIAFSTEPRAVTARGNLAEDERNTIDIFKTAKPSVVYITTLKHVRDFWTRNILKTPQGTGSGFVWDNQGHIVTNWHVVKKATEAIVRLSDQTSYNAVLVGASPEHDLAVLRIKTSASHVQPLPIGESHNLQVGQKVYAIGNPFGLDHTLTTGVISALERSIDSEAGAVMEDLIQTDAAINPGNSGGPLLDSAGRLIGINTAIYSPSGAYAGIGFAVPVDEVNRVVPQLIAQGRYQRPSLGIQASDRSSAQILSRFEITGVLVLGVASGSAAQRAGIQASRLDERGIVLGDVIVAIADQPTENIDQLQKALAKYRVGDTVKITLWRQGENQQLEVVL

SEQ ID NO: 2664 - protein, 456 aa, Haemophilus influenzae R2866
MTKHYDYIAIGGGSGGIASLNRAASYGKKCAIIEAKHLGGTCVNVGCVPKKVMFYGTHIAEAINNYAPDYGFDVEVKKFDFSKLIESRQAYISRIHTSYNNVLAKNNIDVINGFGKFVDAHTVEVTLADGTKEQVTADHILIATGGRPYRPNIKGQEYGIDSDGFFALTELPKRAAVIGAGYIAVELSGVLNSLGVETHLLVRRHAPMRNQDPLIVETLVEVLAQDGIQLHTNSTPSEIVKNADGSLTVRCDGQSDITVDCVIWAAGRVPATDKIGLENAGVETNEHGYVKVDKYQNTNVKGIYAVGDIIENGIELTPVAVAAGRRLSERLFNNKPTEYLDYSLVPTVVFSHPPIGTVGLTEPQAIEQYGAENVKVYKSSFTAMYTAVTQHRQPCKMKLVCVGKDEKVVGLHGIGFGVDEMIQGFAVAIKMGATKADFDNTVAIHPTGSEEFVTMR

SEQ ID NO: 2665 - protein, 296 aa, Triticum aestivum
  misc_feature (128)..(128): Xaa can be any naturally occurring amino acid
  misc_feature (140)..(140): Xaa can be any naturally occurring amino acid
  misc_feature (153)..(153): Xaa can be any naturally occurring amino acid
  misc_feature (248)..(248): Xaa can be any naturally occurring amino acid
  misc_feature (253)..(253): Xaa can be any naturally occurring amino acid
  misc_feature (256)..(256): Xaa can be any naturally occurring amino acid
  misc_feature (258)..(258): Xaa can be any naturally occurring amino acid
  misc_feature (273)..(273): Xaa can be any naturally occurring amino acid
  misc_feature (287)..(287): Xaa can be any naturally occurring amino acid
  unsure (1)..(296): unsure at all Xaa locations
VSVLLARMAVSVLAILLASFALAAASFDKEFDITWGDGRGKILNNGQLLTLGLDKVSGSGFQSKHEYLFGKIDMQLKLVPGNSAGTVTAYYLSSQGPTHDEIDFEFLGNVTGEPYTLHTNVFTQGQGXQREQQFRLWFDXPTNDFHTYSILWXNPKHIIFVVDDMRIRDFRNLEGKGIAFPKNQPMRVYSSLQNADDWATQGGRVKTDWSHAPFCASYRGFKADACVVTAAGRPRCGTSVGAEVAPGXGAAGXCFXPXLALARQLRMWWGRSXYMKKNPCTDPKCVXKGLPAECSM

SEQ ID NO: 2666 - protein, 323 aa, Arabidopsis thaliana
MMTRVECFNPHRWIILHVAIIIQSKANAQSFSPSPPDLQTGHTPSKTTVFAVLVTLFFLTGLLSVYIRHCARSNPDSSTRYFRNRANDGSSRRGGLDNAVVESFPVFAYSSVKESKIGSKDLECAICLNELEDHETVRLLPICNHLFHIDCIDTWLYSHATCPVCRSNLTAKSNKPGDEDDGVPLAAMRDHVVVDIETVEVAKSHHRRLSSEISGKFPRSNSTGHSMDRFSDGTERFTLRLPDDVKMRLMAVKGRRLKRTRSFDVDLTAEHYCRSGEESSNTIGSGAKSGRVNWPDRWGLTLFVSKSNSGSVRSQKSNGEPLK

SEQ ID NO: 2667 - protein, 342 aa, Pisum sativum
MSSLSDLINFNLSDSTEKIIAEYIWVGGSGIDIRSKARTLPGPVSDPAKLPKWNYDGSSTNQAPGKDSEVILVICDVYTPAGEPLPTNKRYNAAKIFSHPDVAAEVPWYGYGIEQEYTLLQKDINWPLGWPIGGYPGKQGPYYCGIGADKAYGRDIVDAHYKACLFAGINISGINGEVMPGQWEFQVGPSVGISAGDEIWAARYILERITEIAGVVVSFDPKPIPGDWNGAGAHANFSTKSMRENGGYEVIKKAIEKLGLRHKEHIAAYGEGNERRLTGKHETADINVFSWGVANRGSSIRVGRDTEKDGKGYFEDRRPASNMDPYVVTSMIAETTILWKKP

SEQ ID NO: 2668 - protein, 532 aa, Hordeum brevisubulatum
MGQCCSRATSPDSVQGGANGYGYSHQPKQAQAPPSYNNAQPPPRAEVRYTPPAMNPPVVPPVVAPSKPMPDTILGKQYEDVRSVYSLGKELGRGQFGVTYLCTEISTGRQYACKSISKRKLVSKADKEDIRREIQIMQHLSGQPNIVEFCGAYEDKGSVHVVMELCAGGELFDRIIAKGHYSERAAATICRGVVNVVNVCHFMGVMHRDLKPENFLLATKDENAVLKATDFGLSVFIEEGKMYRDIVGSGLLCCSEVLRRNYGKEIDVWSAGVILYILLSGVPPFWAETEKGIFDAILQGEIDFESQPWPSISESAKDLVRKMLAQDPKKRISSAQVLRHPWLREGEASDKPIDSAVLSRMKQFRAMNKLKKMALKVIASNLNEEEIKGLKQMFMNMDTDNSGTFTYEELKAGLAKLGSKLSEAEVKQLMDAADVDGNGSIDYVEFITATMHRHKLERDEHLFKAFQYFDKDNSGFITRDELETALIEHEMGDADTIKDIISEVDTDNDGRINYEEFCAMMRGGIQQPIKLK

SEQ ID NO: 2669 - protein, 1005 aa, Cryptococcus neoformans var. neoformans JEC21
MTSFNPAPAQIQAAQDHTYGSMPTPTYMGMVDTGAQWDYVGRRGSSRSREPSASPQRAATESGIPRTSTHAASASASSSYAPVAGASGQASSAPHEPTIREEATAVVDRSMRAHQQTTGPSNGNGNSQPKKSKVRMVGDWQLNKTLGAGSMGKVKLATNIVTKEKCAVKIIPRYTDANRKEETTRTPEEVEKQRLKDESKEIRTIREAHISLLLHHPYICGMREFISHQNHHYMVFEFIDGGQMLDYIISHGRLRERAARKFARQIGSALNYCHQNSIVHRDLKIENILISKNGNIKLIDFGLSNLYSPSRHLSTFCGSLYFAAPELLNARPYTGPEVDVWSFGIVIYVLVCGKVPFDDQSMPALHAKIKRGVVEYPSWLSAEVKSLLSRMLVTNPAERATLAEVLSHPFMTKGYDGPPDSFLIRRELLRAEEIDMNVVEAMEGFTFGDANTIYRNLHSILTSEDYLHCVATFEAHREKLRTSSPGVSTNDPSDSPKKKRFSGFDLKKRLFKEDKKVEEAPFKEKVRDPTKGYDPLISIYFLAREKIERERVFGPGFFASSQLSLDTFNTSQGYGMAVPNLPPPASTHVMGHDSSRGPDFASEPRPRSDDVPNPVMAHPSADREQSKLADIPSAVHRRQPSLSQPPLPSSMPAAVERSADEGLTKKFSMLGRGPRPPSAGPAGPSRSASTKRESMTASPSMPIQEHRRATTVVHSDKSKQERRVSVGSFTNSVSKASGLARRASQRDRPPATPPDSRWLNAPAEAEEYHQVETSVRPSSTPREPEPDTANEPQSYDDVKPSYLKGIFSVSTTSTKPANVLIRDIAMVLDRIGIKHRPIKGGFECVHMPSIDLASVVNGDEASTSLSNVPSHASGARRKQSLRRKGSKVNMNGISSNGAGSRATSPGPHRVLTGNSSGTVSGGDVAHLSVPSGKNRHHVGTVEEDEVDAWALAQSGGAGSSLIVRFEIFVVKVPVLPLHGIQFRRVGGDGWQYQMLAKAILREMRL

SEQ ID NO: 2670 - protein, 228 aa, Synechococcus elongatus PCC 7942
MQTSPFQLVIFDCDGVLVDSERITNRVFADMLNELGLLVTLDDMFEQFVGHSMADCLKLIERRLGNPPPPDFVQHYQRRTRIALETHLQAVPGVEEALDALELPYCVASSGDHQKMRTTLSLTKLWPRFEGRIFSVTEVPRGKPFPDVFLLAADRFGVNPTACAVIEDTPLGVAAGVAAGMQVFGYAGSMPAWRLQEAGAHLIFDDMRLLPSLLQSSPKDNSTALPNP

SEQ ID NO: 2671 - protein, 641 aa, Rhodococcus erythropolis
MCGLLGLLTSGGTSEDAVSRVDQAMHCLRHRGPDEHGTWNDDHLVFGFNRLAIIDIAHSHQPLRWGPPENPERYALTFNGEIYNYLEIRAELVKDHDAKFFTEGDSEAIVAAFHYWGEDAVRRLRGMFAFAIWDTDTRELFIARDPFGIKPLFIATGAGGTAFGSEKKSLLELTDLIGIGTELDPRAIEHYTVLQYVPEPETLHKEIRRLESGSFARVRPGEEPTFTRYFTPKFPAKPFAPGTEKARYQEIAEALEDSVAKHMRADVTVGSFLSGGIDSTAIAALAMRHNPNLITFTTGFEREGYSEVDVAAESAAAIGAKHVVKVVSPAEFAAAIPEIVWYLDDPVADPALIPLWFIAKEARKHVKVVLSGEGADELFGGYTIYREPLSLKPFEYLPKGLRRAAGKLSERIPDGTRGKSLLNRGSLTLEERYYGNARSFNDAQLRAVLRDFRPEWTHQDVTAPIYAQSRDWDPVARMQHLDLFTWLRGDILVKADKMTMANSLELRVPFLDPEVFDVASRVPLDQKITKDTTKYALRQALEGIVPHHVLHRAKLGFPVPLRHWLRGTELFDWAHLQIEESGTDHIFDKQAVVKMLNDHREGVSDHSRRLWTVLTFMVWHGIFVEKRIVPQIQEPVYPVNI

SEQ ID NO: 2672 - protein, 582 aa, Synechococcus elongatus PCC 7942
MFSSTSLQKHASYNLLWPYLRPQTKTIVQALLCTLVFTAFWPILAFLAGQMVNLLVQGKVWELARLAAITIVGFLIHKAAQYGQDSLMAKAALQIAYNLRVNTYRHIQSLSLSYFEKAKTGDLTYRMTEDIDRVGEVVNKVFHDATPSILQLIVVLSYMIYLNWTLTLAILVIAPIMGFLVGWFGQQMLVFSRRSQSRISDLSSLLTEVFSGIRLVRAFAAEPYEIERFSREAERNREARYRTAWLRAIQYPVIGFLQAASILFIVVLGSWQISTGQLNGPNLGSYVAAIAMLIDPIVHLIDNFNEFKQGQASLDRIDELLSIEPAVQEDPQSRMLPPITGKVEFRQVSFSYRSDSAPVLRQLNLTVEPGEAVALVGASGAGKSTLVNLIPRFYDPQDGEILVDGIPIRSVTLGSLRRQIGIVPQETILFSGTIAQNIAFGQRQFDRAAVEEAARIANAHQFISQMPDGYDTWVGERGVNLSGGQRQRLAIARAVLLDPRILILDEATSALDSESETLVQEALERVMQGRTVFIIAHRLATVRNASRILVMERGQIVEAGNHDALLAEAGRYARYYAQQFRA

SEQ ID NO: 2673 - protein, 223 aa, Gossypium hirsutum
MGRGKIEIKRIENTTNRQVTFCKRRNGLLKKAYELSVLCDAEVALIVFSSRGRLYEYSNNNIRSTIDRYKKACSDTSNTNTVTEINAQYYQQESAKLRQQIQMLQNSNRHLMGDSLSSLTVKELKQVENRLERGITRIRSKKHEMLLAEIEFLQKREIELENESVCLRTKIAEIERLQQANMVTGPELNAIQALASRNFFSPNVIEHPSAYSHPSDKKILHLG

SEQ ID NO: 2674 - protein, 356 aa, Cryptococcus neoformans var. neoformans B-3501A
MLLSLRSSLSRNIIGQSRHLPTISYSVTSSRIRNMSSQAATSSATVAVCQLRSTSDPVHNLKISEKVIRNAVAAGAKACFLPEASDFINPSKTESRKFSRPLPKHEYTTGLQRLAKELGIVISVGVHEGPEDENEERVYNTHVLIGKDGGILASYRKIHLFDVELSKPPAPDGTPRPPQRTGESERILAGQAVTPPVEVEGIGNIGLEICYDIRFPELSIILTRLGAEVLLFPSAFTVKTGRDHWGTLCRATAIQYQSYLIASAQYGAHNSKRTSWGETLAFDPWGRQLGRLRSVDDTPPPKEGEEGDKGVEKLYEDSGEFFLCEIDGTKVKETRGQIPLAIQKRSDIYGVVGEGA

SEQ ID NO: 2675 - protein, 291 aa, Oryza sativa (indica cultivar-group)
MSAAPVVDAEYMAEVERARRDLRALIASKSCAPIMLRLAWHDAGTYDKATKTGGPNGSIRFPQEYSHAANAGIKIAIDLLEPMKQRHPKITYADLYQLAGVVAVEVTGGPTIDYVPGRRDSSDSPEEGRLPDAKKGAAHLREVFYRMGLSDKDIVALSGGHTLGKARPERSGFDGAWTKDPLKFDNSYFIELLKENSEGLLKLPTDKALVEDPTFRRYVELYAKDEDAFFRDYAESHKKLSELGFTPPRSAFIYKSCQKPKSLLMQTAAGVAVAAAVVAWAYLCESNKRLG

SEQ ID NO: 2676 - protein, 1089 aa, Neurospora crassa
MGGESATQSKPISAYPLRAPKPVGQYITNIYKDRISQFYAKGQWEHNNLNAMMYEGVAEGEPHVKLFVWDAPDQDRPTFDEAVKHEFRKTEVGARFGPAWSTHWFKVVLTVPEDLRDKRLLELHWDANNEGMVWTHDGKPLQGLTGGGERTEWILPDSFRDGKEHIIYIEMACNGMFGAAGGGDIIQPPDPNKHFRLDKAEIVAVNPDARQLYIDIWIIGDAAREFPSESWEQHQALKTCNEIIEAFELGNKDSLKKCREIAQQYLGPDVDSARVYDTKRGKAPLVFGIGHCHIDSCWLWPWDETKRKVARSWSNQCDLMDRYPELNFACSQAQQYKWCKTLYPHVWERVKSKVADGRFHPIGGSWVEHDTNMPSGESLVRQFVYGQRFFESNFGKRCQTFWLPDTFGYSSQLPQLCRLAGMTRFLTQKLSWNNINKFPHTTFNWVALDGTQVICHMPPSETYTAEAHFGDVKRSMSQHKSLDQDHTSLLVFGKGDGGGGPTWQHLEKLRRCRGISDTVGLLPRVSLGGSVDDFFDSLERKADSLVTWFGELYFELHRGTYTTQANNKKFNRKAEFVLRDIEQLATIASLKDKDYKYPKKEIDEMWEATLLCQFHDCLPGSSIEMCYDDSDKLYAQIFKTGERLLRDACKALGVFQVDATGVERGIALNTLPWYREELVEISKGDFALAKGVGPLLKLQQYEIMQVDDGVKLHKLSNGVFVLENKRLKVRVEAGTITSLYDKYDRREVIPEGQRANQFVIFDDKPLYWQAWDVEVYHLDTRKELQSSETQVHEEKTHRVSVITKTKISEQSHISTIISLSAAVNELQSYIEVQSTVEWHETMKFLKVEFPVDIRNTEASYETQFGIVRRPTHYNTSWDMAKFEVCCHKFADLSEHGYGVSILNDSKYGFATTGSLMRLSLLRSPKAPDAHADMGAHTIRWAIFPHTGSLGAMTVRKAYEFNNPLKLLESPHSFATLDEQEPPVWFTDNSNPSLILDTIKRAEDDEDVSVETIESPVKKKKGQSVILRIYDSLGGRARGTIETRWPVKRVSKVNLLEDELEEVSGFDVAEGRFEVDLRPFEVASYRLELA

SEQ ID NO: 2677 - protein, 363 aa, Prochlorococcus marinus subsp. pastoris str. CCMP1986
MNNILITGGAGYLGSHACLNLLEAGYGIYIVDSLENSSFESISRVNRFFKEKNKFADNKIKFFKADITNFEKLKIIFEHALCNNQKIIAVLHFAGLKAVSESEENPIKYWEYNVSGSINLFKVMELYDCKNIVFSSSAAVYGNNQNCPIKEDSSLIPSNVYGKTKKTIEEILTDLHFRKNWGVAILRYFNPVGAHHSGIIGENPISNKNNLFPIICEVAKDNNKKLNIFGKDWPTRDGTCLRDYVHVEDIIDGHEKALRLLLNSKHNLIKVNLGTGKGTTVLELINTFKKVNDIKIEYEFSERRIGDCGVLFADSRLSNSILNWKARKTLDDICRDGWRWGLKNPYGYIKNLEELDLSIYCEI

SEQ ID NO: 2678 - protein, 302 aa, Oryza sativa
  misc_feature (254)..(254): Xaa can be any naturally occurring amino acid
  unsure (1)..(302): unsure at all Xaa locations
MASVTYLDDAHSEVIDPPKNEEMLDVTELVDDHTQHSPKPNAMVSGNVRELLECPVCLNAMYPPIHQCSNGHTLCSGCKPRVHNRCPTCRHELGNIRCLALEKVAASLELPCKYQNFGCLGIYPYYCKLKHESQCQYRPYTCPYAGSECTVAGDIQYLVSHLKDDHKVDMHNGSTFNHRYVKSNPHEVENATWMLTVFSCFGQYFCLHFEAFQLGMAPVYIAFLRFMGDDAEAKNYSYSLEVGGSGRKMTWQGXPRSIRDSHRKVRESYDGLIIQRNMALFFSGGDKKELKLRVTGRIWKEQ

SEQ ID NO: 2679 - protein, 1114 aa, Candida glabrata CBS138
MTLIVASLFLPHRPQFEVTASAGETQELIENNLVKLNPLASNEASPQARPNLDNYIRNTRSALNVPFAQGRNVSQESLLSLNNAGNTSGNIDDLVSSEQFLVNLTANATASGTPNPSYHTKGNMGRPNLGAGGSAEEFFSTSNPPSNRGASPVLSIASAPQVQNNLDSTLNNRGSPPPQQLDSQMADPTAHLLKNVSKSLLTQSLHDSTKEASAPMPSSSANSMGQSRYNHANTSIGTAVTPKSRPLPGHSNSSSIIDFSLSRNKQHAPALPALRRIQKNKVGSPTKPSPLNTQPQSSNLKYSKTLHQMHGDSAYNSDWTTGDDSDHLEEHEEPDNDDDLRQEYLVPQFGGFSTTSKVRETLLKSSRELFAQLPWTIVNSDKGNGSLKNAVNTAVNEKTTKENVKWVGTMGIPTDEIPDEIVENIAKVMEEQYNCGAVVTDDITFKGAYKNYCKQILWPTLQYQIPDNPKSKAFEDHSWQYYHRLNQQFAEKIINVYKDGDIIWIHDYHLMLVPGMVREVFPDAKIGFFLHVSFPSSEVFRCLAHREEILEGLIGANSLGFQTKEYARHFLQTSNRLLAADVSDDELKYDGRIVSVKQVPVGIDYFTLREKLKDENVLQWRHLIKERWHGKKLIVCRDQFDRIRGLYKKMLAYERFLKDNPQYIENVVLVQVCIGKSTDLELERQIMVVVDRINSMSPNISLIQPVVFLHQELDFPQYLALNSEADLFMVNALREGMNLTCHEFIGCSSDKNAPLILSEFTGSSSVLSEGAMLVNPWDIKQVAACIKEGLEMSREEKKRNWKKMVKSVITHDSDSWFVSCLQNLNNSWEFTKERSTVFNLRFETFSDDYNDTSKRLFIFKISEPPNSRMISVLNELSSKNRVYIMNSFSKVVNESLYSRVNNIGLIAENGAFVRLNGDWYNIVEDVNWRAEVVKILEDKVERLPGSYYKIADSMIRFHTENAEDQERVSGVIGEAITHINTLFDDAGIHAYLHKNIVFVQQTGLSLNAVKFLLRYYNTAASGDNVTPMINSEQSPRSRSDSISVSQKPIDFLCISGSSSPVIEPLFKLVKDQRNSGMLRHGHSIVYGDTTSSYAREHVNGSNGLFNVLNRLMRS

SEQ ID NO: 2680 - protein, 334 aa, Ashbya gossypii ATCC 10895
MVEPTLKKQRTGNSLAQLKATGTTVVADTGDFQAIAKYAPQDATTNPSLILAAARKEGYQALIDRAVEYGRSRDGSVEQQTEAAVDRLLVEFGKEILKVVPGRVSTEVDARLSFDKDATVRKALEIISLYEQQGVSKDRVLIKIASTWEGIQAARELESQHGIHVNCTLLFSFCQAVAAAEAGVTLISPFVGRILDWYKASTGKTYSGDEDPGVLSVRRIYNYFKKHDYPTIVMGASFRNLDEIKALAGVDFLTFWPASLNQLMTSADPVPQVLDPASAKAQGDDKVSYVEDEPAFRFALNDDAMATEKLAEGIRKFSEDIVTLFAMVEERIRA

SEQ ID NO: 2681 - protein, 455 aa, Rhodospirillum rubrum
MVSNALRDADLSYTIHPYTNLVAHETKGPLIAVRGEGVRVFDDKGKDYIEGMAGLWCASLGFSEPRLAAAAARQMAELPFFHMFSHKSHEPGIRLSEELVKRAPVPMARAFFCNSGSEANDTAIKMIWYINNALGRPQKKKIIARKRAYHGVTVASASLTGLPANHRDFDLPIANILHTSSPDYYREGKPGESEEAFAKRCADELEAMILAEDPNTVAAFFAEPIMGAGGVVLPPKGYFEHIQAVLKKYDILLVADEVICGFGRTGQYWGSQTFGLKPDILTCAKALSSAYMPISAVLVTEEVYKPLRDNSGKIGTFGHGYTYSAHPVAAAVALETLAIYDERDILGNVAVSGARLQERLRSFADHPLVGNVRGIGLIGAIELVADKATHGAFPASDAVGPRVVTKAEEAGVILRAMAGDVVAFSPPLIITPEEVDQMMDRFTVALEAVTAEVLG

SEQ ID NO: 2682 - protein, 300 aa, Rhizobium etli
MITVFGSINMDLIATTDRLPKPGETVAGNSFATAAGGKGANQALAARRAGRYVHMAGAVGKDGFAADALALLDDAGTDLSLVKHVDGPTGTALILVGGDGENMIAVVPGANGLVTAADAETAVGKMSEGDILMLQLEVPVDAVERALSEARVRGVTSILNLAPLTPDAPRLGRLADIVIANETEFERLAGQDGMDAEAREAALHRLHQETGQTLIVTLGGDGVIAIRNGVISRAQGLKIEPVDTVGAGDTFCGYFTASLDEGLRIFASALRRAAVAGSLACLKAGAQPSIPLSQDVADRI

SEQ ID NO: 2683 - protein, 399 aa, Ralstonia eutropha JMP134
MFAHIEAFPGDPILSLNEDFQKDPRTDKVNLSIGIYFDDEGRLPVMEAVEKAEAALLADMGPRPYLPMSGLVAYRNAVQALVFGEDSAARATGRVATLQTLGGSGALRVGADFLKRYFPQSQVWISDPSWENHRVVFERAGFTVNTYPYYDDATGGLKFDAMVDAISKLPKQSIVLLHVCCHNPTGVDLNQDQWRQLIGVLKAKELLPFVDMAYQGFGEGLDEDAFAIRELDRQGVPCLVANSFSKNFSLYGERCGGLSVVCNSAAEAANVLGQLTGAVRANYSNPPTHGARVVAKVLTTPELRTLWQQELAAMCNRITRMREAIHHHLRDHVSGEALSRYLTQRGMFTYTGLTAEQADRLREDHGVYLLRSGRMCVAGLNERNVTVVAKAIAAVLGGK

SEQ ID NO: 2684 - protein, 871 aa, Clarkia concinna
MQPITKSSSTSSELEFLVDKVKRESLSSSSSDTQNLFLSASPYDTAWLALIPHPHHHHHHGPPMFEKCLQWILHNQTPQGFWTAAAGDNISDTDDDVTLDCLLSTLACLVALKRWQLAPDMIHKGLEFVHRNTERLVMKQKPSDVPRWFTIMFPAMLELAGASGLRVDFSENLNRILVELTQNRDDILTREEVGEKKQYSPLLLFLEALPAQSYDSDVLKQIIDKKLSSDGSLFQSPSATARAYMITGNTRCLSYLHSLTNSCSNGGVPSFYPVDDDLHDLVMVNQLTRSGLTEHLIPEIDHLLLKVQKNYKYKKASPKSLYGIAAELYKDSLAFWLLRVNSHWVTPSIFCWFLNDEEIRDHIETNYKEFAAVLLNVYRATDLMFSGEVQLVEARSFATKYLEKILATGNIQKTNADISSSLHKMIEHELRVPWTARMDHVENRIWIEEIASGALWFGKSSYLRLSCLHKINLQQLAVKNYTLRQSVYRDELAEVERWSKERGLCDMGFGREKTGYCYYAFAASTCLPWSSDVRLVLTKAAVVITVADDFFDVEGSMDDLEKLTDAVRRWDAEGLGSHSKTIFEALDDLVNEVRLKCFQQNGQDIKNNLQQLWYETFHSWLMEAKWGKGLTSKPSVDVYLGNAMTSIAAHTMVLTASCLLGPGFPVHQLWSERHHQDITSLLMVLTRLLNDIQSYLKEEDEGKINYVWMYMIENNQVSIDDSVRHVQTIINVKKQEFIQRVLSDKHCNLPKSFKQLHFSCLKVFNMFFNSSNIFDTDTDLLLDIHKAFVSPPQVPKFKPHIKPPHQLPATLQPPHQPRQIMVNKKKVEMVYKSYHHPFKVFNLPKKQSSGHGTMNPRASILAGPNIKLCFS

SEQ ID NO: 2685 - protein, 616 aa, Streptomyces avermitilis MA-4680
MAAAVSSPKHFEQGGTPDPAGTAAASLPAPYTRLYDPTPPPLSAALERGDPHRIKDAMSQHSADQAPTSALATVAAHRDWWRDAVIYQVYPRSFADSNGDGMGDLEGVRSRLPYLRDLGVDAVWLSPFYASPQADAGYDVADYRAVDPMFGNLLDADALIRDAHELGLRIIVDLVPNHSSDQHEWFKRALREGPGSPLRERYHFRPGKGKNGELPPNDWESIFGGPAWTRVTEPDGTPGEWYLHLFAPEQPDFNWEHPAVGDEFRSILRFWLDMGVDGFRIDVAHGLVKAEGLPDLGAHDQLKLLGNDVMPFFDQDGVHDVYRQWRTILDEYAGERIFVAEAWTPTIERTANYVRPDELHQAFNFQYLGTYWDAAELRSCIDRTLDAMRPVAAPATWVLSNHDVTRHATRFANKAGLGTQIRTAGDRRLGLRRARAATLLMLALPGSAYLYQGEELGLPDVVDLPDEVRQDPAYFRGEGQDGFRDGCRVPIPWTREGSSYGFGSGGSWLPQPAGWGELSVEAQQGVTGSTLELYRTALAVRSERPDLGAGDSVTWLEAPAGVLAFRRGEFVCTANTGAAAVTVPAYGSVLVASGEGTVVGTDEAQLPADTTVWWAV

SEQ ID NO: 2686 - protein, 328 aa, Escherichia coli K12
MTRTNLITGFLGSGKTTSILHLLAHKDPNEKWAVLVNEFGEVGIDGALLADSGALLKEIPGGCMCCVNGLPMQVGLNTLLRQGKPDRLLIEPTGLGHPKQILDLLTAPVYEPWIDLRATLCILDPRLLLDEKSASNENFRDQLAAADIIVANKSDRTTPESEQALQRWWQQNGGDRQLIHSEHGKVDGHLLDLPRRNLAELPASAAHSHQHVVKKGLAALSLPEHQRWRRSLNSGQGYQACGWIFDADTVFDTIGILEWARLAPVERVKGVLRIPEGLVRINRQGDDLHIETQNVAPPDSRIELISSSEADWNALQSALLKLRLATTA

SEQ ID NO: 2687 - protein, 1806 aa, Streptomyces avermitilis MA-4680
MDLIPRGSAPRTRRTHRHSRTAAAVAAAALAVSLAQPLEARAATPPAPPSDAKLAAEPARHDATREQFYFVMPDRFANGDTSNDKGGLTGSRLSTGYDPTDKGFYQGGDLKGLTRKLDYIKGLGTTSIWLAPIFKNQPVQGTGKDASAGYHGYWITDFTKVDPHFGTNKDLETLISKAHAKGMKVFFDVITNHTADVVDYEEKSYGYLSKGAFPYLTKDGRPFDDAGYTDGPRKFPAVDGDSFPRTPAVAARKKNAKVPSWLNDPTMYHNRGDSTFAGESSTHGDFSGLDDLWTERPEVVRGMEKIYEKWVRDFGIDGFRIDTVKHVNTEFWTQWATALDAYAKKRGKDDFFMFGEVYSADTSVTSPYVTQGRLDSTLDFPFQDAARSYASQGGSAKKLASVFGDDYKYTTDKANAYEQVTFLGNHDMGRIGYFLNQDNPKATDAELLRKDRLANELMFLSRGNPVVYYGDEQGFTGSGGDKDARQTMFASKVADYLDDDEIGTDRGHASDAYDTSAPLYKEIAALSKLRKDNPALADGIQTERYAADGAGVYAFSRTDARTGTEYVVAVNNADKASAATFATGSADTAFKGIHGTDDVLKSDADKKITVTVPAGAAVVLKAAGRPGTPAAKPSLTLKAPDAGATGTVELSADVDGGRLNRVVFAAQVGNAKWRTLGSADHAPYRVTQTIGKDVPAGTALRYKAVVIDAAGRTASATAASTTGTPPAAETPTASSRDYAIVHYKRPDGDYTDWRLYAWGDLADGESTTWPAGHDFVGRDAYGAFAYVKLKPGASTVNFLVIDKDGDKDVSADRTIDVTKAGEVWVEQGKETVRTERPDYPAQDKTKAVIHYHRADGDLTGWGLHVWTGAATPTDWSKPLEPVRTDAYGAVFEVPLTDGATSLSYIIHKGDEKDLSADRSLDLTADGHEVWLLNGQENHLLPQPAGSAAALDLTTSKAVWIDRNTVAWNGSDAAASTQLLSSRDGSIAVKDGSLTSDDERWLRLSKTSLTDAQKAAFPHLKSYTAWSVDPRDRDRVREALAGQVVASQRAANGAVLAATGVQLAGVLDDLYDATKADLGPTFRGGHPTLAVWAPTAQSVSLELDGAHVRMKRNNATGVWSVTGPASWKGKPYRYVVKVWAPTVRKVVTNKVTDPYSVALTTDSERSLVVDLDDRSLAPSGWSSLKKPKAVPLRDAEIQELHIRDFSVADRTVPAKDRGTYLAFTDKNSDGSRHLRQLAESGTSYVHLLPAFDIATIAEKKSGQQATDCDLASYAADSEKQQECLTAVAAKDAYNWGYDPYHYTVPEGSYATDANGTRRTVEFRRMVKSLNQDGLRVVMDVVYNHTAAAGQAGTSVLDRIVPGYYQRLLADGSVATSTCCANTATENAMMGKLVVDSLVTWAKEYKVDGFRFDLMGHQPKANILAVRKALDALTVAKDGVDGKKIILYGEGWNFGEVADDARFVQATQKNMAGTGIATFSDRARDAVRGGGPFDADPGVQGFGSGLYTDPNSSDANGTPAEQKARLLHYQDLIKVGLSGNLAKYRFTDSSGKEVTGSEVDYNGTGAGYADAPGDALAYADAHDNESLYDALTYKLPKGTPAGDRARMQVLAMATAALAQGPSLSQAGSDLLRSKSLDRNSYDSGDWFNAIHWNCQDGNGFGRGLPMAADNKSKWPYATPLLTSVKVGCDQIEGTSAGYQDLLRIRTTEPDFSLSTAGQVQSKLTFPLSGKDETPGVITMKLGDLVVVFNATPDQQEQTVAALAGKDYALHPVQAAGADPIVKSASYTAKSGMFAVPGRTVAIFSQVAR

SEQ ID NO: 2688 - protein, 212 aa, Paenibacillus macerans [sequence omitted]

SEQ ID NO: 2689 - protein, 444 aa, Oenothera californica subsp. arizonica
IPWMARMDHLEHRRWMEETASNTLLWMGKSSHHRLSCLHNDNLLELALKDYGLRQSTYLTELQQVKRWSKERSLCDLGFGREKTTYCYFACAASTSLPYNSDIRLIVTKAAIVITVADDFFDTKGSLDDLEKLTDAVHRWDVKGLDSHSKTIFEALVDLVAGIRMKYLQQNGKDIEENLQHLWYETFKSWLVEAKWARVRSKPSVDEYLRNAMISIAAHTLVLQASCFLGFPVDNQLWSTPRQEITSLLMVTTRLLNDTQSYLKEEDEGKINYVWLYMNENQQGKIEDSIQHVQALVNMRRQEFLKHVLSPADEQHCDQQLPKSCKQLHLSCLKVFNMFFNSSNLYDSETELLLDIDKAFASPPNVDKFMLSPQYHPLPPLFLHPPHQVVKKRGAKITNYKNPALVKNYPWRKGFTLQHPISRFGATIRIRDILAASKMKLCFN

SEQ ID NO: 2690 - protein, 343 aa, Ralstonia eutropha JMP134
MDTASELQATIRAMVQPGKGLLAADESGPTIAKRFTTIGVESNEENRRAWRSLLLSTPGLGAHISGVILYEETLGQRADDGTPLPELCARQGIVPGIKVDKGKVPLVNAPGDEITEGLDGLPKRLEAYRQQGARFAKWRAVFNVSDTLPSALAVQANAQVLAAYAAICQASGIVPIVEPEVLMDGDHGLARSAAVTERVLHAVFHALHRYGVVLEHMVLKPSMVIAGKKSAQQTSVQDVATETVRVLKRTVPGAVPGIFFLSGGQTPEQATANLDAMNRLGPLPWPLSFSYGRALQEPPLAAWRGQAANVGKAQQALLQRSLLNGEACQGQYEAAQESMEKVG

SEQ ID NO: 2691 - protein, 378 aa, Arabidopsis thaliana
MAQNGYLVPADPSAVVTVKKKTPQASWALIDATGQSEPLDVDKYEIMHRVQIHARDLRILDPNLSYPSTILGRERAIVLNLEHIKAIITSEEVLLRDPSDENVIPVVEELRRRLPVGNASHNGGQGDGKEIAGAQNDGDTGDEDESPFEFRALEVALEAICSFLAARTAELETAAYPALDELTSKISSRNLDRVRKLKSAMTRLTARVQKVRDELEQLLDDDDDMADLYLSRKLSSASSPISSIGEPNWYTTSPTIGSKISRASRASLATVHGDENDVEELEMLLEAYFMQIDSTLNRLTTLREYIDDTEDYINIQLDNHRNQLIQLELVLSSGTVCLSMYSLVAGIFGMNIPYTWNDGHGYMFKYVRNQNSIRMRMK

SEQ ID NO: 2692 - protein, 325 aa, Nicotiana tabacum
MADISPSTSTDADTEDKNRFLNSQQLGAVASDGSDRTRDQKTLRRLAQNREAARKSRLRKKAYVQQLESSRMKLTQLEQELQRARQQGIFISGSGDQSQSMSGNGALAFDVEYARWLEEQNRRINELRGAVNSHAGDGELRIIVDGILAHYDDIFRIKGDAAKSDVFHILSGMWKTPAERCFLWLGGFRSSELLKLLINQLEPLTEQQLLAINNLQQSSQQAEDALSQGMEALQQSLAETLAGSLGPSSSSGNVANYMGQMAMAMGKLGTLEGFIRQADNLRQQTLQQMHRILTTRQSARALLAISDYFSRLRALSSLWLARPRE

SEQ ID NO: 2693 - protein, 157 aa, Brassica rapa subsp. pekinensis
SNADKLLTEFIEKQLIDYAKNSKKVVGNSTSLLSPYLHFGEISVRRVFQCARMKQIIWARDKNGQGEESAVLFLRGIGLRDYSRYICFNFPFTHEQSLLSHLRFFPWDADVEKFKAWRQGRTGYPLVDAGMRELWATGWMHNRIRVIVSSFAVKFLL

SEQ ID NO: 2694 - protein, 152 aa, Triticum aestivum
MGRPAMESSSEEELEDDFPGHEWITPQSSIRAAYQSQTEKGIRKTCSELLELKDAIENLCGNMQSKYHAFLRISEEVVEAEQELIELQKHVSAQGMLVQDLMSGVCRELEMWQKHSKEEHAVEKDFQSELNEILSVDTQYPKVIFLDEIDIF

SEQ ID NO: 2695 - protein, 450 aa, Arabidopsis thaliana
MATPYPGATQVGSYFVGQYYQVLQQQPDLIHQFYSEPSRAIRIDGDSTETANSLLHIHNMVMSLNFTAIEVKTINSVESWEGGVLVVVSGSVKTKEFSNRRSFVQTFFLAPQEKGYFVLSDVFLFVDEGTVYYHQPSYLSEIKHEAQLNPPTRHPDPQVSDYVLEEEASDYVNAVQIKDDLVDKYSLQEDQHQPQHEDYEDEVAIEETPREEVAVDVVHEHRAAPVEEPVGEKSKMSYASILKVAKEAATVPVAATQPSYNKSSQDINEWDQPMRTPSPQLAAPLAPIQQSNSSTYVSDYGAEAEDGSGFEDFEFKSVYVRNLPSDISASEIEEEFKNFGTIKPDGVFLRTRKDVMGVCYAFVEFEDMTSVENAIKASPIYLGGRQVYIEERRPNPAGVRGARRGGGRGRGGYPTEAPRGRFGGRGSGRGNQDGGDYRPRGNGYYRGGGR

SEQ ID NO: 2696 - protein, 651 aa, Oryza sativa
MAGATAIQVQVPQLPPLSRLKPLLTRSAPTQPSPRSQPYPLLSPPRGQEIMASTFGATSTVGLMAAPTGIVSDKKPSSLSSVSSVSVASRPRNARLQRKCNFRVKAAKELYFNKDGSAIKKLQTGVNKLADLVGVTLGPKGRNVVLESKYGSPRIVNDGVTVAREVELEDPVENIGAKLVRQAAAKTNDLAGDGTTTSVVLAQGLIAEGVKVVAAGANPVQITRGIEKTAKALVEELKKLSKEVEDSELADVAAVSAGNNYEIGNMIAEAMSKVGRKGVVTLEEGRSSENNLYVVEGMQFERGYISPYFVTDSEKMSAEYENCKLLLVDKKITNARDLINVLEEAIRGAYPILIIAEDIEQEALATLVVNKLRGSLKIAAIKAPGFGERKTQYLDDIAILTGATVIRDEVGLSLDKADKSVLGTAAKVVLNKESTTIVGDGSTQEEVTKRVAQIKNLIEAAEQEYEKEKLNERIAKLAGGVAVIQVGAQTETELKEKKLRVEDALNATKAAVEEGIVVGGGCTLLRLAARVDAIKDNLENDEQKVGAEIVRRALSYPLKLIAKNAGVNGSVVTEKVLSNDNFKFGYNAATGQYEDLMAAGIIDPTKVVRCCLEHAASVAKTFLTSDVVVVEIKEPEPAPVTNPMDNSGYGY

SEQ ID NO: 2697 - protein, 665 aa, Burkholderia fungorum LB400
MADALRMLAIDAVEAAKSGHPGMPLGMAEIAVALWDRHLKHNPRNPAWPDRDRFVLSNGHGAMLLYGLLHLTGYDLPIDELRRFRQLYSRTPGHPEVGVTPGVETTTGPLGQGLANAVGMALAEALLAREFNRPGHSIVDHRTYVFVGDGCMMEGISHEAASLAGTLKLDKLTVLYDDNGISIDGHVSQWFSDDTPARFAAYGWHVVREVDGHDVDAVDRALSRARAAGRPTLICCRTVIGKGSPSKAGTHDVHGAPLGADEVANTRRALGWPHAPFAMPAEVRTLWDASERGAATEADWNTRFEAYRKHYPHEAAEFERRTQRTLPVQWRDTVRAMVSDADHAGESIATRKASQQAIAVLARALPELLGGSADLTGSNLTNWKTAVDVHADDSGLQGGNYLHFGVREFGMSAVMNGIALHRGHIPFGGTFLTFSDYSRSALRMAALMKTRAIFVFTHDSIGLGEDGPTHQSVEHAASLRLIPGLDVWRPCDTVETAQAWASAVERDGPSCLLLSRQNLPFAARSAEQIDAIERGGYVLRDWPAERAQTRIVLIATGSEVSLALDAVAPLAQAGIAARVVSMPSTSVFDRQPAAWRDAVLPPRVPRVAVEAGVRAFWRQYVGLEGGVVGIDTFGESAPAAALFEHFGLTARAVVDEARRVAQLAR

SEQ ID NO: 2698 - protein, 365 aa, Zea mays
APIGEEAEGRRKYVIHPYTPISDPDSKGYFDLLIKVYPDGKMSQYFASLKPGDVVEVKGPIEKLRYNPNMKKQIGMIAGGSGITPMLQVVRAILKNPNDNTQVSLIYANVSPDDILLKRELDRLASSYPNFKVGIAVFYTVDKPSTDWRGGVGFVSKDMVLKGLPGPAEDSLILVCGPPGMMNHISGDKAKDRSQGELSGVLKDLGYTAEMMPRCDVCENSSMLALEIRAIEFYWIAAANYEGGASSMAGLQRSSQTFRRSGSSGLVWDERLTSQDDDQSGPEDADAATDLKELRHSRSVGSVGLQPQPQPQPQRRRSDDSGQGFRTRRVAPALDPPSPKVPGCIFCGIFRKAGASEPKSKPRRY

SEQ ID NO: 2699 - protein, 459 aa, Brassica rapa
MTSINVKLLYHYVITNLFNLCFFPLTAIVAGKAYRLTIDDLHHLYYSYLQHNLITIAPLFAFTVFGSVLYIATRPKPVYLVEYSCYLPPTHCRSSISKVMDIFYQVKKSCPSRNGTCDDSSWLDFLRKIQERSGLGDETHGPEGLLQVPPRKTFAAAREETEQVIIGALENLFKNTNVNPKDIGILVVKSSMFNPTPSLSAMVKNNFKLRSNVRSFNLGGMGCSAGVIAIDLAKDLLHVHKNTYAFVVSTENITYNIYAGDNRSMMVSNCLFRVGGAAILLSNKPGDRRRSKYELVHTVRTHTGADDKSFRCVQQGDDENGKIGVSLSKDITDVAGRTVKKNIATLGPLILPLSEKLLFFVTFMGKKLFKDKIKHYYVPDFKLAIDHFCIHAGGRAVIDVLEKNLALAPIDVEASRSTLHRFGNTSSSSIWYELAYIEAKGRMKKGNKVWQIALGSGFK

SEQ ID NO: 2700 - protein, 400 aa, Cryptococcus neoformans var. neoformans JEC21
MCSSHATAVESVSPAPRKSQYEVKYDPDLVLKSAEFKELKQGDKELEDPKANLACAYDEKHNVKMINKPIPKARQDEVVVHIKATGICGSDVHFWKHGQIGPTMIVTDTCGAGHESAGEVVEVGPGVEQWKVGDRVAIECGVPCGQASCGPCVTGRYNACPQVVFFSTPPYHGTLTRYHAHPASWLHRLPDNLSYEEGALCEPFAVALAALERAGNRLGDPVLICGAGPIGLVTLLASHAAGCTPIVITDLQASRLEVAKKLIPTVKTVQIERSWTSKETSEAIKEAAGTGIRVAIDATGFESSITAAIYSVVFGGKVFVIGAGPSEQKYPFGYCSANEIDLQFQYRYAHQYPKALRIVSGGLINLKPLLTHTFPLNKAVEAFHVAADPTKGAIKVQIID

SEQ ID NO: 2701 - protein, 458 aa, Brassica rapa
MTSINVKLLYHYVITNLFNLCFFPLTAIVAGKAYRLTIDDLHHLYYAYLQHNLITIAPLFAFTVFGSVLYIATRPKPVYLVEYSCYLPPTHCRSSISKVMDIFYQVRKADPSRIGTCDDSSWLDFLRKIQERSGLGDENHGPEGLLQVPPRKTFAAAREETEQVIIGALENLFKNTNVSPKDIGILVVHSSMFNPTPSLSAMVNNFKLRSNVRSFNLGGMGCSAGVIAIDLAKDLLHVHKNTYALVVSTENITYNIYAGDNRSMMVSNCLFRVGGAAILLSNKPGDRRRSKYELVHTVRTHTGADDYSFRCVQQGDDENGKTGVSLSKDITDVAGRTVKKNIATLGPLILPLSEKLLFFVTFMGKKLFKDKIKHYYVPDFKLAIDHFCIHAGGRAVIDVLEKNLALAPIDVEASRSTLHRFGNTSSSSIWYELAYIEAKGRMKKGNKVWQIALGSGFK

SEQ ID NO: 2702 - protein, 338 aa, Xylella fastidiosa 9a5c
MLFMRNTTSTLKIAIIGYGSQGRAHALNLRDSGFDIIIGLRPGGPTEAKAQADGFTVQSPDQAAKHADLVAVLTPDMVQKKLYEEVLAPNIKQGACLLFAHGLNVHYGMITPRSDLDVVLVAPKGPGALVRREYEIGRGVPCIYAVHQDLSSHAEQLALTYAGGLGGARANIIKTTFKEETETDLFGEQAVLCGGVSSLVQAGFETLVEAGYQPEIAYYEVLHELKLIVDLFYEGGITRMLEFVSETAQYGDYVSGPRVIDGSTKERMKAVLKDIQDGTFTKHWIAEYQAGLPNYKKYKQADLEHPIEKVGKQLRAKMVWLNSEKTNDTTPPMSSKVV

SEQ ID NO: 2703 - protein, 459 aa, Brassica oleracea var. alboglabra
MTSINVKLLYHYVITNLFNLCFFPLTAIVAGKAYRLTIDDLHHLYYSYLQHNLITIAPLFAFTVFGSVLYIATRPKPVYLVEYSCYLPPTHCRSSISKVMDIFYQVRKADPSRNGTCDDSSWLDFLRKIQERSGLGDETHGPEGLLQVPPRKTFAAAREETEQVIIGALGNLFKNTNVSPKDIGILVVNSSMFNPIPSLSAMVVNTFKLRSNVRSFNLGGMGCSAGVIAIDLAKDLLHVHKNTYALVVSTENITYNIYAGDNRSMMVSNCLFRVGGAAILLSIKPGDRRRSKYELVHTVRTHTGADDFSFRCVQQGDDENGKTGVSLSKDITDVAGRTVKKNIATWGPLILPLSEKLLFFVTFMGKKLFKDKIKHYYVPDFKLAIDHFCIHAGGRAVIDVLEKNLALAPIDVEASRSTLHRFGNTSSSSIWYELAYIEAKGRMKKGNKVWQIALGSGFK

SEQ ID NO: 2704 - protein, 338 aa, Burkholderia vietnamiensis G4
MNVFYDKDADLSLIKGKQVTIIGYGSQGHAHALNLKDSGVNVTVGLRKGGASWSKAENAGLSVKEVAEAVKGADVVMMLLPDEQIADVYAKEVHANIKQGAALAFAHGFNVHYGQVIPRADLDVIMIAPKAPGHTVRGTYSQGGGVPHLIAVAQNKSGAARDIALSYAAANGGGRAGIIETNFREETETDLFGEQAVLCGGTVELIKAGFETLVEAGYAPEMAYFECLHELKLIVDLIYEGGIANMNYSISNNAEYGEYVTGPRVVTEETKKAMKQCLTDIQTGEYAKSFILENKAGAPTLQSRRRLTAEHQIEQVGAKLRAMMPWIAKNKLVDQTKN

SEQ ID NO: 2705 - protein, 358 aa, Mycobacterium avium subsp. paratuberculosis K-10
MGTPEVDVVILVGGKGTRLRPLTLSAPKPMLPTAGLPFLTHLLSRIAAAGIEHVILSTSYQAAVFEAEFGDGSKLGLQIEYVTEERPLGTGGGIANVAGQLRHDTVMVFNGDVLSGADLGQMLDFHAAQQADVTLHLVRVSDPRAFGCVTTEDGRVTAFLEKTQDPPTDQINAGCYVFARRVIDRIPRGREVSVEREVFPALLSDPDVKVCGYVDATYWRDMGTPEDFVRGSADLVRGIAPSPALHGHRGEQLVHDGAAVSPGAVLIGGTVVGRGAEIGPGVRLDGAVIFDGVKVEAGSVIERSIVGFGARIGPRALIRDGVIGDGADIGARCELLRGARVWPGVSIPDGGIRYSSDV

SEQ ID NO: 2706 - protein, 344 aa, Bacillus cereus ATCC 10987
MGEKMLGIINATGSFPSLKKVTGHRSLAALPFGGRYRLIDFMLSNMVNSNIHSVAVFTSHKNRSLMDHVGSGKQWDLDRKRDGLFLFPPNCQCDQDEFGSFAHFRRHIDYFLRAREEYVVITNSHLVTALNFQAVLERHIHTAADITEVCHEGVSLQTYVLKKQLLLDLFDSYKDVEQYSLFDVVREKRGKSLHIATYEHTGYVAIIDSIESYYKHSLEILQPAIWKQLFKKEAPIFTKVKDEPPTRYVKGAVVKNTMIANGSIIEGEVENSVVSRSVKIGKGSIVRNSIIMQKSQIGDNCIIDGVIIDKDVKIGDGVVLKGNADEPYVVEKGSVQNSTINSYS

SEQ ID NO: 2707 - protein, 213 aa, Rhodospirillum rubrum
MDIQDLITNNRKWAEERESALPGYFHILSEVQSPKFLWIGCSDSRVPANEIVGMQPGELFVHRNIANVVPHADANCHAVLEYAIDVLKVEHIMVVGHYGCGGVRAALNRLAMGPIDNWLSHIKDIARIFAAELEDLPDEESRVDRLCELNAMAQVMNVARTSMVQAAWRRGQPLAIHAWCYGLKTGLVNDLGRTLTRIADLPEPYRLIFPDQV

SEQ ID NO: 2708 - protein, 376 aa, Bacillus cereus ATCC 10987
MAQKQKCVAMLLAGGKGSRLSALTKNLAKPAVPFGGKYRIIDFTLSNCANSGIETVGILTQYQPLELHNYIGIGNAWDLDRVSGGVTVLPPYAESSGVKWYTGTASAIYQNLNYLSQYEPEYVLILSGDHIYKMDYSKMLDYHIEKEADVSISVIEVPWDEASRFGIMNTNEEMEIVEFEEKPQFPRSNLASMGIYIFNWAILKEYLEMDARNPESSNDFGKDVLPLLLDEGKKLMAYPFEGYWKDVGTVKSLWEANMDLLRDETSLNLNDRNWRIYSVNPNEPPQYIAEKAKVEESLINEGCVIEGDVKHSVLFQGVTVEEGSMVIDSVVMPGAKIGKNVVIERAIVGSEMVIEDGTIIRPEKNVDDVVLIAEGK

SEQ ID NO: 2709 - protein, 546 aa, Thermococcus sp. KS-1
MAQLAGQPVVILPEGTQRYVGRDAQRLNILAARIIAETVRTTLGPKGMDKMLVDSLGDIVITNDGATILDEMDIQHPAAKMMVEVAKTQDKEAGDGTTTAVVIAGELLRKAEELLDQNIHPSIIIKGYALAAEKAQEILDEIAKDVDVEDREILKKAAVTSITGKAAEEEREYLAEIAVEAVKQVAEKVGETYKVDLDNIKFEKKEGGSVKDTQLIKGVVIDKEVVHPGMPKRVEGAKIALINEALEVKETETDAEIRITSPEQLQAFLEQEEKMLREMVDKIKEVGANVVFVQKGIDDLAQHYLAKYGIMAVRRVKKSDMEKLAKATGAKIVTNVRDLTPEDLGEAELVEQRKVAGENMIFVEGCKNPKAVTILIRGGTEHVVDEVERALEDAVKVVKDIVEDGKIVAAGGAPEIELSIRLDEYAKEVGGKEQLAIEAFAEALKVIPRTLAENAGLDPIETLVKVIAAHKEKGPTIGVDVFEGEPADMLERGVIAPVRVPKQAIKSASEAAIMILRIDDVIAASKLEKDKEGGKGGSEDFGSDLD

SEQ ID NO: 2710 - protein, 247 aa, Candida glabrata CBS138
MPEPITLRVNAALFDVDGTIIISQPALAAFWRDFGKDKPYFDAEHVIHVSHGWRTYDAIAKFAPDFADEETVTKLEGEIPDKYGKEAIEVAGAVKLCNSFNELPKEKWAVATSGTREMASKWFAVLGIKKPTYFITANDVKKGKPNPEPYLKGREGLGYPINTHYPEKSKVVVFEDAPAGIAAGKAAGCKIIGIATTFSASSLREKGCDIVIKDHRSVRVAGYDKETDEVILVFDDYLYVRDDIQKW

SEQ ID NO: 2711 - protein, 535 aa, Staphylococcus epidermidis ATCC 12228
MTKFIFVTGGVVSSLGKGITAASLGRLLKDRGLKVTIQKFDPYLNVDPGTMSPYQHGEVFVTDDGAETDLDLGHYERFIDINLNKYSNVTAGKVYSHVLKKERRGDYLGGTVQVIPHITNEIKERLLLAGESTNADVVITEIGGTTGDIESLPFLEAIRQIRSDLGRENVMYVHCTLLPYIKAAGEMKTKPTQHSVKELRGLGIQPDLIVVRTEYEMTQDLKDKIALFCDIKKESVIECRDADSLYEIPLQLSKQNMDDIVIQRLQLNAKYETQLDEWKHLLNTVNNLDGKITIGLVGKYVSLQDAYLSVVESLKHAGYPFKKDVVVKWIDSSEVNDDNVEAYLSDVDGILVPGGFGFRASEGKIAAIRYARENNIPFFGICLGMQLATVEFARHVLGYEGAHSAELDPSTPYPIIDLLPEQKDIEDLGGTLRLGLYPCHIKEGTLAEKIYNKNDIEERHRHRYEFNNEFREQLESNGMVFSGTSPDGRLVEIIEIPKNDFFIACQFHPEFLSRPNRPQPIFKSFVEAALNYQQK

SEQ ID NO: 2712 - protein, 1028 aa, Methanosarcina acetivorans C2A
MNVSRKILVIIYIIFALLTSVVIFASQNILDSSFSGLEEKEAIENVESVHNVIDFQIIQLDETSSALVSREDVRAFMVSENPKDLGGTLLTDLFTLSGCDFVFFVNSSGTMIYSQVSDSKNASDASSDLIITEIDQKINEGDLLCRERLSPLSGILLLENGPVIVSCRPVSAALDNSKMIGTIVLGKKLDSDFVDSIQKITGNPVLLYGPDNAPPEFEHVFSENGSENFTQLVDVEGDRLAGYFIHRDINGNPTIMVRTTADRNIYEEGRKSLRYIVLFLLFSGLMVGAGCKFLLDREVVSRLVAIDSFVDRVGKDEDFSAHCIMEGDDELSRLTEGINRMLDRLRLNSDKVKAQEHEKKVILNSLSELVIFMDLELKIVWANRASLDYAGLKLENIVGHSYEKLSPISDAVSGRALAQKALESGNEETGEVVTPDGKIWTIRMNLIKDEDGKVTGFLQTGLDITAHRRSEEKLLQAKLEAEAASCTKSEFLANMSHELRTPLNSIIGFSDILIERVFGELNEKQLKYVNNISGSGKHLLGLINDILDLSKVEAGKMDLHYSEFTVDSVFEEVKSTLFPLAQAKSLEINFVVGPDFGDIQADRSRLIQILYNLVSNAIKFTPEGGRVSVYCKKSGSRALFSVTDTGIGISSEDQKKLFQPFTQIDSSSARQYCGTGLGLALVKKIVNLHKGDIWVESELEKGSTFMFTIPLTKPPESPKADTKGIEDVMLEFEMSKAAAFSAKECEEALKEELELPEILLPENREAQSLVLVVDDDINSNELISVVLREAGYSTASLHNGKDVLEVAKKLKPDVITLDVLLPDTSGWNVLKQLKSDLDTTSIPVLIISVTDNNELGVALGATYSFTKPVRRVELLDSLREITGKFSFDEPKVLIIDDDENAVELLSSMIESEGFEIVKAYSGQAGLDKLFSEQQPDILILDLLMPEISGFEIISRLRDGEQTKDIPLIVCTAGEFTEKNIEKLNGELKGHLISIMKKGTFGRKELINRIKQLAMLKRREDERNSYCRR

SEQ ID NO: 2713 - protein, 89 aa, Arabidopsis thaliana
EYRGRPHPSVTPKNPNWLNRDRSVLFVDHGCMLKYPLFNLVGYTSVGEEDLKSFRQGGRKTPGHPGNLGTPGVEATTGPLGQGLANAVG

SEQ ID NO: 2714 - protein, 351 aa, Gelidium crinale
MEKSFDQLLSLNVDEGCIVEYVWIDGYDAVRSKGRYLKNIPSKASDLPDWNYDGSSTNQASGEDSEVIIKPQRIFPDPFRGKPNLLVMCDTYTPNGEPLKTNTRFECERIMNQAKDLKPWFGLEQEYFLINPNTGKPLGFPNDKDPEPQGPYYCGVSGSKMFGRDIADAHFKACVYAGIKISGINAEVAPGQWEFQVGPCVGIEEGDELWMGRYLLQRIAEMKGLDVNYDPKPVKGDWNGSGCHSNFSTKPMREKDGYQNAIIPALEKLSKKHKEHIAAYGIGNEDRLTGKHETASIEQFKWGVADRGASCRVGHDVEKKGYGYFEDRRPAGNCDPYVVTMMLVKTCCLED

SEQ ID NO: 2715 - protein, 394 aa, Staphylococcus epidermidis ATCC 12228
MHNKQKILDFIENNKYDYVEISHRIHERPELGNEEIFASRTLIDQLRANRFEIETDIAGHATGFIATYDSDMTGPVIGFLAEYDALPGLGHACGHNIIGTASVLAAVALKEVVDEIGGKVVVLGCPAEEGGENGSAKASYVKAGVIDEIDVALMIHPGNETYRTINTLAVDVLDIKFYGRSAHASENADEALNALDAMISYFNGIAQLRQHIKKGQRVHGVILDGGKAANIIPDFTHARFYTRATSRKELDVLTEKVNQIARGAAIQTGCDFEFGPIQNGVNEFIKAPKLDDLFEKYATELGEEVIDDDFGYGSTDTGNVSHVVPTIHPHIKIGSRNLVGHTHRFREAAASLQGDQALIRGAKILALMGLELIENKPLLDEIIEEHTHIKGHVK

SEQ ID NO: 2716 - protein, 265 aa, Chrysanthemum x morifolium
MANSDAFELDFSCIDRSMSFPDESADMSPQRKLGKGKIEIKRIENTTNRQVTFCKRRNGLLKKAYELSVLCDAEVALIVFSSRGRLYEYANNSVRGTIDRYKKACLDPPSSGSVSEANAQYYQEESGKLRSQIANLQNQNRQFYRNIMGESLTDMPMKDLKNLETKLEKAITRIRSKKNELLFAEIEYMQKRELELHNNNQFLRAKIAENERSAQQQHMSLMPGSSDYELVTPHQPFDGRNYLQSNEMQPSNDYSCQDQTPLQLV

SEQ ID NO: 2717 - protein, 457 aa, Magnetococcus sp. MC-1
MLGQKQKWRVVGGVLVGLALLLGSAPLHAGAWPVAVEGDKLPTLADMLERTTPGVVNIATSGSVEVAETPLLNDPFFRHFFDIPTMRRAKKIRSLGSGVVVDAAHGYILTNHHVIDKAQVITVTLHDGRALKAVQVGADPETDVAVIKVEAKDLHALPLGNSDILRVGDFVVAIGNPFGLGQTVTSGIVSALGRSGLGIKGYEDFIQTDASINPGNSGGALVNLRGELVGINTAILAKGGGNVGIGFAIPANMTKQLMAQLIEYGEVRRGLLGISSQDLTPELNQAFGLEHQHGSVVTRVTRGSAAQKAGLQAGDIITEVNGVAVRNAAHMRNLVGLLRVGEAVQLTRLRDGHSRTVKAVVEASKREQIEGSRLSPRLEGAVLEKEEQDEKPGVVVRKVVRGSMAARMGLQEGDRLLEVNQQSVKNLADMGKALAVDGRQMLLTLERGERRIRVMVR

SEQ ID NO: 2718 - protein, 584 aa, Mycobacterium leprae TN
MIQQHRYDVVIVGAGGAGMRAAVEAGPRVRTAVLTKLYPTRSHTGAAQGGMCAALANVEDDNWEWHAFDTVKGGDYLADQDAVEIMCKEAIDAVLDLEKMGMPFNRTPEGRIDQRRFGGHTRDHGKAPVRRACYAADRTGHMILQTLYQNCVKHDVEFFNEFYALDLVLTQTPSGPVTTGVVAYELATGDIHVFHTKAVVIATGGSGRMYKTTSNAHTLTGDGIGIVFRKGLPLEDMEFHQFHPTGLAGLGILISEAVRGEGGRLLNGENERFMEHYAPTIVDLAPRDIVARSMVLEVLEGRGAGPHKDYVYIDVRHLGEEVLESKLPDITEFSRTYLGVDPVHELVPVYPTCHYVMGGIPTTVTGQVLRDNTSTVPGLYAAGECACVSVHGANRLGTNSLLDINVFGRRSGIAAASYASANDFVDMPPNPAEMVISWVANILSEHGNERVADIRGALQQTMDNNAAVFRTEETLKQALTDIHSLKERYSRITVHDKGKSFNSDLLEAIELGFLLELAEVTVVGALNRKESRGGHAREDYPHRDDTNYMRHTMAYKQGTDLLSDIALDFKPVVQTRYEPQERKY

SEQ ID NO: 2719 - protein, 96 aa, Dechloromonas aromatica RCB
MNIRPLHDRVIVKRVEAERTTASGIVIPDSAGEKPDQGEVLAVGPGKRDDNGKQIALDVKVGDRVLFGKYAGQAVKVDGQEVLVMREEDIMGVLVA

SEQ ID NO: 2720 - protein, 609 aa, Lycopersicon esculentum
MEQYEILEQIGKGAFGSAVLVKHKLEKKKYVLKKIRLARQTDRTRRNAHQEMALISSMQNPFIVEYKDSWVEKGCYVCIVIGYCEGGDMAEAIKKAKGVHFLEEKLCKWLVQLLMALDYLHTNHILHRDVKCSNIFLTREQDIRLGDFGLAKMLTSDDLASSIVGTPSYMCPELLADIPYGSKSDIWSLGCCIYEMAAFKPAFKAFDMQALINKINKSIVAPLPTKYSGPFRGLVKSMLRKNPELRPSAAELLRNPLLQPYVINTHLKLNGPRRNSLPACLPDNDVKKTRFAISESTPVKKNREKRMSCGNDRTLNPSVSDHDYTFSNRRYPKTPSRVSELSVGSPDRGSTVTKKITSKALLVNKNPQVIVPKLTTTPARQVDLRNSDMASRTLVKRSVSTTRRASLPLTNKAAVQELPRRPSLSFLDCIKSPDVSVNAPRIDKMLEFPLASYEDPFHPIRRTSSNSAQGSSGSPQAEYSVMKDKCTIQIPDSKFDRMSSNDAWQGYEGPMVHVDREDITDSSDQNATAGASSRTSSDTRRRRFNMSSYKQRAEALEGLLEFSARLLQEDRFDELGVLLKPFGPEKVSPRETAIWLTKSIKENAPKQED

SEQ ID NO: 2721 - protein, 233 aa, Oryza sativa
PPGEEFGTRTPLTTHSTQVRSRRRRRRWFPSSCRSGSPQACSNAARARSGSTPMRSTRSPWPTPVRTSVSWSRMGSLSRSPRRFTPGPVHGEPMRPSRRDVTLAMVSVGVPGRLGLPTKILWMRRMRVLRRLLRKYREAKKIDKHMYHDMYMKVKGNMFKNKRVLMESIHKSKAEKAREKTLSDQFEAKRAKSKASRERKIARREERLAQGPREPAAPAVPAQTAAAPKKSKK

SEQ ID NO: 2722 - protein, 550 aa, Dechloromonas aromatica RCB
MAAKEVKFGDSARARMVEGINILADAVKVTLGPKGRNVVLERSFGGPTVTKDGVSVAKEIELKDKFANMGAQMVKEVASKTSDIAGDGTTTATVLAQSIVREGMKFVAAGMNPMDLKRGIDKAVVATIAELQAFSKPCTTTKEIAQVGSISANSDSDIGEIIANAMEKVGKEGVITVEDGKSLANELDVVEGMQFDRGYLSPYFINNGDKQQALLENPFVLLFDKKISNIRDLLPILEQVAKAGRPLLIIAEDVDGEALATLVVNNIRGILKTVAVKAPGFGDRRKAMLEDIAILTGGTVIAEETGLTLEKAVLKDLGQAKRIEVAKENTTIIDGAGEAAAIEARVKQIRIQIEEATSDYDKEKLQERVAKLAGGVAVIKVGAATEVEMKEKKARVEDALHATRAAVEEGIVAGGGVALIRARAAVGKLKGDNHDQDAGIKIVLRAMEQPLREIVANAGDEPSVVVDKVQRGKGNYGYNASTGEYGDMVEMGVLDPTKVTRTALQNAASVAGLMLTTECMVAELAEDKPAGGMPDMGGMGGMGGMGGMGM

SEQ ID NO: 2723 - protein, 391 aa, Zea mays
  misc_feature (16)..(16): Xaa can be any naturally occurring amino acid
  unsure (1)..(391): unsure at all Xaa locations
TPVTIDWYMDRINGPXEVMIGYSDSGKDAGRLSAAWQMYKAQEELIKVAKHYGVKLTMFHGRGGTVGRGGGPTHLAILSQPPDTIHGSLRVTVQGEVIEHSFGEELLCFRTLQRYTAATLEHGMHPPISPKPEWRALMDEMAVVATKEYRSIVFQEPRFVEYFRSATPETEYGRMNIGSRPSKRKPSGGIESLRAIPWIFAWTQTRFHLPVWLGFGAAIKHIMQKDIRNIHILREMYNEWPFFRVTLDLLEMVFAKGDPGIAAVYDKLLVADDLQSFGEQLRKNYEETKELLLQVAGHKDVLEGDPYLKQRLRLRESYITTLNVCQAYTLKRIRDPSFQVSPQPPLSKEFTDESQPAELVQLNQQSEYAPGLEDTLILTMKGIAAGMQNTG

SEQ ID NO: 2724 - protein, 522 aa, Triticum aestivum
  misc_feature (177)..(177): Xaa can be any naturally occurring amino acid
  misc_feature (195)..(195): Xaa can be any naturally occurring amino acid
  misc_feature (235)..(235): Xaa can be any naturally occurring amino acid
  unsure (1)..(522): unsure at all Xaa locations
MSMEDSAQPAGAASAGERASSPSPSRRLPDFLQSVRLKYVKLGYHYLITHGMYLLLTPLIVLIAVHLSTLSPGDVADLWTHLRFNLLSVIACSTLLVFLSTVYFLTRPRSVYLVDFGCYKPGPERRCSRETFMRCSKLTGNFTEANLDFQRKILERSGLGEDTYIPPALVTVPPTPXMELARQEAQVCLFGAFNXMLAKTGVKPKNWSFLLELTLVKPKPSCARGVVPHSRAAGXIVRYHLGGMGCSAGLLSIDLAKDLLQVHPNSYAMVVSTENITLNWYFGNNRSMLVSNCLFRMGCAAILLSNKRSDRRRSKYELVHTVRTHKGADDKCFSCVTQEEDDSGKVGVALSKDLMAVAGDALKTNITTLGPLVLPFSEQLLFMVTLVGKKLFKMKIKPYIPDFKLAFEHFCIHAGGRAVLDEIEKNMDLTDWHMEPSRMTLFRFGNTSSSSLWYELAYSEAKGRIRRRDRIWQIAFGSGFKCNSAVWKALRSVNPAKEQNNPWMDEIDTFPVDVPKVSKVAE

SEQ ID NO: 2725 - protein, 441 aa, Oryza sativa (indica cultivar-group)
MAKQWWQDGRSAQEKAIDDWLPITSSRNAKWWYSAFHNVTAMVGAGVLSLPYAMSELGWGPGIAVLILSWIITLYTLWQMVEMHEMVPGKRFDRYHELGQHAFGEKLGLWIVVPQQLVVEVGVNIVYMVTGGKSLKKFHDVLCEGHGCKNIKLTYFIMIFASVHFVLSQLPNFNSISGVSLAAAVMSLSYSTIAWGASVDKGKVADVDYHLRATTSTGKVFGFFSALGDVAFAYAGHNVVLEIQATIPSTPEKPSKKPMWKGVVVAYIIVALCYFPVALVGYWAFGNHVDDNILITLSRPKWLIALANMMVVIHVIGSYQIYAMPVFDMIETVLVKKLRFPPGLTLRLIARTLYVAFTMFIAITFPFFGGLLGFFGGFAFAPTTYFLPCIMWLAIYKPRRFSLSWFTNWICIILGVMLMILSPIGGLRQIIIDAKTYKFYS

SEQ ID NO: 2726 - protein, 773 aa, Oryza sativa (japonica cultivar-group)
MVSAADAVIPACAAVGIAFAVWQWLLVSRVKVSPYSAAAAAARNGGAGRAVFRPEGEVDDDDGGCGDDEGADGDGGVAAMARCAEIQSAIRVGANSFLFTQYKYLAAFTAVFAVVIFLFLGSVHRFSTESQPCQYTRGKACKPALANAVFSTIAFLLGAATSVASGFLGMRIATAANARTTVEARRGIGPAFAAAFRSGAVMGFLLASLGLLVLYVAIKVFGLYYGDDWEGLYESITGYGLGGSSMALFGRVGGGIYTKAADVGADLVGKVERNIPEDDPRNPAVIADNVGDNVGDIAGMGSDLFGSYAESTCAALFVGSISSFGADHNFAAVSYPLLISSAGLIVCLITTLFATDLYRVKTVDGVAPALKLQLLISTVLMTVGVLVVTFTALPHEFTMFDFGEVKRVKNWHLFFCVTIGLWAGLAIGFTTEYFTSNAYSPVRDVADSCRTGAATNVIFGLALGYKSVIVPVFAIAVSIYVSFTLASIYGIAVAALGMLSTVATGLAIDAYGPISDNAGGIAEMAGMSHRIRQRTDALDAAGNTTAAIGKGFAIGSAALVSLALFGAFVSRAGMAVINVLSPKVFVGLVVGAMLPYWFSAMTMKSVGSAALKMVEEVRREFAAIPGLMEGRATPDYASCVRISTDASLREMMPPGALVLLAPLVAGTFFGVQTLAGLLAGALVSGVQVAISASNSGGAWDNAKKYIEAGASDHAKALGPKGSDAHKAAVIGDTIGDPLKDTSGPSLNILIKLMAVESLVFAPFFAAHGGLIFK

SEQ ID NO: 2727 - protein, 219 aa, Arabidopsis thaliana
MASTEPERENREDETEVNEDEDTGAQVAPIVRLEEVAVTTGEEDEDAVLDLKSKMYRFDKEGNQWKERGAGTVKLLKHKETGKVRLVMRQSKTLKICANHLISSGMSVQEHSGNEKSCLWHATDFSDGELKDELFCIRFASIENCKTFMEKFTEIAESQQVGKESTQGDEAAGLIENLSVEENISEEKAKEAEEKEPAKEDKETKKEKVEEEKKTEAST

SEQ ID NO: 2728 - protein, 199 aa, Brassica napus
  misc_feature (164)..(164): Xaa can be any naturally occurring amino acid
  unsure (1)..(199): unsure at all Xaa locations
PRIRGLFGTGAGSSVSIENAGLLALTRVGSRRVVQIAAGFMIFFSILGKFGAVFASIPGPIIAALYCLFFAYVGAGGLSFLQFCNLNSFRTKFILGFSVFLGLSIPQYFNEYTAIKGYGPVHTGGRWFDDMVNVPFSSEPFVAGMVAFFLDNTLHKKDSSIRKXRGKHWWAKFRSFKGHTRSEEFYSLPFNLNKYFPSV

SEQ ID NO: 2729 - protein, 115 aa, Zea mays
MSISKVLGFLILTCLLIASAMAQSPSPAPFIGGGRRVISPSPSKTPTPESSVASPPSLPQADSPSIDSAAVTPSSISDSPSEAPAPSQQSSAVSNQYTVFAGSITVILYAAVLAF

SEQ ID NO: 2730 - protein, 172 aa, Brassica napus
  misc_feature (7)..(7): Xaa can be any naturally occurring amino acid
  misc_feature (10)..(10): Xaa can be any naturally occurring amino acid
  misc_feature (37)..(37): Xaa can be any naturally occurring amino acid
  unsure (1)..(172): unsure at all Xaa locations
MEVVSEXKMXMFKKARMALETCDRELEDKAKEVAELXAERQKKKLQIDELERIVRLKQAEADMFQLKANEAKREGERLQRIMLAKTDKSEEEYASNYLKQRMSEAEAEKQYLFEKIKLQESSRVAASQSSGGGGDSSQVLMYTKIRDLLQGYNLSPKVDPQSNERHPFRSNP

SEQ ID NO: 2731 - protein, 350 aa, Fusarium proliferatum
MREIVHLQTGQCGNQIGAAFWQTISGEHGLDSNGVYNGTSELQLERMSVYFNEASGNKYVPRAVLVDLEPGTMDAVRAGPFGQLFRPDNFVFGQSGAGNNWAKGHYTEGAELVDQVLDVVRREAEGCDCLQGFQITHSLGGGTGAGMGTLLISKIREEFPDRMMATFSVVPSPKVSDTVVEPYNATLSVHQLVENSDETFCIDNEALYDICMRTLKLSNPSYGDLNYLVSAVMSGVTTCLRFPGQLNSDLRKLAVNMVPFPRLHFFMVGFAPLTSRGAHSFRAVSVPELTQQMFDPKNMMAASDFRNGRYLTCSAIFRGRVAMKEVEDQMRNVQSKNSSYFVEWIPNNIQ

SEQ ID NO: 2732 - protein, 593 aa, Candida glabrata CBS138
MLHKHTDKQRLPVNIVDHHHIDPCLQDFKLLSKELQDIASNSEKLKALGSKENKESHLLSMKYVIPKEGVPADQAYDMIHNELTLDGNTHLNLASFVNTSTTHEVRKLISENLTKNLADNDEYPQLIELTQRCISMLSGLWNANPEEEPIGCATTGSSEAIMLGGLAMKKMWEKKMKAAGRTDTSKPNIIMSSACQVALEKFARYFDVECRLVPVSRKSHHMLDPNLLWDFVDENTIGCFVIMGTTYTGHLENVAEVGDVLTAIEKQHPEWANKDIPIHVDGASGGFIVPFAFSREQLKAYGVPNWGFDHPRVVSINTSGHKFGLTTPGLGWVLWRDESHLAPELRFRLKYLGGVEETFGLNFSRPGFQVVHQYYNFMNLGYDGYRDTFKRSLFVARVFAHQILRSPIFNDYFEVVSSIHESIDGDKVPDAANDYWENPEKYKPGVPLIAFKFSDKFQKEYPEVPQALLSHMLRTRGWIIPNYPLPHSTDGSDKCEVLRVVFRNEMSLDLAQLLLSDIQAVLRKLQGSYSGLKTISHESDSDKRRDYVYKMLLALASPDADIGEDEDEETKEKKASKKEEIKQRLKRNYRGTC

SEQ ID NO: 2733 - protein, 324 aa, Prochlorococcus marinus subsp. pastoris str. CCMP1986
MPIQSIKNDKILEKINSLKILNNFENQNLDHFNQFKIALHIRAIEEAIVSLAKDNKLRGPIHSYVGEEAIATGVLSHAKPIDAVTSTHRGHGHYIAKGGNISMLIDELHGKESGCNGGKGGSMHVADLSINHFGANGIVGGGVPIACGIALANKLDKKDSIVFCFFGDGASNQGVVLESFNLAGFLSLPIVFICENNQFAQSTKLSDISLTSVAKKSQGFGIKSIEVDGLNISEVYSKTSDAVNYTRNEIKPYLIQANTYRFHRHFVSEKPKPIDYLDENFHKEFLSKDPIINYCYRNKIDFIVLEDYLTNIKDIIFNYSKNIS

SEQ ID NO: 2734 - protein, 312 aa, Vibrio vulnificus CMCP6
MMSIPLIYHPIYSQLPLPEGHRYPIMKYHHLYQAVCRYQQQHLEWQQAFAFYQPEALSIEAIKQVHQQEYVDLLTTGLLPAAKMRRIGFPWSEKLIERTLTSTAGTVLTAEKALQHGVAIHLSGGYHHAHFDYGSGFCLFNDLVMAAHKALEHGSVDKVLIIDSDVHHGDGTATLCQRRDDIVTLSFHCDKNFPARKPDSDLDIGLPRECGDEAFLAAFKEVVPMAIRLHQPDLIIYDAGVDIHHEDELGYLNVSTDALYQRDAFLFGQAKANAIPVAAVVGGGYRTDHEALVPLHLQLLNAAFDVYRSTPD

SEQ ID NO: 2735 - protein, 134 aa, Glycine max
  misc_feature (117)..(117): Xaa can be any naturally occurring amino acid
  unsure (1)..(134): unsure at all Xaa locations
MAKSSFKLEHPLERRQAEATRIREKYSDRIPVIVEKAGKSDIPDIDKKKYLVPADLTVGQFVYVVRKRIKLSAEKAIFIFVKNTLPPTAALMSAIYEENKDEDGFLYMTYSGENTFXIALDGAGCHGNRSECLL

SEQ ID NO: 2736 - protein, 1090 aa, Ustilago maydis 521
MSSSTSAAIPPQANSDESNPLRTPPPPSSSTSSSSSSLSASTVSTPTPLAAGATSSSAVQSASASSPDPAVAFIPTPSSSSAPVTAQVSPPKITPATPSSSFSPPPPSSSSPSATVSVSSSPPTSSTIHHATVSDPTTEDIDMAVSTVSHPAPDLVLTDLGASSKRITPLASATIPHNSPQLEGTPLNPSQQQLALDALVPASALSTSSQPFSPISNSPQPMQPTKSSPATPTSLVKHSELTPSPRDRSAASGSASSSTPASSTTPALPPKVAPVMAGMGTLPPNVPPPSASASASTSAFSASDTLRAIPTNKNNPAFLNKLRSMVDDPNTDELIRWSPDGASFFVPNHVRFGDQVLPRFFKHNRFSSFVRQLNMYGFHKVPHLQQGALKHDSPQESELWEFSNPHFHRDHPDWLSKVQRKKGPRDDKDNHADREASATTGQELMHAGALMRTDFGMNNLGADANADGALQLASVLNAINAIKNAQTSISADLRHLQNSNQNLWQEAVESRQRAKRQQETINKILRFLAGVFGNQEDTETPVPGKKVSGKARAGKRVGVRPQQQQQQQQQHQQHQQQRSKSRLMIEDGNASSSSSHRGIQGLDLPLDQEEIEEMPYHLRFQEASNSDSPKVQSPSANLGASRFTQIGSPPSSSSAADFGRQLSEAVSTPGGSRRLSSQASNQVLNALASGEGNAWLASLFGASLANQGSKSTGPASGGGLKLDPHMVAALQQALASAGGVNSASDNTGDYFGSTTGAPADDGSSRFSAFPSSSSNASAVSSSNSAQANALGLDADALARFGASISHALVQSPARPNPNAGASNTQPTNYSVTSPSKGGSANLFDMGNDEVTSSGNNNQQLALSLSRATRDLQNTSSDVDQVQSSINSLIQGLQGIAGQAPASASASASDRAAVVPWQTTSGAAFDAAPATFGDASGSASVGNQFEAPSGTTPPSSTVDVGATSGTNAGMDDFDVDSFLSQFVDSSQAPGGGVTSPTPNNAYGESPSFAFSPATTAAFLHGAATSASDLPYAQQLTSKAESGTSSNSSSSRLNGKADSNAPKKRKPSTSGVELAVDVDMPDRPLKKSGRKA

SEQ ID NO: 2737 - protein, 455 aa, Francisella tularensis subsp. tularensis SCHU S4
MDNNQDKLKRDILSRHIVMISLGGTISASFFLGIGSILNTVGAFGTVIGFFIGGIIMMLVMISLAEMAFEMPISGSFQSYATKFISPYSGFLTGWLYLLNWLTAAAGGLVAAGIICNNFYPAISVWQFCLAIILIVSLLNLCAVRVFAEIEFWLSAIKIITIIIFIIIGIGIIGGFLHSNKPIAGLVNFYVDGLFPNGFKAFLFGLVIIVCTFQGAEVVGIAAGETKEPEKNIRKAIRSVAVRILLFFVFSSFIIAYVIPYKDSGITNTPFVTVLQLVNIKYVDTIMQLVILSASLSAVNSCFYTCARLMWSMAEANQAPKIFAKISKKQVPIYGVVFVALLSCICLITKFIGAEKIFILVISSSGMVGCMIWIIISMCHIYFRKSLTASQIESLRFKAWGFPLIPYTSILFNSCVILAMFWDPEQRMVVYSGVILILLFSFLYKFYYKKIIVKT

SEQ ID NO: 2738 - protein, 509 aa, Zea mays; identical to SEQ ID NO: 941

SEQ ID NO: 2739 - protein, 342 aa, Streptomyces avermitilis MA-4680
MTFKAEYIWIDGTEPTAKLRSKTKILADDAKGAELPIWGFDGSSTNQAEGHASDRVLKPVATYPDPIRGGDDVLVMCEVLNIDMTPHESNTRATLAEVEEKFGAQEPIFGIEQEYTFFKGSRPLGFPEGGFPAAQGGYYCGVGSDEIFGRDVVEAHLENCLKAGLGISGINAEVMPGQWEFQVGPLAPLEVSDQLWVARWLLYRTAEDFGVSATLDPKPVKGDWNGAGAHTNFSTKAMREGYDAIITACESLGEGSKPLDHVKNYGAGIDDRLTGLHETAPWNEYSYGVSNRGASVRIPWQVEKDGKGYIEDRRPNANVDPYVVTRLLVDTCCSALEKAGQV

SEQ ID NO: 2740 - protein, 429 aa, Methylobacillus flagellatus
MQEISKSSKLSNVCYDIRGPVLDRARQMEEDGHRIIKLNIGNPAPFGFAAPEEILQDVIRNMDSASGYTDSKGLFAARKAIMHYTQQKNIQGVTIDDIIIGNGVSELIVMAMQALLNNGDQVLVPMPDYPLWTAAVNLAGGTARHYVCDEQTGWLPDLRDIENKITANTRGIVIINPNNPTGALYPRETLEGIIEIARHHGLVIFADEIYDKVLFDGNTHTSIASLADDVLFVTFNGLSKNYRTCGYRAGWLVISGEKRHAGDYIEGLNMLASMRLSRQCARAVGDPDRAGRYQSIDDLVAPTGRLCKQRDLAYKMLTDIPGVSCVKPKAGLYLFPRLDPKIYPIQDDQQFILDLLLEEKVLLVQGTGFNWRAPDHFRVVFLPNVDDLTEAFTRIARFLENYRKQHSTITIVEAKPRKRAQTTSQSASA

SEQ ID NO: 2741 - protein, 598 aa, Haemophilus influenzae R2866
MKNFKYFAQSYVDWVIRLGRLRFSLLGVMILAVLALCTQILFSLFIVHQISWVDIFRSVTFGLLTAPFVIYFFTLLVEKLEHSRLDLSSSVNRLENEVAERIAAQKKLSQALEKLEKNSRDKSTLLATISHEFRTPLNGIVGLSQILLDDELDDLQRNYLKTINISAVSLGYIFSDIIDLEKIDASRIELNRQPTDFPALLNDIYNFASFLAKEKNLIFSLELEPNLPNWLNLDRVRLSQILWNLISNAVKFTDQGNIILKIMRNQDCYHFIVKDTGMGISPEEQKHIFEMYYQVKESRQQSAGSGIGLAISKNLAQLMEGDLTVESERGKGATFHLTLHAQEISEKESVKKNIPFLNILLVEDVDLNIMVAKTILEKLGHHVDVATNGKQAITLFEKNVYDILLLDIKLPDMSGFEIAQYLRENYENGIYDFLPPMIAFTANVMQSEQEYLEMGMDGVLRKPISIKDLHHCLQQFFADESESIIEMNDDNEFSEQFDLALIETLGKKQILENLSLFKQTMPNYLAQLSKDNMKETEDTAHKIKGAAASLGLNHLRQLADTLESAAKNSDVFNCGELIDKIGNLWLEDVEDLLKFCKF

SEQ ID NO: 2742 - protein, 333 aa, Bacillus anthracis str. A2012
MAEVKEKRHEELGLSDEQVLEMFRTMLLARKIDERMWLLNRAGKIPFVISCQGQEAAQVGAAFALDREKDYALPYYRDMGVVLAFGMTAKELMLSGFAKAGDPNSGGRQMPGHFGQKKNRIVTGSSPVTTQVPHAVGIALAGKMEKKDLVTFVTFGEGSSNQGDFHEGANFAGVHKLPVIFMCENNKYAISIPVEKQLACKNVSDRAIGYGMPGYTVDGNDPLAVYKAVKEAADRGRRGEGPTLIETVSYRLTAHSSDDDDRVYRDKEEVEEAKKNDSIVTFAAYLKEVGVLTEESEKQMLDEIMHIVNEATEYAENAPYAAPEDALKHVYAE

SEQ ID NO: 2743 - protein, 94 aa, Bacillus halodurans C-125
MLKPLGDRVVIEQVETEEKTASGIVLPDTAKEKPQEGRVVAVGTGRVTENGEKIALEVKEGDSVIFSKYAGTEVKYDGKEYLILRESDILAIIG

SEQ ID NO: 2744 - protein, 544 aa, Bacillus halodurans C-125
MAKDIKFSEDARRSMLRGVDKLADAVKVTLGPKGRNVVLEKKFGSPLITNDGVTIAKEIELEDAFENMGAKLVAEVASKTNDIAGDGTTTATVLAQAMIREGLKNVTSGANPMVIRKGIEKATQVAVEELSKISKPIEGKDSIAQVAAISSADDEVGKIIAEAMERVGNDGVITIEESKGFSTELEVVEGMQFDRGYASPYMVTDSDKMEAVLDNPYVLITDKKISNIQEVLPVLEQVVQQGKPILIIAEDVEGEALATLVVNKLRGTFNAVAVKAPGFGDRRKAMLEDIAILTGGEVITEDLGLDLKSANITQLGRASKVVVTKENTTIVEGAGESDKIAARVNQIKAQIEETTSDFDKEKLQERLAKLAGGVAVLKVGAATETEMKERKLRIEDALNSTRAAVEEGIVAGGGTALVNVIKAVSSIGAEGDEATGVNIVLRALEEPVRQIAHNAGLEGSVIVERLKKEEAGFGFNAATGEWVNMVEAGIVDPTKVTRSALQHAASVSAMFLTTEAVIADKPEENEGGGGMPDMGGMGGMGGMM

SEQ ID NO: 2745 - protein, 473 aa, Bacillus anthracis str. A2012
MAKEYDLVIVGGGTGGYVAAIRASQLGLKTALVEKENLGGTCLHKGCIPSKALLRSAEVYATAKKSEEFGVIASNVELNFAKVQERKEKIVTQLHKGVQHLMKQGKIDVFEGIGRILGPSIFSPMPGTISVELASGEENEMLIPKNVLIATGSRPNSLPGLELDGEYVMSSDHALKMETLPSSIIIVGGGVIGIEWASMLADFGVEVTVLEYAKTILPLEDQDVSKEMQRLFKKKGIKVVTGAKVLPETLVKDNGVTIQAEHNGENKEFKAEKMLVSVGRQANTQNIGLENTDIVVEKGYIQTNEFYQTKESHIYAIGDVIGGLQLAHVASHEGIVAVEHIAGKEVTPIDYSMVSKCVYSSPEVASVGLTEQEAKEKGYKLKVGKFSFRAIGKALVYGESDGFVKLVVDEETNDILGVHMIGPHVTDMISEAGLARVLDATPWEVAHTIHPHPSLSEAIGEAALAVDGKALHA

SEQ ID NO: 2746 - protein, 489 aa, Methanosarcina acetivorans C2A
MDVIVVGGFLGSGKTTTVINMGKYLAEKGKKIAIIVNEIGEIGIDGDIIKKFGFDTKEITSGCICCTLKMGLRTTVDTLMKEYKPDILMIEPTGIAFPNSIKNEFKLMNLGEEVKVAPLVTLIDGSRFKHLMKEIKDFAMRQIIDAEILGINKVDLIDSLQIPILEVSVQQLNPTAKVVLLSGKDTGEKFENFIQLVLPGVKDIPNKTKKTEEETEPTQQDFENSNDTCGVDGSEENSSNVPYNHGDSFKHTVGSYSVEYSLKGGRDLSEETARIITTEIMNKIKEKALKLNPEFLGHIKLFLDNGSETVKQSITIYNEEPQEDLFKSNDGATPTFKVLSAVSKVEKEVLKNAVSSSVQETFEKMGIEIQQIKHSHDHEHHHGHDHHQGHDHHQGHDEEDEDCHHGQKHHREQHHHADEEEYHEEENDHEEHEHYGNDHHHKHDHIRKHGYGEQEHEHDVVHDCCCHECDHHKHYVHENYEPQKPHKLK

SEQ ID NO: 2747 - protein, 443 aa, Ralstonia eutropha JMP134
MSQPAPAPVDERLPWRQLFVFGLQHVLVMAASPIAAVFLMSKALNLPSALSVQLLSATFVVCGLGTLLQSLGRRGIGARLPFVMLPGGAPIVLFILIAQQTSVQTAAGAVIITGLFYFCALPVFRRCLRYFPPVVVGTMLLLVAINLAQVSGRLIAGHPAAGASVDPMNLLLAFVTIACTVAASRWFGGTLARLAILIGLVGGALSAMALGVFHAGQVSASPLLALPTPFPFGWPQFDVVAAIPLVVFAVISMVEATGQTLAISDAVGRPVDGERDVPRTIRADALASLLGGVFGTSLIITSGENIGIVRATGVRSRYVTAVSGLILVAFGLLVPVSSLISAIPEAVVGGTGLVVFCIVGTMGIDVLRRVDLRDHANMYVVAVALAAGLLPILVPGIYGALPPNLRILLGNGVAMGAFTAALLNFLFFHTGARRVADVAPVTH

SEQ ID NO: 2748 - protein, 451 aa, Methanosarcina acetivorans C2A
MDITFFHLQALFYKEGYRDRKIYFENRKVDTYISELKAGFYTTYYEHQKNDDSNKVAENGGKKVDVIVVGGFLGSGKTTTIINMGKYLAEKGKKVAIIVNEIGEVGIDGDVINRFGFDTKEITSGCICCTLKVGLRTTMDLLTKEYKPDIVMIEPTGIAFPNVIRTEVELMNLGEEVKVAPLVTLIDGSRFKNLMKEVKEFAMRQIIDAEILGINKVDLIEPIRIPIIEASVQQLNPKAKVVLLSGKDTGERFENFMQLVLPEIKENQEKTQVTTQKEKPVPSEVQETEDSIKASGVGSYAAEFEIKDGGSLSTEAARNLTAELMNTIKEKVLKLNPEFVGHIKLFLDNGLETVKQSVTIYYEEPQEEIIKSKEGATPTFKILSAVSNVEKEALKDSVNSSVHETFEKKGMDVHKVENGHGHGHEHHGHEHHEHEQHEHVQRITGIKSRKE

SEQ ID NO: 2749 - protein, 426 aa, Triticum aestivum
IRHELQREWGVGHPLRVVPLFEKLADLEAAPAAVARLFSIDWYMDRIGGKQEVMIGYSDSGKDAGRLSAAWQLYKAQEELVKVAKQYGVKLTMFHGRGGTVGRGGGPTHLAILSQPPETVNGSLRVTVQGEVIEHSFGEEHLCFRTLQRFTAATLEHGMHPPVSPKPEWRALMDEMAVVATEEYRAMVFKEPRFVEYFRSATPETEYGRMNIGSRPSKRKPSGGIETLRAIPWIFAWTQTRFHLPVWLGFGPAFNHIMHKDIRNVQALREMYNEWPFFRVTLDLLEMVFAKGDPGIAALYDELLVADELKPLGEQLRSNYEDTKKLLVQVAGHRDVLEDDPYLKQRLRLRDPYITTLNVCQAYTLKRIRDPSFQVTAQPPLSKEFTDENQPASLVKLNAASEYAPGLEDTLILTMKGIAAGMQNTG

SEQ ID NO: 2750 - protein, 222 aa, Glycine max
MATRVIPPRILRKLRYNTATKPLNSSHPPLSPSLSPSPCLLPAPLPSPAVLRPSAAASDDLSFRDVEKLFSSVSTTSLLRSSAVLHATAVEPMVDFGTWLLRSNLMHVHGIRDLILATVRNTFFDHFCAGEDAITTAASIRHLNRAGLRGMLVYGVEDANDNDACHRNFKGFLHTIDVSRSLPPSSVSFVIVKITAICPMSLLERMSDLLRWQHKDPCFSLP

SEQ ID NO: 2751 - protein, 440 aa, Streptomyces ansochromogenes
MVSAAEPKRTRKSVAAKSPAKRTATRTVAAKTVTTRKATATTAAPAAPTAAAAADSAEEAATAKKAAAKKTTAAKKATAKKTVAKKTAAKKTTAKKDAVGVLEDTKVADEPEGTETAGFVLSDEDEDDAPAQQVAAAGATADPVKDYLKQIGKVPLLNAEQEVELAKRIEAGLFAEDKLANSDKLAPKLKRELEIIAEDGRRAKNHLLEANLRLVVSLAKRYTGRGMLFLDLIQEGNLGLIRAVEKFDYTKGYKFSTYATWWIRQAITRAMADQARTIRIPVHMVEVINKLARVQRQMLQDLGREPTPEELAKELDMTPEKVIEVQKYGREPISLHTPLGEDGDSEFGDLIEDSEAVVPADAVSFTLLQEQPDSVLDTLSEREAGVVSMRFGLTDGQPKTLDEIGKVYGVTRERIRQIESKTMSKLRHPSRSQVLRDYLD

SEQ ID NO: 2752 - protein, 250 aa, Chrysanthemum x morifolium
MGRGRVELKRIENKINRQVTFSKRRNGLLKKAYELSVLCDAEVGLIIFSSRDKLYEFGSVGVMKTLERYQRCCFNPQDNNNERETQSWYQEVSKLKAKFESLQRTQRHLLGEDLGPLSVKELHNLEKQLEGALTQARQRKTQILVEQMEELRCKERELGDMNKHLKIKVSHELSTFETEGQGYRTHQLPCPWNSSNNNTFLMHPSQSNPMGCQQEQPILQIGDNQFMQGEGSSGQRNMVDETNIHGNWVI

SEQ ID NO: 2753 - protein, 331 aa, Listeria monocytogenes EGD-e
MTKVYYEDAVKNNALEGKTVAVIGYGSQGHAHSQNLRDNGNNVIIGIREGKSAESARNDGFDVYSVSEAADKADVIMILLPDETQGETYENEIKPNLKAGNSLVFAHGFNIHFDVINPPSDVDVFLVAPKGPGHLVRRTFVEGGAVPSLFAIYQDATGNARDTALSYAKGIGATRAGVIETTFKEETETDLFGEQAVLCGGATHLIQAGFETLVEAGYQPELAYFEVLHEMKLIVDLMYEGGMEKMRHSISNTAEYGDYVSGPRVVTADTKKAMKEVLTDIQNGNFAKSFINDNKNGFKEFHRMRKEQQGHQIEKVGAELREMMPFVKPQH

SEQ ID NO: 2754 - protein, 216 aa, Chrysanthemum x morifolium
MVRGKTQMRRIENATSRQVTFSKRRNGLMKKAFELSVLRDAEVALIIFSPRGKLYEFANSSMQETIERYRSHVKDIQTDTSSVEDVQNLKHETAAMAKKVEALEVAKRKLLGEGLGTSTIDELVQIEQQLERSVRIIRARKMQVYNEQIEQLHAKEKMLAAENAILTEKCIIKTDKATEEMGVDLNVLESGENSDVETELFIGLPETRMKQLSWPK

SEQ ID NO: 2755 - protein, 804 aa, ASPERGILLUS NIDULANS FGSC A4
MPHHEPSTADGWHGSIPDSFPAEPDRYHLYIGLFCPFAHRVNFVRHLKGLTELIDLSVVMPYPKGDSKGWPGWRFPASNDEYPGATVDRLFGEDYLHKIYFKADSGYKGRYSVPVLWDRKTGTIVCNESLELLRWLPNAFNDFIPSSLASIDLYPEHLRTVIDGLHSWILPHLCTGVYKAGFASDQDQYNKNVIPVFGALNKLEKIVFANGGPFILGYQMTEVDVTVYATLVRFDTVYVQHFKCNLGTVRHDYPVLNNWLKAMYWDVPAARESTDFRHIKENYTKSHYDINPKAITPLGPWPDVEEGVERDWTKLTVGGVSHPAVLEFEKELNEEQAARQPECLHSSLTYDPSPIAAQVHYTQPSVQDRQDAVTPSSPKETPAPPTRIDLKHFPAPLVLPGDDLALDPEQPPQSFQEWYDEEDRNPVTVKRRTVYLIGPPNVDRSAEEVNSWAAPTLGPETGTEAGYGAEGKKEAVLKPPAVDDILPYISAFFSGLPVKKLRPPPSKWKFTPWTEELPKRSKKVSYIALTTPKGEAIRIRTRPCPASDKLYLRQLNLDDLLDVAISILPEDAYALCMLVHHDLFEDDEDIFVCGRAYGGSRVAVVSTARYNPLLDDSLYVGRDHAWPGSHCVCYIEDICKDHDPDDSGTHSGRKRKRKKPGIRQQPHNRSGPLESALAAFISTPPQAGGDDLPALWRYRILRTVSHELAHCFGLDHCVYYACIMQGSASLAEDARQPPYLCPVDLAKVLAATGSSGQKRDQALLEYCEQPGTRDNKHFAALGAWLRWSLQLGSGSSSSLDGGLS

SEQ ID NO: 2756 - protein, 567 aa, Streptococcus pneumoniae
MALEVIMPKAGVDMTEGQIVQWNKKVGEFVKEGEILLEIMTDKVSMELEAEEDGYLIAILKGDGETVPVTEVIGYLGEERENIPTAGAASPEASPVPVASTSNDDGKSDDAFDIVVIGGGPAGYVAAIKAAQFGGKVALVEKSELGGTCLNRGCIPTKTYLHNAEIIENIGHAANRGIVIENPNFTVDMEKLLETKSKVVNTLVGGVAGLLRSYGVTVHKGIGTITKDKNVLVNGSELLETKKIILAGGSKVSKINVPGMESPLVMTSDDILEMNEVPESLVIIGGGVVGIELGQAFMTFGSKVTVIEMMDRIVPAMDVEVSKNLRLILERKGMTILTGTKLQEIIEENGQLRIKVEGKDDIIASKALLSIGRMPDLEGIGEVEFELDRGCIKVNEYMETSVPGIYAPGDINGTKMLAHAAFRMGEVSAENALKGNHAVAKLNLTPAAIYTLPEVAAVGLTEEQAREKYDVAIGKFNFAANGRAIASDAAQGFVKVIADKKYGEILGVHIIGPAAAELINEASSIIEMEITVEEMLKTIHGHPTYSEVMYEAFADVLGMAIHSPKKK

SEQ ID NO: 2757 - protein, 567 aa, Streptococcus pneumoniae
MALEVIMPKAGVDMTEGQIVQWNKKVGEFVKEGEILLEIMTDKVSMELEAEEDGYLIAILKGDGETVPVTEVIGYLGEERENIPTAGAASPEASSVPVASTSNDDDKSDDAFDIVVIGGGPAGYVAAIKAAQFGGKVALVEKSELGGTCLNRGCIPTKTYLHNAEIIENIGHAANRGIVIENPNFTVDMEKLLETKSKVVNTLVGGVAGLLRSYGVTVHKGIGTITKDKNVLVNGSELLETKKIILAGGSKVSKINVPGMESPLVMTSDDILEMNEVPESLVIIGGGVVGIELGQAFMTFGSKVTVIEMMDRIVPAMDAEVSKNLRLILERKGMTILTGTKLQEIIEENGQLRIKVEGKDDIIASKALLSIGRMPDLEGIGEVEFELDRGCIKVNEYMETSVPGIYAPGDINGTKMLAHAAFRMGEVSAENALKGNHAVAKLNLTPAAIYTLPEVAAVGLTEEQAREKYDVAIGKFNFAANGRAIASDAAQGFVKVIADKKYGEILGVHIIGPAAAELINEASSIIEMEITVEEMLKTIHGHPTYSEVMYEAFADVLGMAIHSPKKK

SEQ ID NO: 2758 - protein, 567 aa, Streptococcus pneumoniae
MALEVIMPKAGVDMTEGQIVQWNKKVGEFVKEGEILLEIMTDKVSMELEAEEDGYLIAILKGDGETVPVTEVIGYLGEERENIPTAGAASPEASPVPVASTSNDDGKSDDAFDIVVIGGGPAGYVAAIKAAQFGGKVALVEKSELGGTCLNRGCIPTKTYLHNAEIIENIGHAANRGIVIENPNFTVDMEKLLETKSKVVNTLVGGVAGLLRSYGVTVHKGIGTITKDKNVLVNGSELLETKKIILAGGSKVNKINVPGMESPLVMTSDDILEMNEVPESLVIIGGGVVGIELGQAFMTFGSKVTVIEMMDRIVPAMDVEVSKNLRLILERKGMTILTGTKLQEIIEENGQLRIKVEGKDDIIASKALLSIGRMPDLEGIGEVEFELDRGCIKVTEYMETSVPGIYAPGDINGTKMLAHAAFRMGEVSAENALKGNHAVAKLNLTPAAIYTLPEVAAVGLTEEQAREKYDVAIGKFNFAANGRAIASDAAQGFVKVIADKKYGEILGVHIIGPAAAELINEASSIIEMEITVEEMLKTIHGHPTYSEVMYEAFADVLGMAIHSPKKK

SEQ ID NO: 2759 - protein, 135 aa, Fusarium proliferatum
EAFSLFDKDGDGQITTKELGTVMRSLGQNPSESELQDMINEVDADNNGTIDFPEFLTMMARKMKDTDSEEEIREAFKVFDRDNNGFISAAELRHVMTSIGEKLTDDEVDEMIREADQDGDGRIDYNEFVQLMMQK

SEQ ID NO: 2760 - protein, 491 aa, Treponema denticola ATCC 35405
MKIMMVTSELVPFAKVGGLADAVTALSIALAEKRHDVRVVMPRYYKIDRKNLKQIPGAMAVHLGPYEHWVGVYESNLPSSKVKVYFIDHEQAFGRDGVYGSAFEPDFSDNTKRFSLLAHAAFQVCRKQAWIPDVVHAHDWAAGLVPVLLRFTEKNTEFKNTASVFTIHNMGYQGVYSKHTFPDTGLDWNDFYTTGFEDWDRINFLKAALVSSDMLTTVSPSYAEEIKRPEFGFRMDGILRYREKELTGILNGVDTSIWNPSKDEYIPYRYNSKTLEEKEKNKSVLQERFGLEIDISVPVFGMISRLVDQKGISELFGPMYGSAFKICSDIKLQMVVLGSGESWCEKELNFLSQRLPNFRCYIGYNEELSHLIEAGSDFFLMPSRYEPCGLNQMYSLLYGTLPIVRKTGGLADTVENYNEETGEGTGFVLDYLSPQSIYDTVGWAAYAWYNKKDHIKKMRTKAMSKKFGWNIAAEKYLKVYADAIEKKASML

SEQ ID NO: 2761 - protein, 276 aa, Prochlorococcus marinus subsp. pastoris str. CCMP1986
MSIETKKYNNLISISTELRKRIIKTSYEAKIPHIGSCLSCIELLVFLYWKELNIDPSNSEAINRDRFILSKGHGAPALFQVLGLKGFFPIERLNSFGKPGSVFHEHPPKPGYIPGIEAATGSLGHGFPMAVGMSLAKRINNLQYRTYSILSDGECNEGSIWEAAMFAGAQKLDDLTIFIDFNKWQATGRSKEVLALDPLKEKWQSFGWDVYEIDGHKFNQIDKSIELAKTNKNKPSAIIAHTIKGKGVSFMEDNNNWHYKTPNEEEFKKAFEELKN

SEQ ID NO: 2762 - protein, 225 aa, Burkholderia vietnamiensis G4
MSIRFCRKGVLMNRPKSMLVANIAWARETREHTPGFFDTLARGQNPRVLWIGCSDSRVPAETITHSVPGELFVHRNIANLFHPDDDNSASVLEYAVRVLKVDHVIVCGHYGCGGVRASLLPPPADLPHVARRIAPLCALARRHRDTLGGLDETAAADRLAELNVLEQVRLLRASPIVRDRERPPLVHGWIFSLADGRLKELDSGYTAPEPAESDLEHAATAAAVG

SEQ ID NO: 2763 - protein, 305 aa, Prochlorococcus marinus subsp. pastoris str. CCMP1986
MRDAFANEIKRLSEANKNVVLLSGDIGNRMFDKYKSVSPERFFNCGIAEANMMSLASGMALCGLKPVIYTITPFTTTRCLEQIRIGVAYHNAPVVIVGTGSGLSYSELGPTHHSLEDIAILRAVPNINILTPSDKQELTTQLQEAISMNTPSYMRIGKKGEPDLFNESHNLGIGKANILKEGEEILIIGIGPILIEAIEAAKSLKNDGLNIGVASMGSIRPLDDDFLRKMISKKYKYWITLEEHGIVGGLGSTLIEWCSDKQLYDIKIKRLGVKNEFIHKLGNQSYTRNILGIDKKGIINTIKEL

SEQ ID NO: 2764 - protein, 881 aa, Cryptococcus neoformans var. neoformans B-3501A
MQPQQHTHNNNPSPVARPHPLHVVYSPTIPPPNRGTRNSELAQGSKIPLTAPLPSRTAAATSPNRKRPTPLVLGKPREAGPEDWEIQLERPVAASSGASDDHSLDNELQDLSKLRKAVRQNLLARPIDSPLEPSDSDKSAFNTPGQQSSFSSSSKPMESIPIELVFDRVESGSVLLVDTRPLASFLNSHLPNSIPLSVPTLLSKRFQKSQSQSNPSAISWATLSPFVSLPSARERWDSADQNKVEIAVICQGEEGRVVEDILKSLINDRTKVVKGGWAAVLNYERARRTLVSGQATTRPCLDMGVSETDSKPRPEPTSILLPPKSAPPCEIPLPPIPASPSPSSPKSLNHRPSLPSLRPPFAGPTRNLPSLSINAGQASQRRTPKLSLNLDRPLKSATLGGYHDIPPTPHGFLCTRTRPQRSPGLSLNIPHTPFQPQQGQVQDRIVGDSRSNGSASIQTIAYEQSHFPPSASTFGDAKQIENEGEDMAPNQYDGRTPRAPISHIPRKSQEYQAARFYSSPPSMNGALPSSPPTIRTAVAPFNPSVILPSFLYLGPDIQSESDVQYLLRLGVKRILNVALECDDNQGLSLKERFKYRKVGMRDIVEENGVGKGMRDACEFLDDARLHSAPTYVHCQAGKSRSVTIILAYLIHANAWTLKTSYAYVAERRKGISPNIGFVAELMQWEETELGVKQSGGVHGDGNGRAKTAGCGGGGGSSRHKEDGDDDEGRGKTHLRDSLPPTWSSSVDTYTRPAKVYSPVGGDDGGEEEGGREGRIAVGDEREVRKNGVWVHHRRAPVDRTTLQPGRRVSKAGLESLQPFLITSADPSSPSAAPNNGDNIDNEHQLNNNNDSETRPSPRAISGMGMRGHAMTPAGDGPLRWI

SEQ ID NO: 2765 - protein, 338 aa, Mycoplasma pneumoniae M129
MSETKSKVLVLGGLGYIGSCFIDQLLKQYPDVTVSVIDINHTSLALQLLPRQVNVHFVNLLDRAQLTDTIAQINPDVVFHFAAKTSVKESTEQPLTYFDHNLVGTLNLLHALKELQKPIQLFFSSTAAVFGSASTLPIPENLVLEETLASNPYGISKFLSEIVLQTLTRSPHFQVIALRYFNVAGASNPFGNFNKNTTLLIPNLIKAFMEKRTFFLYGDDYDTKDGSCIRDYIHVVDLCDAHLLAWKWLQANPKVRFESFNLGSGQGFSNWEVINTAQAIFAPEQLQLKIESRRAGDPPVLVVDCTKAKRLLNFQPTRSLHKMLSDETIFYRDFYNRL

SEQ ID NO: 2766 - protein, 535 aa, Arabidopsis thaliana
MDIGVHVLGSVTSNENESLGLKELIGTKQDRSGFIGEDCLQRSLKLARTTTRAEEEENLSSSVAAAYCKTMSFHQGIPLMRSASPLSSDSRRQEQMLSFSDKPDALDFSKYVGLDNSSNNKNSLSPFLHQIPPPSYFRSSGGYGSGGMMMNMSMQGNFTGVKGPFTLTQWAELEQQALIYKYITANVPVPSSLLISIKKSFYPYGSLPPSSFGWGTFHLGFAGGNMDPEPGRCRRTDGKKWRCSRDAVPDQKYCERHINRGRHRSRKPVEVQSGQNQTAAAASKAVTTPQQPVVAGNTNRSNARASSNRSLAIGSQYINPSTESLPNNRGVSIYPSTVNLQPKESPVIHQKHRNNNNPFEFGHISSDSLLNPNTAKTYGSSFLDFSSNQEKHSGNHNHNSWPEELTSDWTQLSMSIPIASSSPSSTHNNNNAQEKTTLSPLRLSRELDLSIQTDETTIEPTVKKVNTWIPISWGNSLGGPLGEVLNSTTNSPTFGSSPTGVLQKSTFCSLSNNSSVSSPIAENNRHNGDYFHYTT

SEQ ID NO: 2767 - protein, 366 aa, Bacillus anthracis str. A2012
MALEIFEYLEKYDYEQVVFCQDKESGLKAIIAIHDTTLGPALGGTRMWTYDSEEAAIEDALRLAKGMTYKNAAAGLNLGGAKTVIIGDPRKDKSEAMFRALGRYIQGLNGRYITAEDVGTTVDDMDIIHEETDFVTGISPSFGSSGNPSPVTAYGVYRGMKAAAKEAFGTDNLEGKVIAVQGVGNVAYHLCKHLHAEGAKLIVTDINKEAVQRAVEEFGATAVEPNEIYGVECDIYAPCALGATVNDETIPQLKAKVIAGSANNQLKEDRHGDIIHEMGIVYAPDYVINAGGVINVADELYGYNRERALKRVESIYDTIAKVIEISKRDGIATYVAADRLAEERIASLKNSRSTYLRNGHDIISRR

SEQ ID NO: 2768 - protein, 303 aa, ASPERGILLUS NIDULANS FGSC A4
MEETRVNLLEYLRSKTQVDLDTFDITGISFPRLLEHTLNLETVAAGLHDQFPEVTFDELGVEVGAVLLAGEMVPAFTGNLHLMVNPSYAYSREKVIEAAKSTPSPISLYPVLPATWEGLQACRDLQAFKIKTLGTTLFSMEQAILAGEAGCVSISPFVHSLRILVDPEYKDPHPVYNLSAQAQRWYRRQSLPTKVKSCSTVGVDELLELAGIDALTIIPDDLRALQSTYRDANQVFKLSIVENGTQNDDKIEHISYINDEEKYRADFQKADEGRAKAKTAEAIDIFCGFQAKAEDVIRKAKGQ

SEQ ID NO: 2769 - protein, 156 aa, Thermus thermophilus HB8
MAMTLVRRDARPMELTPFRTWSPFTLVDEVNRLFEEAFSDLVRPAAAYVAPADLYETDEALILEMAVPGMTPEDLEVSLEGNKLTIRGQVKPVADERVRRYYLQEMAHGSFVRTFTLPVEVDASGVKAEFRNGILRLTLPKVAEARARRIPIEVVQ

SEQ ID NO: 2770 - protein, 310 aa, Triticum aestivum
MAATKLSSGHEMPAVGLGVWRMDSAAVRGLIHSALRAGYRHFDCAADYKNEAEVGDALAEAFQTGLVKREDLFITTKLWNSDHGHVVEACKDSLKKLRLDYLDLYLIHFPVATKHTGVGTTGSALGDDGVLDIDTTISLETTWHAMEDLVSMGLVRSIGISNYDIFLTRDCLAYAKIKPAVNQIETHPYFQRDSLVKFCQKHGICVTAHTPLGGSTANTEWFGSVSCLDDPVIKSLAEKYGKTPAQLVLRWGLQRNTVVIPKTSKVERLEENFAVSDFDISGEDMEKIKALDRRYRTNQPAKFWGIDLYA

SEQ ID NO: 2771 - protein, 293 aa, Ashbya gossypii ATCC 10895
MDYSTGQYSDIWSYKYTSSVSKEWSRLAADGVNSRFYVEQFNENIRSIEDVLQGLTTVIQRSDYDTSSSEFSSDAEFAVSNTTQGNTSVGNAQDLLPGSAVEAGTVSQARKYAEAYPMYRRMPAPAGVSGGAAAIVPEGSRFFVIKSFNLENIKASFKHGVWTSTKRGNKRLSKAYVGLPAGARIFLFFSVNKSGKFCGVAEMKSNILQGDSRNKIWQCEAGHQFNDLFLVEWTCVCDVHNRLLKHFNIMDTEGSFKPVTHARDADEVDIEIGRTILKLFTNTKKNRSSFLED

SEQ ID NO: 2772 - protein, 581 aa, Oryza sativa (japonica cultivar-group)
MRLSSLLFLVCFFTVAMSQCAAAAKARHFRWEVSNMFWSPDCEEKVVIGINGQFPGPTIRAKAGDTIVVHLKNGLHTEGVVIHWHGIRQIGTPWADGTASISQCAINPEETFTYRFVVDKPGTYFYHGHYGMQRAAGLYGSLIVDVADGDEEPFKYDGEINLLLSDWYHESIYTQMVGLSSNPFRWIGEPQSLLINGRGQFNCSLAAAHTPGAKQCAAAGNRHCAPVILPVLPNKTYRLRVASTTSLASLNLAVGNHKLTVVEADGNYVEPFAVDDIDIYSGDSYSVLLTTDQDTSANYWVSVGVRGRQPRTAPALAVLNYRPNRASRLPAAAPPATPAWDDFARSKAFTYRILGRAGVTPPPPATSDRRIELLNTQNRMGGGHVKWSINNVSMVLPATPYLGSLKMGLRSALPSAARPSDTFGRGYDVMRPPANPNTTVGDNVYVLAHNATVDVVLQNANALARNVSEVHPWHLHGHDFWVLGYGDGAFRGDAGDAAALNLRNPPLRNTAVIFPYGWTAIRFVADNPGVWAFHCHIEPHLHMGMGVIFAEAVDRVSELPKAAVSCGATATALMAGAGGHV

SEQ ID NO: 2773 - protein, 378 aa, Arabidopsis thaliana
MSTMSDLFPDLVEEILSRVPITSLKAVKLTCKQWNDLSKDSSFTKNHYGKEAKEIQVIMICDLKACLMSVNLHNHKDLADPSIKQIGKLNQVEIDSVFHCDGLLLLLLCNPKDNSKLMVWNPYLGQTRWIQPRNNSHKHRPAGRFNHRPAGRFYMGYDSNNNHKILWFSSMYREYEIYDFKSDAWTVIDVNTDQDHIIDNQRVSLKGNVYFIAHDILKEEAFLLSFDFTCERFGPSLPLPFHCCHEDTVLLSTVREEQLAVLFQKSDAYEMGIWITTKIELNIVLWSKFLKVDMTLPNSYWFEDLSFFLVDEKKKVAMVSELDIETCKNYKTYILGENGYYREVDLRKSKGCVYLCVLMFQVWCKSSKVPVLARCERK

SEQ ID NO: 2774 - protein, 219 aa, Escherichia coli O157:H7
MKEIIDGFLKFQREAFPKREALFKQLATQQSPRTLFISCSDSRLVPELVTQREPGDLFGIRNAGNIVPSYGPEPGGVSASVEYAVAALRVSDIVICGHSNCGAMTAIASCQCMDHMPAVSHWLRYADSARVVNEARPHSDLPSKAAAMVRENVIAQLANLQTHPSVRLALEEGRIALHGWVYDIESGSIAAFDGATRQFVPLAANPRVCAIPLRQPTAA

SEQ ID NO: 2775 - protein, 367 aa, Methanosarcina acetivorans C2A
MKCMIIGGFLGSGKTTTIRKLVEYLGARGQRTAIIVNEIGEIGIDGDIISGGEVETREITSGCICCTLRISMEQTLRNLMLTYSPDTIIIEPTGIAFPRQIKSNIESMDLPEISITPIVNLVDPSRLSPNVEDLQNFVRNQIEDAEILGINKVDLIGQEKLLETCLLLRKLNPRARIVHFSARQGGEGLDKFFGLIGVSNKDKTASEVRNSVKAKNPIEERNSVEMSGVSAYSTEFEITSQEIPLETAVSVSGQILDSIRTRMTQLNPEFTGHIKVSFAHKENFVKGSVTSAHEKPEIEILKKEKNPSSRLKILSAVTSVPREELIRTVDTTASGQLEDRKLSYRKVEKSNHGYSQVPISILKQKNF

SEQ ID NO: 2776 - protein, 521 aa, Carboxydothermus hydrogenoformans Z-2901
MKKENQTQEIEERYQALFSNAAAVKALTQVVANSLGPKGLDAMLVDRFGEVVVTNDGVTILTLMDAQHPAARMVVNMARAQEREVGDGTTTAAVLAGALVSEGVNQILKGVPVSKVLAGMNRALNHALFLIRKNAIKVGSITDDRLLAAAKIAGRGDERVAAILRDAAAMLEDKLQDPGFKLADLVLAKVGADTTLIPGVVINKSPLWEEGSQKLQEVRLLVLDDGLYPEEVEEEALASEAGFEQYLKNQKIFQENLKKLKELGVKLILLTRGISDIAEEFCYENEIMVITRITQKELKRVLEFTGARAAKRTSLNKPVEELQKMLGYARTCFYDSRLDFTIIEGGAGKATATVLIGAATDEVVDEQERIAKDAAGSFAAAYRSGVLPGGGAFFLYLSREVESLKNRLPGMESYGVMAFSEALKVPFRVMAENAGFNGLEKLGDLMTLQVQKNNYALGLDFETGEFIDMIAGGVVDPAEVVYQAVKNASEVAISLLKINTIIKMKDYEVLKEGEQEDGGKR

SEQ ID NO: 2777 - protein, 442 aa, Arabidopsis thaliana
MTATEAKNRKINVGDGDDVVDIEIPDTAHQISSDSWFQVAFVLTTGINSAYVLGYSGTIMVPLGWIGGVVGLLIATAISLYANTLIAKLHEFGGRRHIRYRDLAGFIYGRKAYHLTWGLQYVNLFMINCGFIILAGSALKAVYVLFRDDHTMKLPHFIAIAGLICAIFAIGIPHLSALGVWLGVSTFLSLIYIVVAIVLSVRDGVKTPSRDYEIQGSSLSKLFTITGAAANLVFAFNTGMLPEIQATVRQPVVKNMMKALYFQFTAGVLPMYAVTFIGYWAYGSSTSTYLLNSVNGPLWVKALANVSAILQSVISLHIFASPTYEYMDTKYGIKGNPFAIKNLLFRIMARGGYIAVSTLISALLPFLGDFMSLTGAVSTFPLTFILANHMYYKAKNNKLNAMQKLWHWLNVVFFSLMSVAAAIAAVRLIAVDSKNFHVFADL

SEQ ID NO: 2778 - protein, 591 aa, Dechloromonas aromatica RCB
MSNLVEVKVPDIGDFAEVPIIDLFVKVGDSIKVDDAICTLESDKATMDVPSPVAGVVKEVLVQLGAKVAEGSLLIKVESGAAAAAPAPQAAAPAAAPAAVPVAAPVAGSHAGGADIECEMLVLGAGPGGYSAAFRSADLGMKTVIVERYATLGGVCLNVGCIPSKALLHVAAVMEEAEHANDLGVTFAAPTVDIDKLRAHKDKVVGKLTGGLAGMAKGRKVEIVRGYGTFIDPHHIEVEVTDGTGQDKTGAKKIVKFQKCIIAAGSAAMHLPFIPKDPRIVDSTGALELRFVPEKMLVIGGGIIGLEMATVYSTLGAKVDVVEMMDGLMQGPDRDAVKVWEKQNAKRFDKIMLKTKTVAVDAKDDGLYVKFEGEGVSPEPVKYDMILQAAGRTPNGNKIGADKAGVAVTERGFINVDAQMRTNVPHIFAIGDLVGQPMLAHKAVHESHVAAEAAAGQKSAFDASVIPSVAYTHPEVAWVGVTEDQAKKDGRKIEAAKFPWAASGRAIANGADYGFTKLIFDAETHRVIGGAIVGPNAGDMIGEVCLAIEMGCDSVDIGKTIHPHPTLGETVGMAAEVAHGTCTDVPAPRKK

SEQ ID NO: 2779 - protein, 378 aa, Magnetococcus sp. MC-1
MSKDLYEILGVSKGANDAEIKAAYRKLAMKLHPDRNPGNDAAEAQFKEVNAAYEVLKDPQKRTIYDQYGHAGLGQGGPGGPGGFGGQGGAGFGDIFEEFFGDIFGGGRQTRGGGRSGARQGEDYRYDLRVTLEEVARGVEKRVRIPSMSTCDTCHGSGARSGSKPTTCTTCGGAGQIRTQQGFFQVQRACHVCHGKGQIISDPCPDCGGAGRQKKEKTLTVKIPPGVDTGTRIRLSGEGGAGIQGGPAGDLYIITEVEPHSMFERYGVDLLCVVPITFPQAALGAKLEVPTLNGKARITLPAGSQTGKRLVLRSKGLPHLNRPGMLGDLVVEVRVETPVKLTTKQKELLEEFDRCGDPDSQPDSVGFFDKVKEFLGGN

SEQ ID NO: 2780 - protein, 529 aa, Oryza sativa (japonica cultivar-group)
MQFSSVFPLEGKACVSPIRRGGEGSASDRLKIGDSSSIKHDRAVRRMCLGYRGTKNGAQCVLTSDAGPDTLHVRTSFRRNFADPNEVAAVILGGGTGTQLFPLTSTRATPAVPIGGCYRLIDIPMSNCFNSGINKIFIMTQFNSASLNRHIHRTYLGGGINFTDGSVEVLAATQMPGEAAGWFQGTADAVRKFIWVLEDYYKHKAIEHILILSGDQLYRMDYMELVQKHVDDNADITLSCAPVGESRASDYGLVKFDSSGRVIQFSEKPKGTDLEAMKVDTSFLNFAIDDPTKFPYIASMGVYVFKRDVLLNLLKSRYAELHDFGSEILPRALHEHNVQVKVFKLEHYYAYVFADYWEDIGTIRSFFDANMALCEQPPKFEFYDPKTPFFTSPRYLPPTKSDKCRIKDAIISHGCFLRECTIEHSIVGVRSRLNSACELKNTMMMGADLYETEDEISRLLSEGKVPIGVGENTKINNCIIDMNARVGRNVVITNSEGVQESDRPEEGYYIRSGIVVILKNATIKDGKVI

SEQ ID NO: 2781 - protein, 323 aa, Cryptococcus neoformans var. neoformans JEC21
MPTSLEALKASGTTVVADTGDFSSIDEFKPQDATTNPSLILAAVKMPAYAKLLEPAIKYAKSKGGDIEVQSENAMDRLLVEFGTEILKIIPGRVSTEVDAKFSFDTQATINKAHQIIALYKEQGIDKNRVLIKIASTYEGILAAKQLESEGIHCNLTLLFGFGQAVACAEAGVTLISPFVGRILDWYKKANPDTTYTAETDPGVQSVQKIYNYYKQHGYKTIVMGASFRNTGEIAALAGCDFLTISPKLLDELNKSQDDLPKKLDASSTGEPIPKTSYLDDEAKFRWALFEDVMAFDKLHEGIRGFAKDGASLKQMLIEKLKA

SEQ ID NO: 2782 - protein, 734 aa, Crocosphaera watsonii WH 8501
MKNCYCINPYCREPNHPSNNNTQTKFCGSCGSILLLNNKYRVSRLLSDNSGFGIIYEAFAGFNSKILKVLQEKWNNDTKAVELFRREYDVLLSLTQQNITGIPQAEDYFQYQNREGKIFYCLVMEKVEGIDLEKWVKKDNKLHQKQALNCLREVTLILDKIHQQNWFHRDIKPANIMKRNNGKLVLIDFGTAREETQTYYQKVKGESITGINSPGYTPNEQQHGQAVVQSDFFALGRTFVHLLTGKHPSDLYDALNDEFKWRGEIKDIDPLFLDLIDHLMQRFPKHRPKNTRVILEKLDEIEKKINPPPKPIKKQPQVIAKIPQPTVKQKPSQVISNKSQGVIKKKTPKKKEHIFVRVIKTGLISTSIFGVLAFILVEGYVLFKYKYNILKNFTYPINLLYDFKLLSSDIRSSRFLDKTIRGHFKSVNSVAYSPDGKYLASGSWDNTVKIWEVKTGKLIRTFEGDFSSVAYSPDGRYLATYREPDFDTIENPIKIWEVKTGKLLRTLKGHSKGVHSIAYSPDGKYLAISNWENPVKIREVNTGKLIRTFEGYSILVAYSLDGKYLATESENTIKIWEAKTGKLVRTLTGHSDSVVSVAYSPDGKYLASGSWDNTVKIWEVKTGKSIRTLTGFSGWLSSLTSISYSPDGKYLAARCNIARVSHDSMLDDTVKKWDVGHPICTWEVATGKVIQTLTGHASNINSVAYSPDGKYLASSSSDRQIKIWRVEQITCVGA

SEQ ID NO: 2783 - protein, 243 aa, Cyanidioschyzon merolae strain 10D
MLIAYLTAGAPDINTTKEAVMKLAKKGADVIEIGVPYSDALADGAILQKASKQALMNGFHLDHLWNLLSEVNEIEVPLVILAYYNQIWHYGVEKWVKKLVAHNVKGLIVPDLPYEESKTLRQICDRYGLNIIWLISPTTNKTRAQELARACKDWIYVISRTGVTGLETEFDKQIPKLIGELKKVTKAPIALGFGISKSEQVKLVKSWGADGVIIGSACMQILLEKGVDQLSEWISVMKKSFCP

SEQ ID NO: 2784 - protein, 235 aa, Citrus sinensis
MAEEIKKQQKSHEYEPSVGTEGAVETKDRGMLDFLGKKEEEKPQHHDQEVIATEFEKVHVSEPQPKAEEHRKEEKEEEKKPGFLDKLHRSTSSSSSSSDEEEGDDEEKKKKKKEKKGLKEKLKEKISGEKEEDTTVPVEKLDDVHAPHHQEEAHPEEKKGFLNKIKEKLPGQQKKPEDHQVPSPPAAEHPTSVEAPEQRPRRRRAYWRNSRRSPLATTQSLRTKRIRTKKLLPIN

SEQ ID NO: 2785 - protein, 408 aa, Francisella tularensis subsp. tularensis SCHU S4
MKKLPVTVLSGFLGAGKTTLLNNILNNANGLRIAMIVNDMNEINIDAELIKNHDSHISKTEAKMVELSNGCICCTLREDLLVEVEQLAKSQKYDYLIIESTGISEPLPVATTFEFRDEDGKSLADIAYIDTMVTVVDSVNFMNHYSSSEYLKNTSESLGEDDDRAIVDLMVEQIEFANVIILNKINECSTAEKETVKSIIKGLNVDAEIIETNFSKVDINKVINTKKFNLEEAENHPLWSKELYNFKEHVPETEEYGIRSFVYHSINPFDPVKIMNFFDNVDWPGVVRAKGFFWLATRPDYVGEVSQAGALIRHQGMGMWWASMDKDQWPDTPEFKQMLKDRWNDISGDRRQEIVFIGLKDEMKDEQIKAALDQCLINDYWNNPEKYANLVDPFPAWFESDDEEVKNE

SEQ ID NO: 2786 - protein, 904 aa, Escherichia coli K12
MGFALMALLTLTSTLVGWYNLRFISQVEKDNTQALIPTMNMARQLSEASAWELFAAQNLTSADNEKMWQAQGRMLTAQSLKINALLQALREQGFDTTAIEQQEQEISRSLRQQGELVGQRLQLRQQQQQLSQQIVAAADEIARLAQGQANNATTSAGATQAGIYDLIEQDQRQAAESALDRLIDIDLEYVNQMNELRLSALRVQQMVMNLGLEQIQKNAPTLEKQLNNAVKILQRRQIRIEDPGVRAQVATTLTTVSQYSDLLALYQQDSEISNHLQTLAQNNIAQFAQFSSEVSQLVDTIELRNQHGLAHLEKASARGQYSLLLLGMVSLCALILILWRVVYRSVTRPLAEQTQALQRLLDGDIDSPFPETAGVRELDTIGRLMDAFRSNVHALNRHREQLAAQVKARTAELQELVIEHRQARAEAEKASQAKSAFLAAMSHEIRTPLYGILGTAQLLADNPALNAQRDDLRAITDSGESLLTILNDILDYSAIEAGGKNVSVSDEPFEPRPLLESTLQLMSGRVKGRPIRLATAIADDMPCALMGDPRRIRQVITNLLSNALRFTDEGYIILRSRTDGEQWLVEVEDSGCGIDPAKLAEIFQPFVQVSGKRGGTGLGLTISSRLAQAMGGELSATSTPEVGSCFCLRLPLRVATAPVPKTVNQAVRLDGLRLLLIEDNPLTQRITIEMLKTSGAQIVAVGNAAQALETLQNSEPFAAALVDFDLPDIDGITLARQLAQQYPSLVLIGFSAHVIDETLRQRTSSLFRGIIPKPVPREVLGQLLAHYLQLQVNNDQSLDVSQLNEDAQLMGTEKIHEWLVLFTQHALPLLDEIDIARASQDSEKIKRAAHQLKSSCSSLGMHIASQLCAQLEQQPLSAPLPHEEITRSVAALEAWLHKKDLNAI

SEQ ID NO: 2787 - protein, 197 aa, Leptospira interrogans serovar lai str. 56601
MFNFKILIFIYIIFFSPNLMATPKTEKATFAGGCFWCMEGPFESLPGVISVVAGYSGGKEFYPTYQEVSRGKTGHRESVQIEFDSSKIRYEELLTVFWNQIDPTDNGGQFADRGNQYRTGIFYHNQTQKKAAEKSKREISESKKFPGSIVVEIIPFTSFYPAEDYHQNYYKTNSEQYKKYKKYSGREDYLEKMCRQR

SEQ ID NO: 2788 - protein, 449 aa, Listeria monocytogenes str. 4b H7858
MEKHYDYIAIGGGSGGIASINRAAMHGAKCALIEPKFLGGTCVNVGCVPKKVMWYGAQIKEAMDLYADAYGYQVDASFNFQKLVENREAYIERIRGSYKNGLDNNKVEWIKGYAEFVDEKTLRVNGELVTADHILIATGGEPALPSIPGAEFGITSDGFFALKELPKKVAVVGAGYIAVELAGVLQQLGSETHLFVRKHAPLRNFDPLLTDTLTEIIEQSDMTLHKHAVPQKVEKNPDGSLTLSLEDGRTETVDTLIWAIGRKPVIQGLQIEKAGVKLLESGHIAVDKFQNTNVAGIYAVGDVTGHYELTPVAIAAGRRLSERLFNNKKDAHLNYENIPTVVFSHPAIGTVGLTEPEAIEKYGKENIKVYTSSFTSMYTAITDHREPCRMKLICEGKTERVIGLHGIGYGVDEMIQGFAVAINMGATKADFDNTVAIHPTGSEEFVTMK

SEQ ID NO: 2789 - protein, 621 aa, Bordetella pertussis Tohama I
MTRASMHPRAEGLPRGDWPALTLPQMLREQARRQPARIALRQKDYGIWQPIDWATYWRRACQVALGLRAAGLEPGGKVAIIAENRLEWLLAQMGAGVLGAVPVGVYCTSPAAEVGYVLEHAEVDMVVCEDQEQTDKVLEVAARLPGLRRIVVMETKGLRNHAEAERARMISFAELEARGAQCGAAEQARLEQALDAQTLDDVGLMIYTSGSTGKPKGVMISYRNMRGVAPGIADRLDMDAGSVHLSYLPLCHVAEQMLSTFVPVYLGSQVNFGESIRTVQEDLREVAPTVFLGVPRIWEKLHAAISIKMQESGRLRRWLYARALRGCAPFLELSRARYGWRERLVYGWHYALILRALHNFVGLRRVKVAMTGAAPIPPEVLRYFRTLGIPLIEVYGLTESTGMIFGQHPDRVRVGTVGEPTLGVQARVGEQGELLVRGEMVFHGYYRNPQASADTVCDGWLHTGDVVALEDGQYRIVDRLKDIMITAGGKNLTPSEIENAVKGSPYVKECIAIGDQRRYVAALIQIEYDTVAKWAELNGIAYTHFRSLAEHPRVRQLVHGEVERANAALAQVARVKRFHLLVKELDHDDGEVTATMKVRRASIAQAYRSEIEALYRQEEAA

SEQ ID NO: 2790 - protein, 366 aa, Mycobacterium leprae
MATLAESPEPKSGASRAGVLGEEAGYHKGLKPRQLQMIGIGGAIGTGLFLGAGGRLAKAGPGLFLVYAVCGVFVFLILRALGELVLHRPSSGSFVSYAREFFGEKAAYVVGWLYFLDWAMTAIVDTTAIATYLHRWTIFTALPQWTLALLALAVVLVMNLISVEWFGELEFWAALIKVCALMAFLVVGTIFLGGRYPVDGHNTGLSLWTSHGGLFPTGVAQLIVVSSGVMFAYAAVELVGTAAGETVEPKKIMPRAINSVIARIAIFYVGSVILLALLLPYSAFKASESPFVTFFSKVGFYGAGDLMNIVVLTAALSSLNAGLYATGRVMHSIAINGSGPKFTARMSKNGVPYGGILLAAVICLCG

SEQ ID NO: 2791 - protein, 270 aa, Desulfovibrio desulfuricans G20
MHTEHITSPADRLTMRIREANRQGRKALIPFLPAGFPDSGDFWRQLDELDAGGADVLEIGIPFSDPCADGPVVEQASLESLARGTTLRGVLEELERRKGRYRAGIVLMGYLNPFLQYGLDALARDAARAGVEGFIIPDLPLEEDALCRGALAAEGLALIPLVASNTDEDRMRAYAGVAQGYVYVVSVMGTTGARTDLPAGVTATLERARRCFDLPLALGFGVREPEQLAACGDRLDAVIFGSALISHIRTQGSAASFMERWRRPVAELVL

SEQ ID NO: 2792 - protein, 633 aa, Oryza sativa (japonica cultivar-group)
MAAAVQLLVVAAAAAMAAACCAGMAAAAATVEVTWDVEYVLWAPDCQQRVMIGINGRFPGPNITARAGDVISVTMNNKMHTEGVVIHWHGIRQFGTPWADGTASISQCAVNPGETFVYKFVADKPGTYFYHGHFGMQRAAGLYGSLIVLDSPEQPEPFRHQYDDGGELPMMLLSDWWHQNVYAQAAGLDGKDRHFEWIGEPQTILINGRGQFECTLGPARKSFEKLLNENVETCVDDQKMCSDQEKCLRRSECGPYCPRSQCAPVVFNVEQGKTYRLRIASTTSLSLLNVKIQGHKMTVVEADGNHVEPFVVDDIDIYSGESYSVLLKADQKPASYWISVGVRGRHPKTVPALAILSYGNGNAAPPPLQLPAGEPPVTPAWNDTQRSKAFTYSIRARKDTNRPPPAAADRQIVLLNTQNLMDGRYRWSINNVSLTLPATPYLGAFHHGLQDSAFDASGEPPAAFPEDYDVMRPPANNATTASDRVFRLRHGGVVDVVLQNANMLREEVSETHPWHLHGHDFWVLGYGDGRYDPAAHAAGLNAADPPLRNTAVVFPHGWTALRFVANNTGAWAFHCHIEPHLHMGMGVVFVEGEDRMHELDVPKDAMACGLVARTAATPLTPATPLPPSPAPAP

SEQ ID NO: 2793 - protein, 306 aa, Saccharomyces cerevisiae
MKVNMEYTKEKKVGEGTYAVVYLGCQHSTGRKIAIKEIKTSEFKDGLDMSAIREVKYLQEMQHPNVIELIDIFMAYDNLNLVLEFLPTDLEVVIKDKSILFTPADIKAWMLMTLRGVYHCHRNFILHRDLKPNNLLFSPDGQIKVADFGLARAIPAPHEILTSNVVTRWYRAPELLFGAKHYTSAIDIWSVGVIFAELMLRIPYLPGQNDVDQMEVTFRALGTPTDRDWPEVSSFMTYNKLQIYPPPSRDELRKRFIAASEYALDFMCGMLTMNPQKRWTAVQCLESDYFKELPPPSDPSSIKIRN

SEQ ID NO: 2794 - protein, 336 aa, Pseudomonas syringae pv. syringae B728a
MKEPLKVACVQAAPVFLDLDATVDKTITLMEQAAAAGAGLIAFPETWIPGYPWFLWLDAPAWNMPLVQRYHQQSLVLDSVQARRISDAARHLGLYVVLGYSERNKASLYIGQWIIDDHGETVGVRRKLKATHVERTMFGEGDGASLRTFETPVGVLGALCCWEHLQPLSKYAMYAQNEQIHVAAWPSFSLYRNATSALGPEVNTAASRVYAAEGQCFVLAPCAIVSPEMIEMLCDSDAKRSLLQAGGGHARIFGPDGSDLATPLGEHEEGLLYATLDPAALTLAKVAADPAGHYSRPDVTRLMFNPNPTPCVVDLPDLPISSESIELLRPDIALEV

SEQ ID NO: 2795 - protein, 226 aa, Triticum aestivum
  misc_feature (171)..(171): Xaa can be any naturally occurring amino acid
  misc_feature (183)..(183): Xaa can be any naturally occurring amino acid
  misc_feature (219)..(219): Xaa can be any naturally occurring amino acid
  unsure (1)..(226): unsure at all Xaa locations
MLSTLRVASRRAARPAQYNLAAIRAASNWANVPQGPPDAILGITEAFKADKFDKKINLGVGAYRDDAGKPYVLPSVREAEMKVVESKLNKEYAGITGVPEFPPAAAKLAYGANSPALDRITITQTISGTGALRVGAAFLAKFFPGEKKIYIPQPSWANHKAVFNHAGLRVXQYGYYDKKTIGXLDFEGLIADVKSAPNGSVFLFHACAHNPTGVDPTQXQWKQISD

SEQ ID NO: 2796 - protein, 327 aa, Gloeobacter violaceus PCC 7421
MKAFVLAAGKGTRLRPFTDDIPKPLVPVLNRPVMARVLDLCRTHGFDEVVANLHYKGEKISRHFEDGSQYGVRLDYSWEKELMGTAGGVRRQAEFLGDGTFLVISGDVVTDLDITRLVHFHKAHGAIATMAVKEVGDPSRFGIVVTDAAGQIQSFQEKPAAGTERSNLANTGIYVFEPEVFDWIPEGQFYDFGKDLFPALVEKGAPVFAMGTGDYWSDVGTLGQYLYTHWDLLCHPHLKQRIGKGTVIEPGAILSSHALIGENCHIERGAVVMGYSCIGDGCVVRSGATVFDSIVWAAEQISLTVADELVRSIYGDDKQVALGVPTL

SEQ ID NO: 2797 - protein, 933 aa, Escherichia coli K12
MFRALALVLWLLIAFSSVFYIVNALHQRESEIRQEFNLSSDQAQRFIQRTSDVMKELKYIAENRLSAENGVLSPRGRETQADVPAFEPLFADSDCSAMSNTWRGSLESLAWFMRYWRDNFSAAYDLNRVFLIGSDNLCMANFGLRDMPVERDTALKALHERINKYRNAPQDDSGSNLYWISEGPRPGVGYFYALTPVYLANRLQALLGVEQTIRMENFFLPGTLPMGVTILDENGHTLISLTGPESKIKGDPRWMQERSWFGYTEGFRELVLKKNLPPSSLSIVYSVPVDKVLERIRMLILNAILLNVLAGAALFTLARMYERRIFIPAESDALRLEEHEQFNRKIVASAPVGICILRTADGVNILSNELAHTYLNMLTHEDRQRLTQIICGQQVNFVDVLTSNNTNLQISFVHSRYRNENVAICVLVDVSSRVKMEESLQEMAQAAEQASQSKSMFLATVSHELRTPLYGIIGNLDLLQTKELPKGVDRLVTAMNNSSSLLLKIISDILDFSKIESEQLKIEPREFSPREVMNHITANYLPLVVRKQLGLYCFIEPDVPVALNGDPMRLQQVISNLLSNAIKFTDTGCIVLHVRADGDYLSIRVRDTGVGIPAKEVVRLFDPFFQVGTGVQRNFQGTGLGLAICEKLISMMDGDISVDSEPGMGSQFTVRIPLYGAQYPQKKGVEGLSGKRCWLAVRNASLCQFLETSLQRSGIVVTTYEGQEPTPEDVLITDEVVSKKWQGRAVVTFCRRHIGIPLEKAPGEWVHSVAAPHELPALLARIYLIEMESDDPANALPSTDKAVSDNDDMMILVVDDHPINRRLLADQLGSLGYQCKTANDGVDALNVLSKNHIDIVLSDVNMPNMDGYRLTQRIRQLGLTLPVIGVTANALAEEKQRCLESGMDSCLSKPVTLDVIKQTLTLYAERVRKSRDS

SEQ ID NO: 2798 - protein, 523 aa, Agrobacterium tumefaciens str. C58
MSHSQNGHSSLKTASLKTALKATTVGGLAALMLSTGIAAPILHSFAAPVEVTAPQVPSFANVVDAVSPAVVSVRVQSNVQPASDDSSNFSFNFGGRGLDQLPDDHPLKRFFKEFGGQNQDRSDRGPNRHRDGKGPLRPVAQGSGFFISEDGYVVTNNHVVDDGSAYTVVMNDGTELEAKLVGRDPRTDLALLKVDVNRKFTYVKFADDTKIRVGDWVVAVGNPFGLGGTVTSGIISARGRDIGSGPYDDYLQIDAAVNRGNSGGPAFNLNGEVVGINTAIFSPSGGNVGIAFAIPSSVAKDVIADLQKDGKVERGWLGVQIQPVSKDIAESLGLAEAKGALVVSPQSGSPGDKAGIKQGDIITAVNGDPVKDARDLSRRIGGMAPNSKVEISLWRGGKSQSVTVTLGDLTSDEASKATPSQNDDKGGSQSSSEKVLSSLGLTVSPSDDGNGLAITDVDPDSDAAARGLKTGEKITSVNNQQVASAADIEKILEQAKKDGRSKALFQIQTDDGSRFIALDIDQG

SEQ ID NO: 2799 - protein, 631 aa, Borrelia burgdorferi B31
MSDLEKKYSKLIEGIITHLGDRKSLSFSELSNLLPDDILEPEILDCICSVLEDRGIRLVNKISELDLVVSEDGNDEEEEVEIESDRNFMILDDGFQSDEEDIDIDVKLDDCDEEDISVKDDLGSGYIKGNVLKDSHSEDPIKLYLKEIGKEFLLTGNQEVELAKQMDSGESIIENILKNEGLVIENYYNLVNTIYSRMEREEFFKREKDKDKESSPDYYNKKKRIASFYKIPLKPIQDRLISYVDNKHRVYDLGGDIFEKNLKKERLALKELLRDIPLYQEELRIFSDDYIDSANKIKDLQRQQRIILSRLKIEKIRDLRVLGRDLTIAEKKIEIEKSLKLKEDAIKEQITEAQLAQKELERIEMYYEYPTDKIISMSEEIAKGKQMMQHAKDQLIKANLRLVVSIAKKYANRGLHFFDLVQEGNIGLIKAVEKFEYKRGFKFSTYATWWIRQAITRSISDQARTIRVPVHMIEQINRLNRETRYLIQVLGKDPTDEELSDRLGWELKKVKTVKSVSREPVSLETPIGEEEDSVLSDFIEDKAIKNPANHTSFVVLQDQIRAILGTLPEREQEVVKMRFGLEDGYSLTLEEVGLHFNVTRERIRQIESKALRRLKNPKKTQKLKDYLEDLN

SEQ ID NO: 2800 - protein, 246 aa, Triticum aestivum
  misc_feature (34)..(34): Xaa can be any naturally occurring amino acid
  unsure (1)..(246): unsure at all Xaa locations
NIPKGVPPSLVLRLRGGIQIFVKTLPGKTITLEXESSDPIDNVKAKIQDKEGIPPDQQRFIFAGKQLEDARTLADYNIQKESTLHLVLRLRGGMQIFVKTLTGKTITLEVESSDTIDNVKAKIQDKEGIPPDQQRLIFAGKQLEDGRTLADYNIQKESTLHLVLRLRGGMQIFVKTLTGKTITLEVESSDTIDNVKAKIQDKEGIPPDQQRLIFAGKQLEDGRTLADYNIQKESTLHLVLRLRGGQ

SEQ ID NO: 2801 - protein, 288 aa, Brassica napus
  misc_feature (279)..(279): Xaa can be any naturally occurring amino acid
  unsure (1)..(288): unsure at all Xaa locations
DPRVSGRVGSDAIRESPAESASSQETWPLADPVTAKKTTAVKQKTEPEQQQQTVMHHVSSADKVSVRDIARERVEIVAERMHRLPDEFLEELKNGLKAVLEGNVEEFVFLQKLVQSRSDFKNSATLLRAHRSQLEILVAINTGIQAFLHPNVTLSQSSLVEIFLHKRCRNIPCQNQLPADGCRCDVCAARKGFCSLCMCVICNKFDFSVNTCRWIGCDSCSHWTHTDCAIRDGQITAKNASGRSGEMMFKCRACNHASELIGFVKDVFQHCASNWDREXLGEELDFVS

SEQ ID NO: 2802 - protein, 404 aa, Arabidopsis thaliana
MNPKGRTNLNRSIIGGHDHGSILQLLLFLLLLSSHGGFKFVAGQATHGGSDVSGDSSRFDPTMAILMIVLVSVFFFLGFFSVYIRRCLERVMGMDYGNPNDAGNWLATNRQQARGLDASIIETFPTFQYSTVKTLRIGKEALECSVCLNEFEDDETLRLIPKCCHVFHPGCIDAWLRSHTTCPLCRADLIPVPGESIVSIQIPGLVNDPPGSDPNGDRIRSLGSPDARLIESVALTCNQSMPRRSMSTGWNLAGMFTNSDRTGQHSENLDRFTLRLPQDIHNKLVNPNLSKVHVALPQVMSSTRGYRTGSLGSERNYFYYERFDQDGRLDRRPFSITPPYRTSSINHMSPGGSGGDKVRASSPKSLLLAMRSPFDRLFLGKNNNVGENSSDHLRSCDATPSNTV

SEQ ID NO: 2803 - protein, 515 aa, Zea mays
  misc_feature (210)..(210): Xaa can be any naturally occurring amino acid
  unsure (1)..(515): unsure at all Xaa locations
QKMLFFDRHKVGELTGLLTSDLGSLKSVVSDNISRDRGLRALSEIIGTLCILFTLSTELAPVLGLLMVSVSVLVAIFKRSTVPTFKSYGIVQARISDCASETFSAIRTVRSFGGEKRQISLFDNLAHAYQNNGTKLGVLKSANESLTRVVVYVSLMALYILGGRKVNAGKLSVGTMVSFIGYTFTLTFAVQGAVNTLGDLRGTLASVERXNSILSAKDIDDSLAYGLAKELDGKEFDDSNGVYENGSVNKHFMSELKSSSSCSNLAWSGDIRLKEVHFSYPLRSNVEILNGLDLTIECGKVTALVGPSGAGKSTVVQLLARYYEPTQGSITVAGEDIRVFDKREWSRVVSLVNQDPVLFSVSVGENIAYGLPDDVVSKDEIIKAAKAANAHEFIISLPQGYDTLVGERGSLLSGGQRQRIAIARALLKNAPILILDEATSALDATSERLVQEALNHLMKGRTSLVIAHRLSTVQNAHRIAVCSEGRITELGTHRELVAKGGSYASLVGTQRLAFE

SEQ ID NO: 2804 - protein, 566 aa, Sulfolobus tokodaii str. 7
MEKVSYDVVIVGAGLAGLMAAHEIASAGYNVAVISKVFPTRSHSAAAEGGIAAYIQGNSDPNDNPDYMAYDTIKGGDYLVDQDAAELLAYKSGEIVMLLERWGTLFNRQPDGRVAVRYFGGQTYPRTRFVGDKTGMALLHTVYERTSGLGSVDFYFEWFAWELVRDENRVRGIIAFDMRNMVPVFFKAKAVVIASGGMGMLYRHSTNSYINTGDGYAMALRARVALKDPEFVQFHPTALYPSDILISEAARGEGAVLRNVKGERFMARYAPKKLDLAPRDIVSRAILTEVKEGRGFPGGYVGLDLTHLGEDYIKERLALAYEAAKSFAGLDATKEMIPVRPAQHYYMGGIDVDITGRNPDLIGLFAAGEAACVSVHGANRLGSNSLLETLVFGRETGRAVVEFLKSYTEPSSDIDKEAEKMIDSAYDVVKSESGIHFGEILEKLRDTMWDYVGVFRDENGLKTALSEIMKLREDMKKMYVLDKSKVYNTEFYNALELKNMLDLALVIATSALNRKESRGAHYRLDFPERDDQNWLKHTIAYLRGNSVEITYKPVKMTKWKPEARVY

SEQ ID NO: 2805 - protein, 294 aa, Saccharomyces cerevisiae
MKTLVHVASVEKGRSYEDFQKVYNAIALKLREDDEYDNYIGYGPVLVRLAWHISGTWDKHDNTGGSYGGTYRFKKEFNDPSNAGLQNGFKFLEPIHKEFPWISSGDLFSLGGVTAVQEMQGPKIPWRCGRVDTPEDTTPDNGRLPDMDKDAGYVRTFFQRLNMNDREVVALMGAHALGKTHLKNSGYEGPWGAANNVFTNEFYLNLLNEDWKLEKNDANNEQWDSKSGYMMLPTDYSLIQDPKYLSIVKEYANDQDKFFKDFSKAFEKLLENGITFPKDAPSPFIFKTLEEQGL

SEQ ID NO: 2806 - protein, 126 aa, Beta vulgaris
KFYTREGNFDLVGNNFPVFFIRDGMKFPDMVHSLKPNPKSHIQENWRVMDFFSHHPESLHMFTFLFDDIGVPANYRHMEGSGVNTYTLINKAGKVHCVKFHWKPTCGVKSLLEDEAIKVGGANHSH

SEQ ID NO: 2807 - protein, 319 aa, Glycine max
  misc_feature (237)..(237): Xaa can be any naturally occurring amino acid
  unsure (1)..(319): unsure at all Xaa locations
HLLPNSRYIRLLFSLSIQHRNEVVLCSAEGTGGCSRLAAMDLASNLGGKIDKAEVLSAVQKYEKYHVCYGGQEEERKANYTDMVNKYYDLVTSFYEFGWGESFHFAPRWKGESLRESIKRHEHFLPLQLGLKPGQKVLDVGCGIGGPLREISRFSSTSITGLNNNEYQITRGKELNRIAGVDKTCNFVKADFMKMPFPDNSFDAVYAIEATCHAPDAYGCYKEIFRVLKPGPFFPCXERGMPDSFDPQNPEHQKIKAEIEIGDGLPDIRLTAKCLEALKQAGFEVIWEKDLAVDSPLPWYLPLDKSHFFLARKPDLDRN

SEQ ID NO: 2808 - protein, 170 aa, Beta vulgaris
ALLHSSHTYHEAKHAFAAHGVKCSSVEVDLPAMMGQKDKAVSNLTRGIEGLFKKNKVTYVKGYGKFVSPSEVSVDTIEGGNTVVKGKHIIVATGSDVKSLPGVTIDETKIVSSTGALALKEIPKRLVVIGAGYIGLEMGSVWGRIGSEVIVVEFASDIVPTMDGEIRKQF

SEQ ID NO: 2809 - protein, 117 aa, Beta vulgaris
  misc_feature (11)..(11): Xaa can be any naturally occurring amino acid
  misc_feature (19)..(19): Xaa can be any naturally occurring amino acid
  misc_feature (21)..(22): Xaa can be any naturally occurring amino acid
  misc_feature (25)..(25): Xaa can be any naturally occurring amino acid
  misc_feature (27)..(27): Xaa can be any naturally occurring amino acid
  misc_feature (37)..(37): Xaa can be any naturally occurring amino acid
  misc_feature (50)..(50): Xaa can be any naturally occurring amino acid
  unsure (1)..(117): unsure at all Xaa locations
ILLILLTILQXFADQSPGXHXXIVXEXLGNVSGHPYXVHTNVFSQGKGNXEQQFHLWFDPTRNFHTYSILWSTKLIMFLVDEIPIRIFRNHEKHGVAFPKNQPMRLHSSLWNADDWA

SEQ ID NO: 2810 - protein, 345 aa, Salmonella enterica subsp. enterica serovar Typhi Ty2
MTLHCAFIGFGKSTTRYHLPYVLNRKDTWHVAHIFRRHAKPEEQAPQYSHIHFTSDLDEVLGDPQVKLVIVCTHADSHFEYAKRALEAGKNVLVEKPFTPTLAEAKVLFELARSKGLTVTPYQNRRFDSCFLTAKKAIESGKLGKIVEIESHFDYYRPVAETKPGLPQDGAFYGLGVHTMDQIISLFGRPDHVAYDIRSLRNKANPDDTFEAQLFYGALKAIVKTSHLVKIDYPKFIVHGTKGSFVKYGIDQQETSLKANIMPGEPGFAADESVGVLEYVNDEGVTVKEEVKPETGDYGRVYDALYQTLTIGTPNYVKESEVLTNLEILERAFEQATPATITLAK

SEQ ID NO: 2811 - protein, 119 aa, Beta vulgaris
LVPGDSAGTVTAYYLSSLGSTHDEIDFEFLGNASGQPYTLHTNVFAQGKGNREQQFHLWFDPTKDFHTYSILWNPQRIVFSVDGIPIREFNNMESQGVSFPKNQPMKIYSSLWNADDWA

SEQ ID NO: 2812 - protein, 196 aa, Mitthyridium sp. Wall 3650
GGAKKVVISAPSKDAPMFVIGVNEDKYTNEDIVSNASCTTNCLAPLAKVINDKFGILEGLMTTVHATTATQKTVDGPSNKDWRGGRSAGTNIIPTATGAAKAVGKVLPELNGKLTGMAFRVPTTDVSVVDLTVRLEKPASYDAIKAALKEASQGKMKGILGYTEDDVVSSDFITDSRSSIFDAKAGIALSDTFVKL

SEQ ID NO: 2813 - protein, 636 aa, Ustilago maydis 521
MTSTSIRTSSMRIAQPQQPPSQHDENAMPSSFCSSQVAATASTFGSMGRTRSPSKLPTLSDIAARLNRDKESINPNSGSPIKPHRLELTGRIANSPKMPQLYDRKAAVLSTSPSKMSSPADTQHKHEKATVCSSPPKVPSSGTSSPNKRMLAKGLPSLEEIRDRMSKKGLAAGSDQTSPELASTPSSPSKVPAAEDRSVQSESKPSPVQALVAHPVKVESNPTTSDASKSASRVAARSLSIAPTVKLTHPLPPSPAAKPACHPLQHEWTLFFDCRTAGAPSTPTFAPNCRPLSLPHTPTQAASTWEANLRTIGTYPSVETFLSCFAQLRRPSQLERHSTYHCFKDGIKPMWEDTRNAQGGKWTLTFRHRHPALVDRSWLWLVLGLIGEDMDEADETCGAVCSARPRGDRISLWVRDRSDVEKVNRIGRKMISLLGVENEPGISLEFSAHSERSDELKCERLYSLHNPMQMARTPTMSTFGDSAKLASSAVDSPPSPRAKTRTSTSPTPNNSSSSEPYARLTGQTPQNTVGGGMFRSRSPAMPSCSTAGLPTPPPTGAIGALGHSLGLGLGLGLGGNNTPAANTNDAKAGMSPLSQQSSETSAFSWRTNTANRTLSPQRKKGTTDGMRSRSTSPFKA

SEQ ID NO: 2814 - protein, 330 aa, Salmonella typhimurium
MSQNTLKVHDLNEDAEFDENGVEAFDEKALSEEEPSDNDLAEEELLSQGATQRVLDATQLYLGEIGYSPLLTAEEEVYFARRDLRGDVASRRRMIESNLRLVVKIARRYGNRGLALLDLIEEGNLGLIRAVEKFDPERGFRFSTYATWWIRQTIERAIMNQTRTIRLPIHIVKELNVYLRTARELSHKLDHEPSAEEIAEQLDKPVDDVSRMLRLNERITSVDTPLGGDSEKALLDILADEKENGPEDTTQDDDMKQSIVKWLFELNAKQREVLARRFGLLGYEAATLEDVGREIGLTRERVRQIQVEGLRRLREILQTQGLNIEALFRE

SEQ ID NO: 2815 - protein, 491 aa, Listeria monocytogenes str. 4b H7858
MVFLSIKETALPKVQTKLFINGKWTDGDNKETKDIVNPANGEVIAKIAQAGPNETKKAIKAAKEAFPDWAKMELADRVKLLHKIADLMEEKADTLAKIMTLEQGKPLKESKGEVLTGAENFRFAAEEARRLYGETIPAPNNHAFIVKKQPIGVVAAITPWNFPGGMVTRKLAPALATGNTIVLKPSGDTPLSALAIFEIFEEAGLPKGVANIVMGSSKEIGETLTDSDDVRKLTFTGSTKVGQTLFKQSAETLKKISLELGGHAPFIVFDDANLDAAVNDLVAAKFRNNGQVCVSPNRIFVAKEIKEKFTKALVAKVKQLKVGNGLDDVNVGPLIREDAIDKIDKQLKNATDKGAKVLTGGGRLTGSDYDKGNFYKPTVLDNVTREMDIFYEETFGPVIPLITFETEDEAIEMANDSEFGLASYFYTKDLARVEKVGAALEYGMVGANEIVISNPETPFGGVKHSGFGRENGHYGMEEYIQVKFINLKYRD

SEQ ID NO: 2816 - protein, 349 aa, Neurospora crassa
MAEYIWIDSEGNTRSKSRTLDEKPEGYKPEELPIWNFDGSSTGQAPGDNSDVYLKPVAVYPDPFRPPNNILVLAECWDADGTPNKYNHRHECAKLMELHAKHEPWFGLEQEYTLLDLNDRPYGWPQNGYPAPQGPYYCGVGAGKVVMRDIVEAHYRACLYSGIKISGTNAEVMPAQWEFQVGPCVGIEMGDQLWLARFLLHRVAEEFAVKVSLDPKPIPGDWNGAGLHSNFSTVEMRKEGGMKQIEAAIKKLEGRHKEHIAGEFVRSEEEWSGVGTEANAGKTVYGEGNEKRLTGRHETGAIDTFTYGVANRGASIRIPRECAAKGYGYFEDRRPASNADPYLITGIIT

SEQ ID NO: 2817 - protein, 329 aa, Ustilago maydis 521
MSTIQALQIQSQGGPEVVQVRCIPAPTLSGSGQVIVRNEYAGVNMIDTYHFGGLYPLKCPIVIGQESAGVVEAVDADVTSVAVGDRVVQYGGGSYTEKQLLNAERVIKLPESISTKTAAAAYLQGLTALTLLKEAHPVKQGDWILVTAAAGGVGLLLCQMGKAFGANVIAVTSTEEKCQLAKQHGAIHALRYNKQDPAQYIAAIKHITQDHGVDAILDGVGADTWESNFEIAARKATIVTFGNASGPVPAFAPLKLASKNLKVVRPTLFNYVTTREERERYSQELFDLIQQGNVKINVHEEYPFTTEDMRRAFADIKSRKTTGKLVVKM

SEQ ID NO: 2818 - protein, 482 aa, Zea mays
MAPSVAVENLNPKVLKCEYAVRGEIVIHAQRLQQQLQTQPGSLPFDEILFCNIGNPQSLGQQPVTFFREVLALCDHPCLLEKEETKSLFSADAISRAKQILATIPGRATGAYSHSQGIKGLRDAIAAGITSRDGFPANADDIFITDGASPGVHMMMQLLIRNEKDGILCPIPQYPLYSASIALHGGALVPYYLDEKTGWGLEISDLKKQLEDARSKGIDVRALVVINPGNPTGQVLAEDNQYDIVKFCKNEGLVLLADEVYQENIYVDNKKFNSFKKIARSMGYGEDDLPLVSFQSVSKGYYGECGKRGGYMEITGFSAPVREQIYKVASVNLCSNITGQILASLVMNPPKVGDESYASYKAEKDGILQSLARRAKALEDAFNTLEGFSCNKAEGAMYLFPQIHLPHKAIEAAKAAKKAPDAFYALRLLESTGIVVVPGSGFGQVPGTWHVRCTILPQEDKIPAVITRFKAFHEAFMAEYRD

SEQ ID NO: 2819 - protein, 253 aa, Ashbya gossypii ATCC 10895
MSLPATFDLTPEDAQLLLAANVHLGSKNVQVHQEPYLYKTRPDGVNIIHIGKTWEKIVLAARIIAAIPNAEDVVAISSRTYGQRAVLKFSAHTGATAIAGRFTPGSFTNYITRSFKEPRLVIVTDPRSDAQAIKEASYVNIPVIALTDLESPSEYVDVAIPCNNRGKHSIGLIWYLLAREVLRLRGALVDRTQPWSIMPDLYFYRDPEEIEQQAAEEAAAGEEDDEAKEEVAAEEQTEAADWAEGQSEEVASW

SEQ ID NO: 2820 - protein, 278 aa, Cryptomeria japonica
MDLLPCFLLLSLALSFSHLASANFFNDFDITWGNDRAKILDNGQRLQLTLDQSSGSGFQSKNEYLFGKIDMQIKLVPGNSAGTVTAYYLSSQGDKHDEIDFEFLGNLSGDPYIMHTNVFSQGKGSREQQFYLWFDPTADFHTYSLLWNPHQIMFSVDGTPVRVFKNSEDLGFAYPKNQAMRIYSSLWNADDWATRGGAVKIDWSKSPFVASYGNFKAETCSASSDCSVNSWYGAQALELSEQEKLEWVRKNYMIYNYCTDSKRFPQGFPAECTRQTSN

SEQ ID NO: 2821 - protein, 776 aa, Zea mays
MGSAAAADVVIPACAAVGIAFALWQWFLVSRVKMSAYAAPGNGGHHGGPVFRMEDDEEDVGMGGAGDRDEEEEETAGDGTVAVARCAEIQSAISVGANSFLFTQYKYLAAFTVVFAVVIFLFLGSVHRFSTDSRPCQYTSGRTCKPALANAVFSSVAFLLGAATSVVSGYLGMRIATYANGRTTLEARRGVGAAFATAFRSGAVMGFLLASLGLLVLYITIKVFGLYYGDDWESLYESITGYGLGGSSMALFGRVGGGIYTKAADVGADLVGKVERNIPEDDPRNPAVIADNVGDNVGDIAGMGSDLFGSYAESTCAALFVASISSFGADHNFAAVAYPLLISSAGLLVCLVTTLFATDLFKVKTVRGVAPALKLQLIISTVLMTVAALVVSLAALPAKFTMFDFGEAKQVKNWHLFLCVAIGLWAGLAIGFTTEYFTSNAYSPVRDVADSCRTGAATNVIFGLALGYKSVIVPVFAIAVSIYVGFTLASIYGIAVAALGMLSTVATGLAIDAYGPISDNAGGIAEMAGMSRRIRQRTDALDAAGNTTAAIGKGFAIGSAALVSLALFGAFVSRAGVEDVNVLNPKVFVGLLVGAMLPYWFSAMTMKSVGSAALKMVEEVRRQFITIPGLMEGRAAPDYARCVRISTDASLKEMMPPGALVLLAPLVAGTFFGVSTLAGLLAGALVSGVQIAISASNSGGAWDNAKKYIEAGASDHAKSLGPKGSDAHKAAVIGDTIGDPLKDTSGPSLNILIKLMAVESLVFAPFFAAHGGLIFK

SEQ ID NO: 2822 - protein, 464 aa, Carboxydothermus hydrogenoformans Z-2901
MVETEKELKRGLEARHIELIALGGTIGVGLFMGSASTLKWAGPSVILAYIIAGIFIFFIMRTIGEMLYIEPITGSFATYAHKYIGPLWGYLTAWSYWFMWVAVGMSEVTAVGIYMKFWFPTLPQWVPGLIAILIVGTANLAAVKYYGEFEFWFALIKVVTIVVMIILGIGMIFFGFGNHGRPIGLENLYIHGGFFPNGIKGFLFALCLVVAAFQGVELVGVTAGEAKDPQRTLRRAVQNITWRILIFYIGAIFVIVALYPWNKLGTIGSPFVLTFAKVGIPAAASIINFVVLTAALSGCNSGIYSSARMLYTLSQNGQAPKFLAKVSPSGVPVNSLLVTIACLLIGVALNYIAPQKLFVYIYSASVLPGMMPWFVILISQLKFRKLKDNEIKDHPFKAPLSPYSNYLTIIFLVLVLVGMWLNSDTRLSLIIGAAFMALIIISYYVFGIDKKQVPEVKKIKEEAI

SEQ ID NO: 2823 - protein, 212 aa, Bacillus cereus ATCC 10987
MKQINRYIDSVFCSQDTLLDEVIASIKENEMPPISVSPSSGKLLTMLVSISGAKDILEIGALGGYSGICLAKGFGEGGTLTSLELEEKYAKVAHSNLHKAGFGKQVSYMTGAALQSLEILATGNNRFDFFFIDADKENYENYLTYCIKLAKPGALIVTDNVLAGGSVADEGAKQKRYTEVMKKFNEVVAAHPNLESVLIPIGDGMTVSKVKK

SEQ ID NO: 2824 - protein, 445 aa, Glycine max
RVSSRRPPPPRGLTVGTATTHYYASEEFKIKQHKTKSFTCSPQEVISGGDYKQSTYCHLLLGLYFSDQVEFITSAFIYSMVQAFTTFEELWREICNDIRDGTLSSRIKSSKMRKAALDIFSPSPNLASKLEDSCKELEGVDWFGLIPKLWPNAKYVYSIMTGSMQPYLKKLRHYANGLPLVSAEYGSTESWIGVNVDPSLPPEDVTFAVVPTFSYFEFIPLHRHEKKLSSGGDDFMEDKPIPLSQIKVGQEYEVVLTTFTGLYRCRLGDVVEVASFHNGIPKLNFVCRRKLILTVNIDKNTEKDLQLVVERGSHILNKASRAELIDFTSYADVSNQPGHYVIYWEIKGEVEDNVLGACCNEMDKSFADHGYVVSRKTNSIGPLELCVLESGTFKKILDNFIANGAALSQFKTPRCTNNHVILKILNTCTTKKFRSTAYNNCSNEQ

SEQ ID NO: 2825 - protein, 1036 aa, Listeria monocytogenes EGD-e
MSIHMFFTKDKLRGRLDEVALYRYEKTYPIRNFQTAEDMDGEIAARPDNILYDNELTIGENWSGRDRYVWLKTTITFPDTKTGTRLIGYFDFGNTGDGHNSGFESLLFVNGEPYQGVDQNHREVLFPDSFAGKTIELVFRLWSGLEGGGTPTIQTHQLKEAFIGYLNLMIDDLYFTSKATLKTLDQLEEKNPTYAPLLQAINRAYLAIDWSTPGSIQNLISMETANQNLQAALKKIPKNFPIKVAAVGHTHIDVAWLWRLKHTREKAARSFSTVLHLMEDYPEYLFLQSQPQLYAYIKEDYPEIYAKIKAKISEGNWEADGGMWLEADCNIPSGESLVRQMLYGQKFLREEFGKPSSFLWLPDVFGYSWALPQILRKSGIKTFMTTKISWNQYNRMPHDTFQWRGMDGTEILTHFITAPEKNSRISTYNGKMTARELVGLWDKYQDKEVNQELLLAYGYGDGGGGVNREMLEMRRRYDAMPGIPEVKPKSATTYFNDLHETINATDQYVHTWNGELYFEYHRGTYTSQAFTKKMNRKIELGLRNSEWLSVLANLKQGITYPTEKLAGIWQILLRNQFHDIIPGSSIKEVYDDALIEYTEAMTENNVLISKQLASLTRAAEEKITLWNSSTWTRPRYIEISPENPADHLAFYDENNILLPAQKLVNNTWLIQHPNLPVLGAATISVKETPNILGQSSFNYNNKQLETPFYQIKWNEVGQFTSIFDKKNNRQVLAENTRGNVFQLFEDKPMWHDAWDIDLFYQEKQNEITALDSVEITEKGPLQFTMKQVLHSEKSQITQWIHFYHESPEIRFETEVDWRDRNQLLKVAFPVDVHASEASYDIQFGNVKRPTHWNTSWDYARFETVGHQWADLSEKNYGVSLLNDSKYGYDIKDSTIRLTLLKAAGYPDPDADLGIHQFTYSLYPHQGDFLDGETVQAAWELNNPIFTSNGEIETFSLFQVTNPYVMIDSVKQAEDGNGFILRLHEFAGTHGEVTFNSDYTITSITECNLLEENETSLPTPTFTIAPFEIKTYRIHLA

SEQ ID NO: 2826 - protein, 349 aa, Oryza sativa
MDMASIECVSYSDSMDDDDDDGVGVGGVSHLPRPILVKPSSAAAAVNVVVVSAGSGGGAGGGGVGVGVVAGAPAVPPATSVHELLECPVCTNSMYPPIHQGQNGHTLCSTCKARVHNRCPTCRQELGDIRCLALEKVAESLELPCKYYSLGCPEIFPYYSKIKHEAQCMFRPYNCPYAGSECAVVGDIPYLVAHLRDDHKVDMHSGCTFNHRYVKSNPREVENATWMLTVFHCFGQYFCLHFEAFQLGMAPVYMAFLRFMGDENDARNYSYSLEVGANGRKMIWEGTPRSIRDSHRKVRDSHDGLIIQRNMALFFSGGERKELKLRVTGRIWKEQQNPDSGACIPNLFS

SEQ ID NO: 2827 - protein, 541 aa, Mycobacterium avium
MAKTIAYDEEARRGLERGLNALADAVKVTLGPKGRNVVLEKKWGAPTITNDGVSIAKEIELEDPYEKIGAELVKEVAKKTDDVAGDGTTTATVLAQALVREGLRNVAAGANPLGLKRGIEKAVEKVTETLLKSAKEVETKDQIAATAAISAGDQSIGDLIAEAMDKVGNEGVITVEESNTFGLQLELTEGMRFDKGYISGYFVTDAERQEAVLEDPFILLVSSKVSTVKDLLPLLEKVIQAGKPLLIIAEDVEGEALSTLVVNKIRGTFKSVAVKAPGFGDRRKAMLQDMAILTGGQVISEEVGLSLESADISLLGKARKVVVTKDETTIVEGAGDSDAIAGRVAQIRTEIENSDSDYDREKLQERLAKLAGGVAVIKAGAATEVELKERKHRIEDAVRNAKAAVEEGIVAGGGVALLHAIPALDELKLEGDEATGANIVRVALEAPLKQIAFNGGLEPGVVAEKVHNSPAGTGLNAATGEYEDLLKAGVADPVKVTRSALQNAASIAGLFLTTEAVVADKPEKAAAPAGDPTGGMGDGFL

SEQ ID NO: 2828 - protein, 508 aa, Rhodobacter sphaeroides 2.4.1
MDGVAERQMMGEDSPPSGDDPRAEARALLAELTALRADLFRRADARMADWATRVRRLEFLPSVANMADWLALREADLTTLQPRLSRLGLSTLGRLDGHVPPSLEAVIAALSAIAGLEGPAFPDRESFDPELRSLHARRDALFGARDTAPGTRILVTLPSEAASDPAIVRELVAAGADAFRINCAHDGPEAWAAMIGHIRKSERMTGRKLPISMDLGGPKFRVTKTGGPLPKRLQAGDRFAFVEKPSLAPEGRGWAMLGHPALLAALAPGVQVSVDDGKLWATVIQTGRGHALLEVDRVGERGLKLKPGRGVNLPGSHLDVAALTEEDLAALDVVVAEADLVAFSFVQTPGDVRALIAAMEARACHPRPLPAILLKIETPMGLHLLPELIVEAGGSLPVGVMIARGDLAVEIGFDRLSEIQEEILWLCEAAKVPVVWATQVLEGMVKEGQASRAEVTDAAMSQRADCVMLNKGPHVAAAIEFLRDILIRMDRHQTKKSARLGPLRVWAG

SEQ ID NO: 2829 - protein, 613 aa, Haemophilus influenzae 86-028NP
MHRFFYNDNNVLGDLMKNFKYFAQSYVDWVIRLGRLRFSLLGVMILAVLALCTQILFSLFIVHQISWVDIFRSVTFGLLTAPFVIYFFTLLVEKLEHSRLDLSSSVNRLENEVAERIAAQKKLSQALEKLEKNSRDKSTLLATISHEFRTPLNGIVGLSQILLDDELDDLQRNYLKTINISAVSLGYIFSDIIDLEKIDASRIELNRQPTDFPALLNDIYNFASFLAKEKNLIFSLELEPNLPNWLNLDRVRLSQILWNLISNAVKFTDQGNIILKIMRNQDCYHFIVKDTGMGISPEEQKHIFEMYYQVKESRQQSAGSGIGLAISKNLAQLMEGDLTVESERGKGATFHLTLHAQEISEKESVKKNIPSLNILLVEDVDLNIMVAKTILEKLGHHVDVATNGKQAITLFEKNVYDILLLDIKLPDMSGFEIAQYLRENYENGIYDFLPPMIAFTANVMQSEQEYLEMGMDGVLRKPISIKDLHHCLQQFFADESESIIEMNDDNELSEQFDLALIETLGKKQILENLSLFKQTMPNYLAQLSKDNMKETEDTAHKIKGAAASVGLNHLRQLADTLESAAKNSDVFNCGELIDEIGNLWLEDVEDLLKFCKF

SEQ ID NO: 2830 - protein, 212 aa, Glycine max
MVSLKLQKRLAASVLKCGRGKVWLDPNEVNEISMANSRQNIRKLVKDGFIIRKPTKIHSRSRARRMKEAKRKGRHSGYGKRKGTREARLPTKILWMRRMRVLRRLLRKYRESKKIDKHMYHDMYMKVKGNVFKNKRVLMESIHKSKAEKAREKTLSDQFEAKRAKNKASRERKIARREERLAQGPGEKVSAAPSATAATASQPAQAPKKSKK

SEQ ID NO: 2831 - protein, 356 aa, Anabaena variabilis ATCC 29413
MVCGILLLFLVVHPVQSQEPDNQKSLVVATRAIPPFVFNDNGELSGFSIDLWRSIASQIGAESKFVEYPNVADLLSSVRNGKANAGIAAISITAERQQQFDFSLPMFSGGLQILVRNPKLSNSGTPNILSLFFSTTILQVLGLALFLIVIAAHVIWLSERHQKEGMISPSYFPGIFKACWWAAATLATQADEMPKGVIGRILAIIWMFIGVLFVTYFTAAATTSLTVQQLQADINSVSDLPGRVVATTTGSTAATYLKQQKISVLEVPKIEQAYDALETKKAEAVVFDSPVLLFYAANQGQGKVEVVGSVFREENYGIVLPNNSPYRKPINNALLKLKENGTYQSLYDKWFGVKNS

SEQ ID NO: 2832 - protein, 431 aa, Salmonella enterica subsp. enterica serovar Typhi Ty2
MVSLEKNDRVMLARQLPLKSVALILAGGRGTRLKDLTNKRAKPAVHFGGKFRIIDFALSNCLNSGIRRIGVITQYQSHTLVQHIQRGWSLFSEEMNEFVDLLPAQQRMKGENWYRGTADAVTQNLDIIRCYKAEYVVILAGDHIYKQDYSRMLIDHVEKGARCTVACMPVPIKEATAFGVMAVDENDKIIDFVEKPANPPAMPGDASKSLASMGIYVFDADYLYELLAADDKDDASSHDFGKDIIPKITREGMAYAHPFPLSCVQSDPQAEPYWRDVGTLEAYWKANLDLASVTPELDMYDQNWPIRTHMESLPPAKFVQDRSGSHGMTLNSLVSGGCIISGSVVVQSVLFPRVRINSFCNIDSAVLLPEVWVGRSCRLRRCVIDRACIIPEGMVIGENAEEDARRFYRSEEGIVLVTREMLRKLQVKQER

SEQ ID NO: 2833 - protein, 477 aa, Salmonella enterica subsp. enterica serovar Typhi Ty2
MQVLHVCSEMFPLLKTGGLADVIGALPAAQIADGVDVRVLLPGFPDIRRGIPDAHVVSRRDTFAGKISLLFGHYNGVGIYLIDAPHLYERPGSPYHDTNLYAYIDNVLRFALLGWVGCEMACGLDPFWRPDVVHAHDWHAGLAPAYLAARGRPAKSVFTVHNLAYQGMFYAKHMDDIELPWSFFNMHGLEFNGQLSFLKAGLYYADHITAVSPTYAREITEPQFAYGMEGLLRQRHLEGRLSGILNGVDEKIWNPESDLLLASRYTRDTLEEKAENKRQLQIAMGLKVNDKVPLFAVVSRLTNQKGLDLVLEALPGLLEQGGQLALLGAGDPVLQEGFLAAAAEHPGQAGVQIGYHEAFSHRIMGGADVILVPSRFEPCGLTQLYGLKYGTLPLVRRTGGLADTVSDSSLENLADGIASGFVFEDSNAWSLLRAIRRAFVLWSRPSLWRFVQRQAMAMDFSWQVAAKSYRELYYRLK

SEQ ID NO: 2834 - protein, 471 aa, Diospyros kaki
MKLLSRKAACNTHGQDSSYFLGWQEYEKNPYDESHNPTGIIQMGLAENQLSFDLLESWLASNPDAAGFKRDGQSIFRELALFQDYHGLPDFKKALVEFMSEIRGNKVSFDPKKLVLTAGATSANETLMFCLADPGEAFLLPTPYYPGFDRDLKWRTGVEIVPIKCTSSNGFRITESALEEAYQAAGKRNLKVKGVLVTNPSNPLGTTLSRHELNLLLSFVTEKGIHLISDEIYSGTVFSSPGFLSVMEILMDKKYSMNTEVWKRVHIVYSLSKDLGLPGFRVGAIYSNDDVVVEAATKMSSFGLVSSQTQYLLSAMLSDKKFRKNYISENQKRLRHRQEMLISGLESAGIRCLKSNAGLFCWVDMRHLLSSETFDAEMELWKKIVYDVGLNISPGSSCHCDEPGWFRVCFANMSAATLNLAIQRIKLFVQSTAAGSKQNQSYHQSLNNSRRKSLTKWVFRLSFDGREPDER

SEQ ID NO: 2835 - protein, 135 aa, Beta vulgaris
GELEDARNFGWELNEKIDFNWKKLLQKKTDEIIRLNNIYKRLLSNAGVKLYEGEGTVVGPNEVQVTQIDGTKLSYSAKHILIATGSRAQRPNIPGQELGITSDEALSLEEFPRRVVILGGGYIAVEFASIWRGMG

SEQ ID NO: 2836 - protein, 488 aa, Diospyros kaki
MMNTTGSGNHHHRLLSKIATNDEHGENSLYFHGWKAYDDNPFHLTQNPNGVIQMGLAENQLSFDLIEDWMKKNQRASICTTEGVHMFKEIANFQDYHGLPEFRNAVAKFMGKVRGGRAEFDPKRIVMGGGATGANELLMFCLADPGDAFLVPSPYYPAFDRDLRWRTGVKLLPVECKSSDSFRITREALEEAYEKASESNIRVKGLIIGNPSNPLGTIMDRNTLKSLVSFVNDKNIHFVCDEIYAATVFKQPEFISVSEIIQEMDCNLDLIHVVYSLSKDMGMPGFRVGIVYSYNDEVVTCARKMSSFGLVSSQTQHLLASMLSDDEFVERFIGESSRRLENRHRTFTEGLKEVEIKCLEGNAGLFCWMDLRPLLKEATFEAETELWKVIINQVKLNVSPGSSFHCSEPGWFRVCFANMDDETVQVALQRIRTFVDEKKGAGKAAPEKKKKQWQRNLRLSFSSGRIYEDGCLSPHVLSPHSPMLRAQT

SEQ ID NO: 2837 - protein, 486 aa, Diospyros kaki
MGFVSSNNQQHLLSKIATDGGHGENSSYFDGWKAYDSDPYHPTGNPDGVIQMGLAENQLCFDLIEEWVVNNPKASICTAEGAGDFMDTAIFQDYHGLPEFREGVANFMAKVRGDRVRFDPDRIVMSGGATGAHEMLVFCLADPGDAFLVPTPYYPGFDRDLRWRTGVQLVPVPCESSNHFKITGEALEAAFRRAKDANIRVKGLLITNPSNPLGTILGKSTMRDILSFITRNNIHLVLDEIYAATVFSQPRFTSIAEIVEKERGSNSINTDLIHIVYSLSKDLGFPGFRVGIVYSYNDAVTSCARKMSSFGLVSTQTQHLLAAMLSDNDFVGKFIAESGKRLAKRHEDFTKGLAQVGIGSLESNAGLFFWMDLRRLLKEPTPEAELALWKVIVHEVKLNVSPGVSFHCSEPGWFRVCFANMDDDTMRVALRRIRSFVAKRKAMEGPAKRQCWRSNLRINLSFRRKDDIAMMSPHSPLTSPLVRART

SEQ ID NO: 2838 - protein, 211 aa, Salicornia herbacea
MPINRIAVGTTEDARHPNTLKAGLAEFISTLIFVYAGQGSGMAFAKLTAGAANTPAGLVAAAISHGFALFVAVAVGANISGGHVNPAVTFGAFIGGNITLLNGIVYWIAQLLGSTVACLLLKFSTGGLQTSAFALCEGETVWGAFVMEIVMTFGLVYTRIRNRIGPKEGQHRDHCAPTHGFNRRCPPSLSGGAFCGPPINPLFFFGPPLVI

SEQ ID NO: 2839 - protein, 461 aa, Desulfovibrio desulfuricans G20
MHAPVSSPRHPAKRFARTAALWLVVATLLHASPALAEDAPAMLSQQHGNILWTLIAAILVMLMQAGFAMVECGFTRAKNAGNILMKNFVDFAAGSLVFFLVGYAFMFGADAGGFIGTSGFALAHVDPATEGGMWDLTFWFFQSVFAATAATIVSGGIAERTRFASYIIVSVLVTGIIYPVSGHWAWGGLAGNAGWLEGLGFADFAGSTVVHSVGGWVALAGAIVVGPRAGKYGPDGSVRAIPGHNIPLAALGVFILWFGWFGFNPGSTTTADGTIGYIAVNTSLAACAGTVTAMLTAWIRFGKPDASITMNGALAGLVGITAGCYELSPSGAIIVGIICGFVVVLSIEFLDKILKIDDPVGAVSVHGVCGAIGTLMVGLLAHPSYGGSTGLVYGGDASLLMVQALGVAVVFAWAFGMGLVVFRIVAAVAGLRVSPEEELKGLDITEHGSESYNGFQIFTVE

SEQ ID NO: 2840 - protein, 196 aa, Mitthyridium sp. Wall 3826
GGAKKVVISAPSKDAPMFVMGVNEEKYTNEDIVSNASCTTNCLAPLTKVINDKFGILEGLMTTVHATTATQKTVDGPSNKDWRGGRSAGTNIIPSSTGAAKAVGKVLPELNGKLTGMAFRVPTTDVSVVDLTVRLEKPASYDAIKAALKEASQGKMKGILGYTEDDVVSSDFVTDSQSSIFDAKAGIALSDTFVKL

SEQ ID NO: 2841 - protein, 324 aa, Zea mays
MARPPCCDKEGVKKGPWTPEEDLVLVSYIQDHGPGNWRAVPTRTGLMRCSKSCRLRWTNYLRPGIRRGNFTEQEEKLIVHLQALLGNRWAAIASYLPERTDNDVKNYWNTHLKRKLQAGGGDGDGDGAAKPPAHRPPPSNSKGQWERRLQTDINLARRALREALTPLGDLKPQPQPQRDGAGVGIVGGDSPAASSLSSQCSPPPAPAALGTYVLTADNVSRMLDGWAGLNGKRRGGAPGTPGGAETASTGSSSEVSYGGGTAVVAPAAGGPVFEYETKPPAAPFQLMMPLSAIESWLFDDDTHFHRPVQSASLLDAAPMDYYLL

SEQ ID NO: 2842 - protein, 290 aa, Cryptomeria japonica
MVFKVFLFLILVVPAVMAGTPRKPIDVPFQKNYNPTWAADHIKYIDGGKQATLSLDKSTGTGFQSKGTYLFGHFSMQIKMVPGDSAGTVTAFYLSSQNSEHDEIDFEFLGNRSGQPYILQTNVFSGGKGDREQRIYLWFDPTKDYHSYSVLWNMRQIVFFVDDVPIRVFKNSKDLGVRYPFNQPMKIYSSLWNADDWATRGGIEKTDWSKAPFVAAYKGFHIDGCEASAPYSLCPTLGRRWWDQKEFDDLDGLQWRKLKWVRSKYTIYNYCSDRVRYPKLSPECSRDRDI

SEQ ID NO: 2843 - protein, 221 aa, Mesorhizobium loti MAFF303099
MSTKTWAAVDDYIVDALFDADLALDAVLAANRDQGLPPIDVSPAQGKLLSLLARIRGAKKILEIGTLGGYSTIWMARALPMDGKIVTLELDPHHAKVARSNFERAGVSDQVELRVGPALKSLAALSAENAGPFDLIFIDADKPNNPNYLSGAMRLSRPGTVIICDNVIRDGAVLDGGGHDANVVGARAAFSFIGGDKRLDGTAIQTVGAKGYDGFAIAIVE

SEQ ID NO: 2844 - protein, 311 aa, Mesorhizobium loti MAFF303099
MSSNNNPINIGIVGVGKIVRDQHLPALAKDQNYRLIAAASRHGKVDGIPNFPTIEAMLDAVPELEAVSLCMPPQFRYDAARTALEAKKHVFLEKPPGATVSEVEDLKVLAGKNGVSLFASWHSRYAPAVEAARGFLASTQIRSAAIVWKEDVRRWHPNQEWIWAPGGFGVFDPGINALSIATHILPAMFITSAVLDFPENRAAPVAAQVTFRTSNGLPVAMDLDWLQTGPQSWDILADTDAGKMVLSGGGSKLAIDGRIVHEEPEAEYPMLYKRFAEIVRAGTSDVDLAPLQHVADAFMLGKRNVVEAFFD

SEQ ID NO: 2845 - protein, 409 aa, Frankia sp. EaI-12
MPRNLGRSREGSDEIPPMSPTVLPREAQVDEVKDLITRGKEIGFLTTEDVTVAIQAAELPPEQAETVLQVLNDEGIEVLEAGGENADEPDLLARRRREKEELALKAPTSEPVRMYLKEIGKVPLLTAEEQVDLAKRIEAGLFASDKLAVATKKTSPQMRRDLEAIERDGQIAKRKLVEANLRLVVSIAKRYVGRGMLFLDLIQEGNLGLIRAVEKFDYTKGYKFSTYATWWIRQAITRAIADQARTIRIPVHMVETINKLIRIQRQLLQDLGREPSPEEIAKEMDLTPDKVREILKVSQEPVSLETPIGEEEDSHLGDFIEDCDAVVPVDAASFILLQEQLDSVLHTLSDREKKVIQLRFGLTDGHPRTLEEVGREFGVTRERIRQIESKTLSKLRHPSRSQKLRDYLE

SEQ ID NO: 2846 - protein, 325 aa, Pseudomonas syringae pv. syringae B728a
MAKRIQFNTVGGPEVLEYVDFEPQAPGPQAVVVRNKAIGLNFIDTYYRSGLYPAPSLPSGLGAEGAGVVEAVGAEVTRFKVGDRVAYGTGPLGAYSEVHVLPEANLVKLADSISFEQAAALMLKGLTVQYLLRQTYQVKPGEIILFHAAAGGVGSLACQWVKALGGKLIGTVSSPEKAAHAKALGAWETIDYSHEDVASRVLELTDGKKCPVVYDGVGQDTWLTSLDCVAPRGLVVSFGNASGPVSGVNLGILAQKGSVYVTRPTLGSYANTAQNLQAMADELFDMLASGKLKVDGIQQYALKDAARAQTELSARRTTGSTILIP

SEQ ID NO: 2847 - protein, 220 aa, Frankia sp. ORS020607
FDPDLPADLRRDLGLLVKDGHAAKQQLVSANLRLVVSVAKKYSGRGMTLLDLVQEGNLGLIRAVEKFDYAKGYKFSTYATWWIRQAIGRALADQARTIRIPVHVVEQINKITRLQRQLVSTLGREPTDEELALELDMPIEQVVELRRYAQDTVSLETSVGDDGDSVLGDFIEDSDATSPADAASYGAMQDEIENVLGGLSPREREVMRLRFGLTNRIPAA

SEQ ID NO: 2848 - protein, 338 aa, Alkalilimnicola ehrlichei MLHE-1
MQVYYDKDADLSIIQGKKVAVIGYGSQGHAHANNLKESGVDVVVGLREGSSSAAKAQKAGLAVASIEDAAAQADVVMILAPDEHQAVIYHNQIAPNVKPGAAIAFAHGFNIHFGQIQPAADLDVIMVAPKGPGHLVRSTYVEGGGVPSLIAIHQDATGKAKDIALSYASANGGGRAGVIETSFREETETDLFGEQAVLCGGITSLIQAGFETLVEAGYAPEMAYFECLHETKLIVDLLYQGGIANMRYSISNTAEYGDFTRGPRVINEESREAMREILAEIQEGEFAREFVLENQAGCPTLTARRRLAAEHEIEVVGERLRGMMPWINANKLVDKDKN

SEQ ID NO: 2849 - protein, 85 aa, Triticum aestivum
MDVPLASKTFPSPSPSKREQCNIDGHKSSSKHADLNPHVDDSVLGIILGGGAGTRLYPLTKKRAKPAVPLGANYRLIDIPVSNCL

SEQ ID NO: 2850 - protein, 221 aa, Bacillus anthracis str. A2012
MMKAIIFDFDGLIVDTETIWFHSFRDAVREYGGDLPLEEFAKCIGTTDDVLYEYLNEQLKEKFDKYALKEKVKNLHKEKMKIPEARDGVKEYLEEAKEMGLKIALASSSSREWVIPFLEELQIRDYFEVIKTREDVEKVKPDPALYRVAIEDLGIDSSEAVAFEDSLNGLKAAIAAGLTCVVVPNDVTRNLPFENHHLRIESMKDKSLKEVMQNIKKDRIY

SEQ ID NO: 2851 - protein, 398 aa, Candida albicans SC5314
MFLKNIFIALAIALLVDATPTTTKRSAGFVALDFSVVKTPKAFPVTNGQEGKTSKRQAVPVTLHNEQVTYAADITVGSNNQKLNVIVDTGSSDLWVPDVNVDCQVTYSDQTADFCKQKGTYDPSGSSASQDLNTPFKIGYGDGSSSQGTLYKDTVGFGGVSIKNQVLADVDSTSIDQGILGVGYKTNEAGGSYDNVPVTLKKQGVIAKNAYSLYLNSPDAATGQIIFGGVDNAKYSGSLIALPVTSDRELRISLGSVEVSGKTINTDNVDVLVDSGTTITYLQQDLADQIIKAFNGKLTQDSNGNSFYEVDCNLSGDVVFNFSKNAKISVPASEFAASLQGDDGQPYDKCQLLFDVNDANILGDNFLRSAYIVYDLDDNEISLAQVKYTSASSISALT

SEQ ID NO: 2852 - protein, 124 aa, Triticum aestivum
MAAAASPSKILIPPHRASAATAAAPTSCDSFRLLCAPRGRRQRPRGLVARSAPRRPFFFSPRAVSDSKSSQTCLDPDASTSVLGIILGGGAGTRLYPLTKKRAKPAVPLGANYRLIDIPVSNCL

SEQ ID NO: 2853 - protein, 544 aa, Sinorhizobium meliloti 1021
MSAKQIVFSTDARDRLLRGVELLNNAVKVTLGPKGRNVVIDKSYGAPRITKDGVSVAKEIELEDKFENMGAQMVRAVASKTNDLAGDGTTTATVLAASIFREGAKLVSVGMNPMDLKRGIDLGVAAVLAEIKARATKVISSSEIAQVGTIAANGDAGVGEMIARAMEKVGNEGVITVEEARTADTELDVVEGMQFDRGYLSPYFVTNAEKMRVELEDPYILIHEKKLGSLQAMLPILEAAVQSGKPLLIISEDVEGEVLATLVVNRLRGGLKIAAVKTPGFGDRRKAMLEDIAVLTAGQMISEDLGIKLENVTLDMLGRARRVLIEKDTTTIIDGSGDKASIQARVSQIKAQIEETASDYDKEKLQERLAKLAGGVAVIRVGGATELEVKEKKDRIDDALNATRAAVEEGIVPGGGVALLRAKSALVGLTDDNADVTAGISIVRRALEAPIRQIADNAGVEGSIVVGKLVDGRDHNQGFDAQTETYVDMIKAGIVDPAKVVRTALRDAGSIASLLITAEAMIADIPERGSPQSTGNGAVDSMGY

SEQ ID NO: 2854 - protein, 105 aa, Sinorhizobium meliloti 1021
MTFRPLLDRVVIRRAEGNTQSKGGIIIPDTAKEKPQEGEVIAVGPGSRDESGKLIPLDVKIGDTILFGKWSGTEVKIDGEDLLIMKESDIMGIVANTVPTAANAA

SEQ ID NO: 2855 - protein, 587 aa, Bacillus sp.
MLKEAIYHRPKNNYAYAYSKDTLHIRLRTKKNDLTQVELLYADPYNWNEDGWLYEQKTMRLEASDHLFDYWIIDVTVPYRRLRYGFKLTSEDETLYYTEKGFYETAPTDDTAYYFCFPFINPVDIFQAPEWVKKTVWYQIFPERFANGDSSINPASTLPWGSTEATPTNFFGGDFEGILNHLDYLVDLGINGIYFTPIFKAKSNHKYDTIDYMEIDPQFGDKETFRKLVNACHEKGIKIMLDAVFNHSGYYFEAFQDVLKHQEQSKYKDWFHIRDFPVTPGPKPNYDTFGFVEYMPKLNTENQEVKDYLLKVARYWIEEFNIDGWRLDVANEVDHQFWRDFRREVKTINPDVYILGEIWHDSMPWLQGDQFDAVMNYPFTVAALDYIAKDKINAEEFAHQLTDVLCSYPANIHEVTFNLLGSHDTARVLTVCKDNKEKTKLLYLLLLSSKGSPCIFYGEEIGMAGENDPGCRDCMIWEEDQQDLEFKAFIKKCIELRKTEPAFSSEASFEIVEANTESNHLIYARELDGERIYFVINPTEQPITVTLPIDPTGQQIKDAWTDKSIEAVDNKVTMDISATGFGVIKVI

SEQ ID NO: 2856 - protein, 336 aa, Porphyra yezoensis
MVVKIGINGGGRIGRLVLRAALEKGGVEVVAINDPFIALDYMAYMFKYDSTHGPYKGKVEVVDGKLVIDGFTITMFGMRDPAEIPWKDVGAEYIVESTGVFTTTDKAKAHLVGGAKKVVISAPSADAPMFVCGVNEKKYTPDLSIVSNASCTTNCLAPLAKVLHEKYGILEGLMTTVHATTATQKTVDGPSHKDWRGGRGAGANVIPSSTGAAKAVGKVIPELNGKLTGMAFRVPTPDVSVVDLTVRLQKPTTYDDIKATMKAASEDDLAGILGYTEDAVVSTDFVHDNRSSIFDASAGIMLNETFVKLVAWYDNEWGYSNRVVDLITHMSKVDSA

SEQ ID NO: 2857 - protein, 607 aa, Avena sativa
MAKNYGDVYHVEGWGEPYFAVNKDGHLCVRIYGRETLPGQEIDVLSVIEQATSADGTGKKLQFPMILRFPDVLRHRINSLHTAFANAIKYTQYGSVYQGVFPVKVNQHKDVVQDMVHFGYDHSYGLEAGSKPELLIAMSCLTKAKPGAYLVCNGYKDSAYVALALAARAMGLNVIIVLEMEEELDIVIEESSKLGVEPVIGVRAKLLTKIPGHFGSTAGKHGKFGLPAEKIYEVAKKLKALNKLHWLKLLHFHVGSMIPTTDIVFKAASEASDIYCALVKEYGVETMTTLDCGGGLGVDYDGTRSGSSDMSVAYGLEEYASSIVQAVRLKCDYHGVPHPVLCTESGRAMASYHSMIILEALSAIPEPKDDEDEATTEQLHGRIRDLSSKLQPTGLSMSSHAVHIKKHGIEMYKLGKKLSKSVTTDAHTIYNYHMNLSVFSLMPDYWGIQHLFPMMPVSRLDEKPTHKATLVDVTCDSDGKVDKFIRDTETMPLHPLDPKLGGYYVAVLLTGAYQEALSNKHNLFGGPSLVRVVGTGNGGAFNVEAALLGSTTEELIGTVSYDVKQDISSVIEERARENKVWEMVEKLVESGLHTMPYLADYKPPPMA

SEQ ID NO: 2858 - protein, 351 aa, Oryza sativa
MERAVPVRKPHTSTADLLTWSATGPDAAASRVPRRSPPPAPASSERKFCSGSKLKEMTGSGIFAENSENDDSEASNPANKTSVRMYQQTVTGISQISFSADGSVSPKKPSSLPEVAKQRELSGTLETDAEAKMNKQHSEAKSKELSGSDIFGPPPEIPARPLAARNMELQGNLDFALPQPRSVHTSVKVSNAFVIEYRTTAPIFCRLNNLLVRYAKKEFIPPFFRKPQLQKGPFLLFLLVIQDIHTPYREWMLKLGCIDIGPAGGPSNITFSEEPVVKTSKKIHNQKFQELTGNNIFKEDATPASAEKSLSSAKLKEMSGSDIFADGAAAPRDYLGGVRKPPGGESSIALI

SEQ ID NO: 2859 - protein, 166 aa, Ustilago maydis 521
MVLNQEKLAKLQAASRTGGKGTPRRKMAPKPKGPGGEDPKLQAALKKLQVEPVSGVEEVNMFKEDGNVLHFAAPKVHGLPTSNTFAVYGNGVDKELTELVPGILNQLGPDSLASLRKLAESYQAMNAQHAASQAAAAGTKDDDDVPDVVENFDEADKKETEVDKLD

SEQ ID NO: 2860 - protein, 386 aa, Avena sativa
AVLMDLEPGTMDSVRTGPYGQIFRPDNFVFGQSGAGNNWAKGHYTEGAELIDSVLDVVRKEAENCDCLQGFQVCHSLGGGTGSGMGTLLISKIREEYPDRMMLTFSVFPSPKVSDTVVEPYNATLSVHQLVENADECMVLDNEALYDICFRTLKLTTPSFGDLNHLISATMSGVTCCLRFPGQLNSDLRKLAVNLIPFPRLHFFMVGFAPLTSRGSQQYRALTVPELTQQMWDSKNMMCAADPRHGRYLTASAMFRGKMSTKEVDEQMINVQNKNSSYFVEWIPNNVKSSVCDIPPTGLSMASTFIGNSTSIQEMFRRVSEQFTAMFRRKAFLHWYTGEGMDEMEFTEAESNMNDLVSEYQQYQDATADEEGEYEDEEEDLQAEDM

SEQ ID NO: 2861 - protein, 475 aa, Bordetella pertussis Tohama I
MSKQFDVVVIGAGPGGYIAAIRAAQLGMSVACIDAWQNGQGGPAPGGTCTNVGCIPSKALLQSSEHYEQANHHFAEHGIEVKGVSLKLDTLIGRKNTVVKQNNDGILYLFKKNKVTYFHGKGAFAGQVDGGWSIKVTGTTDADLVAKHVIVATGSSARELPGLPFDEKNILSNDGALNIGAVPKKLGVIGAGVIGLEMGSVWRRLGAEVTILEAMPEFLAAADQQVAKEALKSFAKQGLDIQTGVKIGEIKAAAKSITVPYVDAKGAEQKLVVDKLIVSIGRVPYTGGLNAEAVGLKLDERGFVAVDEDCKTNLPNVWAVGDVVRGPMLAHKAEEEGVAVAERIAGQHGHVNFATVPWVIYTSPEIAWVGKTEQQLKAEGREYKAGSFPFMANGRARALGDTTGFAKVIADAKTDEVLGVHIIGPMASELISEAVTIMEFRGAAEDIARICHAHPTLSEAVKEAALAVDKRTLNF

SEQ ID NO: 2862 - protein, 671 aa, GIBBERELLA ZEAE PH-1
MCGISAFITHPGHSRSPVLNGDAKQVVEELETSLDLIAHRGPDARGRWFSDNHHVGLGHVRLSIIDLSPSGNQPFHDEQGGIHAVVNGELYDYERYKAQLADEFKFVGNSDCEIVIALYKHYGLSFISHLRGEFAFVLWDENRQQLIAARDRYGIKSLYYTVHQNKLLVATEIKSFLAFGLEPEWCVRSLRDQSWRVDSTTFFEGVYKVRPGHYLICRPNEREEQHPYWDLEYPDKFAKDLRSEDEITEGVRERLLEAVRIRLKADVPVAVYLSGGIDSSSVAGMVSHLIKQGTKLGNETSLLPSSMKCYTVQFDEGSGADESAIARRTADFLGVDIHLVKMDEEALVSRFEDTTWYSEVPLPDLNGMGRLALAEAVHAQGIKAVITGEGSDEHFGGYDAFRADSLSEPDHSWPAMMTDTERQEAHALASKEAQYGIFGDFTPKVPISTKRMFYSNHVASSIARVGSLPFSDWTKVYGNSIPETTMIEGFDGRVRDNILKRWHPVHTAQYMFVKTFMPHFILRYNGDNIDMVHQVESRCPFLDHHLTEYVNNVPPSLKMRYNAKDKSWREKHILREAVKPFVTDEVYNMSKKAYMGPRKFWPGGPLHKKISELVTKANVENLGFVDWQATQDAMDGAFNKQEGLALRRIITVAQFVVLGQRFGVKRASGRR

SEQ ID NO: 2863 - protein, 196 aa, Mitthyridium sp. Wall 3890
GGAKKVVISAPSKDAPMFVIGVNEDKYTNEDIVSNASCTTNCLAPLAKVINDKFGILEGLMTTVHATTATQKTVDGPSNKDWRGGRSAGTNIIPSATGAAKAVGKVLPELNGKLTGMAFRVPTTDVSVVDLTVRLEKPASYDAIKAALKEASQGKMKGILGYTEDDVVSSDFITDSRSSIFDAKAGIALSDTFVKL

SEQ ID NO: 2864 - protein, 360 aa, Glycine max
PTRPGVLPNGKIVAVKQLKSESRQGEREFHAEVDVISRVHHRHLVSLVGYCVSDSQKMLVYEYVENDTLEFHLHGKDRLPMDWSTRMKIAIGSAKGLAYLHEDCNPKIIHRDIKASNILLDESFEAKVADFGLAKFSSDTDTHVSTRVMGTFGYMAPEYAASGKLTEKSDVFSFGVVLLELITGRKPVDKTQTFIDDSMVEWARPLLSQALENGNLNGLVDPRLQTNYNLDEMIRMTTCAATCVRYSARLRPRMSQVVRALEGNISLEDLNDGIAPGHSRVFGSFESSSYDSVQYREDLKNFKKLALESQEQGISEYSGPSSEYGRHPSVSTSSDQQNTQEMEMGNKKGSNHDSGIQVLD

SEQ ID NO: 2865 - protein, 76 aa, Acetabularia peniculus
MQIFVKTLTGKTITLEVESSDTVENVKSKIQDKEGIPPDQQRLIFAGKQLEDGRTLADYNIQKESTLHLVLRLRGG

SEQ ID NO: 2866 - protein, 93 aa, Borrelia burgdorferi B31
MFEMKNIKPLADRVLIKIKEAESKTISGLYIPENAKEKTNIGTVIAVGSNKEEITVKVGDTVLYEKYAGAAVKIENKEHLILKAKEIVAIIEE

SEQ ID NO: 2867 - protein, 383 aa, Nicotiana sylvestris
RGSPESLRDIRGFAVKFYTREGNFDLVGNNVPVFFNRDAKSFPDTIRALKPNPKSHIQEYWRILDFFSFLPESLHTFAWFFDDVCLPTDYRHMEGYGVHAYQLINKAGKAHYVKFHWKPTCGVKCMSEEEAIRVGGTNHSHATKDLYDSIAAGNYPEWKLFIQIMDTEDVDKFDFDPLDVTKTWPEDILPLMPVGRLVLNRNIDNFFAENEQLAFNPGHIVPGLYYSEDKLLQTRIFAYADTQRHRIGPNYMQLPVNAPKCAHHNNHRDGAMNFMHRDEEVDYLPSRFDPCRHAEQYPIPSRVLTGRREMCVIEKENNFKQAGERYRSWEPDRQDRYVSKWVEHLSDPRVTYEIRSIWISYLSQADKSCGQKVASRLTLKPTM

SEQ ID NO: 2868 - protein, 269 aa, Pirellula sp. 1
MEAVNADVANEHSPSHSRSIENMSQSNSDDSASSSTQQAGDGQDDVQQNIVWHAHTVSREDRESKLGQRGVVVWFTGLSGCGKSTIANELDRLLIDRGATCTLLDGDNVRHGLCAPPSVLKEEHGEDFAGRFGLGFGPTDREENIRRIGAVTELFASAGVIVLAAFVSPYQRDRDRVRNTIESSGRAGDFLEVFVDTPLEICKQRDPKGLYQKAIAGEIKNFTGISDPYDAPPSPEIHLKWREGQTPHDQASEIIREMEKRGVLGPAKG

SEQ ID NO: 2869 - protein, 403 aa, Rhizobium leguminosarum
MDRRVVITGLGGLCGLGTDASSIWTENARRPSAIGPISNSEIHELKGMIGTEIKVLPHNDIDRKQLISMDRFSLLAVLAAKQAMLQAGLSCNEGNAHRFGATVGVGFGGWDATEKAYRTLLLGGATRTELFTGVKAMPSAAACQVSMNLGLRGPVFGATSACASANHAIASAVDQIKLGRADVMLAGGSDAPLVWIVLKAWEAMRVLAPDTCRPFSADRKGLVLGEGAGMAVLESYEHAAARGATMLAEVAGIGLSADAYHIAAPAVHGPEAAMRACLVDASLNAEDVDYLNAHGTGTKANDQIETTAIKRVFGDHARSMSISSTKSTHAHCLGAASALEMIACVMAIQEGVVPPTANYREPDPDCDLDVTPNVPRERKVRVAMSNAFAMGGMNAVLAFKQVP

SEQ ID NO: 2870 - protein, 223 aa, Bacillus cereus E33L
MSTIEKWTAVDQYVSDILIPKDSTLEEVLQTNATANIPAHDVSPTQGMFLQLLVQIQGARNILEIGTLGGYSTIWLARGLSSEGRVVTLEASEKHAEIARNNIERANLTDKIEIRLGFALDSLKQIENEKYEPFDFIFIDADKQNNPAYFEWALKLSRPGTVIIGDNVVREGEVIDNTSNDPRVQGIRRFYELIATEPRVSATALQTVGSKGYDGFIMAVVKE

SEQ ID NO: 2871 - protein, 133 aa, Arabidopsis thaliana
  misc_feature (56)..(56): Xaa can be any naturally occurring amino acid
  misc_feature (66)..(66): Xaa can be any naturally occurring amino acid
  misc_feature (88)..(88): Xaa can be any naturally occurring amino acid
  unsure (1)..(133): unsure at all Xaa locations
MDSVFSNGASAPKDPILSVTDAYNSDPSPVKINQGVSAYLTEEGNPLVLDVVPKAXQQLLNYHVRXKEYIPIGGISDLNKLSTTAHIXADSTANTKRIATTDHSSSDTASLRVGAEILITHYHLSVIYIPKPT

SEQ ID NO: 2872 - protein, 377 aa, Oryza sativa
MPAKRNQKRRRRQIRAQNELIRWCKRKGSPCQHGDSRAVKTMRRSTPYPCLPEDIWHHIHSLMPMRDAARAACLSRTFLQSWRSHPNLILNKDTIGLNASACGGNFSRKVDHIMRNHSGIGVKIFRLEYLGVVGFDASRYLDSWLQVVVKPGIEELTLVLCKTKREYNFPCSLLSDGIQNSIRYLRLDWCALRPTAELGPLQSLTSLRLRSVSIRGEELQCLLSNSPALEQLRISSCTEIVCLKIPCSLQKLSNLTVIGCDSLKVLENKAPNLSSFFVSGCSNLRILENKTPNLSSFFCRGVGAKLSLGETLKMKKLGMGRANAVHYARAELPSIMPNLETLNIRSGPEVCIYISRSFRCYRLVLHIYAYYISHTCV

SEQ ID NO: 2873 - protein, 634 aa, Zea mays
MDGCDCIEPLWPTDDLLVKYQYISDFFIALAYFSIPLELIYFVKKSSFFPYRWVLIQFGAFIVLCGATHLINLWTFTTHTKTVAMVMTIAKISTAVVSCATALMLVHIIPDLLSVKTRELFLKNKAEELDREMGLIRTQEETGRHVRMLTHEIRSTLDRHTILKTTLVELGRTLGLEECALWMPSRSGSSLQLSHTLRHQITVGSSVPMNLPVVNQVFSSNRAIIIPHTSSLARVRPLAGRYVPPEVAAVRVPLLHLSNFQINDWPELSAKSFAIMVLMLPSDSARKLHVHELELVEVVADQVAVALSHAAILEESMRARDLLMEQNVALDLARREAEMAIRARNDFLAVMNHEMRTPMNAIIALSSLLLETELTPEQRLMVETVLKSSNLLATLINDVLDLSKLEDGSLELEIKAFNLHAVFKEVMGFIKPIASIKRLSVSVMLAPDLPLCAIGDEKRLMQTILNISGNAVKFTKEGHITLVASIVKADSLREFRTPEFHPTASDEHFYLKVQVKDTGCGVSPQDLPHVFTKFAHPQSGGNRGFNGSGLGLAICKRFVSLMGGHIWIDSEGTGRGCTATFVIKLGVCDNTNTYQKQLVPLIWPSSADSNLSAPKVLPDGRGSVSLKSRYQRSV

SEQ ID NO: 2874 - protein, 130 aa, Brassica napus
  misc_feature (64)..(64): Xaa can be any naturally occurring amino acid
  misc_feature (119)..(119): Xaa can be any naturally occurring amino acid
  unsure (1)..(130): unsure at all Xaa locations
MASKSSILFIGGTGYIGKYIVEASARSGHPTLVLVRNSTLTSPSRSTTIDNFKNLGVRFLLGDXNDHTSLVNSIKQADVVISTVGHSLLGQQDKILSAIKEAGNVKRFFPSEFGNDVDXAQSVEPAKSAY

SEQ ID NO: 2875 - protein, 593 aa, Oryza sativa (japonica cultivar-group)
MESTMKGIRGDNAPCVLDLDDAATVGGGVGDTYGEDCATEEQLVTPWTVSVASGYNLLRDPRYNKGLAFNERERETHYLRGLLPPAIVSQELQERKIMHNIRQYQLPLQKYMAMMDLQEGNERLFYKLLIDNVEELLPVVYTPTVGEACQKYGSIFSRPQGLYISLKEKGKILEVLKNWPERSIQVIVVTDGERILGLGDLGCQGMGIPVGKLALYTALGGVRPSACLPITLDVGTNNEALLNDEFYIGLRQKRATAQEYADFLHEFMTAVKQNYGEKVLIQFEDFANHNAFELLAKYGTTHLVFNDDIQGTASVVLSGLVAALKLVGGSLSEHSYLFLGAGEAGTGIAELIALEISRQTKAPIEECRKKIWLVDSKGLIVSSRKETLQHFKKPWAHEHEPVGNLLDAVKTIKPTVLIGTSGKGQTFTQEVVEAISSFNERPVIFALSNPTSQSECTAEQAYTWSKGRAVFASGSPFDPVEYDGKIYVPGQANNAYIFPGFGLGVVMSGAIRVHDDMLLAASEALAQQVTQENFDKGLTYPPFSNIRKISAHIAANVAAKAYELGLASRRPRPKDLVKYAESCMYSPLYRNYR

SEQ ID NO: 2876 - protein, 1100 aa, Rhodopseudomonas palustris CGA009
MNKMTSIAPSDRPDAETSDELWYKDAIIYQLHVKAFADSNNDGIGDFAGLTEKLDYLQELGVNTLWLLPFYPSPQRDDGYDIADYGSINPDFGTMKDFRRFIVEAKKRNLRVITELVINHTSDQHAWFKRARRSPKDSSARDWYVWSDTDQKYLGTRIIFTDTEKSNWTWDPEAGQYYWHRFFSHQPDLNFDNPRVVSAVVKVMKRWLDTGVDGFRLDAIPYLCERDGTNNENLPETHAVIKRLRAELDAYAKGKLLLAEANQWPEDVQQYFGDGDECHMAYHFPLMPRIYMAIAQEDRFPITDIMRQTPEIPANCQWAMFLRNHDELTLEMVTDVERDYLWKTYAADPRARINVGIRRRLAPLMDNDRRKIELMNSLLMSFPGTPIIYYGDEIGMGDNIYLGDRNGVRTPMQWSPDRNGGFSRADPARLYAPPIMDPVYGYASVNVEAQQRSLSSLLSAMKRLIAVRKSTPAFGRGSITFIRPSNRAVIAYVRQYKDEVILCVANLSRAAQATELDLSPWKDRVPQEMLGRTKFPPIGDPAYMITLAPFGFYWFKLQEPGTAAHVAPVSTVPEFVTLVVPLGSTWMTLGRTRSMFEHEVLPTFLSRTRWFPERNPRAIHPRLTSAIPFANDGDNRPWLAFFEATQRGTTARYLLPMQIDWVRFDRERYNPRAYAAVRQGAREGTLLDVAADPSFIDLLLENVRDAVTVTGDNGDRLEFRPGSKLAERPAGPFQNIRAVETEQSNSTALVDGDYVVKLYRRLQIGINPELEMGRFLTEVAGYANTPALLGSVELIEGDKTSAVAVVHEFARNQGDGWTVTSGYLDRYIDEQRVLSRAEEKTESDQLAPYLHFMQQTGKRVAEMHIALASHPEVPDFAPEPITLDASRDWAETVAASADRMLDELRRRRDTLKEGDRTLVDELLAARDVLMSRIHGLLGDDGGLNIRHHGDFHLGQMLIVKDDIYIIDFEGEPRRTLDERRAKAPAARDVAGLIRSIDYSTTAALERALKAASDEPGRLTEALDLWRIRATGAFLDAYRQTMGDSPVWPADIAAADRVLDFFLIEKALYEIDYEIAHRPDWVHVPLVGILRILSPPPEELP

SEQ ID NO: 2877 - protein, 1342 aa, Magnaporthe grisea 70-15
MSQNRPAAFNTLRMGEVIREKVQDGITGETRDLQYTQCKIVGNGSFGVVFQTKLSPSNEDAAIKRVLQDKRFKNRELQIMRIVRHPNIVQLKAFYYSNGERKDEVYLNLVQEFVPETVYRASRFFNKMKTTMPILEVKLYIYQLFRALAYIHSQGICHRDIKPQNLLLDPTTGILKLCDFGSAKILVENEPNVSYICSRYYRAPELIFGATNYTTKIDVWSTGCVMAELMLGQPLFPGESGIDQLVEIIKVLGTPTREQIRTMNPNYMEHKFPQIKPHPFNRVLRKADNNAIDLIARLLEYTPTERLGAIDAMVHPFFDDLRNPSTKLPDSRHQTGQVRDLPPLFDFNRHELSIAPQLNHQLVPPHVRPTLAAQGLDIDHFTPMRKEDMLASRDTPEIVPGRPRSRLGPSALDSTFGTGIPINLLTQMLPNEMLSEEVVRESSRIHKNYMIAKIGYAGGLIDSQILSGGESDTVLLVSETIYLIYERFIEVPGKLACLVGRSEWIIAAVVVGLAPSASASNMADYDRRYRGDGGRGGYNPRKRRYNDDDDYGRNRGGGRRRHDGSSHAPPFIRIRKQLLGLAESAARKWHEDVVSVSRLVVENYDDEFVRNGFLDLVCQLVVEQPLKTPFVAAVVLVTNTLKSELVAELLARVGKALETAITAGEWRDVKALLKLLACLQTCLEGEGIFPVLDELFNRAVDLQTASSDDTIGIELVKIILLTIPYIMAAAPGQWIDKAAELMDKTDVIASEDHPMQKLVDPYCPEAGEKDVEASPSLLSLLQKQLQTEAGNGWGLECLPRAWKMPLEEVEQQSKLDDCPRHPLPTISVPETIIAGSRPLFPEVSISIYAAQDVASVPPDTTIAASLIRDAILDTINTLHYNRNVVARFLIDLDCYFSNGTFVKRATPFDRLRDVEAGKSTWKPEDVVVDAVFSQILQLPRPEHKLVFYHSVLTETCKIAPAAIAPSLGRAIRHIYRNIPRHDLELNHRFIDWFSHHLSNFGFTWKWVEWVDDVELPALHPLKAFIVGALDKEIRLSFAQRIKNTVPDEYKSLIGPEKEIDVPEFKYKNDDVPFASQGREIANLLKKKEPDEAIQPLIEEIQNGAVDQGLDPLVTSTDVFMTAVLAVGSKSLSHVLACIERVKDRLLDAGAASVAARIQVIEAVMAYWSAHQGVALSIVEKLLNYAILTPAVVVEWAVGAGRGAVTAIEDDESRLAQDHIYELVLNTVRKVTGRVRQVALTKAQNLDGDVSMTEDQDGPEVKEMRELFQLIEHALAARASSLASNKLLARLWVDRWQRAFKRCAAIEENFLIEVEKNRKKQAAIAAAAPAPEAKPEVKDGDIE

SEQ ID NO: 2878 - protein, 351 aa, Streptococcus agalactiae 2603V/R
MRAATYLSANELSLTDKAKPQVIKPTDAVVRLVKTTICGTDLHILGGDVPACKPGTTLGHEGIGIVEEVGSAVNHFKVGDKVIISCVTACNTCYYCKHQLPSHCEDGGWILGHLIEGTQAEYVHIPHADGSLYHAPEGVCDDALVMLSDILPTSYEIGVLPSHIKPGDTVCIVGAGPIGLSALLTAQFYSPAKIIMVDLSQKRLEASKKFGATHTILSTSTQEVKEEIDKITKGRGVDVVLECVGYPATFDICQNVVSIGGHIANVGVHGKPVEFNLQDLWIKNITLNTGLVNANTTEMLLEVLETGKIDATQLVTHHFKLSEIEEAYKVFKAAEENNTLKVIIENDITPA

SEQ ID NO: 2879 - protein, 76 aa, Aglaothamnion neglectum
MQIFVKTLTGKTITLEVESSDTIENVKTKIQDKEGIPPDQQRLIFAGKQLEDGRTLSDYNIQKESTLHLVLRLRGG

SEQ ID NO: 2880 - protein, 196 aa, Mitthyridium sp. Wall 3727
GGAKKVVISAPSKDAPMFVMGVNEEKYTNEDIVSNASCTTNCLAPLAKVINDKFGILEGLMTTVHATTATQKTVDGPSNKDWRGGRSAGTNIIPSATGAAKAVGKVLPELNGKLTGMAFRVPTTDVSVVDLTVRLEKPASYDAIKAALKEASQGKMKGILGYTEDDVVSSDFITDSQSSIFDAKAGIALSDTFVKL

SEQ ID NO: 2881 - protein, 162 aa, Zea mays
MAVLVARQGRELQRYSQSTGGRIVVGCIPYRVRCDGELEVLAITSQKGHGMMFPKGGWEVDESMDEAARREALEEAGVLGDTEPVLGLWHYKSRRYVDQTYEGFMFPLRVADELHQWPEMASRKRTWATVQQVMDGCPHWWMREALERLVARHAVPVLQSAL

SEQ ID NO: 2882 - protein, 411 aa, Saccharomyces cerevisiae
MDATTPLLTVANSHPARNPKHTAWRAAVYDLQYILKASPLNFLLVFVPLGLIWGHFQLSHTLTFLFNFLAIIPLAAILANATEELADKAGNTIGGLLNATFGNAVELIVSIIALKKGQVRIVQASMLGSLLSNLLLVLGLCFIFGGYNRVQQTFNQTAAQTMSSLLAIACASLLIPAAFRATLPHGKEDHFIDGKILELSRGTSIVILIVYVLFLYFQLGSHHALFEQQEEETDEVMSTISRNPHHSLSVKSSLVILLGTTVIISFCADFLVGTIDNVVESTGLSKTFIGLIVIPIVGNAAEHVTSVLVAMKDKMDLALGVAIGSSLQVALFVTPFMVLVGWMIDVPMTLNFSTFETATLFIAVFLSNYLILDGESNWLEGVMSLAMYILIAMAFFYYPDEKTLDSIGNSL

SEQ ID NO: 2883 - protein, 403 aa, Triticum aestivum
  misc_feature (6)..(6): Xaa can be any naturally occurring amino acid
  misc_feature (24)..(24): Xaa can be any naturally occurring amino acid
  unsure (1)..(403): unsure at all Xaa locations
QWKKGXLLGSGTFGQVYLGFNSEXGQFCAIKEVQVISDDPHSKERLKQLNQEIDMLKKASHPNVVQYYDSDMTDDTLSIYLEYVSGGSIHKLLREYGPFKEPVIRSYTCQILAGLAYLHAKNTVHRDIKGANILVGPNGDVKLADFGMAKHISSFAEIRSFKGSPYWMAPEVIMNSKGYNLAVDIWSLGCTIIEMATARPPWHQYEGVAAIFKIANSKDTPEIPDIFSEDGRSFLKLCLKRNPASRATASQLMDHPFVQDHPAVRAAKDSALRNAFSAPADVKHTMSNRELPSRRSITPLRDIGVSARDFTGFSTTVPSPRTSSPIPVRTNMSLPVSPCSSPLRQFKQSNWSCLPSPPHPMLSSGAAAYNSSSYALNQARRMPDPWQDGSLKLHSPYGSPKRF

SEQ ID NO: 2884 - protein, 370 aa, Lycopersicon esculentum
MNSSTYTQFVASKRMGICDPIHQIGMWGDFKGSSFPDSLILEVENCLENEMPIMEKRLENEIEEPSQVTVGTSNRYEPETTKRIDKVRRRLAQNREAARKSRLRKKAYVQQLENSKLKLLQLEQELERNRQQGLYVGDGLDASQIGCSGTANSGIASFEMEYGHWVEEQDRQTDDLRNALNSQMGEIELRILVEDCLNHYFDLFRLKATAANADVLYLMSGTWKTSAERFFLWIGGFRPSELLKVLTPHVEPLSDQQIQEVSNLTQSCQQAEDALSQGMVKLHQILAEAVAAGTLGEGVILPQMTATIEKLEALVRFVNQADHLRQETLLQMSCILAPHQSAQGLLALGDYFKRLRALSSLWAGRLSEPA

SEQ ID NO: 2885 - protein, 310 aa, Amaranthus tricolor
  misc_feature (197)..(197): Xaa can be any naturally occurring amino acid
  unsure (1)..(310): unsure at all Xaa locations
NEYIDYVGSWGPAIIGHADDEVLAALAETMKKGTSFGAPCLLENNLAEMVISAVPSIEMVRFVNSGTEACMGVLRLARAFTGKQKIIKFEGCYHGHADPFLVTAGSGVATLGLPDSPGVPKSATSDTLTSPYNDLETIKGLFEANKGEIAAVILEPVVGNSGFIPPNPGFLEFLREITKENDTLLIFDEVMTGFRLXYGGAQEYFKITPDLTTLGKVIGGGLPVGAYGGRRDIMEMVAPAGPMYQAGTLSGNPLAMTAGIHTLKRLMQPGSYEYLDKITSELTQGIIAAGKKTGHAICGGYISGMFGFFF

SEQ ID NO: 2886 - protein, 546 aa, Helicobacter pylori
MAKEIKFSDSARNLLFEGVRQLHDAVKVTMGPRGRNVLIQKSYGAPSITKDGVSVAKEIELSCPVANMGAQLVKEVASKTADAAGDGTTTATVLAYSIFKEGLRNITAGANPIEVKRGMDKAAEAIINELKKASKKVGGKEEITQVATISANSDHNIGKLIADAMEKVGKDGVITVEEAKGIEDELDVVEGMQFDRGYLSPYFVTNAEKMTAQLDNAYILLTDKKISSMKDILPLLEKTMKEGKPLLIIAEDIEGEALTTLVVNKLRGVLNIAAVKAPGFGDRRKEMLKDIAILTGGQVISEELGLSLENAEVEFLGKAGRIVIDKDNTTIVDGKGHSDDVKDRVAQIKTQIASTTSDYDKEKLQERLAKLSGGVAVIKVGAASEVEMKEKKDRVDDALSATKAAVEEGIVIGGGAALIRAAQKVHLNLHDDEKVGYEIIMRAIKAPLAQIAINAGYDGGVVVNEVEKHEGHFGFNASNGKYVDMFKEGIIDPLKVERIALQNAVSVSSLLLTTEATVHEIKEEKATPAMPDMGGMGGMGGMGGMM

SEQ ID NO: 2887 - protein, 357 aa, Triticum aestivum
  misc_feature (260)..(260): Xaa can be any naturally occurring amino acid
  misc_feature (294)..(294): Xaa can be any naturally occurring amino acid
  unsure (1)..(357): unsure at all Xaa locations
VTLQNKFVQKSSFPPVRNSRDIVDPRVRADSCPTGAATNVIFGLALGYKSGIIPIFAIAFSIFLSFSLAAMYGVAVAALGMLSTIATGLAIDAYGPISDNAGGIAEMAGMSHRIRERTDALDAAGNTTAAIGKGFAIGSAALVSLALFGAFVSRAGITTVDVLTPNVFIGLLVGAMLPYWFSAMTMKSVGSAALKMVEEVRRQFNTIPGLMEGTAKPDYATCVKISTDASIKEMIPPGTLVMLTPLIVGTFFGVETLSGXLAGALVSGVQIAISASNTGGAWDNAKKYIEAGAXSEHAKSLGPKGSDCHKAAVIGDTIGGPSQGHLRAPPLNILIKLMAVESLVFAPFFATYGGILL

SEQ ID NO: 2888 - protein, 354 aa, Ashbya gossypii ATCC 10895
MVYKQLYMRGTPPDLSRCITGQDIAMVMNVRTIKLNNGADMPLVGLGCWKIPNEVAAEQVYEAIKLGYRLLDGAEDYANEREVGQGIRRAIDEGLVRREELFVVSKLWNNYHRPEDVGKALQRTLSDLGLDYLDLFYIHFPLAFKFVPLEERYPAGLYTGAADEQAGRLAQEPVPLIETYRALEQLVDEGRIRAIGLSNFQGCLVQDLLRGCRIRPAALQIEHHPYLTQERLVQYAKSEGLAVVGYSSLGPQSFLELGNTAAQNAAPLLQHEVVCRIAERHTATPAEVLLRWATQRDIAVIPKSSRKERLATNLRVDEALTLADDELRELSSLNCGLRFNDPWDWSAQPLPTFI

SEQ ID NO: 2889 - protein, 490 aa, Arabidopsis thaliana
MANKPRTRWVLPYKTKNVEDNYFLGQVLGQGQFGTTFLCTHKQTGQKLACKSIPKRKLLCQEDYDDVLREIQIMHHLSEYPNVVRIESAYEDTKNVHLVMELCEGGELFDRIVKRGHYSEREAAKLIKTIVGVVEACHSLGVVHRDLKPENFLFSSSDEDASLKSTDFGLSVFCTPGEAFSELVGSAYYVAPEVLHKHYGPECDVWSAGVILYILLCGFPPFWAESEIGIFRKILQGKLEFEINPWPSISESAKDLIKKMLESNPKKRLTAHQVLCHPWIVDDKVAPDKPLDCAVVSRLKKFSAMNKLKKMALRVIAERLSEEEIGGLKELFKMIDTDKSGTITFEELKDSMRRVGSELMESEIQELLRAADVDESGTIDYGEFLAATIHLNKLEREENLVAAFSFFDKDASGYITIEELQQAWKEFGINDSNLDEMIKDIDQDNDGQIDYGEFVAMMRKGNGTGGGIGRRTMRNSLNFGTTLPDESMNV

SEQ ID NO: 2890 - protein, 616 aa, Gloeobacter violaceus PCC 7421
MRALNESTVEPRFESAALTRPGAGLPSAAAPDLPFKSYDPDLIARYAERRFGRVLWRFFQTLLPFVGFALQVQWDRLTGTVARHQLKRAVRLREILTRLGPTYIKIGQALSTRPDLVPPVYLDELTLLQDRLPPVPNAEAYALIRAGLGRDPHEIYAEFDEVPIAAASLGQVYRARLTTGERVAVKVQRPNLIPLVSLDLYLQRGLLGWVERNVPQVKSDLQAILDEFGRKLFEEMDYVQEGKNAERFAACFTEMPEVYVPRIYWDYTCRQVLTMEWIDGLKLTRLEDIQRAGLNARKVIENGVQCSLRQLLEHGFFHADPHPGNLLVMADGRLAYLDFGMMSEVEPAQRYGLIEAIVHMVNRDFDGLARDYVKLGFLKPDQDLKPIVPVLAVVFGQALGSSVGSLNIKSITDNMSSMMYDLPFRVPAFFALIIRSLVTLEGIAISVDPDFKVLEVAYPYVARRLLTDNAPELRASLSELLFKDGSFRWNRLENLVRNARSARDYDINRALDQAAEFLLSERGASIREKLIDELTSASTVNPNVPGGKASGLQNLERLWSLLREDPKLDLRKSVSILGKLILKPEGRDLSRRVAGRLLERELARLLRRTLLPATLA

SEQ ID NO: 2891 - protein, 639 aa, Zea mays
MPWRRASLGVVTSSLLVRLPVALSRLAGRRRQTSSSSSTRRPGPGHAMPEKEAQAAAFCGEAVIAEFESLTRDAAAVQRDTLRRILADNACAEYLRCRGLAGRTDAASFRACVPLATHADIEPYIARIADGDTSPVLTAKPITSISLSSGTTQGKRKYLPFNQELAKSTMQIYRTSYAFRNRAFPVEDGKALQFIYGSRQFTTKGGLTATTATTNVYRSEEFMPTMRAIQSQVCSPEAGDLRADFAQSLYCHLLCGLLYADEVRIVSATFAHSIVLAFQTFERVWEELCADIRAGALSPARVAAPAVRGAVEALLAGPDPARADEVARRCAGLSNWYGVIPALFPNARYVHGIMTGTMEHYVKKLRHYAGGLPLVAAEYGASEGWVGANVEPETPPESATFTVLPNIAYFEFIPLKAATGHGGGTAGDTCYAEAEPEPVGLTEVTVGEHYEVVVTTFAGLYRYRLGDVVQVAGFYNSTPKLKFVCRRNLLLSINIDKSSEQDLQLAVDSAAKVLAAEKLEVVDYSSHAEVSRDPGHYVVFWELNADAGDDVLQSCCDELDRAFADPGYVGSRRARGIGPLELRVLQRGTFQKVLRHYLSLGAPVSQFKSPRCVGRANNSGVLQILSANVVKAFFSAAYD

SEQ ID NO: 2892 - protein, 586 aa, Bacillus cereus E33L
MEVRDEIKKKGNWRQFLRLIQDTKPPKGILIFALLMSLLSTGASLFIPMLTKGLVDNFSLSSISTGQIVGLVAFFIMQTIAAGLSIYLLNYIGQKIVAGLRERLWKKVLILPVSYYDQNRTGDTISRMTNDTGVVKTLISEHLSNLLTGGISIVGSLIVLFVLDWKMTLLLLTVIPLSVLILVPLGRKMYKISKALQDETASFTSVLTQVLSEIRLVKSSNTEKREYETGNKGIEKLLQFGLKEGKVQALISPVMSFVLMALLVIIVGYGGMRVSSGALTTGELVAFILYLVQIIMPMSQLSMFFTQFQKAIGATERINTILEYEVEDHETGVKVTNAKQPIVLENVHFEYNEEEQVLKNIDFTIESGKVTAIVGPSGSGKTTLFSLLERFYEPTSGAIKLGKDAITNYSLQSWRRQIGYVSQDSPLIDGTIRDNICYGVEGEVTDEEIEKVAAMAYVDAFIHDLPNAYATEVGERGVKLSGGQRQRIAIARALLRNPQILMLDEATSSLDSKSESVVQKALNNLMKGRTTLVIAHRLSTVVDADKIIFIEKGNLTGSGTHDELLRTHDMYREFATQQLKIKEAAL

SEQ ID NO: 2893 - protein, 99 aa, Corynebacterium glutamicum ATCC 13032
MANVNIKPLEDKILVQINEAETTTASGLVIPDSAKEKPQEATVIAVGPGRFDDKGNRIPLDIKEDDVVIFSRYGGTEIKFGGVEYLLLSARDILAIVEK

SEQ ID NO: 2894 - protein, 355 aa, Zea mays; identical to SEQ ID NO: 1266

SEQ ID NO: 2895 - protein, 326 aa, Rickettsia akari str. Hartford
MDIKLGKYKPIKEEYLRAFKEVLLVRRFEEKCGQLYGVGEIGGFCHLYIGQEAGIVAVNMVRQKGDSMITSYRDHAHIILAGTEPKDVLAELMGRATGCSKGKGGSMHLFDVPRKFYGGHGIVGAQVPIGTGLAFAEKYNGTNNICFTFLGDGAVNQGQVYEALNMAALWGLPVVYIIENNEYSMGTSVARSTFMCDLYKKGESFGIKGCQLDGMDFEEMYNGFKQAAEYVRENSFPLILEVKTYRYRGHSMSDPAKYRSKEEVEKYKERDPLVIIRKTILDNKYATEADLKEIEQSVKEIVKEAVEFSENSPLPDESELYTNVYV

SEQ ID NO: 2896 - protein, 371 aa, Bacillus anthracis str. 'Ames Ancestor'
MTVIRGLEGVVATTSSVSSIIDDTLTYAGYNIDDLAENATFEEVVYLLWHRKLPNEQELAKFNEIVSEYYKVPGEILAYLKQVDLKIAHPMSVLRTAISMLSLYDESAEIMDEKSNYLKAVKLQAQVGTLVAAYARIRKGLDVVEPRNDLSLAANFLYMLNDREPNEVEIEAFDKALVLHADHELNASTFTARVCVATLSDVYSGITAAIGALKGPLHGGANENVMKMLTEIGEEENVESYIHNALQNKVKIMGFGHRVYEQGDPRAKHLREMSKRLCVLLGEEKWYNMSIKIEDIVTKEKGLPPNVDFYSASVYHCLGIDHDLFTPIFAISRMSGWLAHILEQYENNRLIRPRADYNGPTHQVYVPIAQR

SEQ ID NO: 2897 - protein, 326 aa, Dunaliella salina
MAFALRTGVAPSVLPRGQSRRQMVCRAGKFDEELMKTARTIASPGRGILAMDESNATVGKRLDSIGLENSEANRQAYREMLVSTKGLGQYISGAILFEETLYQSGSNGKRMTDILVENGIVPGIKVDKGLAPLANSNNEQWAMGLDGLDTRCAEYYKTGARFAKWRSVVSIPNGPSPIAVRETAYGLARYAAICQNNGLVPIVEPEILLDGDHDINRCLAVFEDVWAETFKYLADNKVLFEGILLKPSMVTPGAESPARATPQQVAEMTLIGLKRRVPPAVPGIMFLSGGQSELEATLNLQEMNPPNPTLGQVSFLLTPVPCRTPC

SEQ ID NO: 2898 - protein, 476 aa, Burkholderia sp. 383
MSKEFDVVVIGAGPGGYIAAIRAAQLGKTVACIEKWKNPAGALKLGGTCLNVGCIPSKALLASSEEFENTSHHLADHGITVDGVKIDVAKMLGRKDAIVEKMTSGIEFLFKKNKITWLKGHGKFTGKTDAGVQIEVSGEGETEVVTAKNVIIATGSKARHLPGIPVDNKIVSDNEGALTFDAVPKKLAVIGAGVIGLELGSVWRRLGAEVTVLEALPAFLGAADEALAKEAAKLFKKQGLDINLGVQIGEVKATANGVSIAYTDKDGNAQTLDADRLIVSVGRVPNTDNLGLEAIGLKANERGFIDVDDHCRTAVPNVYAIGDVVRGPMLAHKAEDEGVLVAEVIDGQKPHIDYNCIPWVIYTYPEIAWVGKTEQQLKAEGREIKSGKFPFSINGRALGMNAPDGFVKMIADAKTDELLGVHVIAANASDLIAEAVVAMEFKAASEDIARICHPHPSMSEVMREAALAVDKRSLNS

SEQ ID NO: 2899 - protein, 332 aa, Oryza sativa
MAASNIGMMDGAYFVGRNEILAWINTTLQLGLSKVEEAASGAVACQLMDAAHPGAVPMHKVNFDAKTEYEMIQNYKVLQDVFNKLKITKHIEVNKLTKGRPLDNLEFMQWMKRYCDSVNGGFMNSYNASERRESSKGGKETNRRTSVPSQAPAKSSSATHTFPRRPPRVKKANGHAPNAPPSRSAKPSPANSAGPAYDEQITELKLLVDSLEKERDFYFSKLRDVEILCQSPEVEHLPIVNAIHKVLYAAEDDPSMVAEAQAMISQQQQSEQPMLSPILEASEERPAKQEAHKRKSISDLELEEFGMASSSRQRLSDISDVQLCGSPLTSFT

SEQ ID NO: 2900 - protein, 561 aa, Bacillus thuringiensis serovar konkukian str. 97-27
MIHLKTHYTVSTYLLDRLSELGIEHIFGIPGDYNLAFLDDVIAHEKLEWIGNCNELNAAYAADGYARIKGIAALITTFGVGELSAINGIAGSYAENVPVIKITGTPTTTVMENGELVHHTLGDGKFNHFSNMYREITVAQTNLTPEHAVEEIDRVLRACWNEKRPVHINLPIDVYNKPINKPAGPILHKPILSNKETLDKMLLHAISKINSAKKPIILADFEVDRFHAKEYLYQFVEKTGFPIATLSMGKGIFPEKHPQFIGIYTGDVSSPYLRKRIDESDCIISIGVKLTDTITGGFTQGFTKEQVIEIHPYTVKITDKKYGPVVMKDVLQQLSDVIEHRNEETLDIKPFISESLSMTEEFNPKAQMVTQKRFWQQIYHFLQENDVLLAEQGTPFFGSAAIPLPNDTTYVAQPLWGSIGYTLPALLGTQLANLSRRNILIIGDGSFQLTVQELSTMLRQNLKPIIFLINNNGYTVERAIHGQIEPYNDIQMWEYTKLANVFGTEEKSQTFKVENETELQEVLTKISIDKDQLTFVEVVMSQGDQPELLAKLGKRFGQQNS

SEQ ID NO: 2901 - protein, 196 aa, Mitthyridium sp. Wall 3858
GGAKKVVISAPSKDAPMFVMGVNEEKYTNEDIVSNASCTTNCLAPLAKVINDKFGILEGLMTTVHATTATQKTVDGPSNKDWRGGRSAGTNIIPSATGAAKAVGKVLPELNGKLTGMAFRVPTTDVSVVDLTVRLEKPASYDAIKAALKEASQGKMKGILGYTEDDVVSSDFITDSQSSIFDAKAGIALSDRFVKL

SEQ ID NO: 2902 - protein, 373 aa, Bacillus cereus ATCC 14579
MMKAEEKFSPGLDGIVAAETKISFLDTVKGEIVIQGYDLIELSKTKEYLDIVHLLLEEHLPNEDEKVTLEKKLKEEYAVPEGVFNVLKALPKETHPMDGLRTGVSALAGYDNDIENRSLEVNKSRGYKLLSKVPNIVANSYHILNNEEPIEPLKELSYSANFFYMLTGKKPTELEEKIFDRSLVLYSEHEMPNSTFTARVIASTQSDLYGALTGAVASLKGSLHGGANEAVMYMLLEAGNVEKFEELLQKKLYNKEKIMGFGHRVYMKKMDPRALMMKEALKQLCDVKGDYTLYEMCEAGEKIMEKEKGIYPNLDYYAAPVYWMLGIPIQLYTPIFFSSRTVGLCAHVIEQHANNRLFRPRVNYIGERHVLSK

SEQ ID NO: 2903 - protein, 479 aa, Ralstonia metallidurans CH34
MTRSTKIVATIGPASSTLEVLTRMIGAGVDVVRLNFSHGTAQDHIDRAALVREAAAACGREVAIMADLQGPKIRVGKFENGKITLKPGDAFILDSACQMGNQERVGLDYKDLPRDVGPGDLLLLNDGLIVLVVDRVLGNEIFTTVRIGGELSNNKGINRQGGGLSAPALTAKDMEDIKTAMALGADYVAVSFPKNATDMEMARQLTNVAGQPHNHKARMIAKIERAEAIRPGVLEEILLASDGIMVARGDLAVEVGNAAVPALQKRMIKLAREANKLTITATQMMESMIVNPVPTRAEVSDVANAVLDGTDAVMTSAETAAGRYPVETVEAMAAICLEAEKSEVVQLDTDFLNQTFARIDQSIAMGALFTAYHLGVKAIAALTDSGATALWMSRHRIHVPIYAMTPNLASQRKMQLYRNVVPLPLQSSADRDVALEQAEELLLSQGVVQRGDFIVLTIGEPMGQPGGTNTLKIVRVGTR

SEQ ID NO: 2904 - protein, 369 aa, Listeria monocytogenes str. 4b H7858
MGQLKGLPVEDGFRMPGEYEPHIGCFMIWPERPDNWRLGGKPAQQNYKEVAVAISNFEPVTMFVSPNQYKNARKELPDTIRVIEMSNDDAWIRDYGPSFLVNDKGEMRGVDWGFNAWGGLLDGLYFPWDKDNQIAKKVCDIERLDYYSQKDFILEGCSIHVDGEGTLVTTEECLLSEGRNPNLTKIEIEQTLKKYFHVQKVIWLKHGFYLDETNGHVDNIFNFVAPGEVVLSWTDNKSDPQYEISRECYDILANQTDAKGRTFIIHKLHCPDPVLITQTESEGVEAINGTFPRQAGDRLAASYVNYYTANGAIIFPLFDDPKDKDAQELLEQLYPDRKIVGIKAREILLGGGNIHCITQHLPDKSTIRE

SEQ ID NO: 2905 - protein, 428 aa, Mesorhizobium loti MAFF303099
MQLSFAPLVKQTAPAVVNVYASQTAKVTSPFEGDPFFEEFFGRAQPRAQSSLGSGVLVDPSGVIVTNFHVIKDADEVKVATADGREFTSKVMLKDETLDLAVLKIESDKPFPVIAIGDSDALEVGDLVLAIGNPFGVGQTTTSGIVSALARSHIGVSDSGYFIQTDAAINPGNSGGALINMGGQLVGINTAIYSRSGGSIGIGFAIPANMVRAFADAAKAGLDFFERPYIGAEFEAVTPQIADSLGMEKPTGALVSSVDATGPAGKAGLKAGDVVLQINGKPVESIEALDYRMATLSIGTKANFAVLTKGQKAAMDIALERAPEGAKASEVTLHGRSPFSGAKVAELSPRLAQKLGLRTDLKGVTVIDINRDSPAADFGFLPGDIVREVNGTTIDTAATLAQVAQQDTRWWRFTVERGGQILRQVLRY

SEQ ID NO: 2906 - protein, 298 aa, Triticum aestivum
  misc_feature (46)..(46): Xaa can be any naturally occurring amino acid
  misc_feature (166)..(166): Xaa can be any naturally occurring amino acid
  unsure (1)..(298): unsure at all Xaa locations
NKFVQKSRLVPVRNSRDIVDPRVRCCVVCRELTHLDVDNFVEEVLXVKDTEWLPGSPEAIKGSYVFVCCHGSRDKRCGVCGPALITRFKEEIEGQGLDGQVAVSACSHVGGHKYAGDVVIFSPDAKGEVTGHWYGYVAPDDVPVLLRQHIGQGEIVGHLWRGQLGXSEEQQKQARELRHMTNGVAGQESSAKESPEANGTDGAPAGGCCQGNGGALSCCQSDLPEGKQDKSIPAEQNRRISKTESVKESVAASKGRMRICRMPTWFETWDRSDTYTTLAVVAAAATVFVAFRAYKTMN

SEQ ID NO: 2907 - protein, 175 aa, Oryza sativa
MELSVVGGEPLLAVAMQQLLDLDLPDELERQLNPPTRAYVRDRRAMANTPMDVKELRASGALVLAVDMPGVAPADVRVEVEDGNVLAISGERRRPAGDGDDGGEGVKYLRMERRMGKFMRRFPLPESADLDGVRAEYKDGVLTVTVDKKPPPEPKKPRVVEVKVAGAGEPKGKGK

SEQ ID NO: 2908 - protein, 606 aa, Magnaporthe grisea 70-15
MTSNAAPMTVPPAAPPSGMPIADTTAAQNEAVHSIGKETVNADDIERNAGSLNAEEKNESDASSEFKQDGVARAEAITKVWTTKTLWATFGLLYLVSTVDSMLGNVEGALSPYVTSAFGRHGLISTTSIVSTILGGVITLTIAKMINIWGRMEGLAGMVFLITIGMIMKALCQNVETYAAAQVMYWVGHIGLLLIINVTVADMTTLRNRMIIFGFNTSPLIISFFTGPLIADRFLKEVNFRWAFGAFAIIMIATTTPIIGVFIYNERKAKSVGLVREKPGRTFFESVKYYVVELDVVGLFLITVGASLLLLPFSLVNYVPGGWANGGLISMFVLGPALLAVFYIWEKKYAPVQFFPWVYLTNKTILGACSCYGLMFASIFCWDTYYYSYLQVAHSLSVVDASYTINSLSLSSAILGVFIGILIRYTGKVKWVAMAGVPFMILGTALLVRFRTPETSIAVLVVLQVLVGLASCVFALCSQMAVMATVKHNEVAPGLALHGLFGAVGAAIGQAIAGGIWNNLLPFKLMQYLPDEAKADAWTIFGDITVQQAATGAVRDAIDAAYGDMQHMMVIAGCCFAPFVIVAVWFWDDLDVRKVDEERGRVGNVF

SEQ ID NO: 2909 - protein, 413 aa, Bacillus anthracis str. 'Ames Ancestor'
MGYYDGPNLNEEHSETREVRKSGSKKGYFFTGLVGAVVGAVSISFAAPYMPWAQNNGATVSSFSSDSKVEGTVVPVVNKAKNETDLPGMIEGAKDVVVGVINMQQSIDPFAMQPTGQEQQAGSGSGVIYKKAGNKAYIVTNNHVVDGANKLAVKLSDGKKVDAKLVGKDPWLDLAVVEIDGANVNKVATLGDSSKIRAGEKAIAIGNPLGFDGSVTEGIISSKEREIPVDIDGDKRADWNAQVIQTDAAINPGNSGGALFNQNGEIIGINSSKIAQQEVEGIGFAIPINIAKPVIESLEKDGVVKRPALGVGVVSLEDVQAYAVNQLKVPKEVTNGVVLGKIYPISPAEKAGLEQYDIVVALDNQKVENSLQFRKYLYEKKKVGEKVEVTFYRNGQKMTKTATLADNSATKNQ

SEQ ID NO: 2910 - protein, 210 aa, Zea mays
  misc_feature (58)..(58): Xaa can be any naturally occurring amino acid
  unsure (1)..(210): unsure at all Xaa locations
AINGGATSRWRCVEACYNYGFLPADRGRHQPPPAPHATLPHAAEDAGELWEYFPCPFXICNHLQEEHCFDTRNAVCPICANNLGKDMAAHFRLQHTHLLKRRKPYRPSSCPAAATSPATYQVNSYYEEAEPQQHYSRPYKDPAPDPLLSQFICSVDAIPGDANAQKDDQRLKLNNKGATASDDDASSKLGLEERLQRIDFLTEILMSPIL

SEQ ID NO: 2911 - protein, 367 aa, Rubrobacter xylanophilus DSM 9941
MQAVILVGGLGTRLRPITYDIPKALVPLRNKPFMGYTLDFLRGGGIEGAVLSLGYLPDPIQRYIDERGDLDGFSVEYAVEERPLGTAGGIKNAARFLQDGPVVVLNGDVLTGMDLRKAIELHRSTGALATITLTSVEDPTAYGLVEVDHDMMVRRFIEKPSPDEVTTNLVNAGVYVLEPEVLEMIPPGREVSIEREIFPRLQERRQLYAHVSSSYWKDIGTPRSYLAASHDVLSGAVGAGEGFDYMDVHRSTLIEKNVRILPPVSVAEGCEISAGATVGGRSSLGRGCRVGEGAVVEGSILLDGAVVEAGAVVRGSIVGPGARIGEGAIVRGLSVLGARCVVGEGNVLDQGIRINPGVVLQPRSVSF

SEQ ID NO: 2912 - protein, 153 aa, Triticum aestivum
  misc_feature (99)..(99): Xaa can be any naturally occurring amino acid
  unsure (1)..(153): unsure at all Xaa locations
MASPGPGTASTVTSSSAGSEATRAPPAALTEERNRKRKESNRLSAQRSRARKLLQVDELEAEAAALRARNCAVAAAAQEAARRCAVVQAENELLHARAXELGARLESLAEADPVPGRGRHGCFLNPARQRQHAQPILTMNYPTTLIHMWVKCV

SEQ ID NO: 2913 - protein, 584 aa, Frankia sp. CcI3
MQVHRYDAVIVGAGGAGMRAAIEAGTRCRTAVLTKLYPTRSHTGAAQGGMCAALANVEEDNWEWHTFDTIKGGDYLVDQDAAEIMAKEAIDAVLDLEKMGLPFNRTPEGRIDQRRFGGHTRDHGKAPVRRSCYAADRTGHMILQTLYQQCVKHDIEFFNEFYVLDLLLQKGAAAGVVAYELKTGEIHIFQAKSVVFATGGFGKVFKVTSNAHTLTGDGMGLAFRRGIPLEDMEFFQFHPTGIWKMGILLTEGARGEGGILRNKDGERFMERYAPTIKDLAPRDMVARAIYTEIRAGRGCGPDADHVYLDLTHLPPEHLDAKLPDITEFARTYLGIEPYNDPIPIQPTAHYAMGGIPTNVDAQVLADNDTVVPGLYAAGEVACVSVHGANRLGTNSLLDINVFGRRAGIAAAEYANANAQHVDLPENPASFVEDLLGRLRAGAGTENAAAIRRELQESMDVNASVYRTEATLKQALSDISGLKTRYQRVGVSDRGRRYNTELLEAVELGFLLDLAEVLVIGAMARNESRGGHSREDYPNRDDVNFMRHTMAYRSGPLVAASPEAEIRLDYKPVVMTRYQPMERKY

SEQ ID NO: 2914 - protein, 933 aa, Escherichia coli
MFRALALVLWLLIAFSSVFYIVNALHQRESEIRQEFNLSSDQAQRFIQRTSDVMKELKYIAENRLSAENGVLSPRGRETQADVPAFEPLFADSDCSAMSNTWRGSLESLAWFIGYWRDNFSAAYDLNRVFLIGSDNLCMANFGLRDMPVERDTALKALHERINKYRNAPQDDSGSNLYWISEGPRPGVGYFYALTPVYLANRLQALLGVEQTIRMENFFLPGTLPMGVTILDENGHTLISLTGPESKIKGDPRWMQERSWFGYTEGFRELVLKKNLPPSSLSIVYSVPVDKVLERIRMLILNAILLNVLAGAALFTLARMYERRIFIPAESDALRLEEHEQFNRKIVASAPVGICILRTADGVNILSNELAHTYLNMLTHEDRQRLTQIICGQQVNFVDVLTSNNTNLQISFVHSRYRNENVAICVLVDVSSRVKMEESLQEMAQAAEQASQSKSMFLATVSHELRTPLYGIIGNLDLLQTKELPKGVDRLVTAMNNSSSLLLKIISDILDFSKIESEQLKIEPREFSPREVMNHITANYLPLVVRKQLGLYCFIEPDVPVALNGDPMRLQQVISNLLSNAIKFTDTGCIVLHVRADGDYLSIRVRDTGVGIPAKEVVRLFDPFFQVGTGVQRNFQGTGLGLAICEKLISMMDGDISVDSEPGMGSQFTVRIPLYGAQYPQKKGVEGLSGKRCWLAVRNASLCQFLETSLQRSGIVVTTYEGQEPTPEDVLITDEVVSKKWQGRAVVTFCRRHIGIPLEKAPGEWVHSVAAPHELPALLARIYLIEMESDDPANALPSTDKAVSDNDDMMILVVDDHPINRRLLADQLGSLGYQCKTANDGVDALNVLSKNHIDIVLSDVNMPNMDGYRLTQRIRQLGLTLPVIGVTANALAEEKQRCLESGMDSCLSKPVTLDVIKQSLTLYAERVRKSRDS

SEQ ID NO: 2915 - protein, 446 aa, Arabidopsis thaliana
MSSISTESSSNLCLLENGGGGSDKPTAETSRRVRRTVSASSLIRKRSDLKLISRVRWEFMRRILTNLQEVLLGTKLFILFPAVPLAVVAHRYDCPRAWVFALSLLGLTPLAERISFLTEQIAFHTGPTVGGLMNATCGNATEMIIAILAVGQRKMRIVKLSLLGSILSNLLFVLGTSLFLGGISNLRKHQSFDPRQGDMNSMLLYLALLCQTLPMIMRFTMEAEEYDGSDVVVLSRASSFVMLIAYLAFLIFHLFSSHLSPPPPPLPQREDVYDDDVSDKEEEGAVIGMWSAIFWLIIMTLLVALLSDYLVSTIQDAADSWGLSVGFIGIILLPIVGNAAEHAGAVIFAFRNKLDITLGIALGSATQIALFVVPVTVLVAWTMGIEMDLNFNLLETACLAMSIIVTSLVLQDGTSNYMKGLVLLLCYFVIAACFFVSNSPSSKLLF

SEQ ID NO: 2916 - protein, 481 aa, Xanthomonas campestris pv. campestris str. ATCC 33913
MFPGEPMSSVSIDGAPDAGENTRFIILISCVATIGGFLFGFDSGVINGTVDGLKQTFQSSAAETGFEVASMLLGCAIGAFFAGRLADRWGRRAVLIISAALFLLSAIGAGASHSSGFFIFARVMGGFAVGAASVISPAYIAEVASARYRGRLATMQQIAIISGLFCAFLSNYLLANAAGASTEPLWGGQAAWRWMFWMQAIPSLLFLLLLLVIPESPRYLVVKGRREQALVVLKRLYGNAAAQTKLGEISASMSADQHKPKFSDLISKTTGKIRPIVWIGVGLAVFQQLVGINVVFYYGAVLWQAVGFSEQDALLINVLSGGLSIGACLVTVMLVDKIGRKPLLWIGSAGMAVSLALVTYAFATASLDPNGKLAMSDAMGMLALVAANVYVVFFNASWGPVMWVMLGEMFPNQIRGSGLAIAGAAQWTSNFAITVSFPILLGSIGLAGAYGIYTVAAFISVFFVLKYVYETKGKELEQMEG

SEQ ID NO: 2917 - protein, 933 aa, Escherichia coli
MFRALALVLWLLIAFSSVFYIVNALHQRESEIRQEFNLSSDQAQRFIQRTSDVMKELKYIAENRLSAENGVLSPRGRETQADVPAFEPLFADSDCSAMSNTWRGSLESLAWFIGYWRDNFSAAYDLNRVFLIGSDNLCMANFGLRDMPVERDTALKALHERINKYRNAPQDDSGSNLYWISEGPRPGVGYFYALTPVYLANRLQALLGVEQTIRMENFFLPGTLPMGVTILDENGHTLISLTGPESKIKGDPRWMQERSWFGYTEGFRELVLKKNLPPSSLSIVYSVPVDKVLERIRMVILNAILLNVLAGAALFTLARMYERRIFIPAESDALRLEEHEQFNRKIVASAPVGICILRTADGVNILSNELAHTYLNMLTHEDRQRLTQIICGQQVNFVDVLTSNNTNLQISFVHSRYRNENVAICVLVDVSSRVKMEESLQEMAQAAEQASQSKSMFLATVSHELRTPLYGIIGNLDLLQTKELPKGVDRLVTAMNNSSSLLLKIISDILDFSKIESEQLKIEPREFSPREVMNHITANYLPLVVRKQLGLYCFIEPDVPVALNGDPMRLQQVISNLLSNAIKFTDTGCIVLHVRADGDYLSIRVRDTGVGIPAKEVVRLFDPFFQVGTGVQRNFQGTGLGLAICEKLISMMDGDISVDSEPGMGSQFTVRIPLYGAQYPQKKGVEGLSGKRCWLAVRNASLCQFLETSLQRSGIVVTTYEGQEPTPEDVLITDEVVSKKWQGRAVVTFCRRHIGIPLEEAPGEWVHSVAAPHELPALLARIYLIEMESDDPANALPSTDKAVSDNDDMMILVVDDHPINRRLLADQLGSLGYQCKTANDGVDALNVLSKNHIDIVLSDVNMPNMDGYRLTQRTRQLGLTLPVIGVTANALAEEKQRCLESGMDSCLSKPVTLDVIKQTLTVYAERVRKSRES

SEQ ID NO: 2918 - protein, 619 aa, Nitrosomonas europaea ATCC 19718
MSGICGWLGADHLAIENQQIIDRMTGSLIRFDSNPVQTAVQGNAALSVAAKTSHSHLYEKEGLLVGIWGRIKSRNTDLQTAIDARGMAAALADQWKQKGRQAFSELAGEFVCCIVDSHAREVALAIDPLGTHVLYYQSLGDDGILFGTSADALLTHPRANTEINPQGLLNYLYFHMIPGPDTIYLAQKRLLPGEYLHFHDGHTEIGRYTQIRFDEDIKRPFPELQQEFLSLLRKSVSEAVQGQKAGTFLSGGTDSSTLAGILTEVTGEPAKTYSIGFEATGYDEMHYARIAARHFATDHHEYYVTPDDVVETIPLIASVFDQPFGNASALPAYYCGRMARNDGLDLLLGGDGGDELFGGNVRYAKQYIFSLYDKIPAPLRNYLLSPFILSLPENKGPKLLRKARSYVAQATVPMPHRMETYNLLAHYGFETVFSPELLAKIDTAQPALLIERTYQDVSHARSLINRMLAFDWKFTLADNDFPKVVQACHLAGMEVAFPFVNDEILAFSLALPPEQKLKGTQLRYFFKQALRGFLPDEIITKQKQGFGLPFGVWLQTHRPLREIAADSLSDLKSRNIIRTDFIDQLLDQHLHEHASYHGTMVWLLMMLEYWFKQHHPIKV

SEQ ID NO: 2919 - protein, 144 aa, Elymus repens
  misc_feature (132)..(132): Xaa can be any naturally occurring amino acid
  unsure (1)..(144): unsure at all Xaa locations
TIMRLTGITGIVNGMDVSEWDPTKDKFLAVNYDITTALEGKALNKEALQAEVGLPVDRKVPLVAFIGRLEEQKGPDVMIAAIPEIVKDEDVQIVLLGTGKKKFERLLKSVEEKFPGKVRAVVRFNAPLAHQXMAGADVLAVTSR

SEQ ID NO: 2920 - protein, 117 aa, Brassica napus
MTLMPLTFSSSIAVAAAAAATVTSSPRFSLVSLRGFKKLPLRCALSVRAMSELVQDKESVVAATTSSFSNTTPTELNHSRTFLDARTEEDLISGLRKEIEAGRLPPNVASGMEELFC

SEQ ID NO: 2921 - protein, 525 aa, Buchnera aphidicola
NEARIKMLRGVNVLADAVKVTLGPKGRNVVLDKSFGAPSITKDGVSVAREIELEDKFENMGAQMVKEVASKANDAAGDGTTTATLLAQSIVNEGLKAVAAGMNPMDLKRGIDKAVISAVEELKNLSVPCSDSKAITQVGTISANADEKVGALIAEAMEKVGNDGVITVEEGTGLQNELEVVKGMQFDRGYLSPYFINKPETGIVELENPYILMADKKISNVREMLPILESVAKSGKPLLIISEDLEGEALATLVVNSMRGIVKVAAVKAPGFGDRRKAMLQDISILTGGSVISEELAMDLEKSTLEDLGQAKRVVINKDTTTIIGGSGEKHTIQSRISQIRQEIQEATSDYDKEKLNERLAKLSGGVAVLKVGAAPEVEMKEKKARVEDALHATRAAVEEGVVAGGGVALVRVAGKISNLRGQNEDQNVGIRVALRAMEAPLRQIVSNSGEEPSVVTNNVKDGKGNYGYNAATDEYGDMIDFGILDPTKVTRSALQYAASVAGLMITTECMVTDLPKEEKSSDSS

SEQ ID NO: 2922 - protein, 361 aa, Ocimum basilicum
MGSATNTPQINSDEEENFLFAMQLASASVLPMVLKSAIELDLLELIKKSGAGAFVSPVDLAAQLPTTNPDAHVMLDRILRLLTSYAILECRLKTLPDGGVERLYGLAPVCKFLTKNEDGVSMAPLTLMNQDKVLMESWYHLSDAVVDGGIPFNKAYGMTAFEYHGTDPRFNKVFNQGMSNHSTITMKKILETYTGFDGLKTVVDVGGGTGATLNMIVSKYPSIKGINFDLPHVIEDAPSYPGVEHVGGDMFVSVPKGDAIFMKWICHDWSDEHCVKFLKNCYDALPQNGKVILAECVLPEAPDTGLATKNVVHIDVIMLAHNPGGKERTEKEFQGLAKAAGFKQFNKACCAYNTWIMELLK

SEQ ID NO: 2923 - protein, 144 aa, Elymus repens
TIMRLTGITGIVNGMDVSEWDPTKDKFLAVNYDVTTALEGKALNKEALQAEVGLPVDRKVPLVAFIGRLEEQKGPDVMIAAIPEIMKDEDVQIVLLGTGKKKFERLLKSVEEKFPGKVRAVVRFNAPLAHQMMAGADMLAVTSR

SEQ ID NO: 2924 - protein, 525 aa, Buchnera aphidicola
NEARVKMLRGVNVLADAVKVTLGPKGRNVVLDKSFGAPSITKDGVSVAREIELEDKFENMGAQMVKEVASKANDAAGDGTTTATLLAQAIVNEGLKAVAAGMNPMDLKRGIDKAVIAAVEELKRLSVPCSDSKAITQVGTISANADEKVGMLIADAMEKVGKDGVITVEEGTGLQDELEVVKGMQFDRGYLSPYFINKADTGIVELDNPYILMADKKISNVRELLPILEAVAKSGKPLLIISEDLEGEALATLVVNSIRGIVKVAAVKAPGFGDRRKAMLQDISILTAGSVISEELAMELEKATLEDLGQAKRVVISKDTTTIIGGIGEKFNIQNRISQIRQQIQEATSDYDKEKLNERLAKLSGGVAVLKVGAAPEVEMKEKKARVEDALHATRAAVEEGVVPGGGVALVRVAAKISSLLGQNEDQNVGIRVALRAMEAPLRQIVSNSGEEPSVVTNNVKDGKGNYGYNAATDEYGDMIQFGILDPTKVTRSALQYASSVAGLMITTECMVTDLPKEEKSDLSS

SEQ ID NO: 2925 - protein, 250 aa, Lactobacillus johnsonii NCC 533
MEHSWMLKYFAEFFGTLIMVMFGNGAVANSFLKGTTGNAHDGKANGGWILIAFSFGFGVMLPAMLFGSISGNHLNPAVTLAQATAGVFPWAQVTPYIISQVLGAICGQLLIITIYWPYIKKSTDSNIVFACFATSDCVNSKWNGFISELVGTGVLMFVAIGLYKGMFFKQAVDIANIGVGFLITALVMALGGPTGPALNPARDFGPRLVYSILPIPNKKDAHWSYGWVPVVAPILGAIIGIFLYKIPFGL

SEQ ID NO: 2926 - protein, 361 aa, Ocimum basilicum
MSSTANNPQINSDEEENFLFAMQLASASVLPMVLKSAIELDLLELIKKAGAGAFVSPAELAAQLLTTNAEAHVMLDRILRLLTSYAILECRLKTLPDGGVQRLYGLAPVCKFLTKNEDGVSMAPLALMNQDKVLMESWYHLKDAVLDGGIPFNKAYGMTAFEYHGTDPRFNKVFNQGMSNHSTITMKKILETYTGFDGLKTVVDVGGGTGATLNMIISKYPSIKGINFDLPHVVEDAPSYPGVEHVGGDMFVSVPKGDAIFMKWICHDWSDAHCVKFLKKCYEALPENGKVILAECVLPEAPDTGLATKNVVHIDVIMLAHNPGGKERTEKEFQVLAKASGFKQFNKVCCAYNSWIMELLK

SEQ ID NO: 2927 - protein, 149 aa, Desulfitobacterium hafniense DCB-2
MEKTFIMLKPDAVQRGLVGQIIARFEAKGCKLVGMKLMSVDQALAEQHYAEHKGKSFFEPTVQYIMSSPVVAMVWEGKNVVALARELMGATNPANANPGSIRGSFGMDISRNVIHGSDSVASAEREIALYFRPEELCDYRKAGEEWLSE

SEQ ID NO: 2928 - protein, 146 aa, Elymus repens
NIMRLTGITGIVNGMDVSEWDPIKDKFLAVNYDVTTALEGKALNKEALQAEVGLPVDRKVPLVAFIGRLEEQKGPDVMIAAIPEIVKDEDVQIVLLGTGKKKFERLLKSVEEKFPGKVRAVVRFNAPLAHQMMAGADVLAVTSRFQ

SEQ ID NO: 2929 - protein, 525 aa, Buchnera aphidicola
NEARVKMLRGVNVLADAVKVTLGPKGRNVVLDKSFGAPSITKDGVSVAREIELEDKFENMGAQMVKEVASKANDAAGDGTTTATLLAQAIVNEGLKAVAAGMNPMDLKRGIDKAVIAAVEELKCLSVPCSDSRAITQVGTISANADEKVGMLIADAMEKVGKDGVITVEEGTGLQDELEVVKGMQFDRGYLSPYFINKTETGIVELDNPYILMADKKISNVRELLPILESVAKSGKPLLIISEDLEGEALATLVVNSIRGIVKVAAVKAPGFGDRRKAMLQDISILTAGSVISEELAMELEKSTLEDLGQAKRVVISKDPTTIIGGIGQKFDIQNRISQIRQQINEATSDYDKEKLNERLAKLSGGVAVLKVGAAPEVEMKEKKARVEDALHATRAAVEEGVVPGGGVALVRVAAKISNLLGQNEDQNVGIRVALRAMEAPLRQIVSNSGEEPSVVTNNVKDGKGNYGYNAATDEYGDMIRFGILDPTKVTRSALQYASSVAGLMITTECMVTDLPKEEKSDLSN

SEQ ID NO: 2930 - protein, 510 aa, Oryza sativa (japonica cultivar-group)
MWKGFLSKLPRKTSASGRGADLDSGQCSNGAGNGNPIQRTSSCGSIPSGRSTSTIKRMSSAIFPSSVVAGIEPLVSFKDVPNSEKQNLFVSKLNLCCAVFDFSDPNKSSAEKDIKRQTLLDLIDYVDSSSSRFSEAVIAASSRMFAVNLFRVFPPNYRSSSSGGGEGEEEEPMFEPAWCHLQLVYELLLKFIGSSSLDAKVGKKYFDHSFIVKLLNLLDSEDPRERDCLKTILHRIYGKFMVHRPFIRKAVSNIFYHFVFETDRHNGIAELLEVFGSVISGFALPLKEEHKIFLWRVLVPLHKPKSVGVYLQQLTYCVTQFIEKDPKLASSVIIGLLRYWPITNSQKEVMFLSEIEEILETISTAEFQKCMVPLFRRIAQCIKSSHFQVAERALFIWNNDNVISLIAQNRQMIMPIIVPALEHNSQNHWNQAVLNLTDNVKKMFSEMDDVLFSACLVKYKEDEERQASLESKRRLTWEKLESAASFQPVTGHTAVLVGRQPSANLIATLI

SEQ ID NO: 2931 - protein, 662 aa, Chromobacterium violaceum ATCC 12472
MVTRTELANAIRFLSMDAVEKAKSGHPGAPMGMADIAEVLWRDHLKHNPANPAWADRDRFVLSNGHGSMLIYSLLHLTGYDLSIDDLKNFRQLHSKTPGHPEYGYAPGVETTTGPLGQGITNAVGMALAEKMLAAQFNRDGHEIVNHHTYVFLGDGCLMEGISHEACSLAGTWGLNKLVAFWDDNGISIDGHVEGWFSDDTPARFEAYGWQVIRNVNGHDPAEIATAIATAKKSADKPTLICCKTTIGFGAPNKQGSHDCHGAPLGAAEIAAARELLKWPHAPFEIPSEIYAEWSARDQGAVAEIEWNKRFDAYRAAHPQLAAEFERRMAGELPAGWAEAQAAAVAKIADAAQTVATRKASQIALEAFSPSLPEFVGGSADLTGSNLTNWSGSQWIDGEGNGNYISYGVREFGMAAIINGMTLHGGLRPYGGTFLMFSEYARNALRMASLMKINPIFVFTHDSIGLGEDGPTHQPVEQTATLRYIPNHHTWRPCDTTETAVAWAHAIEQKTTPSSLVLSRQNLPFVARDAAQTAAIKKGGYVLRDAENARAVLIATGSEVELALKAQETLAAEGVPVRVVSMPCTNVFDAQDKAWQQSVLPAGLPRVAVEAGHPDFWRKYVGLEGDVVGIDHFGESAPAGQLFKEFGFTVENVVAKIRAVLR

SEQ ID NO: 2932 - protein, 241 aa, Sinapis alba
MGRGRVQLKRIENKINRQVTFSKRRSGLLKKAHEISVLCDAEVALVIFSSKGKLFEYSTDSCMEKILERYDRYLYSDKQLVGRDISQSENWVLEHAKLKARVEVLEKNKRNFMGEDLDSLSLKELQSLEHQLHAAIKSIRSRKNQAMFESISALQKKDKVLQDHNNALLKKIKEREKNTVHQEVQLIQCSNNSSILQPQYCLTSSRDGFVGRVEGENEGASSLAEPNSLLPAWMLRPTTNE

SEQ ID NO: 2933 - protein, 471 aa, Hebeloma cylindrosporum
MVNVTYDASQPLVWTDAAGNTGVYSPGDIAWVLASTALVWIMVPGVGFFYSGLLRRKNALSMIYLSMMTVAVVSFQWFFWGFSLAFSDGASLFIGDLKYFGMKGVLEEPSIGSTRIPAIVFSVYQLMFAAITPMIAVGGFAERAHLGPLLFFVFVWSTLVYDPIACWTWNSKGWSFVHGSYDFAGGTPVHISSGTAALAISIYLGKRRGYGTEVLTYKPHNTTYVILGTIFLWFGWFGFNGGSALAANLRAAQACIVTNLAASVGGLTWMLWDYRIEKKWSAVGFCSGAIAGLVAITPGSGFVGSPAAVLFGFMAGTVCNFATQLKFFAGYDDSLDIFASHAVGGVVGNLLTALFAQASVAGFDGFTVIPGGWLDRHYIQLAWHVADSAAGLSYSFVVTTIILWVMHFIPGLRLRVPEETEIIGIDEADMGEFAYDYVGLETELKPHVYVRSTGTAYDSGRNSELKERSSA

SEQ ID NO: 2934 - protein, 617 aa, Desulfitobacterium hafniense DCB-2
MCSILGLVNFKRKISPQEIQCLSTMGKTLIHRGPDQNGLEYGEHFAFQHNRLAIIDIEKGRQPMTATHQGYDYTIVYNGELYNTADLRQELLEHGVKFKTYCDTEVVLYAYIIWGEQCSSKLNGIYAFVIYDSKEKKTYLSRDRFGVKPFFYTFVEGALLFASEIKALLKHPQVKPRLDYQGLWQLLYMMPVKEEGTAIFKDIFELPTASHAFYSLAPGASEAELKIAKYWTMEAYENQDSEAAIVATTRDLLVDAIERQLVSDVPLCTFLSGGLDSSIITAVAAQKYQAEGRQLATYSFEHEGNKDHFKQTLFQPQSDDEFAVYLAQHLHTQHQILTAKKEHLVDYLDEAVRYRDYPGMADIDSSLLFYCRQVKEHHTVALSGECSDEVFGGYPWFYRPEMLTRGFFPWIHEPHARISLFKPELVRPQEGFAYTSEIYRRSVEACPLLPDESETMQNSRIASWLSINYFMTSLLERKDRMSMASGLEVRVPFSDHRLVQYVYNVPWEIKFKDGVEKALLRAAMQDYLPPKILYRKKSPFPKTHDPHYEELVFHLFRKRLDSGSGMLAELLQKDVLNRLISPGNNTWFGQLMGLPQLLAWLVQLDYWFEAYQVQLVG

SEQ ID NO: 2935 - protein, 492 aa, Vibrio fischeri ES114
MKRLKYFVSNVAILIIIKALIMTNSTPIRSTHFDAIVIGSGPGGEGAAMGLTKANLNVAIIEREPSVGGGCTHWGTIPSKALRHAVSRIIEFNSNPLYCKNNTSLHSTFSDILGHAKSVIDKQTRMRQGFYDRNQCSLIFGEASFVEKNTVAVTAKDGSIETYTADKFIIATGSRPYRPEGINFNHSRVYDSDSILSLKHDPRHIIIYGAGVIGSEYASIFRGLGVKVDLVNTRDRLLSFLDNEMSDALSYHFWNSGIVTRNDENFEHIEANDDGVIMHLESGKKMKADCILFANGRTGNTDKLNLSAVGLEADSRGQLKVNDNYQTDVEHIYAVGDVIGYPSLASAAYDQGRFTAQAITKGKAEARLIDHIPTGIYTIPEISSVGKTEQELTAAKVPYEVGRSSFKHLARAQIAGKDIGSLKILFHRETKEILGIHCFGERAAEIIHIGQAIMEQKGEANTIEYFVNTTFNYPTMAEAYRVAALNGLNRLF

SEQ ID NO: 2936 - protein, 205 aa, Chromobacterium violaceum ATCC 12472
MLRILGRSSSINVRKVLWTCHEIGLDYEREDWGRGVRPVSDPAFLALNPFAMIPALVDGDVALSESNAICRYLAAKHGRRDLLPADPAGRAQVERWMDWQIADLNPAWSYAFHALSRNSPEHRDPARIADSAAAWNKQMAVLESQLGEVWLLGEDFTLADIALGVSVQRWLLTPFDKPALPKAEAYFERLRRRPAYLAHGGEGVA

SEQ ID NO: 2937 - protein, 492 aa, Hebeloma cylindrosporum
MSNLATGQFDRGDISFIVVAGAMVFFMVPGLAFLYSGLSRRKSALSLIWAVAASNAVVIFQWYFVGYSLAFSSTATNGYIGNLRNFGLMKVEADPSPGSPLIPEILYSFFQMEFACVTAGILMGGLAERGRVFPAMIFIFFWMTFVYCPLACWAWSTHGWAFKWGVLDFAGGGPVEIGSGVGGLAYAWVLGRRNERELLNFRPHNVGLVGLGTFMLWFGWIGFNGGSAFGANLRAIFAIWNTMIAASFGGMVWCLLDFRIERRWSMVGFCSGTIAGLVAATPSSGYLRPWSSVVVGVLAGTLCNFATKVKFLLRIDDALDLFAEHAVGGVVGLMLNAFFAETAVIAMDDVTIGVRGGWVDHNWKQLYIQFTYVVATCAYSFVMTALVAKTVDLIPGLKLRSSPEGEMLGMDEVEIGEFATDYIELRRDVADCSTFGFTRGSNGYIPHAATNETHAQDTSSNDDPHHRIDEPTAPERLEPLTEKNECGTVTPS

SEQ ID NO: 2938 - protein, 237 aa, Streptococcus agalactiae 2603V/R
MTQFLGEFLGTFILVLLGDGVVAGNVLSKTKEEGTGWTAIVFGWGIACTVAVYVSGLFSPAHLNPAVTLAMASIGAISWGQVIPFIIAQMLGAMVAATILWLHYYPHWKETKDSGLILASFSTGPAIRHTPSNLLGEIIGTAILVITIMAIGPSKVAAGLGPIIVGIVIFAVGFSLDPTTGYAINPARDLGPRLMHAILPIENKGNSDWSYAWIPVVGPIIGGVLGAILYNIALTLV

SEQ ID NO: 2939 - protein, 248 aa, Lycopersicon esculentum
MDFQSDLTREISPQRKLGRGKIEIKRIENTTNRQVTFCKRRNGLLKKAYELSVLCDAEVALVVFSNRGRLYEYANNSVKATIERYKKACSDSSNTGSVSEANAQYYQQEASKLRAQIGNLMNQNRNMMGEALAGMKLKELKNLEQRIEKGISKIRSKKNELLFAEIEYMQKREVDLHNNNQYLRAKIAETERAQHQHQQMNLMPGSSSNYHELVPPPQQFDTRNYLQVNGLQTNNHYPRQDQPPIQLV

SEQ ID NO: 2940 - protein, 562 aa, Bacillus sp. DG0303
MQHPWWKKAVVYQIYPKSFNDTNGDGIGDLAGIIEKLDYLKQLGVDVIKLKPIYKSPQRDNGYDISDYFQIHDEYGTMEDFDRLLEEVHRRGMKLIMDMVVNHTSTEHEWFKQARTSKDNPYRHFYIWRDPKPDGSAPTNWQSKFGGSAWEYDEKTGQYYLHLFDVTQADLNWENEELRRRIYDMMHFWFQKGVDGFRLDVVNLLSKDQRFLDDDGSMPPGDGRKFYTDGPRIHEFLHEMNREVFSKYDVMTVGEMSSTTIDHCIKYTNPERRELNMVFNFHHLKVDYPNGEKWAVADFDFLALKRILSEWQVEMHKGGGWNALFWCNHDQPRIVSRYGDDGKYHKESAKMLATVIHMMQGTPYIYQGEEIGMTDPKFERIDDYRDVESLNMYHILREQGKSEQEVLEILKRKSRDNSRTPMQWDDSENAGFTTGKPWIRVAPNYQQINVKKALEDPTSVFYHYQRLIQLRKQYDIITTGDYQLLLEDHPDIFAYLRNGENEKLLVVNNFYGRETTFILPDDVDVNGYASEILISNYDDSPSDFRKITLRPYESIVYYLTKS

SEQ ID NO: 2941 - protein, 238 aa, Oryza sativa (indica cultivar-group)
ENTMNRQVTFFKRRNGLLKKAHEISVLCDADVALIVFSTKGKLYEFSSHSSMEGILERYQRYSFDERAVLEPNTEDQENWGDEYGILKSKLDALQKSQRQLLGEQLDTLTTKELQQLEHQLEYSLKHIRSKKNQLLFESISELQKKEKSLKNQNNVLQKLMETEKEKNNAIINTNREEQNGATPSTSSPTPVTAPDPIPTTNNSQSQPRGSGESEAQPSPAQAGNSKLPPWMLRTSHT

SEQ ID NO: 2942 - protein, 605 aa, Arabidopsis thaliana
MAMAFTLLFFACLCSFVSPDAQGDALFALRISLRALPNQLSDWNQNQVNPCTWSQVICDDKNFVTSLTLSDMNFSGTLSSRVGILENLKTLTLKGNGITGEIPEDFGNLTSLTSLDLEDNQLTGRIPSTIGNLKKLQFLTLSRNKLNGTIPESLTGLPNLLNLLLDSNSLSGQIPQSLFEIPKYNFTSNNLNCGGRQPHPCVSAVAHSGDSSKPKTGIIAGVVAGVTVVLFGILLFLFCKDRHKGYRRDVFVDVAGEVDRRIAFGQLKRFAWRELQLATDNFSEKNVLGQGGFGKVYKGVLPDNTKVAVKRLTDFESPGGDAAFQREVEMISVAVHRNLLRLIGFCTTQTERLLVYPFMQNLSLAHRLREIKAGDPVLDWETRKRIALGAARGFEYLHEHCNPKIIHRDVKAANVLLDEDFEAVVGDFGLAKLVDVRRTNVTTQVRGTMGHIAPEYLSTGKSSERTDVFGYGIMLLELVTGQRAIDFSRLEEEDDVLLLDHVKKLEREKRLGAIVDKNLDGEYIKEEVEMMIQVALLCTQGSPEDRPVMSEVVRMLEGEGLAERWEEWQNVEVTRRHEFERLQRRFDWGEDSMHNQDAIELSGGR

SEQ ID NO: 2943 - protein, 217 aa, Magnaporthe grisea 70-15
MGDKNLNALLKWSIENTNTDGSAPAAGADQQQELQRPDPEVLAALFGGPSEAELMKAAMDVITSTEPDVTLDNKLIAFDNFEQLIESLDNANNLSKLSLWTPLLGLLDSDHPDLRRMAAWCIGTAVQNNEPCQERLLALGGLPSLVKLATAEDQREDVRRKVVYALSSAGRNYQPAMDVIVEEVGKQGGKSDKVDATNMDAVDAVIDLLKAGIPKKS

SEQ ID NO: 2944 - protein, 332 aa, Bacillus thuringiensis serovar konkukian str. 97-27
MNPLIFKGNRPFDLIAVGRLCVDLNANETQRPMEETRTFTKYVGGSPANIAIGAARLGLQTGFIGKVSDDQMGRFITGYLKDNKINTDQIPIDCTGAVTGLAFTEIKSPEDCSILMYRDNVADLNLDPTEVSEDYIKQSKALLISGTALAKSPSREAVFLALEYARKHDVVVFFDVDYRPYTWQSEAETAVYYNLAAEKSDVIIGTREEFDMMEKLLNYEKSNDQVTAERWFSHHAKIVVIKHGGDGSIAYTRDGQSHRGGIFKTKVLKTFGAGDSYASAFIYGLMQGLEIPQAMRLGGASASIVISKHSCSDAMPTRAEISAFMETAEELV

SEQ ID NO: 2945 - protein, 248 aa, Nicotiana tabacum
MDFQSDLTREISPQRKLGRGKIEIKRIENTTNRQVTFCKRRNGLLKKAYELSVLCDAEVALIVFSSRGRLYEYANNSVKATIERYKKACSDSSNTGSISEANAQYYQQEASKLRAQIGNLQNQNRNMLGESLAALSLRDLKNLEQKIEKGISKIRSKKNELLFAEIEYMQKREIDLHNNNQYLRAKIAETERAQQQQQQQQMNLMPGSSSYELVPPPHQFDTRNYLQVNGLQTNNHYTRQDQPSLQLV

SEQ ID NO: 2946 - protein, 458 aa, Oenococcus oeni
MTKKILVSSDNTVAELQSALEKVDVKFLKKDKKEELLRLAKNYNRRVDRAEKKSEGNDGLSIKKGDLKKGKTKDNSKSGEKSSSAATAFDEKAYAKSLKAFIKKNKKSGQVVYDDLENKMAKPFALNADQIDKLIEKVEDAGISIVDEDGNPSEKSLKTKSNNPSQEELSQASSAPKGVKINDPVRMYLKEIGRVSLLNADQEVAIAKRIEKGGSDGERARQELAEANLRLVVSIAKRYVGRGMHFLDLIQEGNMGLMKAVEKFDYTKGFKFSTYATWWIRQAITRAIADQARTIRIPVHMVETINKLIRIQRTLIQDLGRDPMPEEIGAEMELTADKVREIQKIAQEPVSLETPIGEEDDSHLGDFIEDNEGESPIESTSDQMLKDQLEEVLGTLTEREENVLRLRFGLEDGKTRTLEEVGRVFGVTRERIRQIEAKALRKLRHPSRSKQLKDFMEE

SEQ ID NO: 2947 - protein, 476 aa, Triticum aestivum
  misc_feature (225)..(225): Xaa can be any naturally occurring amino acid
  misc_feature (395)..(395): Xaa can be any naturally occurring amino acid
  misc_feature (413)..(413): Xaa can be any naturally occurring amino acid
  misc_feature (425)..(426): Xaa can be any naturally occurring amino acid
  misc_feature (436)..(436): Xaa can be any naturally occurring amino acid
  misc_feature (440)..(440): Xaa can be any naturally occurring amino acid
  misc_feature (447)..(447): Xaa can be any naturally occurring amino acid
  misc_feature (455)..(455): Xaa can be any naturally occurring amino acid
  misc_feature (458)..(458): Xaa can be any naturally occurring amino acid
  misc_feature (461)..(461): Xaa can be any naturally occurring amino acid
  misc_feature (463)..(463): Xaa can be any naturally occurring amino acid
  unsure (1)..(476): unsure at all Xaa locations
MPWIHLGCRSAQGYRWMLQWSPMRRGWVSILEALKLYGRSWRQIQEHIGTKTAVQIRSHAQKFFSKVVREPGAKIEIEIPPPRPKRKPLHPYPRKRANSCNGANAANGQSKLAHMSSSSGSDQENGSPVSVLSAMQSDAFGSSMSNPSSRSTSPESSDEENSVLPMVNGGEGQQTGIDQPHKEADQENIDTGTSEEDSSDEVQVTSVKLFGKTVVIPDPRKRCSXDTGSGHENGEQTSQSSNIGTSQAPLAVEIPTHTKGGQISQSSNKATSPAPLAAEVPTYTNGEQISEFSYKATSQAPLAVEVPTCTNGEQISEFSYKATSQAPLAVEIQAYAAPPSAWVLPYNSFPLHFGESAEARIARLHMWWPYYGFPMVHPSGPSAVAHNGKVTDESXAAKSPPVESSSDFVDNTXATASKQWKVLEXXGTAQAPPSAXNFQXKPSTNSXAFVRMKPXSAXGDXPXRGSPVQKISMTKA

SEQ ID NO: 2948 - protein, 448 aa, Bifidobacterium longum NCC2705
MLTDEYIKRVYDQVVARDGDQPEFLQAVREVFETLQPVVEKHPEYEKAGVLERIVEPERTIKFRVAWVDDEGKVQVNRGYRIQFNSAIGPYKGGLRFHPTVTESVVKFLGFEQILKNSLTTLPMGGGKGGSDFNPKGKSDAEVMRFCQAFMTELSRHIGQFTDVPAGDINVGGREIGYLFGQYKRIRDEYSGVLTGKGLEFGGSLARTEATGYGVCYYTQEALRVLRNDSFEGKTVVISGSGNVATYAAQKAEQLGAKVVTVSDSNGYIYDPNGINVEVVKQIKEVERGRIKEYAERVPGSEYHEGSKGVWTVKGDIALPCATQNEVDGESAQKLVDNGVTVVVEGANMPSTPEAIEVYQKNGVLYGPAKAANAGGVAVSGLEMSQNSYRLSWTFEEVDAKLKSIMEEIVANSLAAAKEYGHEGDLMLGANAAGFVKVANAMVAQGVL

SEQ ID NO: 2949 - protein, 447 aa, Desulfovibrio desulfuricans G20
MSDIYSILVIDDEESILRLLERELTTQDRIVHTAQNGREGREKLSRQRYDVVISDIRLPDADGLDLMVELKGIYPDVEFILITGHGNIDNAVEAMRLGAYDYVTKPFHLDRVELVVERAYQRVCLQRENRSFRHSHSSAPPSKMVGNSAEIKQIRYLVGKVAPTDVPVLITGESGVGKDVVAHSIQALSTRSGKPFLVKNCATLQKELMRSELFGHTKGSFTGATDNREGLLAFADTGTLFLDEIGELPPEVQGALLRVLEAKRYRRVGEKSERQVDIRFLFATSRNLLEEVEAGRFNDALFHRINVFNICVAPLRDRKEDIPLLVEHFLGRLGNAMGHNELTVSDKAMQCLQHYDWPGNVRELRNVLERSIILSENGIISERSLPRDLVERAEQSGLESSIFSLEHMEREHITRALAFFNGNRQQASKALGIGRKTLYRKLERYNL

SEQ ID NO: 2950 - protein, 526 aa, Oryza sativa
MDLPPLSHQALFAAVRSADAAAVAGLLADAGASGPTTQALAAAQTDAGETALYVAAEAGSEEIVRLLIPLYDLEAATVRSRLDLDAFHVAAKQGHTGAVKEFLGRWPELCSICDSSNTSPLYSAAVKDHLDVVNAILDTDDSCIRIVRKNGKTSLHTAARIGYHRIVKALIERDPGIVPIRDRKGQTALHMAVKGKNTDVVEELLMADVSILDVRDKKANTALHIATRKWRPQMVQLLLSYEALEVNAINNQNETAMDLAEKVPYGESKMEIIEWLTEAGAKNARNVGKIDEASELRRTVSDIKHNVQAQLNENAKTNKRVTGIAKELRKLHREAVQNTINSVTMVATLIASIAFVAIFNLPGQYYVDRDSGGDIGEAHIANLTGFRVFCLLNATALFISLAVVVVQITLVAWETGAQKRVIKIVNKLMWSACLSTCAAFISLAYVVVGPQNAWMAFTISAIGGPIMIGTLLFLAYLLLRPRFKFGEDRQRRIKRASGSKSFSWSIHEGISDLEAFSDHEKRIYAL

SEQ ID NO: 2951 - protein, 346 aa, Mesorhizobium loti MAFF303099
MTKYKLEYIWLDGYTPVPNLRGKTQIKEFAEFPTLEQLPLWGFDGSSTMQAEGRSSDCVLKPVALYPDPARTNGILVMCEVMMPDGVTPHESNSRATILDDEDAWFGFEQEYFFYKDGRPLGFPESGYPAPQGPYYTGVGYKNVGDVARKIVEEHLDQCLAAGINHEGINAEVAKGQWEFQIFGKGSKKAADQIWMARYLLLRLTETYGIDIEFHCKPLGDTDWNGSGMHCNFSTKFMREVGGKAYFEALMAQFDKNLMDHIAVYGPDNDKRLTGKHETAPWNKFSYGVADRGASIRVPHSFVKNDYKGYLEDRRPNSQGDPYQIASQVLKTISQVATDAKVSAAA

SEQ ID NO: 2952 - protein, 801 aa, Daucus carota
MAQPLLSLRQRFESTFSSHRQEIFMFLSRIQSLGNGILKPHQLFSEFQAISKIDRLKLEDSALVQLLNSAQEAIVCSPWIALAIRLRPGVWEYVRLNVHQLVVEELTVPDYLYLKEELVNASSNGNFVLELDFAPFTASIPRPTLTKSIGNGVEFLNRHLSAKMFQDKDSMHPLLDFLRLHHHNGRTLMLNNRVQTVNGLQDILRIAGEYLSKLPSDTPYSDFEHKFQEIGFERGWGDTAEHVSEMFHMLLDLLEAPDACTLETFLGKIPMIFNVVILSPHGYFAQENVLGYPDTGGQVVYILDQVPAMEREMTKRIKEQGLDIIPRILIVTRLLPDAVGTTCNLRLEKVFGAEHSHILRVPFRTEKGILRKWISRFEVWPYMETFTEDVAKEIALELKAKPDLIIGNYSEGNLVASLLANKLGVTQCTIAHALEKTKYPDSDIYWEKFDKKYHFSSQFTADLIAMNHTDFIITSTFQEIAGSKDTVGQYESHTAFTMPGLYRVVHGIDVFDPKFNIVSPGADTSVYYPYTEKKRRLTALHPEIEDLLFSSVENKEHICVLKDRYKPILFTMARLDNVKNLTGIVEWYAKNPKLRELVNLVVVGGDRRKESKDLEEQAQMKKMYGLIDTYKLNGQFRWISAQKNRVRNGELYRCIADTKGAFVQPAFYEAFGLTVIEAMTCGLPTFATIHGGPAEIIVHGTSGFHIDPYHGEKAAELIVNFFERCKTEPSHWETISAGGLKRIQEKYTWQIYSERLLTLGGVYGFWKHVSKLDRIEIRRYLEMFCALKYRNLAESVPLAVD

SEQ ID NO: 2953 - protein, 1375 aa, Rubrobacter xylanophilus DSM 9941
MGSEGETPDAREKRLLEFSHDAVLARDEDGRISFWNRSAERLYGWSSSEALGRNARELLKTRSGEPLEEIEERVRSEGAWEGELRQHARDGRPLVVECRWVRAGAGNIVEFSRDTAERQKAEEYRSVLEAIEDGYFETDLAGNLTFANQALGRILGYPASRLLGKNSRQYMDRENARKVHEAFKEVYATGRAARGLVWEMIPRTGSPRCVEGSVSLIRDGSGRPCGFRGILRDITERLRMEERLRSSEAELRALFAAIDDIVLKLDREGRCLDIAPSNPSPLYRPGREMVGRNVREIFPVDEKEPLLDSVRRVLQTGRPAAMECSMQLGYRRLYFDVSISPEGEGAAVLVARDVTRERLAEQELRRAEERYRRLIEQIPGIVYTEDARTGETLYDSPRVEEILGYPADTYRKDPNYWQKIIHPEDRELLRALEERASREGKLSAEYRVFAADGRVVWVREEGALIPGEEGRPDVWQGIILDITERKRAEQALHESEQRFRRAFDDAPIGMALVGLDGRWLQANRALCEIVGYPRERLLQKTFQDITHPEDLDADLELLRRLVAREIPGYQMEKRYIHASGRIVWVLLSVSLVTGENDEPLYVIAQVQDITERKRIEEELREAKEQAEAASRAKSEFVANMSHEIRTPMNGVIGMAELLLDTPLTPEQREYARTIRSSGEALLAILNDILDFSKIEAGRLSLERIPFEIHKEVEEVVSLLAPRAHAKGLELICFIEPGVPPLIKGDPFRLRQVLTNLIGNAIKFTEEGEVVVSASLSKEEKKKSAPAGERGGEIELRFEVKDSGIGIQEEQQKHLFEAFSQADASTTRRYGGTGLGLAISRQLVEMMGGEIGLKSSPKEGSTFHFSARFVLPEEEEEKSPKTPPEEGEGGGARRTREEEERGRRESLAGLRVLVVDDNATNRTILCRQLEAWRMEPKSVGGAQEAIRELEASGTFLASSSSGYDLVILDMQMPETDGLELARRIKSRLQEEEEKRGGAFSALRLMLLTSMDPQTKEKIKASGTVEACLQKPVRQSQLYDAIATLFQKKKEEERPLPLPAHQKEEEKEGKERPLILLAEDNPVNQQVAASMLKKLGYRVELAQNGEEALKKLFPPPSSPPSSSGREEGGGSPKKKYAAVLMDIQMPKMDGLEATRRIRSKEEEGVLRLPRTPIIAMSAHAMQEDRERALKAGMDHYISKPVKKEQLKEALERFVAATEGQKERPSSCPPGKKHREPERGGEGAALDPDSLKELDELGEGVFEELCQLFLEDAPRKLAGIKEALRLEAKEGGEKATSSSSSFAPREEVGRLSHALKGSAASLGAKRLAGLCQRLGEEAGGTGSEEQLLRLVWEMERELERVRGEIAARGGGGGEERAR

SEQ ID NO: 2954 - protein, 142 aa, Elymus repens
  misc_feature (129)..(129): Xaa can be any naturally occurring amino acid
  unsure (1)..(142): unsure at all Xaa locations
DNIMRLTGITGIVNGMDVSEWDPTKDKFLAVNYDITTALEGKALNKEALQAEVGLPVDRKVPLVAFIGRLEEQKGPDVMIAAIPEIVKDEDVQIVLLGTGKKKFERLLKSVEEKFPGKVRAVVRFNAPXAHQMMAGADVLVV

SEQ ID NO: 2955 - protein, 142 aa, Elymus repens
IMRLTGITGIVNGMDVSEWDPTKDKFLAVNYDITTALEGKALNKEALQAEVGLPVDRKVPLVAFIGRLEEQKGPDVMIAAIPEIVKDEDVQIVLLGTGKKKFERLLKSVEEKFPGKVRAVVRFNAPLAHQMMAGADVLAVTS

SEQ ID NO: 2956 - protein, 134 aa, Elymus repens
TGITGIVNGMDVSEWDPTKDKFLAVNYDITTALEAKALNKEALQAEVGLPVDRKVPLVAFIGRLEEQKGPDVMIAAIPEIVKEEDVQIILLGTGKKKFERLLKSVEEKFPGKVRAVVRFNAPLAHQMMAGADLL

SEQ ID NO: 2957 - protein, 322 aa, Nostoc punctiforme PCC 73102
MSQSSQNSPLPRKPVQSYFHWLYAFWKFSRPHTIIGTSLSVLSLYLIAIAISNNTASLFTTPGSLSPLFGAWIACLCGNVYIVGLNQLEDVDIDKINKPHLPLASGEFSQQTGQLIVASTGILALVMAWLTGPFLFGMVTISLAIGTAYSLPPIRLKQFPFWAALCIFSVRGTIVNLGLYLHYSWALKQSQTIPPVVWVLTLFILVFTFAIAIFKDIPDIEGDRLYNITTFTIKLGSQAVFNLALWVITVCYLGIILVGVLRIASVNPIFLITAHLALLVWMWWRSLAVDLQDKSAIAQFYQFIWKLFFIEYLIFPIACFLA

SEQ ID NO: 2958 - protein, 490 aa, Beta vulgaris
MSSDSEAGLGGGGGDLRKPFLHTGSWYRMGSRQSSLMGSSQVIRESSISVLACVLIVALGPIQFGFTAGYSSPTQSAITNELGLSVAEYSWFGSLSNVGAMVGAIASGQISEYIGRKGSLMIAAIPNIIGWLAISFAKDSSFLYMGRMLEGFGVGIISYTVPVYISEIAPQNLRGALGSVNQLSVTIGIMLSYMLGLFVPWRILAVLGILPCTILIPGLFFIPESPRWLAKMGMMEEFEVSLQVLRGFDTDISLEVNEIKRSVASSSKRTTIRFAELRQRRYWLPLMIGNGLLILQQLSGINGVLFYSSTIFKEAGVTSSNAATFGLGAVQVIATVVTTWLVDKSGRRLLLIVSSSGMTLSLLVVAMSFFLKEMVSDESTWYSVFSILSVVGVVAMVVTFSLGIGAIPWIIMSEILPINIKGLAGSIATLANWFVAWIVTMTANIMLSWNSGGTFSIYMVVCAFTVAFVVIWVPETKGRTLEEIQWSFRR

SEQ ID NO: 2959 - protein, 118 aa, Triticum aestivum
MASETVVLKVAMSCGGCSGAVKRVLTKMEGVESFDIDMEQQKVTVKGNVKPEDVFQTVSKTGKKTAFWEAEATPAPDATPAAPAAEAAPAADAAPAPEAAPAADAAPAPEATPANTVA

SEQ ID NO: 2960 - protein, 146 aa, Elymus repens
NNIMRLTGITGIVNGMDVSEWDPTKDKFLAVNYDVTTALEGKALNKEALQAEVGLPVDRKVPLVAFIGRLEEQKGPDVMIAAIPDIVKDEDVQIVLLGTGKKKFERLLKSVEEKFPGKVRAVVRFNAPLAHQMMAGADVLAVTSRF

SEQ ID NO: 2961 - protein, 631 aa, Clostridium butyricum
MKKYRVNVQGMTCSGCEQHVAVALENMGAKAIEVDFRRGEAVFELPDDVKVEDAKNAIADANYHPGEAEEFQSEQKTNLLKKYRLNVEGMTCTGCEEHIAVALENAGAKGIEVDFRRGEALFELPYDVDIDIAKTAITDAQYQPGEAEEIQVQSEKRTDVSLNDEGNYDYDYIIIGSGGAAFSSAIEAVALNAKVAMIERGTVGGTCVNVGCVPSKTLLRAGEINHLAKNNPFVGLHTSASNVDLAPLVKQKNDLVTEMRNEKYVNLIDDYGFELIKGEAKFVNENTVEVNGNQITAKRFLIATGASSTAPNIPGLDEVDYLTSTSLLELKKVPNRLTVIGSGYIGMELGQLFHNLGSEVTLIQRSERLLKEYDPEISEAITKALTEQGINLVTGATYERVEQDGDIKKVHVEINGKKRIIEAEQLLIATGRKPNTESLNLHAAGVEVGSRGEIVIDDYLKTTNSRIYSAGDVTPGPQFVYVAAYEGGLAARNAIGGLNQKVNLEVVPGVTFTSPSIATVGLTEQQAKEKGYEVKTSVLPLDAVPRALVNRETTGVFKLVADAKTLKVLGAHVVAENAGDVIYAATLAVKFGLTVGDLRETMAPYLTMAEGLKLAVLTFDKDVSKLSCCAG

SEQ ID NO: 2962 - protein, 370 aa, Streptococcus pneumoniae TIGR4
MNDKLKIFLLLGVFFLAITGFYVLLIRNAGQTDASQIEKAAVSQGGKAVKKTEISKDADLHEIYLAGGCFWGVEEYFSRVPGVTDAVSGYANGRGETTKYELINQTGHAETVHVTYDAKQISLKEILLHYFRIINPTSKNKQGNDVGTQYRTGVYYTDDKDLEVINQVFDEVAKKYDQPLAVEKENLKNFVVAEDYHQDYLKKNPNGYCHINVNQAAYPVIDASKYPKPSDEELKKTLSPEEYAVTQENQTERAFSNRYWDKFESGIYVDIATGEPLFSSKDKFESGCGWPSFTQPISPDVVTYKEDKSYNMTRMEVRSRVGDSHLGHVFTDGPQDKGGLRYCINSLSIRFIPKDQMEEKGYAYLLDYVD

SEQ ID NO: 2963 - protein, 451 aa, Nostoc punctiforme PCC 73102
MTLETETLQATSSTSTFETPENQQEFNWRQSWYPVCFLQDLPTNRPYTFSLYEEPFVLFKDQNGQLICLTDRCSHRAARLSDGQIIDGKIECSYHGWQFGNNGQCLHIPQLASDAKIPVNACVPSFKVLERQGIIWMWAGEAETAIDELIPSLPDWNKPECFNLDYVRDLPYDQSYFIENIIDPAHVPISHDGIIGSREDAQALDIEVIESNIQGIKGRWQRTRTPNLPWISLDFIAPNLILYKFANVQQGKFWGTALYSIPLGKNRCRILIRNYSNSFPQKTKLMPPWLDHILIRNKILEGDLQLVVEQKAQIERLKKNLKEVYLPLKTSDTLVVEYRKWLDKFGSSLPFYQGYSTSKNVGNSESDEKLITLDRFSQHTIICHSCNQAYQVTNKVRQSCIGVAIALAAIGILADDSRIRIAAISVSITAIVISAMAQTLKTHFERSYTRH

SEQ ID NO: 2964 - protein, 98 aa, Bartonella bacilliformis
MANTKFRPLHDRVVVRRVESENKTAGGIIIPDTAQEKPQEGEVIAVGNGVLNDNGQRVSLEVKEGDRILFGKWSGTEVKINGEELLIMKESDIMGILA

SEQ ID NO: 2965 - protein, 544 aa, Bartonella bacilliformis
MAAKEVKFGRDARERLLRGVDILADAVKVTLGPKGRNVVIDKSFGAPRITKDGVSVAKEIELENKFENMGAQMLREVASKTNDIAGDGTTTATVLGQAIVQEGVKAVAASMNPMDLKRGIDAAVEAVVADLFKKAKKIQTSEEIAQVATISANGAEDIGKMIADAMEKVGNEGVITVEEAKTAETELEVVEGMQFDRGYLSPYFVTNSEKMMVDLDDPYILIHEKKLSNLQSLLPVLEAVVQSGKPLLIIAEDVEGEALATLVVNKLRGGLKIAAVKAPGFGDRRKAMLEDIAVLTSGQVISEDVGIKLENVTLEMLGRAKKVHVSKETTTIVDGAGQKSEINARVSQIKAQIEETTSDYDREKLQERLAKLAGGVAVIRVGGSTEVEVKEKKDRVDDALNATRAAVEEGIVPGGGTALLRAAKALSIKGKNPDQEAGIGIIRRALQAPARQIAHNAGEEAAVIVGKVLENCSDTFGYNTATAQFGDLISFGIVDPVKVVRSALQNAASIASLLITTEAMVAEVPKKEAAAPAMPGGGMGGMDF

SEQ ID NO: 2966 - protein, 1263 aa, GIBBERELLA ZEAE PH-1
MDAAIEKRKTSVDDSIATKQNEVEKQAQLSDLWRAFQFADRLDWVLNVISLICSIASGAAMPVMAILFGKATGRLADFGGGSVDPDEFKSEVNSFVLWFTYLFVGKFVLAYVATTAITISGVRTTRVLRQRVLEKLLRTEIWYFDTANVGSPATQLTTNVTRINQGIAEKLSLLVQGLAMFASAFVVAIAVQWKLALITLTVVPLFFLIMGVFMSLDAPIEAKVTGIHSQANVFAQEVMASIRTVHAFWAHGRMSERYDNYLKEAHTHGKKKSLLYGIMSSSTYFCMYSGNALAFWQGFRMYRSGEIDSVGTVFTVVLSVLLASSSIGLLYPQIPALVNGAAAASELFQIFDKPSLLDPLSNEGQVPEACNGNIQVENISFSYPSRPNTQVLKDISLDIPAGKTTAFVGASGSGKSTIIGLLERWYLPSSGRLLLDGVDISTLNVKWFRSQMALVQQEPVLFRGTVFENVSKGFTDSQKALPLKEQRTLVQEACEASYAHDFIQNLEHGYDTYLGERGGTLSGGQKQRIAIARSVVSNPKILLLDEATSALDPNAERIVQKALSRVSQQRTTLVIAHRLSTIRDADSIVVLSNGQVVEQGTHDDLLALDSHYARLIRAQNLSVVGREIKAGISADENPDAFDTEDEVRRVITAQTHKYRDVEGQESKPKDRSILSSIFLVVKEQKALRLYIITSALCCTIAAATWPGQALLFSRIITAFSADTSASDVNFYALMFFVIALGNLVCYGIIGYIANHVSQTISYQYRLELFTRMVGLDIEFFDRPENSSGALASTLSSIPTHLQELLGLNIFVIVVMFVNITASSILAIAYGWKLALVMVFAALPLLMGSGYFKVRLESKLHAGNEARFRESASLASEAVSSLRTVASLTAETDFITQYSDTLSSIVMKTIKSLSVSMIAYAFSQSIEFLVMALGFWYGSRLMASGEYTSEQFFLIFMGVLFAGQAASQLFANLTSLTMAKGAANYLFNLREEKAVIRETNDNKDKCPDFDQPIGVTDVHFQYKSRSTKVLQGLSMDISPSQFVAVVGPSGCGKSTLISLLERYYDATTGKICVGEQDIKDMSPRQFRSQMSIVQQEPILYEGSVRENILMGLEGDATDKTDERLNEAARQADILEFASSLPEGFDTPCGPRGTAFSGGQRQRIAIARALIRKPKLLLLDEATSALDTHSEKLVQEALEQTRKESGCSVIAVAHRLSTIRDADIIFVLVGGKVAEVGTHEDLQARRGVYADMCQAQSLDRETNDS

SEQ ID NO: 2967 - protein, 163 aa, Zea mays
MSLIRRGSAFDPFSLDLWDPFQGLFPFGSGSSSSSSLFPSFGGTTTSSETAAFAGARVDWKETPEAHVFKTDVPGLKKEEVKVELEDGNVLQISGERCKEQEEKTDTWHRVERSSGKFLRRFRLTENARTEQISASMENGVLTVTVPKEEAKKADVKSIQISG

SEQ ID NO: 2968 - protein, 485 aa, Oryza sativa
MMVSSQTSSLTRTIAQDPELFTAKIILPMGPPDVISENDEFDFSDVFGTTPVQTPTGISVAGPDSPAPLAESNEGVYNDPIVIIKRSHSLVGPTSLVSQSLRLSNLTLNKTEGSSEPAEEKERNLGQLSDEEFDNATTENEGIGLDDFEILKLVGQGAFGKVFQVRKKGTSEIYAMKVMRKDKILEKNHAEYMKAERDILTKVDHPFVVQLRYSFQTKYRLYLVLDFINGGHLFFQLYKQGLFREELARIYTAEIVSAVAHLHDNGIMHRDLKPENILLDADGHAMLTDFGLAKEFNENTRSNSMCGTVEYMAPEIILGRGHDKAADWWSVGILLFEMLTGKPPFVGNRDKVQQKIVKEKLKLPSFLSSEAHSLLKGLLHKEGGKRLGSGPGGSDEIKRHKWLKPINWRKLEARQIQPSFRPNVSGLTCIANFDECWTSMPVLDSPVATPVAGGAGHSSFAGFTYVRPAPFLQDVKPPSSSRLKD

SEQ ID NO: 2969 - protein, 152 aa, Picea glauca
MAMDPSLITVQHLLGVPDDLEKLLNAPTHSYMRDTKAMASTPVDVKEYPNSYVFIIDMPGLKSNDIKVQVEDENVLNISGERKRNEKDEEGEVKYIRMERRVGKFMRKFTLPADCNLEAISAACQDGVLTVTVPKLPPPEPKKPKTIEVKIG

SEQ ID NO: 2970 - protein, 145 aa, Desulfotalea psychrophila LSv54
MIEFIKEIVLGLWSLIVGMRITAREFFTPKITVQYPHETEVMPARFRGHIELIGDEEGNTRCVACGMCVRACPSGCIKVSGEKLEGSKKKIATVYELDFTKCSLCGSCIESCNFGAIQFSRVYNHVSTKKEDFYYNLIKDLEEKK

SEQ ID NO: 2971 - protein, 241 aa, Methanopyrus kandleri AV19
MRSVGSPPMIKAVLFDVDDTLYPSSKLAEEARRNAIRAMIEAGLETDLSEEELYRELQEVVKEYGSNHPRHFDLLLRRIGADPEPKLVAAAVVAYHDTKFAYLKPYPDVIPTLMQLREMGFKLGAVTSGLAVKQWEKLIRLGIHHFFHEVVISEEIGVEKPNPKIFIEAARRLGVKPEEAVYVGDRLDKDIRGANRAGMVTVRIRRGKYQDMEPRNDDDVPDFEIDRPRELLDVVRELAKD

SEQ ID NO: 2972 - protein, 196 aa, Mitthyridium sp. Efate and Streimann 63086
GGAKKVVISAPSKDAPMFVMGVNEDKYTNEDVVSNASCTTNCLAPLAKVINDKFGILEGLMTTVHATTATQKTVDGPSNKDWRGGRSASTNIIPSATGAAKAVGKVLPELNGKLTGMAFRVPTTDVSVVDLTVRLEKPASYNAIKAALKEASQGKMKGILGYTEDEVVSSDFITDSRSSIFDAKAGIALSDTFVKL

SEQ ID NO: 2973 - protein, 174 aa, Triticum aestivum
MAPAVMASSATTVAPFQGLKSTAGLPVSRRSSASLGSVSNGGRIRCMQVWPIEGIKKFETLSYLPPLSTEALLKQVDYLIRSKWVPCLEFSKVGFVFREHNSSPGYYDGRYWTMWKLPMFGCTDATQVLNEVEEVKKEYPDAYVRVIGFDNLRQVQCVSFIAFRPPGCEESGKA

SEQ ID NO: 2974 - protein, 414 aa, Frankia sp. CcI3
MCREEPGRQMKVDETAAVAGWVAAHESELIALRRDLHAHPELGRQEHRTAEQVEARLRAAGLSPQRLPDLPGLWCDIGAGVDHDPGAPVIMLRADMDALPLSDIKDVPYRSTVPGVAHACGHDVHTTVALGAGLALAEVARVSTLPGTVRLVFQPAEELMPGGALDIIDAGVLKPVTTAIALHCDPALDLGMIGLRTGPITSAADAVEITLAGPGGHTSRPQNTVDLVYALVRLAADLPAALGRLVDPRSALSLVWGQVQAGTVANAIPRTGQLRGTVRTLSRETWESVPALVTQVAEQLVAPYGAQIVVDYRRGVPPVVNSVDVVEVLRTVVDRVFGHGASTMVAQSLGGEDFGWYLNHVPGALARLGTRTPGGHTYDLHQGSFDVDERAIGVGVKLLAGAALDLLTHTPPAP

SEQ ID NO: 2975 - protein, 551 aa, Magnetococcus sp. MC-1
MAAKEVKFGEAARAKMLNGVNILANAVKVTLGPKGRNVVLDKSWGAPRMTKDGVSVAKEIELEDKFENMGAQMVREVSSKTADVAGDGTTTATVLAQAIIREGMKAVAAGMNPMDLKRGIDLAVEAVVVGLKGISREVANSQEIAQVGAISANSDKVVGDMIAEAMDKVGKEGVITVEEAKGLETTLDVVEGMQFDRGYLSPYFVTNADKMLVQMENPLILLVEKKISNLQQILQILEGAVQSSRPLMIIAEDVEGEALATLVVNKLRGGLKVCAVKAPGFGDRRKAMMEDIATLTGGVLVSEDVGVKLENVTMDMLGMAKSIVVTKEDTTIIDGAGDHEAIKARVNQIRAQIEETSSDYDREKLQERLAKLAGGVAVIKVGGATEVEVKERKDRVDDALHATRAAVEEGIVPGGGVALLRAREASLTNLQGANHDQQVGINIVTRALEEPLRIIASNAGAEGSVVVNRVVETKETNFGFNAATGVYEDLVASGVIDPAKVVRHALQAAASVAGLMITTEAMVAELPKDEPAMPGGDMGGMGGMGGMGGMM

SEQ ID NO: 2976 - protein, 584 aa, Nostoc punctiforme PCC 73102
MLFDAFKNRKSPKIEFIKTDPTWRVAWGTVDESYENIAWRDEKFYVVLPRTASGFLTEKLAISSGGRFVVVGDVWLTNQVQLLQKLGIEPDSFQGSYLQVVANLWERWGFECLHQLVGMFALVVWDRERQVLKLVRDRIGVRTLYYTTTGSVRWIAPQLRTLSPHRSSELDLVALRDYLCCAFVPGERTLWEQVRELRPGTVLEFPDQKIEAYWQLQEQIVAIDQPLAWHGDRLRELLDQVVQEYLPPANEPVGVFLSGGLDSSCITALAAKFHKAPVHTFSIHFGSECPNELEFSSLVASHCQTQHHILEITFKDMWSRLPETMAYLDDPIGDPLTVPNLLLGRLARENVEVVLNGEGGDPCFGGPKNQPMLINSLYGSVTNQDALQAYLISFQKCAVDLPQLLKPEVWTAVQTAPWVFEEDLYSQASYLNRLMAMNIKFKGADQILTKVSNLTQAALLHGRSPLFDQRVVDLSMEIPPEYKLSGVEEKAVLKQVIADILPEEIIHRPKSGMMVPVQLGFRKYWQQEARDLLLNRNAAITPYLNQLPIRNWLNYQGDTWSRYGVKLWLLASLEIWLQVNQKVR

SEQ ID NO: 2977 - protein, 367 aa, Salmonella enterica subsp. enterica serovar Paratyphi A str.
MTSRNYLLLTPGPLTTSRTVKEAMLFDSCTWDDDYNIGVVEQIRQQLTALATASEGYTSVLLQGSGSYAVEAVLGSALGPQDKVLIVSNGAYGARMVEMAGLMGIAHHAYDCGEVARPDVQAIDAILNVDPTISHIAMVHSETTTGMLNPIDEVGALAHRYGKTYIVDAMSSFGGIPMDIAALHIDYLISSANKCIQGVPGFAFVIAREQKLAACKGRSRSLSLDLYAQWRCMEDNHGKWRFTSPTHTVLAFAQALKELAKEGGVAARHQRYQQNQRSLVAGMRALGFNTLLDDELHSPIITAFYSPEDPQYRFSEFYRRLKEQGFVIYPGKVSQSDCFRIGNIGEVYAADITALLTAIRTAMYWTK

SEQ ID NO: 2978 - protein, 457 aa, Mesorhizobium sp. BNC1
MLYHRAKNSWEQRDQENVFHGFTDLETLNQNGPVVLTHGEGIHVFDVHGKSYMDANSGLWNNVAGFNHKGLIEAICDQARRFPGYHAFFGRIADTTVALSEKLIEISPFPSGRVYYTNSGSEANDTVVKMLWLLHRRNGQPQRRKIITRVNAYHGVTVATASMTGKTYNAEFGLPLPGFLHADCPHHWRYGEPGESEAAFSQRLARKLEELIIKEGPDTIAGMFAEPVQGAGGVIPPSRGYFEAIRPILRKYGIPLIADEVITGFGRTGEMWGGDKYNVEPDAIVASKCITAGYFPMGAIILGPELADALTRACEAAEEFPHGFTSGGNPLGSAIALKALEVIETEGLLDNVRRVSPRFLAGLDRLARHDHAGEARGVGLMGAVELVADKNSKAPLDGALRIPERIANKALEKGLICRPLGQAIVLGPPFIITEGQIGEIFDILEDTMAEVFADVGL

SEQ ID NO: 2979 - protein, 546 aa, Geobacillus kaustophilus HTA426
MKTYRMTVQGMTCTGCEQHVARALEAIGAKLMDVSFRRGEVVFALPEGTDVDMARQAVKNAHYEPGEAEEITASARSVIDGEGEYDYMIIGSGGAAFSSAIEAVKYGAKVAMVERGTVGGTCVNIGCVPSKTLLRAGEIYALARNHPFLGLHTSAGPVDLAPLVKQKNELVEQLRQAKYADLIGEYGFDFIQGEARFIDRQTIEVNGQTLSAKRFLIATGASPAVPDIPGLHDVDYLTSTTLLELKKVPKRLAVIGAGYIGMELGQLFHHLGSEVTLMQRSSRLLKEYDPEISEAVARALTEQGIRVITGASFERVEQDGNTKKVYVNVDGRTRVIEADELLVAAGRTPNTAALNLPAAGVEVGARGEILIDEYTRTTNPSIYAAGDVTLGPQFVYVAAYQGAVAAANAIGGLNKRWDTAVVPAVTFTHPAIATVGLTEQRAKENGYDVKTSVLPLEAVPRAIVNRETTGVFKLVAEARTGKLLGAHIVADNAGEVIYAAALAIQFGLTIDDLRHTLVPYLTMAEGLKLAALTFDQDVSKLSCCAG

SEQ ID NO: 2980 - protein, 311 aa, Burkholderia sp. 383
MTKTFPRLIVFGEALTDFIRDDAQHWHSVAGGSCWNVARVGARLGVPTAFAGTVSRDTFGDELMRKSADAGLDLRFIRQVDRAPLLAMVVSKQPPHYFFIGENSADLAFDPADLPAGALDAAEIVHVGSLGVVREPLASRLIEVAHAARAAGKRISFDPNFRAPMAAPSYRDTLRKLAGLADWIKVSDEDLRGLFPELDEAAALAQLRTWAPDATMLVTRGASGMQLLHRDTVLFQPAFPTAVADTVGCGDASIGGWLASQLARPDASDAEHLRYAAACAAVACAHAGAYAPTAAEVTDMIDRSADAAVSQ

SEQ ID NO: 2981 - protein, 324 aa, Chromobacterium violaceum ATCC 12472
MSQAIVFAETGGPEVLRLQSAEVGQPGPGQARVRHTAIGVNFIDTYQRSGLYPTPLPSGLGSEAAGVVEAVGEGVAGLRPGDRVAYAGGPLGAYSTERLIAAEHLVKLPDGIADETAACAMLQGMTVEYLVQRTFPVQPGQTVLWHAAAGGVGQIALQWLSAMGVQVIATVGSQAKAEIARSLGAAHVILYREEDVAARVREITGGRGVPVVFDSVGKDTFESSLDSLAPRGMMITFGNASGPVPALSPLELTKRGSLFLTRPKLGDYIASRTDLEASSAALFSRLRDGTIKLSPSHRYPLAEAAQAHRDLEARRTTGSIILQP

SEQ ID NO: 2982 - protein, 612 aa, Nostoc punctiforme PCC 73102
MDNIPHHFLGYWGYGAQHELEALLNSVLENLSPNLSPKRGEALNFPPSLQGKGVRGLGQKNNFSLQENYPFPIWNVVYIGLDGNCPPLKNQIAAISASGLLTSPDAWVSVQENNCLILGREPFGKMPLYWTQQEQVIWFASQLQLLLPILQQSEVSISGLYGYSCFSYVPTPLTPVKEVFAVTAGTELVWQSDCQSGKLQTPKSKHIDSWREAPEQLTNEATAITELQTLLKDSIERQIADLKDEPVGVFLSGGLDSSVVAALLVQAGVKVRAYTLDFGDVGIPEYPYSEQVAQFLKIPLIKVAVTPSSIKNALIPTVQALDLPFGDGVCVPLYLLSERASQETQVIFNGEGGDQLFAGWTNKPLIAAGVYQAENPAGQETFIQQYLRTFHRLGGYESQVYQPEVYAQIQNLHPEDWLLAALNRNECPSLLHRLRRASLMLKGAQNIHPRAAALGFAHGLWVRSPFCDLPLAEWTFRLSGELCLQGACEKYILKRAVENWLPPEIVWRQKRGMGVPLTSWCLNDFWHQLGIWLNPETLRTNNHFYPHIAAQIVEGKLGAAIQGRRIGETLWLLIMWQLWRSHVLNEELSKQSLDHPFWLHRWLWRNYKRWQG

SEQ ID NO: 2983 - protein, 404 aa, Haemophilus influenzae 86-028NP
MRLFPKSDKLEHVCYDIRGPVHKEALRLEEEGNKILKLNIGNPAPFGFEAPDEILVDVLRNLPSAQGYCDSKGLYSARKAIVQYYQSKGILGATVNDVYIGNGVSELITMAMQALLNDGDEVLVPMPDYPLWTAAVTLSGGKAVHYLCDEEANWFPAIDDIKAKVNAKTKAIVIINPNNPTGAVYSKELLQEIVEIARQNNLIIFADEIYDKILYDGAVHHHIAALAPDLLTVTLNGLSKAYRVAGFRQGWMILNGPKHNAKGYIEGLDMLASMRLCANVPMQHAIQTALGGYQSINEFILPGGRLLEQRNKAYDLITQIPGITCVKPMGAMYMFPKIDVKKFNIRSDEKMVLDLLRQEKVLLVHGKGFNWHSPDHFRVVTLPYVNQLEEAITKLARFLSDYRQ

SEQ ID NO: 2984 - protein, 151 aa, Picea glauca
MAMDPLLNTVQQLLVVPDDLERILHAPTRSYMRDTEATASTPVDVKEYPNSYVFIVDMPGLKSNDIKVQVEDENILNISGERKRNEKEEGEVKYIRMERRVGKFMRKFSLPADCNLEAISAACQDGVLTVTVPKLPPPEPKKPKTIAVQIG

SEQ ID NO: 2985 - protein, 501 aa, Suaeda liaotungensis
MSIPIPSRQLFIDGEWREPIKRNRLPIINPSTEETIGEIPAATAEDVEAAVSAARRALKRNKGRDWAATSGAHRARYLRAIAAKVSEKKDHFVKLETMDSGKPLDEAVLDIDDVSTCFEYFADQAEALDNKQKYPVKLPMDRFKSHVLRQPIGVVGLISPWNYPLLMATWKIAPALAAGCTAVLKPSELASVTCLEFGEVCNEVGLPPGVLNILTGLGPDAGAPLVSHPDVDKVAFTGSSATGSKVMGSAAQLVKPVTLELGGKSPIIVFEDVVDLDVAAEWTIFGVFWTNGQICSATSRLLVHESIAAEFVEKLVKWSKKIKISDPFEEGCRLGPVISKGQYDKIMKYISTAKSEGATILCGGSRPEHLKKGYFIEPTIVTDITTSMQIWKEEVFGPVLCVKTFSTEEEALELANDTEYGLAAAVFSKDLERCERVTKALEVGAVWVNCSQPCFCHAPWGGVKRSGFGRELGEWGIENYLNIKQVTSDISDEPWGWYKSP

SEQ ID NO: 2986 - protein, 816 aa, Oncidium cv. 'Goldiana'
  misc_feature (371)..(371): Xaa can be any naturally occurring amino acid
  misc_feature (375)..(375): Xaa can be any naturally occurring amino acid
  unsure (1)..(816): unsure at all Xaa locations
MADNRFLSRVHSARERLGDTLSAHKNELLALFSRFVKQGKVMLLPHQILAEYESVIPEADRQKLKDGVFEDVLKAAQEAIVVPPWVALAIRPRPGVWEYVRVNVSELAVEELSVPGYLQFKEELVDGRSQSNFTLELDFEPFNASFPRPLLSKSIGNGVQFLNRHLSSKLFHDKESMYPLLNFLRHHHYNGMSMMLNDRIQSLSALQASLRKAEAHLLGIPQDTPYSEFNHRFQELGLEKGWGDTAGRVHEAIHLLLDLLEAPDPSTLENFLGRVPMMFNVVILSPHGYFAQANVLGYPDTGGQVVYILDQVRALENEMLLRIKKQGLDITPRILIVTRLLPDAVGTTCGQHLEKVIGTEHTHILRVPFRXEKGXIRKWISRFEVWPYLETYADDVANELARELQATPDLIVGNYSDGNLVASLLAHKLGVTQCTIAHALEKTKYPNSDIYWKKFEDQYHFSCQFTADLIAMNHADFIITSTFQEIAGSKDTVGQYESHTAFTLPGLYRVVHGIDVFDPKFNIVSPGADMSIYFSYAEESQRLTALHPEIEELLFSEVENSEHKCVLKDKNKPIIFSMARLDRVKNITGLVELYGKNPRLRELVNLVVVAGDHAKASKDLEEQEEMKKMYRFIEEYKLDGHIRWISAQMNRVRNGELYRYIADKRGVFVQPAFYEAFGLTVVESMTCGLPTFATVHGGPGEIIVDGVSGFHIDPYQGDKAAELLVNFFEKCNEDPGYWEKISSGAIKRIEEKYTWKLYSERLMTLSGVYGFWKYVSNLDRRETKRYLEMFYALKYRNLAQSVPLHSDEEVVVNGAK

SEQ ID NO: 2987 - protein, 749 aa, Ajellomyces capsulatus
MTSKVEEGLQRVKELVENMQPGEQKVADLARDTTDVNGCLPFTTDHGVKVSNTDFWLRLASENQTGPLLLEDQIAREKIHRFDHERIPERVVHARGTGAFGHFKLFESAADVTSAGVLTDTSRTTPVFVRFSTVQGSKGSFDTVRDVRGFATKFYTEEGNWDLVGNNIPVFFIQDAVKFPDFVHAVKPEPHNEVPQGQTAHNNFWDFVYMHPEATHMFMWAMSDRAIPRSYRMMQGFGVNTFVLVNKQGKRHFVKFHWMPELGVHSLVPDESFKLGGQDPDFHRKDLMEAIDNKVYPKWKFGIQVLPEEKEHDFDFDILDPTKIWPESLIPVRYIGEMELNRNVDEFFPQTEQVAFCTAHIVPGIEFSGDPLLQGRNFSYFDTQITRLGVNWEELPINRPVCPVMNHNRDGAMRHKITQGTVNYWPNRFEACPPTKPEDGGFVTYPQKVEQSIKARMLSSKFREHINQAQLFYNSLSEYEKLHVNNAFCFELDHCDDPIVYNRLVSRISEIDHALAQAVAVKVGAPTPPRPGRDNPGQTTINLSQKYINDRQLSSPTIKGRRIAILIGDGYDSVAFGTVIAAVSAMGALPFIIGTKRQPIFADDEDRNHSKGVTPNHNYTSQRSTCFDATFIPGGSHIKELSQLGLIQHWVAEQFGHCKAIGATGEAINLIVQALSNLPDLEVASASSGHPVDWYGVVTSSKLHEPHSLTEGIKLFPEASDFLGKLFYQISQHRNYEREMAGLTDKVPF

SEQ ID NO: 2988 - protein, 816 aa, x Mokara cv. 'Yellow'
MADHRTLTRIHSIRERLADTLSSHPNELLALFSRFVKQGKGMLLPHQILAEYESVIPEADREKLKGGVFEDVVKAAQEAIVIPPWVALAIRPRPGVWEYVRINVSELAVEELSVPRYLQFKEDLVNGRSESNFVLELDFEPFNASFPRPSLSKSIGNGVQFLNRHLSSKLFQDKESMYPLLNFLKTHNYNGMSIMLNDRIQSLSALRSALRKAEQYLMSVPQDTPYSEFNHRFQELGLEKGWGDTAGRVQETIHLLLDLLEAPDPNTLENFLGAVPMVFNVVILSPHGYFAQDNVLGYPDTGGQVVYILDQVRALENEMLLRIKKQGLDITPHILIVTRLLPDAVGTTCGQRLEKVIGTEHTNILRVPFRTEKGILRKWISRFEVWPYLETYADDVAKELVMELQATPDLIIGNYSDGNLVASLLAQKLGITQCTIAHALEKTKYPNSDIYWKKSDEQYHFSCQFTADLIAMNHADFIITSTFQEIAGSKDTVGQYESHTAFTMPGLYRVVHGIDVFDPKFNIVSPGADMSIYFSYSEKNKRLTALHPELEELLFSDVENSEHKCVLNDKSKPIIFSMARLDRVKNITGLVEFYGKNPRLRELVNLVVVAGDHAKASKDLEEQAEMNKMYSLIEQYKLDGHIRWISAQMNRVRNGELYRYIADKKGVFVQPAFYEAFGLTVVESMTCGLPTFATVNGGPAEIIVHGVSGFHIDPYQGDKAAELLVNFFEKCEEDPTYWEKISKGAMKRIEEKYTWKLYSERLMTLAGVYGFWKYVSNLDRRETKRYLEMFYALKYRKLAESVPLHHDEEVVPNSTG

SEQ ID NO: 2989 - protein, 728 aa, Ajellomyces capsulatus
MRSLKLILASASVVSATCPYMSGEMPNSQNGPLDRRHDTLSDPTDQFLSKFYIDDEQSVLTTDVGGPIEDQHSLKAGNRGPTLLEDFIFRQKIQHFDHERVPERAVHARGAGAHGVFTSYNNWSNITAASFLNAAGKQTPVFVRFSTVAGSRGSVDSARDIHGFATRLYTDEGNFDIVGNNVPVFFIQDAIQFPDLIHAVKPQPDSEIPQAATAHDTAWDFFSQQPSSLHALFWAMSGHGIPRSMRHVDGWGVHTFRLVTDEGNSTLVKFRWKTLQGRAGLVWEEAQALGGKNPDFHRQDLWDAIESGRYPEWELGFQLVNEADQSKFDFDLLDPTKIIPEELVPFTPIGKMVLNRNPKNYFAETEQIMFQPGHVVRGIDFTDDPLLQGRLYSYLDTQLNRHGGPNFEQLPINRPRIPFHNNNRDGAGQMFIPLNTAAYTPNSMSNGFPQQANRTHNRGFFTAPGRMVNGPLVRELSPSFNDVWSQPRLFYNSLTVFEKQFLVNAMRFENSHVRSETVRKNVIIQLNRVDNDLARRVALAIGVEPPSPDPTFYHNKTTVPIGTFGTNLLRLDGLKIALLTRDDGSFTIAEQLRAAFNSANNKVDIVLVGSSLDPQRGVNMTYSGADGSIFDAVIVVGGLLTSASTQYPRGRPLRIITDAYAYGKPVGAVGDGSNEALRDVLMAAGGDASNGLDQPGVYISNDVSEAYVRSVLDGLTAYRFLNRFPLDR

SEQ ID NO: 2990 - protein, 517 aa, Oncidium cv. 'Goldiana'
MELCMKSQIALSAAVLQPHAGSGRFSDGETMGQRLDFSSFRRANEQICRRRRASLLRMSFATTELVAEGKLRDLELEGRDPRTVVAVILGGGAGTRLFPLTRQRAKPAVPIGGAYRLIDVPMSNCINSGINKVYILTQFNSASLNRHLLRAYNFSNGIGFGDGFVEVLAATQTPGEAGKKWFQGTADAVRQFHWLFEDAKGKEIEDVLILSGDHLYRMDYMDFVQSHRQSGADITISCVPMDVSRASDFGLMKIDNNGRVLSFSEKPKGQELKAMEVDTSVLGLSREQAKKTPFIASMGVYVFKKEILLNLLRWRFPTANDFGSEIIPASAKELFVKAYLFNDYWEDIGTIKSFCEANLSLTRHPPNFSFYDATKPIYTSRRNLPPTAINNSKIVDSIISHGSLLSNCLIEHSVVGIRSRINDNVHLKDTVMLGADLYETDAEIAALLAEGRVPVGIGENTKIKDCIIDKNARIGKNATISNVDGVQEADRSAEGFYTRSGITVILKNSTIPDGFAI

SEQ ID NO: 2991 - protein, 196 aa, Mitthyridium sp. Wall 510
GGAKKVVISAPSKDAPMFVMGVNEDKYTNEDVVSNASCTTNCLAPLAKVINDKFGILEGLMTTVHATTATQKTVDGPSNKDWRGGRSASTNIIPSATGAAKAVGKVLPELNGKLTGMAFRVPTTDVSVVDLTVRLEKPASYDAIKAALKEASQGKMKGILGYTEDEVVSSDFITDSRSSIFDAKAGIALSDTFVKL

SEQ ID NO: 2992 - protein, 362 aa, Arabidopsis thaliana
MVVLQVGLAGMDILSKAVLNKGMSNYVLVVYRHAVATIVMAPFAFYFDKKVRPKMTLMIFFKISLLGLLEPVIDQNLYYLGMKYTTATFATAMYNVLPAITFVLAYIFGLERVKLRCIRSTGKVVGTLATVGGAMIMTLVKGPVLDLFWTKGVSAHNTAGTDIHSAIKGAVLVTIGCFSYACFMILQAITLRTYPAELSLTAWICLMGTIEGTAVALVMEKGNPSAWAIGWDTKLLTATYSGIVCSALAYYVGGVVMKTRGPVFVTAFSPLCMIIVAIMSTIIFAEQMYLGRVLGAVVICAGLYLVIWGKGKDYKYNSTLQLDDKSAQPKLELSGNGKDNVDHEVITISKQGEQRRTAVETV

SEQ ID NO: 2993 - protein, 97 aa, Magnetococcus sp. MC-1
MSINFRPLHDRVVVKRTESDAKTAGGIIIPDTAKEKPVQGEVLAVGSGVVNDAGNVRPLEVKVGDKVLFSKYGGTEVRIDGEELLIMRESDIVGILG

SEQ ID NO: 2994 - protein, 954 aa, x Mokara cv. 'Yellow'
MAKASVAKLPSMDAHLRLLAPGKVSDDDKLVEYDAMLLDRFLEIVQDLHGEGIRETVQECYELSAEYERTHDSKKLDELGNVLTSLEPGDSIVVASSFSHMLNLANLAEEVQIAQRRRTKPKKGYFESNLEETFKRLIGELKKTPEEIFDALKNQTVDLVFTAHPTQSIRRSLLQKHGRIRNSLTQLCAKDITPDEKQELDEALQREIQAAFRTDEIRRTQPQPQDEMRAGMSYFHETIWKGVPKFLRRVDTAPKSIGINERLPYNAPLIQFSSWMGGDRDGNPRVTPEVTRDVCLLARLMAANLYFSQIEDLMFELSMWRCSDELRLRADELHRSSKKDAKHYIEFWKKVPPSEPYRVILGDVRDKLYNTRERARQLLSSGISDIPEEATLTNVEQFLEPLELCYRSLCACGDSPIADGSLLDFLRQVSTFGLSLVRLDIRQESDRHTDVLDAITRHLQIGSYREWPEEKRQEWLLSELRGKRPLFGSDLPKTEEIADVLGAFDVIAELPSDGFGAYIISMATATSDVLAVELLQRESRVKKPLRVVPLFEKLADLEAAPAAVERLFSIDWYRNRINGKQEVMIGYSDSGKGAGRLSAAWQLYKAQEELVKVAKEYGVKLTMFHGRGGTVGRGGGPTHLAILSQPPDTILGSLRVTVQGEVIEQSFGEENLCFKTLQRYTVGTLEHGMQLPISPKPEWRALMDEMAIVATEEYRSVVFKEPRFVEYFRLATPELEYGRMNIGSRPSKRKPSGGIESLRAIPWIFAWTQTRFHLPVWLGFGAAFKHVIKKDPKNLLILREMHNDWPFFRVTIDLIEMVFSKGNSGIAALYDKLLVSPDLLPFGEQLRANYEETKDLLLQVADHKTLLEGDPYLKQRLRLRVPYITTLNVYQAYTLKRIREPDYAVPHISNDKLNSNKTAAELVKLNPTSEYAPGLEDTLILTMKGIAAGLQNTG

SEQ ID NO: 2995 - protein, 363 aa, Bacillus anthracis str. 'Ames Ancestor'
MNRAVIVEAKRTPIGKKNGMLKDYEVQQLAAPLLTFLSKGMERAIDDVILGNVVGPGGNVARLSALEAGLGHHIPGVTIDRQCGAGLEAIRTACHFIQGGGGKCYIAGGVESTSTSPFQNRARFSPETIGDPNMGVAAEYVAESYNITREMQDEYACLSYKRTLQALAKGYIHEEILSFNGLLDESIKPEMNYERIIKRTKPAFLHNGTVTAGNSCGVNDGACAVLVMEEGQARKLGYKPVLRFVRSAVVGVDPNLPGTGPIFAVNKLLNERNMKVEDIDYFEINEAFASKVVACAKELQIPFGKLNVNGGAIALGHPYGASGAMLVTRLFYQAKRERMKYGIATLGIGGGVGLALLFEKVED

SEQ ID NO: 2996 - protein, 149 aa, Glycine max
MAPKAEKKPAEKKPAAEVAEKAEKTPAGKKPKAEKRLPASKSAKEGGDKKGRKKNKKSVETYKIYIFKVLKQVHPDIGISSKAMSIMNSFINDIFEKLAGEAAKLARYNKKPTITSREIQTSVRLVLPGELAKHAVSEGTKAVTKFTSN

SEQ ID NO: 2997 - protein, 699 aa, Saccharomyces cerevisiae
MTAQLQSESTSKIVLVTGGAGYIGSHTVVELIENGYDCVVADNLSNSTYDSVARLEVLTKHHIPFYEVDLCDRKGLEKVFKEYKIDSVIHFAGLKAVGESTQIPLRYYHNNILGTVVLLELMQQYNVSKFVFSSSATVYGDATRFPNMIPIPEECPLGPTNPYGHTKYAIENILNDLYNSDKKSWKFAILRYFNPIGAHPSGLIGEDPLGIPNNLLPYMAQVAVGRREKLYIFGDDYDSRDGTPIRDYIHVVDLAKGHIAALQYLEAYNENEGLCREWNLGSGKGSTVFEVYHAFCKASGIDLPYKVTGRRAGDVLNLTAKPDRAKRELKWQTELQVEDSCKDLWKWTTENPFGYQLRGVEARFSAEDMRYDARFVTIGAGTRFQATFANLGASIVDLKVNGQSVVLGYENEEGYLNPDSAYIGATIGRYANRISKGKFSLCNKDYQLTVNNGVNANHSSIGSFHRKRFLGPIIQNPSKDVFTAEYMLIDNEKDTEFPGDLLVTIQYTVNVAQKSLEMVYKGKLTAGEATPINLTNHSYFNLNKPYGDTIEGTEIMVRSKKSVDVDKNMIPTGNIVDREIATFNSTKPTVLGPKNPQFDCCFVVDENAKPSQINTLNNELTLIVKAFHPDSNITLEVLSTEPTYQFYTGDFLSAGYEARQGFAIEPGRYIDAINQENWKDCVTLKNGETYGSKIVYRFS

SEQ ID NO: 2998 - protein, 448 aa, Sinorhizobium meliloti 1021
MNVDEKLEPILAEVLRRNGGEHEFHQAVREVLESLGRVIAKHPRYAENALIERICEPERQIIFRVPWVDDKGQVQINRGFRVQFNSALGPYKGGIRFHPSVNIGIIKFLGFEQTFKNALTGMPIGGGKGGSDFNPRGRSDGEIMRFCQSLMTELHRHLGEYTDVPAGDIGVGGREIGYMFGQYKRLTNRYEAGVLTGKALFYGGSRARKEATGYGATYFVQRMIATKGLDFEGKRVTVSGSGNVAIYTMEKVIEFGGKIVACSDSNGYVVDEDGIDLELVKEIKEVRRERISEYARLKGAGTHYIEAGSVWDVPCDVAMPSATQNELTGKDARTLVKNGVLAVGEGANMPCTPEAVRIFQEAGVLFAPGKAANAGGVATSALEMQQNASRDSWTFEQTEARLATIMQAIHDRCAETAEEYGTPGDYVLGANIAGFVRVAEAMDALGVI

SEQ ID NO: 2999 - protein, 392 aa, Zoogloea ramigera
STPSIVIASAARTAVGSFNGAFANTPAHELGATVISAVLERAGVAAGEVNEVILGQVLPAGEGANPARQAAMKAGVPQEATAWGMNQLCGSGLRAVALGMQQIATGDASIIVAGGMESMSMAPHCAHLRGGVKMGDFKMIDTMIKDGLTDAFYGYHMGTTAENVAKQWQLSRDEQDAFAVASQNKAEAAQKDGRFKDEIVPFIVKGRKGDITVDADEYIRHGATLDSMAKLRPAFDKEGTVTAGNASGLNDGAAAALLMSEAEASRRGIQPLGRIVSWATVGVDPKVMGTGPIPASRKALERAGWKIGDLDLVEANEAFAAQACAVNKDLGWDPSIVNVNGGAIAIGHPIGASGARILNTLLFEMKRRGARKGLATLCIGGGMGVAMCIESL

SEQ ID NO: 3000 - protein, 463 aa, Sinorhizobium meliloti 1021
MSRLVIVSNRVPVPDKGGIAPAGGLAVALKVALEEHGGIWMGWSGRSSGENEPEPLAQLHQGNITYALTDLTDTDVGEYYHGFANRVLWPICHYRLDLAEYGRKEMAGYFRVNRFFAHRLAPLVRPDDVIWVHDYHLIPLAAELRQMGLKNRIGFFLHIPWPPADVLFTMPVHEEIMRGLSHYDVVGFQTDHDLENFAGCLRREGIGDELGGGRFSAYGRVFKGGIYAIGIETAAFAEFAKKALTNKTVRKARESIEHRSLIIGVDRLDYSKGITQRIDAFERFILANPAQQGRVTYLQITPKSRSEVPEYEAMQRTVAEQAGRVNGALGAVDWVPIRYINRSVGRHILAGLYRLGKVGLVTPLRDGMNLVAKEYVAAQDPDDPGVLVLSRFAGAARDLKGALLVNPYDIEGTANAMARALSMPLEERKDRWKTMMDHLLEHDVSRWCRDFLNDLATSPDPSG

SEQ ID NO: 3001 - protein, 399 aa, Rubrobacter xylanophilus DSM 9941
MSRSLRPPLEGTTETVAGRARIRILFGERRRQEEVLEEVIGRYRITLAAAAALLAALLLAGACSEENARQPHAPDQSAAQAAQNIPQDEPVARVAAKVEPSVVQVNTRAIQLTPFGPESQSGVGSGVIYREDGYIITNNHVVEGADEVNVAFADGSTERGRVVGSDPRTDIAVVKVDRDSLPAAAFSDAEPVVGQLAVAIGSPSGFESTVTAGVVSGLDREIPPQLTGTGYQIPSLTGLIQTDAAISPGSSGGALANRSGEIIGINVAYLPPQTGAESIGFAIPASVATSVADQLIESGEVRAPFLGIVPVDLTSQEAELYGLEVTSGALVARVEPGSPADEAGLRRGDIIVALDGTEIRSSGDLYSALRDYRPGDEVRLTVVRNGERQRIEVTLGERP

SEQ ID NO: 3002 - protein, 250 aa, Comamonas testosteroni
MGRVNDKVVLVTGGAMGMGLTHCTLLAREGATVYLSDMNEELGHQAVAEIRRQGGKAHFLHLDVTNENHWTGAVDTILAESDRLDALVNNAGILTLKPVQDTSNEEWDRIFEINVRSVFLGTRAVIEPMRKAHKGCIVNVSSIYGLVGAPGAAAYEASKGAVRLFTKACAVDLAPFNIRVNSVHPGVIATPMTQQILDAPQSARALLGPTLLGRAAQPMEVSQAVLFLVSDEASFVHGSELVVDGGYTAN

SEQ ID NO: 3003 - protein, 404 aa, Zea mays
MEAPPVPELMDLDAPPPAAADAAAAAPVPPAVSDKKKEGEGGDTVTGHIISTTIGGKNGEPKRTISYMAERVVGTGSFGIVFQAKCLETGETFAIKKVLQDRRYKNRELQLMRAMEHPNVICLKHCFFSTTSRDELFLNLVMEFVPETLYRVLKHYSNANQRMPLIYVKLYMYQLFRGLAYIHNVPGVCHRDVKPQNVLVDPLTHQVKLCDFGSAKVLIPGEPNISYICSRYYRAPELIFGATEYTTSIDIWSAGCVLAELLLGQPLFPGESAVDQLVEIIKVLGTPTREEIRCMNPNYTEFRFPQIKAHPWHKIFHKRMPPEAIDLASRLLQYSPSLRCSALDACAHPFFDELRTPNARLPNGRPFPPLFNFKHELANASPDLVSRLVPEHIRRQIGVNFGSS

SEQ ID NO: 3004 - protein, 145 aa, Zea mays
MAAATPEEDAASAAAVDATTETTNHFTVNTDAAGADAGPLKLDDVDGNVYSCKRCGTLLAVADDIVSKSFHCKNGKAYLFDNVVNVTVGEKEDRMTITGMYSVSDIFCVGCGEIVGWKYEAAHERSQKYKEGKFVLERYLLLGPE

SEQ ID NO: 3005 - protein, 393 aa, Moorella thermoacetica ATCC 39073
MKDVVIVSGVRTAVGTRGGSLKDIHQADLGAMVIKEAVRRAGLEGNQVDEVIVGNVGQVAENGFIARMCSLKAGLPLETTAFSVNRQCGSGLQAINSAVQEIQSGNAEIVVACGTENMNQLPYYVRKARYGYGFGHGQLEDGLLTILTWPLGPYPNGVTAENIAERYHISREEQDAFALKSQQKAEAAIKAGKFVDEILPVEVPAGKRETRIFAQDEHPRFGLTMEQLAKLKPAFREGGTVTAGNSSGINDGAGAVVLMTAEKANKLGLKPLLLIRSQAVAGVDPDVMGIGPAPATMKAVEKAGLTLADIDLFELNEAFASQSIAVMRILGLPEEKVNVNGGAIALGHPIGATGIILTVKLQKEMVRRQAKYGIVTMCIGGGQGIATVFENIA

SEQ ID NO: 3006 - protein, 222 aa, Glycine max
MGRGKIEIKRIENTTNRQVTFCKRRNGLLKKAYELSVLCDAEVSLIVFSSRGRLYEYSNNNIRSTIERYKKACSDHSSASTTTEINAQYYQQESAKLRQQIQMLQNSNRHLMGDALSTLTVKELKQLENRLERGITRIRSKKHEMLLAEIEYFQKREIELENENLCLRTKITDVERIQQVNMVSGPELNVIQALASRNFFNPNMLDGGTVYPQTDKKILHLG

SEQ ID NO: 3007 - protein, 120 aa, Triticum aestivum
MSNTTMGSTTRSCDAYLLFNGETLLPNGVRAFLCTVALAYCFIGLSAITARFFKSMESITNHSREVVTVDTETNTPIVKHEKVWNYTIADIALLAFGTSFPQISLATIDAIRNLGQLTAG

SEQ ID NO: 3008 - protein, 509 aa, Moorella thermoacetica ATCC 39073
MPYLLGIDIGTSGTKALLVEETGRVVASAYKEYPLSQPRPGWAEQDPEEWWRAVVEAAREVLARSGLAGGDVAGVGLSGQMHGAVVLDANYRVLRPAILWCDQRTGAECAWMYEEIGQEKLYRWTGNPVLPGFTAPKLVWLKRHEPETYSRIRHVLLPKDYIRFRLTGELATEVSDASGTLLLDVTHRCWSGEILAAMGLPEEWLPRVYESPEVTGRITPEAAALTGLMAGTPVVGGGGDQAAGAIGTGVVVEGIISTALGTSGVVFAMTDRPHTQPGSALHSFCHAVPGKWHLMGVMLAAGGSLQWFRNQLGSEEVREAAVKNIDPYEMLTEQAAEVGTGAGGLLFLPYLLGERTPYPDPAARGAFIGLTMRHRKGHLVRAVMEGVAFGLRDSLELLRQAGVKVEEIRVSGGGARSPLWRHILASTFKYPITTVNSTDGPAFGAALLAGVGAGIYPSVEEACRLTIKVTSRVEPIAPETDAYDRLYEIYKSLYPLLRDTMHDLTKFTE

SEQ ID NO: 3009 - protein, 196 aa, Mitthyridium sp. Wall 739
GGAKKVVISAPSKDAPMFVMGVNEEKYTNEDIVSNASCTTNCLAPLAKVINDKFGILEGLMTTVHATTATQKTVDGPSNKDWRGGRSAGTNIIPSSTGAAKAVGKVLPELNGKLTGMAFRVPTTDVSVVDLTVRLEKPASYDAIKAALKEASQGKMKGILGYTEDDVVSSDFVTDSQSSIFDAKAGIALSDTFVKL

SEQ ID NO: 3010 - protein, 649 aa, Desulfotalea psychrophila LSv54
MGSEIMFGEGRLDAKLLPVREIQKTLFEMFIASVAHHSDNIAYIYKVNGEELRVTYSKLFEDVLLLSRAFKRRGLGRGDKVMLLSDNRYSWIVTDLALLSLGAVNVPRGSDTPTQELEFIVEHSESVHLIVESSKLLDLHADYIKRCRQIKDIFIMVAGEVHTLFGRTYSYQDLLANRQYSEKDVNNFLEEGYSSTEDDFVTIIYTSGTTGVPKGVQLSNKNIMHNVDCLPGIIRLTEEDLWLSILPSWHIFERTAEYVALAAGTTLVYSTVRTLVQDLERYKPTLLATVPRVWESLYSKVDSGVRKKGAMAYRIFTSLIWCSSTYRRNRREFLDRLPVFAKPNSLVRFGQKGVALVKMLFLYLPYLFAEKKLNVVRQRFGGRLRLAISGGGSLADYLEEWVDAVGIRIVNAYGMTECSPAIAGRGLDCRVYGTVGAGVTNTRIRLVDDDGLEVSQGKEGLIEVVGDQVMGGYYKNDVGNIESFTDDGFFRTGDLGRRTISGDLVLTGRAKDIIVLSSGENIDPSRIESAISVFPFVQDAILVGQDKKGLGALLVADREELLKYADSRFSHLRKASQELLKDNKVLELIRKEMNDKLRPKQGFKSYEKLHKITFLEKEFKLGEELTNTLKKKRHVIEKKYHKVINDLLH

SEQ ID NO: 3011 - protein, 91 aa, Picea glauca
MEQHQDRRELDAKARVGEPVVPGGTGGKSLDAQERLAEGRSRGAQTRKEQIASEGYQEMAPKGGLSSAGGPGGERASEEGRPIDESKYRHP

SEQ ID NO: 3012 - protein, 311 aa, Triticum aestivum
MALASFAVSPPIAACAAVLRRAMSFSSVSAASQTRVGVVQMTSVGDLDANYATCSRLTKEAAAAGVKFLCFPEVFSFIGSKDGESVKLAEPLDGPIMQRYCSLANESSIWLSLGGFQERGPDDSHQYNTHVLIDESGKVRSSYRKIHLFDVDVPGNMVYKESRFTTAGDTVVAVDSPFGRLGLTVCYDLRFPELYQCLRFKHQAQVLLVPSAFTKVTGEAHWEILLRARAIETQCYVIAAAQAGKHNEKRESYGDSIIIDPWGTVIARLPDRLSTGFAVADIDLSKVEAVRTKMPISVHRKFESIWKSSSL

SEQ ID NO: 3013 - protein, 422 aa, Streptomyces antibioticus
MTRRVVITGVGVRAPGGNGTKAFWDLLSAGRTATRSISFFDASPFRSRIAGEVDFDAAAEGFGPREIRRMDRATQFAVACTREAVADSGLDLSALDPHRIGVSLGSAVASATSLENEYLVMSDAGKEWEVDPAYLSPHMFDYLSPGVMPAEVAWEVGAEGPVTMVSDGCTSGLDSVRYAVQLIREGTVDTVVAGAADTPISPIVVACFDAIKATTTRNDDPAHASRPFDGTRNGFVLAEGAAMFVLEEYEAAKNRGAHIYAEVGGYATRCNAHHMTGLRKDGREMAEAIRVSLDEARLDGTKIDYINAHGSGTKQNDRHETAALKRSLGQHAYDVPVSSIKSMVGHSLGAIGSVEIAASLLAIEHNVVPPTANLHTPDPECDLDYVPLTAREQRVDTVLTVGSGFGGFQSAMILHRPEVAAA

SEQ ID NO: 3014 - protein, 193 aa, Oryza sativa
MPSSFLSPLLSPSPILSSSFPRGDAAAMAVDKDKEFKIDWKRVGITSSFGFAFVGPVGHYWYEYLDRFILRRYQPKTFKFVASKVAADGLLFGPVDLLLFFSYVGLASGRSVEQVKDDVKRDFIPALVLGGTIWPAVQIANFRFIPVRYQLLYVNLFCLLDSCFLSWIDQQGDAPWKQWFTSFQKIEGQKGKV

SEQ ID NO: 3015 - protein, 518 aa, Nocardia farcinica IFM 10152
MSSSQFPHSTPMTRRGFLALGAGVTAAAALTACSKNSTASRTLVEPDSEAVRAAENRRRAAGAAVRQVRLRAEPATVDLGGVRVQTWAYGGTLPGQEIRITKGNVLRAEFTNALSAPSTVHWHGIALRNDMDGAPEVTQPPIAPGGTFGYEFTAPDPGTYFFHPHVGVQLDRGLYAPLIIEDPADGKDYDLEAVVVLDDWLDGVNGRDPDKELDQLRAKGMSGMDMGGMDHGGMTMGGSSTMAMPTDPSAPLGSDTGDVRDYPYYLINGRIGADPVTITARPGQRIRLRIINAASDTAFRVAVGGHQLRVTHSDAFPVQPVTTSSLLISMGERYDAVVELADGVFPLVASAEGKAGQGFALIRTGGGTPPPADVRPAELSAPPLTADRLVGAESVRLPNRTPDNTLDLTLENDTAKYLWMINGKAFPDHSMLDVTEGQRVRLRLVNKTMMFHPMHLHGHTFQVVSAAGTGPRKDTSIVLPMQTVEVDFDADNPGQWMVHCHNAYHGEAGMMSVVSYVR

SEQ ID NO: 3016 - protein, 226 aa, Oryza sativa (japonica cultivar-group)
MSRGGGSYGEVGQKIDYVFKVVLIGDSAVGKSQLLARFARNEFNLDSKATIGVEFQTRTLHIDARTVKAQIWDTAGQERYRAVTSAYYRGAVGAMLVYDITKRQSFDHVARWLEELRGHADKNIVIMLIGNKSDLGTLRVVPTEDAKEFAERENLFFMETSALESTNVENAFMTVLTEIYRIVSKKNLVANEEVDSSGNSSLLKGTKIVVPGQEPAPPTKASCCMS

SEQ ID NO: 3017 - protein, 348 aa, Nitrosomonas europaea ATCC 19718
MPASRGCSLVTGGGGFIGTHLVRLLLEQGERVRVLELDDVPVLDGAEVIRGSVADEAVVHRAVKGVRRVYHLAAHTDLWAPDKRIFRQINYESTRTVLREAMYADVEVVVHTSTEAILTGRGDPDQSDRTLSSSSRKRKTLGPYCQAKLMAEQAALEASRNGLSVVVVSPTLPVGPGDRHITPPTRMIVDFLNRKIPAYLDCRLNLVDVRDVAEGHILAAQRGRSGERYLLGHENIMLSRLLLMLKEITGVVMPEHKIPYWLALVVGILQEFVADHVTHKAPMAPLTGVRLAGRGNDFDSDKAVRELGFRQTPIRQALIDEIIWLVETGHINLPVHSFRKHFGSTEKK

SEQ ID NO: 3018 - protein, 571 aa, Cucurbita maxima
MGNTCRGSFKGNIFQGYSQPEDSSTLYSKRNNSSSSARSNSDISPTSINTHNLIAQEFSKENKTKSKDNDYNQAFLSPTKKDFTMRKSAENQAYYVLGHKTANIRDLYTLGRKLGQGQFGTTYLCTEITTGIEYACKSISKRKLIAKEDVEDVRREIQIMHHLAGHKNIVTIKGAYEDSLYVHIVMELCSGGELFDRIIHRGHYSERKAAELTRIIVGVVETCHSLGVMHRDLKPENFLLVNKDDDFSLKAIDFGLSVFFKPGQIFTDVVGRPYYVAPEVLLKHYGPAADVWTAGVILYILLSGVPPFWAETQQGIFDAVLKGHIDFDSDPWPLISDSAKDIIRKMLCSRPSDRLTAHEVLCHPWICENGVAPDRALDPAVLSRLKQFSAMNKLKKMALRVIAESLSEEEIAGLREMFTAMDTDNSGAITFDELKAGLRRYGSTLKDIEIRDLMDAADIDNSGTIDYGEFIAATIHLNKLEREEHLVAAFRYFDKDGSGYITVDELQQACAEHNMTDAYLEDVIREVDQDNDGRIDYGEFVAMMQKGNAGVGRRTMRNSLNLSMRDGPGAL

SEQ ID NO: 3019 - protein, 555 aa, Lactobacillus johnsonii NCC 533
MNDWKKKAVVYEAYVQSFKDSNGDGIGDIQGLIEKLDYIKNLGANVIWLTPIFKSPLVDNGYDIADYQAINPIYGTMDDFKKLLSKAHEKGLRIVLDLVVNHTSDQHKWFKESQKNKENKYSDYYIWRDPKEDGSAPTNLGSAFGGSAWTYVPERNQYYLHLFAKQQPDLNWDNPEVRNDIYKIMMFWLDMGVDGFRMDSISFISKPSKFEDAPLEDNKEYGAYYYGSANGPHIHQYLQEMNREVLSKYDVIAIGETPHTSAKEARLFVEPERHELDMVFQFEHMHVDYGKYGRYSDVTFKMSDLRNSMSSWQNSLSWNSNYLGNHDQPRIVSRFGNDNKYRKESAKMLAIVSLLQKGTPFIFQGEEIGMTNLHIKKIDELKDLEAHNIYNFLRSKGISEDDALNMVNRKTRDNARTPMQWDESEQGGFSSETPWMEVNPNYKEINVKKDLKDPDSIYHFYQKILKLRNNNQVLLDGKYELVSSDDSAVFAYTRSTGKEKLAVICSFVPYKVKYNLPTDFVNRNELLLSSYGDNKAKASNVMYLRPYEGVVIRRE

SEQ ID NO: 3020 - protein, 558 aa, Cucurbita maxima
MGNTCRGSFKGNIFQGYSQPEESSTPNFKRNINGSSDHSPSSINTNNLISQAFAEENKTKSKDNDCKKDYTMRKSAENQAYYVLGHKTANIRDLYTLGRKLGQGQFGTTYLCTEIMTGIEYACKSISKRKLIAKEDVEDVRREIQIMHHLAGHKNIVTIKGAYEDSLYVHIVMELCSGGELFDRIIQRGHYSERKAAELTRIIVGVVETCHSLGVMHRDLKPENFLLVNKDDDFSLKAIDFGLSVFFKPGQIFTDVVGSPYYVAPEVLLKHYGPAADVWTAGVILYILLSGVPPFWAETQQGIFDAVLKGHIDFDSDPWPLISDSAKDLIRKMLCSRPSDRLTAHEVLCHPWICENGVAPDRALDPAVLSRLKQFSAMNKLKKMALRVIAESLSEEEIAGLREMFTAMDTDNSGAITFDELKAGLRRYGSTLKDTEIRDLMEAADIDNSGTIDYGEFIAATIHLNKLEREEHLVAAFRYFDKDGSGYITVDELQQACAEHNMTDAYLEDIIREVDQDNDGRIDYSEFVAMMQKGNAGIGRRTMRNSLNLSMRDGPGAL

SEQ ID NO: 3021 - protein, 378 aa, Shewanella oneidensis MR-1
MMLPAPHFSAFNPPRRILMGPGPSDVYPEVLAAQARPTVGHLDPLFVSMMDELKSLIQYAFQTKNEMTMAVSAPGSAGMETCFVNLVEPGEKVIVCRNGVFGERMRQNVERVGAIAVLVDNEWGTPVDPVAVEAALKAHPDAKFLAFVHAETSTGALSDAKTLCALAKQYGCLSIVDAVTSLGGVELRVDEWGIDAIYSGSQKCLSCVPGLSPVSFSPAAVEKLKNRKTPVQSWFLDQSLVMAYWTSAGGKRSYHHTAPVNALYAMHESLRILAAEGLENAWKRHQDMHLVLRAGLEKLGLKFVVAEASRLPQLNAIYIPEGVDDAAVRARLLKDYNLEIGAGLGALAGKAWRIGLMGFGARRENVALCLRALEEVLN

SEQ ID NO: 3022 - protein, 155 aa, Staphylococcus aureus
GADWIVITAGWGLAVTMGVYAVGQFSGAHLNPAVSLALALDGSFDWSLVPGYIVAQMLGAIVGATIVWLMYLPHWIATEEAGAKLGVFSTAPAIKNYFANFLSEIIGTMALTLGILFIGVNKIADGLNPLIVGALIVAIGLSLGGATGYAINPAR

SEQ ID NO: 3023 - protein, 155 aa, Staphylococcus aureus
GADWIVITAGWGLAVTMGVFAVGQFSGAHLNPAVSLALALDGSFDWSLVPGYIVAQMLGAIVGATIVWLMYLPHWKATEEAGAKLGVFSTAPAIKNYFANFLSEIIGTMALTLGILFIGVNKIADGLNPLIVGALIVAIGLSLGGATGYAINPAR

SEQ ID NO: 3024 - protein, 575 aa, Cryptococcus neoformans var. neoformans JEC21
MVNITYGALLSSSDGAVHFEPLGTDIISTLAGQPTAFDPGDIAWVLTCSALIVFMLPGLGYLYSGLARRKNALSMLFLSLVSLGIVSFQWFFIGYSLVFSETGGSFWGDGRNIGFRQVLERPIPEANGKLPEIVFATFQLMFACLVPAVLLGAAAERSRILPAMIFMFCWTTLVYDPLAHWIWSANGWANKWGVLDYAGGVPVEIASGTAGLAYSYFIGKRRGYGTDRVLFKPSNVGNVVLGTVFLWVGWLGFNGGSCYCASLKAALAIFNTNLAGSVGGVVWLIMDFRLERKWSMVGYCTGAIAGLVAITPAAGYVGAPAAALIGLVSAAVSNLATRLKVTMRVDDPMDIFAVHALAGIVGVLMTGLFAQSSVAANDGFSDIDGGWLDRHYVQLGKQIAWACVGMAWTFVVTYAIMFFINLIPGCHFRATDEAEIVGMDEVELGEYVADYAFHQRDLEGEYEAHTLSQCPSATKLHLQEFRHNKDGESSSSSQPKELPPTMPRGGAVVGDLDGDTAVESQHSRSRSRGRSQHRVRIEKEGDNEAMEMSDVRHTKTSDQRQEGSNLEGSYMDHRE

SEQ ID NO: 3025 - protein, 124 aa, Zea mays
MDDGGEPTKYRGVRRRPSGKFAAEIRDSSRQSVRMWLGTFDTAEEAARAYDRAAYAMRGQIAVLNFPAEARNYVRGGSSSSRQQQQGGGGGGGSGGGAGQQVIELECLDDQVLQEMLKGGDGKK

SEQ ID NO: 3026 - protein, 149 aa, Methanosarcina barkeri str. fusaro
MEQTYVMVKPDGVQRGLVGEIISRIEKRGLKIVALRMNVISEATAKEHYSEHAAKPFFPGLVGFITSGPSVSMVVEGKDAIRVMRAINGATNPVDAAPGTVRGDFALDVGRNVVHASDSPEAAAREIAIHFKDSEIGNYSRIDEVCLYE

SEQ ID NO: 3027 - protein, 412 aa, Lactobacillus johnsonii NCC 533
MDTLVKHRHTLSKNQKWVIASTSSGFALENMDVLFLSFAMSSMIADLHLSGGEAGFISTITNLGMLVGGIAFGILGDKIGRVKTFSHTVIIFAIATALMAFTNNIYLIYALRFLAGIGAGGEYGVGIALIAENFHKEQIGKMTSVAAIGGQIGAILAALIAAWIIPAAGWHMLFLIGILPVILTIFIRKHVHESEQFIKAQASESNSLLSDVAKKMFSTPHLAWQTVGLMIMMTVQIAGYFGLMNWLPTIVQKQLNLNVSNSSLWMISTIIGMSIGMMTFGSIFDYFGPRRAFAIFLIGSALMVYTLSLAQNMAMLLIIGAVVGFFSNGMFGGYGAVISRLYPTEIRSSANNIIVNVGRAIGGFSSVVIGILMDKYNLGVVMGFLSALYLLSFVVMITLPGLKTLTKEAKRN

SEQ ID NO: 3028 - protein, 349 aa, Geobacillus kaustophilus HTA426
MRNWKKLLVSPSTSIIETMKNIDQTAAQIALVVDDDFRLLGTVTDGDIRRGILRGISLDDQVSKVMNKNPITMKKGASKQEIKRLFQEKKLRQLPILNQNNQVVDVIFSDVLFDSVSVDNWVVLMAGGLGTRLRPLTENIPKPMLTVGTKPILQTILESFIEHGFHQFYFSVNYKREMIKGYFGDGLKWGVSIQYLDEDQRLGTAGALSLFPEKPTKPIIVMNGDILTKVNFQQLLQFHEENDSVATMCVREYQHQIPYGVVRTEGTRLCSIEEKPIERYFVNAGIYVLNPEVLELIPKNTYFDMPSLFELLIKMQKKTNVFPIREYWLDIGRIPDFEKANLEFAEVFE

SEQ ID NO: 3029 - protein, 346 aa, Thlaspi caerulescens
MASTSTLLMKTIFLVLIFVSFAISPATSTAPDDCASESANPCVNKAKALPLKIIAIAAILVASMIGVGAPLFSRSVPFLQPDGNIFTIVKCFASGIILGTGFMHVLPDSFDMLSSKCLGENPWHKFPFSGFLAMLACLVTLVIDSMATTLYTSKNVVGIVPHGHGHGHGPENDVALPIKEDDSANAQLLRYRVIAMVLELGIIVHSVVIGLSLGATSDTCTIKGLIAALCFHQMFEGMGLGGCILQAEYTNMKKFVVAFFFAVTTPSGIALGTALSTVYRENSPSALITVGLNACSAGLLIYMALVDLLAAEFMGPKLKGSIKMQAKCFLAALLGCGGMSIIAKWA

SEQ ID NO: 3030 - protein, 155 aa, Staphylococcus aureus
GADWIVITAGWGLAVTMGVYAVGQFSGAHLNPAVSLALALDRSFDWSLVPGYIVAQMLGAIVGATIVWLMYLPHWKATEEAGAKLGVFSTAPAIKNYFANFLSEIIGTMALTLGILFIGVNKIADGLNPLIVGALIVAIGLSLGGATGYAINPAR

SEQ ID NO: 3031 - protein, 329 aa, Zea mays
MAPLANQKTYKLYNGVTIPAVGFGTFASEGASGETYAAVTTALKTGYRHLDCAWFYQNEEEVGAAVRDFLKENPSVTRKDLFICTKVWNHLHEPDQVKWSFNSSLTKLGMDYIDAFLVHWPIAAESDDNHMPKIGADGKYIIKKDLTENPEPTWHAMEEIYESGKAKSIGVSNWTIDGLKKLLSFAKVKPMMNQIEIHPFLPNSDLVKFCQDNDILVSAYSPLGSQNQVPSTGEKVRTNAKLNEVAQRSGYDLAQVLLAWGLQRGYVVLPKSSTPSRIQSNWNIPELSKEDFDAVEEVARGRHTRFVNMKDTFGYDVWPEETDGGELKK

SEQ ID NO: 3032 - protein, 262 aa, Triticum aestivum
MEDERSTQSYQGGEAAEQVEVTDRGLLGNLLGKKKAEEDKEKEEELVTGMEKVSVEEPEVKKEEHEDGEKKETLFSKLHRSSSSSSSSSDEEEEEVIDDNGEVIKRKKKKGLKEKLQGKLPGHKDTEGEHVTGLPAPAAPASVQTHGGHHDTDVVVEKIDGDVKTEAAPAVPEEEKKGFLEKIKEKLPGGHKKPEDAAAVPVTHAAPAPVHAPVPAPEEVSSPDAKEKKGLLGKIMDKLPGYHKTGEEDKAAAATGEHKPSA

SEQ ID NO: 3033 - protein, 1060 aa, GIBBERELLA ZEAE PH-1
MGSPVESDQPVRPPQGDTIFVKHPRLDPTTQPATPQEIGPQDPVQETLPSTEIPNSPIDPNESFTTQVNEDRPHVTVIPSSLTPPPSTQVNISHNASQPGPSKRKFSASQQSTLCSPPATIRNIIRDRSATSDFLPPAPQQVLEASADELRVMVQNALAEQQKLKTEAAHFKLQYNLMALQADDDAKRAAVEHEMMRREVEALRNAEHTRQARKELDSASESLQAKYLQMKAWYEGALQDQDTLQRRLKTAKKVIKQREDEYNTLAEERDMLLNRIRENREHMQMLCSPGGIFHALAPKQRGVVVPSSQGQRGSQQQASRTQVHNRQGAHGLSALLQAMSQDKDNNSAPSTPMHSHRPPTRHVGKHSRNAQSMSSLPTTPLSRPAGPHVGLLPSVDLVPQTEPQRYTQRQFIPTTPKSERQRRRSRESTISVDDNEELARQALETVAAVQSFTSQTSQSRNRNGQDEVYDSQASQAAAEMLRRDPRQSFEVADARKMPGAVEKSVRMQERLLSHHHNGDGDKRKFNGDHNSEEAHRDDESPAKKSRVVDPLTNSPKKFALGFQYREHENDKLRKRLCSNILRSNFNCREMLLSFRTLTRQRYCQQPTSKPIRPTIHSQWGSHPEFDRGERPSISWIIPLASFTMSARLHKGLSSVLAKSPSDTVILSSVRTPICRSYKGQLKDAYPEELLASVLKATLKAHPEAPVDDVAVGVVLSELGGSKAARMALNHVGFKNTTSLYTVNRACSSSLQAIAAVSGQIQTGMIDSGIAAGMESMTRNYGSRAIPVDVWPELKESENHHARDCIMPMGLTSENVASRYNVSRADQDAMAVESHRRAARARSEGRFAEEIVPVETRFQEVDKQGNKVGEEKRITVTADDGIREGVTIEALTKLKPAFKADGTSTAGNSSQVSDGAAATFLMRRSTATALGLQDQIIGKFVSAVTVGCDPDEMGIGPALAIPKLLDQVGLKNEDVSRWEINEAFASQALHCVRALGLEDAWAKEKVNPDGGAIALGHPLGATGARMTSTLLHGLKRDGGEVGVVSMCVGTGMGMAGMFVRE

SEQ ID NO: 3034 - protein, 497 aa, Triticum aestivum
  misc_feature (68)..(68): Xaa can be any naturally occurring amino acid
  unsure (1)..(497): unsure at all Xaa locations
MARKMLKDGEAPVVADDGGSYDYDLFVIGAGSGGVRGSRTAAGFGAKVAICELPFHPISSEWLGGHGXGTCVIRGCVPKKILVYGASFRGEFDDAKQFGWEINGDINYNWKKLLENKTQEIVRLNGVYKRILGGSGVTMIEGAGSIVDAHTVEVTQPDGSKQRHTTKHILIATGSRATLVNIPGKELAITSDEALSLEELPKRALILGGGYIAVEFASIWKGLGAEVDLFYRKELPLRGFDDEMRTVVASNLEGRGIRLHPGTNLTELSKTADGIKVVTDKGDELIADVVLFATGRAPNSNRLNLEAVGVEVDQIGAIKVDEYSRTSVPSIWAVGDVTNRINLTPVALMEATCFAKTVFGGQTVKPDYKDVPCAVFCIPPLSVVGLSEQEALAETKNDLLIYTSSFNPMKNSISKRVEKSTMKLVVDAETDKVLGAAMCGPDAAEIMQGIAVALKAGATKATFDSTVGIHPSAAEEFVTMRTLTRRVSPPSKPKTNL

SEQ ID NO: 3035 - protein, 319 aa, Acacia mangium x Acacia auriculiformis
MSKVVCVTGASGAIGSWLVRLLLDRGYTIHATVQNLKDENETKHLEVMEGAKSRLRLFEMDLLDEDSIMATVKGCAGVFHLACPNVIGQVQDPEKEIVEPAVKGTVNVLKAAREAGVERVVATSSISAIIPSPNWPSDRIKNEDCWCDLDYCKRKGLWYPIAKTLAEKAGWEFAKETGYDVVMINPGTALGPLIPPRLNSSMAVLLGVLKGDTETYEDFFMGMAHFKDVAMAHILAFEKKEASGRNLCVEAIRHYGDFVEKVAELYPQYHVAKVPKDTQPGLLRATDASKKLINLGMKFTPIEQIITDAVESLKSLGFL

SEQ ID NO: 3036 - protein, 260 aa, Glycine max
MADPAEETVAAPPPTPAAPAEGAPPLSAEPPASTDASPEKAAPPAPAPDTTVRSRGFRLLGEDTSVHKVLGGGKTADVLLWKDKKTTAVVIGGTTVIWVLFEVLDYHLLTLLSHVMIGVLAILFVWSKAMTFIKKSPPDIPVVEIPEDLAVNVSRALRSDVNRSLHLLREIAMGHDLKKFLGVIAGLWVLSEVGSCCDFLTLIYIAVLMIHTVPILYDKYQDKVDHFAGKAHTEACKHYEVLDQKVLSKIPRGPAKTKKT

SEQ ID NO: 3037 - protein, 383 aa, Magnaporthe grisea 70-15
MDDVPAAPGVGKANGNGAAPPEMPAAAIGHELPYVAPSSYLRPKPQSRIAMPESQPFGLLDRDQMQGLNGIREFLKIRTSYDVLPLSFRLIILDQDLLIKKSLNILIQNSIVSAPLWDSKNSTFAGLLTSTDYINVIQYYCQYPSRLDEVDQFRLSSLRKIEKAIGVIPPETISIHPMRPLYEACVRMNATRARRIPLIDVDDETGRETVVSVITQYRILKFIAVNNENYSQLLRKPVRECGLGTYDNIFTARMSHSVLDVINLMVSYSISSVPIVDKDNRVINVFEAVDVIPCIKGGVYDELTATVGEALARRSDDFPGIYTCFEDDRLSSIFDTLRKSRVHRFIVIDDQSHLKGIISLSDILKYVLGDEAEETDGSKDGRK

SEQ ID NO: 3038 - protein, 365 aa, Acacia mangium x Acacia auriculiformis
MGSAGETQITPTHVNDEEANLFAMQLASASVLPMILKSALELDLLEIIAKAGPNAQLSPSDIASQLPTKNPDAAVMLDRMMRLLACYNVLSSSLRTLPDGKIERLYGLAPVAKYLVKNEDGVSIAPLNLMNQDKVLMESWYYLTETVLEGGIPFNKAHGMTSFEYHGKDARFNKVFNKGMADHSTITMKKILETYTGFEGLKSLVDVGGGTGAVINTIVSKYPSIKGINFDLPHVIEEAPSFPGVEHVGGDMFVSVPKADAVFMKWICHDWSDEHCVKFLKNCYDALPENGKVIVAECILPVAPDSSLATKGVVHIDVIMLAHNPGGKERTEKEFEALAKGAGFQGFRVCCSAFNSYIMEFLKKP

SEQ ID NO: 3039 - protein, 473 aa, Arabidopsis thaliana
MVFFRSVSAFTRLRSRVGQQSSLNNSVRWIQMQSSTDLDLKSQLQELIPEQQDRLKKLKSEHGKVQLGNITVDMVIGGMRGMTGLLWETSLLDPEEGIRFRGLSIPECQKVLPTAQSGAEPLPEGLLWLLLTGKVPSKEQVEALSKDLANRAAVPDYVYNAIDALPSTAHPMTQFASGVMALQVQSEFQKAYENGIHKSKFWEPTYEDCLNLIARVPVVAAYVYRRMYKNGDSIPSDKSLDYGANFSHMLGFDDEKVKELMRLYITIHSDHEGGNVSAHTGHLVGSALSDPYLSFAAALNGLAGPLHGLANQEVLLWIKSVVEECGEDISKEQLKEYVWKTLNSGKVIPGYGHGVLRNTDPRYVCQREFALKHLPDDPLFQLVSKLYEVVPPVLTELGKVKNPWPNVDAHSGVLLNHYGLTEARYYTVLFGVSRSLGICSQLIWDRALGLALERPKSVTMDWLEAHCKKASSA

SEQ ID NO: 3040 - protein, 196 aa, Syrrhopodon armatus
GGAKKVVISAPSKDAPMFVMGVNEEKYTNEDIVSNASCTTNCLAPLAKVINDRFGILEGLMTTVHATTATQKTVDGPSNKDWRGGRSAGTNIIPSATGAAKAVGKVLPELNGKLTGMAFRVPTTDVSVVDLTVRLEKPASYDAIKAALKEASEGKMKGILGYTEDDVVSSDFITDSRSSIFDAKAGIALSDTFVKL

SEQ ID NO: 3041 - protein, 158 aa, Picea glauca
METTFYSILGVNKDSSSAEIRSAYRKLAMKWHPDKWSTDPSSSETAKLRFQQIQEAYSVLSDDTKRALYDAGMYEPSEDMDAFCDFLDELSSLIATVKVQSNKDDELLQLQEMFTKMLEEDWFSTDNFEAFKEISSQHSDDKPENGQDHEPYGSVDDL

SEQ ID NO: 3042 - protein, 487 aa, Sinorhizobium meliloti 1021
MTFHAKFSGYADPALHAAGLYIGGKWQSGSGITVLDPSTGNLLAEVADASIEDAQRAVDAADAAAAGWRATPARQRSEILRRWYQLMTQHAEELATLIALENGKALADARGEVAYAAEFFRWYAEEATRIPGEFRHTPSGSHNILVDHEPIGIAVLITPWNFPAAMATRKIGPALAAGCTVILKPASETPLTAYAMARLGEEAGVPPGVVNVLTTSNPGGITNAMLADPRVRKLSFTGSTGVGRVLLAEAAKSVVSCSMELGGNAPFIVFDDADLEVALDGAMIAKMRNAGEACTAANRFYVQAGIHDAFVAGLTARMKSLKLGPGYDPETQCGPMITQNAVRKIDRLVSEALAAGARATTGGKPLTENGYFYPPTVLENVPVNASIAREEIFGPVAPVYKFESDDEAIRLANNTEYGLAAYIYSRDLKRAMKVGKRIETGMLGINRGLMSDPAAPFGGVKQSGLGREGGVTGILEFMEPKYFAVDY

SEQ ID NO: 3043 - protein, 339 aa, Glycine max
MEERYETLKELGSGNFGVARLAKDKETGELVAIKYIERGKKIDANVQREIVNHRSLRHPNIIRFKEVFLTPTHLAIVLEYAAGGELFERICNAGRLSEDEARFFFQQLISGVSYCHSMQICHRDLKLENTLLDGNPAPRLKICDFGFSKSALLHSQPKSTVGTPAYIAPEVLSRKEYDGKVADVWSCGVTLYVMLVGAYPFEDPEDPKNFRKSIGRIMSVQYAIPDYVRVSKECRHLISCIFVANPAKRISISEIKQHLWFRKNLPREIIEPERRGYVDHKRTQPSQSVEETMRIIQEARTKIHTGEQAGTGTSDAVHGDEANEEVDINDHYAKYLALN

SEQ ID NO: 3044 - protein, 349 aa, Lycopersicon esculentum
MSPPLLGVGEEEGQSNVTLLASSTSLGSICIKGSALKERNYMGLSDCSSVDSCNISTSSEDNNGCGLNLKATELRLGLPGSQSPERGEETCPVISTKVDEKLLFPLHPSKDTAFSVSQKTVVSGNKRGFSDAMDGFSEGKFLSNSGVKAGDTKETSRVQPPKMKDANTQSTVPERPSAVNDASNRAGSGAPATKAQVVGWPPIRSFRKNTLASASKNNEEVDGKAGSPALFIKVSMDGAPYLRKVDLRTCSAYQELSSALEKMFSCFTIGQYGSHGAPGKDMLSESKLKDLLHGSEYVLTYEDKDGDWMLVGDVPWEMFIDTCKRLRIMKGSDAIGLAPRAMEKCRSRN

SEQ ID NO: 3045 - protein, 458 aa, Listeria monocytogenes EGD-e
MEEQKEELQRGLKNRHIQLIAIGGAIGTGLFLGAGKSIHLAGPSIMLVYLIIGAILFFVMRALGELLIHNPTTGSFTEFAEQFIGPWAGFITGWTYWFCWIVTGIAEITAVGMYVKFWVPDLPQWIPALACVLILLLFNLATVKAFGEIEFWFAIIKVVVIIALIVIGFVLVFIGYKHGTSTASFSNLVDYGGFFPNGIAGFLLAFQMATFSFVGIELVGVTAGEADDPERTLPKAINNIPIRILIFYIGALLVLMSIYPWSNIDPNTSPFVSVFTMIGIPAAAGIINFVVLTAAMSSCNSGIFSTSRMLYTLSAEGKAPKKMHHLSSNGVPATALITSTACLLIGVFLNYFLPEQVFILVTSIATICFIWVWGVILVAHLRFRHKHPEISEKSKFKMPLSPLMNWVSLIFFGGLLVILGFAADTRIALFVTPVWFLILGIAYQILKASNRKTKIRHN

SEQ ID NO: 3046 - protein, 437 aa, Moorella thermoacetica ATCC 39073
MTDSEAWPRSAAAFAEAVKLMPGGVNSPVRAFKSVGLTPPFIQRGEGAYLYDIDGHKYIDYVSSWGPLILGHRHPEVVDALEKTLREMGTSFGAPTELENELAREITTAMPAVEMVRLVNSGTEATMSALRLARGYTGREKVVKFAGCYHGHADYFLIQAGSGALTFGIPNSPGVPATVAANTIVAPYNDLAAVEDIFQKAGEEIAAVIVEPVAGNMGCVPPLTGFLAGLRTITKEYGSLLIFDEVMTGFRVAFGGAQALYGIRPDLTCLGKIIGGGLPVGAYGGRREIMERVAPSGPIYQAGTLSGNPLAVSAGLATLKVLKKPGTYERLESLSARLEKGLKEAAAEAGVPVTFNRVGAMFTTFFNPGPVTDYATATASDTRAFAAFFRAMLRQGIYLAPSQFEAAFMSLAHREDDIDCTIAAAREAFKGIAIGDS

SEQ ID NO: 3047 - protein, 492 aa, Shewanella oneidensis MR-1
MANYFNSLNLRQQLAQLGQCRFMDRSEFSDGCNYIKDWNIVILGCGAQGLNQGLNMRDSGLNIAYALRPEAIAQKRASWQKATDNGFKVGTFEELIPSADLVLNLTPDKQHSNVVSAVMPLMKQGATLSYSHGFNIVEEGMQIRPDITVIMVAPKCPGTEVREEYKRGFGVPTLIAVHPENDPNGDGLDIAKAYASATGGDRAGVLQSSFIAEVKSDLMGEQTILCGMLQTGAILGYEKMVADGVEPGYAAKLIQQGWETVTEALKHGGITNMMDRLSNPAKIKAFEIAEDLKDILQPLFEKHMDDIISGEFSRTMMQDWANDDANLLRWRAETGETGFENAPVSSEHIDEQTYFDKGIFLVAMIKAGVELAFDTMVSAGIVEESAYYESLHETPLIANTIARKRLYEMNVVISDTAEYGCYLFNHAAVPLLRDYVNAMSPEYLGAGLKDSSNSVDNLQLIAINDAIRHTAVEYVGAELRGYMTDMKSIVGA

SEQ ID NO: 3048 - protein, 215 aa, Oceanobacillus iheyensis HTE831
MDDTILDYLAGLTPNSPEWADQLEIVAEENNIPIMDRTSMHFVQVLLQIHQPKRILEVGTAIGYSALRMQDNTQASIVTIEKDEKRYRDAVENINNLNKDDCIKVIHGDALEEMSRLKENNERFDTIFIDAAKGQYGKFLELADLMVGNGGLVITDNVLFRGYVAAPEETPKRFRSMVKKLREYNEKLMNHPHYQTSILPIGDGVAISYKLEEGN

SEQ ID NO: 3049 - protein, 176 aa, Triticum aestivum
  misc_feature (105)..(105): Xaa can be any naturally occurring amino acid
  unsure (1)..(176): unsure at all Xaa locations
MAPTVMASSATSVAPFQGLKSTAGLPVSRRSNGASLGSVSNGGRIRCMQVWPIEGIKKFETLSYLPPLSTEALLKQVDYLIRSKWVPCLEFSKVGFIFREHNASXPGYYDGRYWTMWKLPMFGCTDATQVINEVEEVKKEYPDAYVRIIGFDNMRQVQCVSFIAFKPPGCEESGKA

SEQ ID NO: 3050 - protein, 155 aa, Staphylococcus aureus
GADWIVITAGWGLAVTMGVFAVGQFSGAHLNPAVSLALALDGNFDWSLVPGYIVAQMLGAIVGATIVWLMYLPHWKATEEAGAKLGVFSTAPAIKNYFANFLSEIIGTMALTLGILFIGVNKIADGLNPLIVGALIVAIGLSLGGATGYAINPAR

SEQ ID NO: 3051 - protein, 155 aa, Brassica rapa
MPVPLAPYPTPPATPLAPAYTPPSPANGSTGGQSQLVCSGCRNLLMYPVGATSVCCAVCNAVTAVPPPGTEMAQLVCGGCHTLLMYIRGATSVQCSCCHTVNLALEANQVAHVNCGSCKMLLMYQYGARSVKCAVCSFITSVGGSTSTTDQKLNN

SEQ ID NO: 3052 - protein, 605 aa, Salmonella enterica subsp. enterica serovar Paratyphi A str.
MLNAWHLPVAPFVKQHNDKLTITLWLSGENPPSRVTLRSEFDNEEISLAMRKQRRQPQPGVTAWRATLNIALGQPCRRYSFKLLWHDRQLWFTPQGFNRFPPARLEQFAVDVPDSGPQWVADQIFYQIFPDRFARSATREADQDRVYYHHAAGQEIVLRDWDDPLTPQAGGSTFYGGCLNGICEKLPYLKTLGVTALYLNPVFTAPSVHKYDTEDYRHVDPQFGGDRALLRLRRETQAQGMRLMLDGVFNHSGDSHAWFDRHNRSTGGACHHPDSPWRDWYSFSPQGVALDWLGYPSLPKLDYQSETLVDEIYRGEDSIVRHWLKAPWNMDGWRLDVVHMLGEAGGARHNLQHVAGITRAAKEAQPEAYIVGEHFGDARQWLQADAEDAAMNYRGFTFPLWGFLANTDIAYEPQHIDARTCIAWMDNYRAGLSHQQQLRMFNQLDSHDTARFKTLLGKDAARLPLAVVWLFTWPGVPCIYYGDEVGVDGANDPMCRKPFPWDERKQDGNLLALYQRMAKLRQRSLALRRGGCQALYAEGDVVVFVRVYQQQRALVAINRGEACEVALEALPLLNVAGWQCKTGSGDIREGRLSLPAISATVWMNR

SEQ ID NO: 3053 - protein, 212 aa, Populus tremula
MLLPLSFLLLASTLLPEAVRASGNPVLDVKGSGLLPGVPYYMISSEWPIVGGVVSLGNDINGTCPLDVILLENFCVTGTPVTFSIASGDQELFITDSTDVYISFDSTSNCTNETMVWMHESINGSSTELLTIGGVEGDVNTLFRIVNVGGSFVSNYKLVAYKPSSYDLALTTSDVGAVFDFTTGIRYLALTEPPLIVGFQVAYDYDGLKAVV

SEQ ID NO: 3054 - protein, 456 aa, Salmonella enterica subsp. enterica serovar Paratyphi A str.
MESNNKLKRGLSTRHIRFMALGSAIGTGLFYGSADAIKMAGPSVLLAYIIGGVAAYIIMRALGEMSVHNPAASSFSRYAQENLGPLAGYITGWTYCFEILIVAIADVTAFGIYMGVWFPAVPHWIWVLSVVLIICAINLMSVKVFGELEFWFSFFKVATIIIMIVAGIGIIVWGIGNGGQPTGIHNLWSNGGFFSNGWLGMIMSLQMVMFAYGGIEIIGITAGEAKDPEKSIPRAINSVPMRILVFYVGTLFVIMSIYPWNQVGTNGSPFVLTFQHMGITFAASILNFVVLTASLSAINSDVFGVGRMLHGMAEQGSAPKIFAKTSRRGIPWVTVLVMTIALLFAVYLNYIMPENVFLVIASLATFATVWVWIMILLSQIAFRRRLPPEEVKALKFKVPGGVVTTIAGLIFLVFIIALIGYHPDTRISLYVGFAWIVLLLIGWIFKRRRDRQLAQA

SEQ ID NO: 3055 - protein, 57 aa, Debaryomyces hansenii CBS767
MAFTCSDIFKIIIAIILPPLGVFLERGCASSFWINIVLTILGYIPGIIHALYVILKY

SEQ ID NO: 3056 - protein, 331 aa, Geobacillus kaustophilus HTA426
MKILITGADGFIGSHLTEELVRQGYDVKAFVYYNSFNSWGWLDTSPESIKKELEVFAGDIRDPHGVKEAMKGCDVVLHLASLIAIPYSYHSPDTYVDTNIKGTLNVLQAARELDIQKVVHTSTSEVYGTAQYVPIDENHPLQGQSPYSASKIGADQMAIAFYRSFETPVAIIRPFNTYGPRQSARAVIPTIITQIASGKRKIKLGSLHPTRDFNYIKDTVNGFISVMTHGESIGEVINIGSNFEVSIGETAKLIAEIMGVDIEIETDDVRIRPKKSEVERLWADNSKAKALLGWEPKYGGKEGFKRGLKETIEWFTDERNLSRYKADVYNI

SEQ ID NO: 3057 - protein, 381 aa, Haloarcula marismortui ATCC 43049
MSDDLKKGLEGVIVAESELSVIDGDAGKLVYRGYTIEDLAKGASYEEVLYLLWHGHLPNRDELSEFKQAMVDARGVDDDVISTVRQLAEADENPMAALRTAVSMLSAFDPAPEDAEPTDEMVNLETGRRITAKIPTIIAAFTRIRDGKEPVEPHDDLDHAANFLYMLNGEEPDDVLADVFDQALVLHADHGLNASTFSAITTASTLSDVHSAVTSAIGTLKGPLHGGANQDVMEMLKEVDDAESDPLDWVKNALDEGRRVSGFGHRVYNVKDPRAKILGERSKELGEAAGTLKWYEMSTTIEDYLMEEKGLAPNVDFYSASTYYQMGIPIDIYTPIFAMSRVGGWVAHVFEYIEDNRLIRPRARYVGKNTDETEFVPLDER

SEQ ID NO: 3058 - protein, 343 aa, Gossypium hirsutum
MENSTQESHLRSDNAVTYESPYPLYAMALSSTPAVTHLNYQRIALGSFIEDYTNRVHIISFDPESLTLITHPSLSFDHPYPPTKLMFQPHRKSPFSSSSDLLASSGDYLRLWEVGHSSIELISVLDNSKTSEFSAPLTSFDWNDVEPNRIGTSSIDTTCTIWDIEKGVVETQLIAHDKEVYDIAWGEGRVFGSVSADGSVRIFDLRDKEHSTIIYESPQPDTPLLRLAWNKQDLRYMATTLMDSNKVVILDIRSPTTPVAELDRHGASVNAIAWAPQSCKHICSAGDDTHALIWELPTVAGPNGIDPLSMYSASSEINQLQWSAAQPDWIAIAFSNKMQLLKV

SEQ ID NO: 3059 - protein, 495 aa, Debaryomyces hansenii CBS767
MLRSSSSFRGLNNKAIKIAQFVRHASTQEFDVVVIGGGPGGYVSAIKSAQLNLKTACIEKRGSLGGTCLNVGCIPSKSLLNNSQLFHQIQHDSKHRGIEISGDVSINIDTLQAAKDKAVKGLTGGVEMLLKKNGVTYFKGEGSFIDENNVNVKPIDGSEDIQISAKNIVVATGSEPTPFPGIEIDEERIVSSTGALALKEVPKKMSIIGGGIIGLEMASVWSRLGSEVTVIEFQNAIGAGMDGEVAKQIQKLLGKQGLKFKLGTKVTKGVRDGETVKIEVEDVKSGKKEDLDADVLLVAIGRRPFTNGLNFDKIGLEADDKGRLVIDNQFRTKHEHIRVIGDVTYGPMLAHKAEEEGIAAAEYIKNGHGHVNYANIPSVMYSHPEVAWVGANEEQLKEQGIKYKIGKFPFIANSRAKTNLDTDGFVKFIADAETQRVLGVHIIGSNAGEMIAEAGLALEYGASTEDIARTCHAHPTLSEAFKEAALATFDKPINF

SEQ ID NO: 3060 - protein, 451 aa, Vibrio fischeri ES114
MTTHFDYICIGGGSGGIASANRASMYGAKVALIEAQDLGGTCVNVGCVPKKVMWHGAQVAEAINLYAEDYGFDVELKEFKWNKMIESRQAYIGRIHESYDRVLGNNKVNVIKGFAKFVDAKTVEVNGEHYTADHILIAVGGRPTIPNIPGAEYGIDSNGFFELTEQPKRVAVIGAGYIAVEIAGVLHSLGTETHLFCRKESPLRSFDPMIIDTLVEVMNTEGPTLHTHSVPKEVVKEADGSLTLHLENGNTQNVDTLIWAIGRHPATDAINLDKTGVATNDRGYIKVDEYQETNVKGIYCVGDIMEGGIELTPVAVKAGRQLSERLFNGKTNAKMDYDLVPTVVFSHPPIGTIGLTEQEADEQYGKENVKVYTSGFTAMYTAVTKHRQPCKMKLVCAGEDEKVVGLHGIGFTVDEMIQGFAVAMKMGATKADFDAVVAIHPTGSEEFVTMR

SEQ ID NO: 3061 - protein, 155 aa, Staphylococcus aureus
GADWIVITAGWGLAVTMGVFAVGQFSGAHLNPAVSLALALDGSFDWSLVPGYIVAQMLGAIVGATIVWLMYLPHWKATEEAGAKLGVFSTAPAIKNYFANFLSEIIGTMALTLGILFIGVNNIADGLNPLIVGALIVAIGLSLGGATGYAINPAR

SEQ ID NO: 3062 - protein, 465 aa, Medicago truncatula
MGFLHSLLLALCLVLNLVFVCNGGRTSTFVRKVEKTIDMPLDSDVFDVPSGYNAPQQVHITQGDHVGKAVIVSWVTEDEPGSNAVRYWSKNSKQKRLAKGKIVTYRFFNYTSGFIHHTTIRNLEYNTKYYYEVGLGNTTRQFWFTTPPEIGPDVPYTFGLIGDLGQSYDSNKTLSHYELNPTKGQTVLFVGDLSYADNYPNHDNVRWDTWGRFAERSVAYQPWIWTVGNHELDFAPEIGETKPFKPYSHRYRTPYKASQSTSPFWYSIKRASAHIIVLASYSAYGKYTPQYKWLEQELPKVNRTETPWLIVLMHSPWYNSYNYHYMEGESMRVMYEPWFVKYKVDVVYAGHVHAYERSERVSNVAYNVVNGICTPIKDQSAPVYITIGDGGNLEGLATNMTEPQPEYSAYREASFGHAIFDIKNRTHAHYSWHRNQDGYSVEADSHWFFNRFWHPVDDSTTHVSH

SEQ ID NO: 3063 - protein, 155 aa, Staphylococcus aureus
GADWIVITAGWGLAVTMGVYAVGQFSGAHLNPAVSLALALDGSFDWSLVPGYIVAQMLGTIVGATIVWLMYLPHWKATEEAGAKLGVFSTAPAIKNYFANFLSEIIGTMALTLGILFIGVNKIADGLNPLIVGALIVAIGLSLGGATGYAINPAR

SEQ ID NO: 3064 - protein, 483 aa, Pseudomonas syringae pv. tomato str. DC3000
MTVRRTKIVATLGPASNSPEVIEQLILSGLDVARLNFSHGTPDEHKARAKLIREIAARHGRFVALLGDLQGPKIRIAKFTDKRIELKVGDKFTFSTAHPLTSGNQQIVGIDYPDLVKDCGVGDELLLDDGRVVMRVDTQTAHELHCTVLIGGPLSDHKGINRRGGGLTAPALTEKDKQDIKLAAEMDLDYLAVSFPRDAADMEYARQLRDESGGTAWLVAKIERAEAVANDEVLDALIRASDAVMVARGDLGVEIGDAELVGVQKRIILHARRHNKAVIVATQMMESMISSPMPTRAEVSDVANAVLDYTDAVMLSAESAAGSYPVEAVQAMARICVGAEKHPTGKTSSHRIGHSFTRCDESIALAAMYTANHFPGVKAIIALTESGYTPLIMSRIRSSVPIYAFSPHRGTQARAAMFRGVYTVPFDPGALPPGQVSQAAVDELLKRGLVEQGDWVILTKGDSYHTIGGTNGMKILHVGDPLV

SEQ ID NO: 3065 - protein, 395 aa, Rhodopseudomonas palustris CGA009
MTEAVIVSTARTPIGKAYRGALNATEGATLLGHAIEHAVKRAGIDPKEVEDVVMGAAMQQGATGGNIARKALLRAGLPVTTAGTTIDRQCASGLQAIALAARSVLFDGVEIAVGGGGESISLVQNDKMNTFHAVDPALEAIKGDVYMAMLDTAETVAKRYGISRERQDEYSLESQRRTAAAQQGGKFNDEIAPISTKMGVVDKATGAVSFKDITLSQDEGPRPETTAEGLAGLKAVRGEGFTITAGNASQLSDGASATVIMSDKTAAAKGLKPLGIFRGMVSYGCEPDEMGIGPVFAVPRLLKRHGLSVDDIGLWELNEAFAVQVLYCRDKLGIDPEKLNVNGGAISVGHPYGMSGARLAGHALIEGRRRKAKYAVVTMCVGGGMGSAGLFEIVH

SEQ ID NO: 3066 - protein, 281 aa, Zea mays
KRGLVFQVVLTPTHLAIVMEYAAGGELFERICNAGRFSEDEARFFFQQLISGVSYCHSMQICHRDLKLENTLLDDSIAPRLKICDFGYSKSSVLHSQPKSTVGTPAYIAPEVLARKEYDGKVADVWSCGVTLYVMLVGAYPFEDPDEPKNFRKTLTRIISVQYAVPDFVRVSMECRHLLSRIFVAKPEQRITIPEIKNHPWFLKNLPIEMTDEYQMNLQLVDMNVPSQSLEEIMSIILEARKPGDGLKHAGQLPGLGSMELDDIDVDDIDVEDSGDFVCAL

SEQ ID NO: 3067 - protein, 212 aa, Populus tremula
MLLPLSFLLLASTLLPEAVRASGNPVLDVKGLGLLPGVPYYMISSEWPIVGGVVSLGNDINGTCPLDVILLENFCVTGTPVTFSVASGDQELFITDSTDVYISFDSTSNCTNETMVWMHESINGSSTELLTIGGVEGDVNTIFRIVNVGGSFVSNYKLVAYKLSSYDLALTTSDVGAVFDFTTGIRYLALTEPPLIVGFQVAYDHDGLKAVV

SEQ ID NO: 3068 - protein, 152 aa, Oryza sativa (japonica cultivar-group)
MAPKAEKKPAAKKPAEEEPAAEKAPAAGKKPKAEKRLPAGKGEKGGAGEGKKAGRKKGKKSVETYKIYIFKVLKQVHPDIGISSKAMSIMNSFINDIFEKLAAEAAKLARYNKKPTITSREIQTSVRLVLPGELAKHAVSEGTKAVTKFTSA

SEQ ID NO: 3069 - protein, 437 aa, Beta vulgaris subsp. vulgaris
SSNLDLRSELQELIPEQQERLKKIKKEFGSFQLGNINVDMVLGGMRGMTGLLWETSLLDPEEGIRFRGFSIPECQKLLPAASAGAEPLPEGLLWLLLTGKVPSKEQVDALSADLRKRASIPDHVYKTIDALPITAHPMTQFCTGVMALQTRSEFQKAYEKGIHKSKFWEPTYEDCLSLIAQVPVVAAYVYRRMYKNGQVIPLDDSLDYGGNFAHMLGFDSPQMLELMRLYVTIHSDHEGGNVSAHTGHLVGSPLSDPYLSFAAALNGLAGPLHGLANQEVLLWIKSVVDECGENISTEQLKDYVWKTLNSGKVVPGFGLGVLRKTDPRYTCQREFALKHLPDDPFFQLVSKLYEVVPPILLELGKVKNPWPNVDAHSGVLLNHYGLTEARYYTVLFGVSRSLGICSQLIWDRALGLPLERPKSVTMEWLEKFCKRRA

SEQ ID NO: 3070 - protein, 545 aa, Methanopyrus kandleri AV19
MAMLAGDGRQVLILPEGYQRFVGRDAQRMNIMAARVVAETVRTTLGPMGMDKMLVDEMGDVVVTNDGVTILEEMDIEHPAAKMVVEVAKTQEDEVGDGTTTAVVLAGELLHKAEDLLQQDIHPTVIARGYRMAVEKAEEILEEIAEEIDPDDEETLKKIAKTAMTGKGVEKARDYLAELVVKAVKQVAEEEDGEIVIDTDHIKLEKKEGGGLEDTELVKGMVIDKERVHPGMPRRVENAKIALLNCPIEVKETETDAEIRITDPEQLQAFIEEEERMLSEMVDKIAETGANVVFCQKGIDDLAQHYLAKKGILAVRRVKKSDMQKLARATGARIVTNIDDLSEEDLGEAEVVEEKKVAGDKMIFVEGCKDPKAVTILIRGGTEHVVDEAERAIEDAIGVVAAALEDGKVVAGGGAPEVEVARQLRDFADGVEGREQLAVEAFADALEIIPRTLAENSGLDPIDVLVQLRAKHEDGQVTAGIDVYDGDVKDMLEEGVVEPLRVKTQALASATEAAEMILRIDDVIAARELSKEEEEEEEEGGSSEF

SEQ ID NO: 3071 - protein, 192 aa, Schizosaccharomyces pombe
MSVFRRSVQCVGVLPSILAQRSSLLARPANLQFLKTNSSKFVPQVTANVSRRMYHKNVLDHYNNPRNVGTLPKGDPDVGIGLVGAPACGDVMRLAIRVNKDGVIEDVKFKTFGCGSAIASSSYVTTMVKGMTLEEASKIKNTQIAKELCLPPVKLHCSMLAEDAIKSAVKHYRSKQLTPVGTTAGAIESATA

SEQ ID NO: 3072 - protein, 361 aa, Candida albicans SC5314
MSSIFKLSTRTIMTSTTTNSIKPKVLRLGITHYAQHKWDQLSKIAEIIDCESANREEFIHDLQTKYNDITNISRTFASIKQTGRFDNELAKHMPTTLKAISHCGAGYDQIDVTPFTEIGVQISNVTVPVEGPTADTAIYLVLACMRNFQIGHNILVNGEWLQSKNKKKKKISHAFSIGNSPEDKVVGILGMGGIGRAIRDRLKPFGFGKIVYHNRNRLSEELEAEAEYLSMDELLNQSDIIIVSVPLNAHTKHLVNKSLIEKMKDGVILINTARGAVIDEKVLPELIKSGKIGSFGADVFENEPEVSPELYELPQVVSLPHMGTYTVEAVRNMESWVVDNIESYIKTGKVKTIVPEQYNAF

SEQ ID NO: 3073 - protein, 423 aa, Zea mays
  misc_feature (185)..(185): Xaa can be any naturally occurring amino acid
  unsure (1)..(423): unsure at all Xaa locations
RPGGPNQLESSSSQLSRRAQPIPLPPAYTAHNSLLHLSLSLSPVSPPVCVQPHGDPRRRERQRARERRRARGKFNCYPAGVGLPEARRALAEHLSSDLPYKLTTDDIFVTAGGTQAIEVVVSVLAQPGTNILLPRPGYPNYEARAGLHNLEVRRFNLIPERGWEIDIDGLESIADKNTTAMVIIXPHNPCGSVYTREHLAKVAEVARKLGILVIADEVYGNLVFGDTPYVPMGVFGHIAPVLSLGSLSKRWIVPGWRLGWVAVCDPNKILQETKIIASITNFLNVSTDPATFVQGALPHILENTKEDFFRRIIGLLAETSEICYREIKDIKCITCPHKPEGSMFVMVKLNLYLLEGIHDDIDFCCKLAKEESVILCPGEMDLICWKKSYLTKTHFGSSSCLFRVTGIPGLNCMFALRNALRKQ

SEQ ID NO: 3074 - protein, 615 aa, Corynebacterium diphtheriae NCTC 13129
MRSIAKILRSASALWPFYVGVVLSAITVAVLALITPFIIKDATDTIVEAVNGNMAIDNATKKVIWLSLGLLVAQLANTILNNIGGYVGDVLAAKLRQILSTRYFAQLLGMPQRYFDDQVTGTIIARLDRSITSITQALQAMANNFFPMLISVAAVLGIAATYYWPLAVLLATIIPIYMWLTSLTSKKWQVIEEKKNEQIDLAGGRFAEVVSQVKVVKSFVSEPRELRSFGEHYEETVTFTRQQSRFWHFMDTLRTGSMNLVFFAIYLVLFYRTLHGYFTLGDMVLLIQLVNMARTPMTMMSWMVDTTQRAITGSKDYFEVMERQLEPTVNPEISAATATTGLPELNTAPTKPLVPATEQPAFDFRNVSFAYNEGEEVLHNVSFHANIGQKIALVGESGGGKSTLVNLLLGLYKPTHGALNVCGQHASEISAEDLRATVGVVFQESNLFSGTVRENIAYARPDASLEEVIAVAKRANAHDFIVNFPQGYDTLIGERGLRLSGGQKQRVSVARAMLKDAPILVLDEATSALDTKSELAVQAGLEELMRGRTTLIIAHRLSTIADVETIITLKNGAVDEIGSPQELAHSGGIYAELLKLTANASDDSKEQLKRFGFHS

SEQ ID NO: 3075 - protein, 547 aa, Magnetococcus sp. MC-1
MAKFVFITGGVVSSLGKGLAAASLAALLQARGYRVTMQKLDPYINVDPGTMSPFQHGEVFVTDDGAETDLDLGHYERFLGLPMGKANNWTAGRIYQHVIKRERRGDYLGATVQVIPHITDAIKNAVRSVGNDVDIALIEVGGTVGDIESLPFMEAIRQLRNDLGKQETMFVHLTLLPYIPTSGELKTKPTQHSVKELLAIGIQPDILVCRSDRAVPETEKRKIALFCNVDQQNVISCVDQDTIYKVPFALYQEGFARKVLDHLGMGVREPDLSAWEAVLEAVVNPAYKTTIAIVGKYVELKDAYMSLAEALSHGGIANNAKVSIRWVDAENVHDEEAESLLGGVDGILVPGGFGERGTHGKLAAIHYARTNKVPYFGICLGMQMAVVEFARNVAGLAGAHSTELSDDTPHPVIGLLTEWVDGGTLQKRDKDGDKGGTMRLGAYPCVLKPDSLAAWIYPQGEIMERHRHRYEFNNAYREQLEQAGMVFSGTSPDNELVEVVEIPDHPFFIACQYHPEFMSRPREPHPLFTAFVRAALEQRKRRKGQEA

SEQ ID NO: 3076 - protein, 320 aa, Leptospira interrogans serovar Copenhageni str. Fiocruz L1-130
MGAPSTSTATEKATRDGYGDALHELGASRPDVVVLDADLSGSTKTNKFAKAFPDRFFNVGVAEQNLVGHAAGLALSGLVPFASSFAMFLSGRAWEIVRNSVVYPFLNVKLVASHGGITVGEDGASHQCIEDFAIMRVIPEMTVICPSDYNECKQIIHAIADYKGPVYVRVGRPNVPIIERENYKFQIGKAEVMREGKDVLIIANGVLVNEAIKASEELSKEGIQVTLLNMATIKPIDKETILKYAKECGIVVTCEEHNVVGGLGSAVSEFLSEEYPVHVLKVGMKDQFGKSGTWKELLDYFGLRSKNIVETVKKAKTLKK

SEQ ID NO: 3077 - protein, 552 aa, Lactobacillus johnsonii NCC 533
MNNLGNKVIYQIYPKSFYDSNNDGIGDLRGIIQKIDYIKKLNVDFIWFNPFFVSPQNDNGYDIADYKKIDPRFGTMADFEELVAKLKDINVNVMLDMVLNHCSTEHEWFKKALAGDKKYQKFFYLRKGKDGKLPNNWQSKFGGPAWSKFGDTDYYYLHLYDPTQADLDWHNPEVRAALIDVINFWRSKGVHGFRFDVINVTGKDTVLVDSTDPVQEKSLYTDTPVVQQYLKELNAKSFGQDPESVTVGEMSSTTIENSIAYTRPQDHELSMVFTFHHLKVDYKNGEKWSKMSFDFKKLKDIMLTWNSKIDQGGGWQALFWNNHDQPWALNRFGDTGKYHDKSAEMLALALHLLRGTPYIYMGEEIGMMDPHYTSMKDYVDIEALNAYDALIAKGMNKKEAFEIVQSKARDNSRVPMHWDNSKYAGFSESKPWLMPTDQDKVNGEKELREGEIFNFYQKLIKLRKSEELISAGHIKPLLMDHPQVMAYERYLDNSDEKLLVFANFYGKETKVEIPTEYIDRDGEILIQNYDEEIVTLPSTLELKPYEALAIKI

SEQ ID NO: 3078 - protein, 447 aa, Arabidopsis thaliana
MVKFENGYSVETVFDGSKLGIEPYSIEVLPNGELLILDSENSNIYKISSSLSLYSRPRLVTGSPEGYPGHVDGRLRDAKLNHPKGLTVDDRGNIYVADTVNNAIRKISEGGVTTIAGGKTVRNGGHVDGPSEDAKFSNDFDVVYVGSSCSLLVIDRGNKAIREIQLHFDDCAYQYGSGFPLGIAVLVAAGFFGYMLALLQRRVGSIVSSHNDQEMFEADPDQKPMKHSRPSLIPAGDEQLEKQEETFVVSLGKLVSNAWESVMEILRKKQTGTSFQQYHGTTKQSAAFSTSTPWPIQESFVIRDEDGPPPVEPRNPTPRKTYAFMSKDAEKMQQLRQSRAFYSSWDAEFPNQQQQQQKQHQKHQHQQQQQQQHRRHYSSIPHTYYEQDSEKSNEIVFGAVQEQSSKRVAKPKPKPIESGDQMNNNTQQNLHYRSHSVSYPYGYYPNT

SEQ ID NO: 3079 - protein, 475 aa, Oryza sativa (japonica cultivar-group)
MAFREDKYVRFHDWRSEHSVGSEKTVLEGRHNVFDSLMDRTVGAFSFLGNSSHPETLNKPASEEKKSKTRVLDPQGPFLQRWNKIFVISCLIAVSVDPLFFYIPVIDGDNICLYLDKKLEIIASVLRFFTDIFYLLHIIFQFRTGFIAPSSRVFGRGVLVEDTFAIAKRYLSTYFLIDFLAVLPLPQVLVLVVLPRLQGSSVMTAKNILMVIVICQYVPRLIRIIPLYLQITRSAGIITETAWAGAAFNLLIYMLASHVLGALWYLLSIQREDTCWKDACSRHDGCDSGSLFCGSNAARNNSFLQDFCPTNGTDNADPTFGIYLPALQNVSQSTSFFEKLFYCFWWGLQNLSSLGQNLKTSTYTWENLFAVFVSTSGLVLFALLIGNVQTYLQSASVRIEEMRVKRRDTEQWMAHRLLPDNLKERILRHEQYRWQETRGVDEEGLLSNLPKNLRREIKRHLCLSLLMRVFSHTFA

SEQ ID NO: 3080 - protein, 323 aa, Nostoc sp. PCC 7120
MITTTSNTKFSTDIVRNYLQDIVRVPLLTHEEEIVYSKQVQQMMVLQKKKETLKKQLNHEPSQKELAKYVQLSEIEVKDIFQQGTQAKQKMMVANLRLVVAIAKKYQRRNLELMDLIQEGSLGLERGVEKFDPTRGYKFSTYAYWWISQAMTRAISQQSRTIRLPIHITEKLNKFKKVQRELSQKLKRSPSADEIAEKMKLNPAQIRELLMISRQPASLDKQVGDNEDTELQELLTEVPETSPEIQVTQNLMRQDIYLSLRELTPQQQQVLILHYGLEDNYELTLTQVAQHLNISERRVRYLEKQALSYLRRCQTNLREYIFS

SEQ ID NO: 3081 - protein, 212 aa, Populus tremula
MLLPLSFLLLASTLLPEAVRASGNPVLDVKGLGLLPGVPYYMISSEWPIVGGVVSLGNDINGTCPLDVILLENFCVTGTPVTFSVASGDQELFITDSTDVYISFDSTSNCTNETMVWMHESINGSSTELLTIGGVEGDVNTIFRIVNVGGSFVSNYKLVAYKLSSYDLALTTSDVGAVFDFTTGIRYLALSEPPLIVGFQVAYDHDGLKAVV

SEQ ID NO: 3082 - protein, 478 aa, Burkholderia mallei ATCC 23344
MHRATKIVATIGPASSSPEVLSQMMHAGLDVVRLNFSHGSADDHRERAEMVREAARRVGREIAIMADLQGPKIRVGKFEAGKTTLTPGQPFILDATCELGNDERVGLDYKDLPRDLKPGDVLLLNDGLIVLKVDRVLGDEIHTTVKVGGDLSNNKGINRQGGGLSAPALTAKDMEDIRTAMSLGADLVAVSFPKNATDMEMARQLANIAGAPYGIKPKMIAKIERAEAIPALQEILDASDGIMVARGDLAVEVGNAAVPALQKRMIRMARESNKLVITATQMMESMIHAPVPTRAEVSDVANAVLDGTDAVMLSAETATGKYPAVTIEAMAAVCVEAEKSEHVELDKDFLDRTFTRIDQSIAMGALFTAYHLGAKAIVALTESGATALWMSRHYTHVPIFALTPRVGSERAMALFRNVTPLHVDFNSDRDSALQQALELIVRRGYVAHGDMVVLTVGEPMGQAGGTNTLKIVRVGEHY

SEQ ID NO: 3083 - protein, 231 aa, Corynebacterium glutamicum ATCC 13032
MIKAIFWDMDGTMVDSEPQWGIATYELSEAMGRRLTPELRELTVGSSLPRTMRLCAEHAGITLSDADYERYRAGMFARVHELFDESLVPNPGVTELLTELKALEIPMLVTTNTERDLATRSVAAVGNEFFIGSIAGDEVPTAKPAPDMYLEAARRVGFDPSECLVFEDSYNGMLGAVTAGCRVIGLHPEEVQAPEGVVPLRSLHGKNSFEGVTAEMVTAWYHQIEPAGVAK

SEQ ID NO: 3084 - protein, 214 aa, Populus tremula
MLLPLSFLLLASTLTLLPAAVRASGNPVLDVKGLGLLPGVPYYMISSEWPIVGGVVSLGNDVNGTCPLDVILLENFCVTGTPVTFSIASGNQELFITDSTDVYISFDSTSNCTNETMVWMHESINGSSTELLTIGGVEGDVNTIFRIVNVGGSFVSNYKLVAYKLSSYDLALTTSDVGAVFDFTTGIRYLALTEPPLIVGFEVAYDYDGLKAVV

SEQ ID NO: 3085 - protein, 586 aa, Vibrio vulnificus YJ016
MSSKNNKNLGILLKLSTFVSPYRWRVAAALVALVATASLTLSVGYGVRMLIDQGFAQQSLQELTNAIQFIVGVTLCIAIGTFFRFYLVSSVGERVSADIRLAVFNHVITLHPSYFETNSSGDIMSRLTTDTTLLQSIIGSSFSMAMRSALMCVGAIIMLFATNFKLTLIVLASVPFVLVPILFYGRRVRALSRQSQDSMADVGSYAGEAIEHIKTVQSFSSEQHEKASFAVEVEKAYEIGRQRVKQRAILISGVIVIVFSAIAGMLWVGGSDVIHGKMSAGDLGAFVFYAIMVASSTATISEVLGELQRAAGATERLIEILQVESDIKAPSHHQSIPADIPAEVSFDLVNFNYPSRPNQPAIKGLNLTAEQGKVLALVGPSGAGKTTLFELLQRFYDPQQGHVLLGGIDIRQFDPNELRQQMALVPQQPALFSHDVFHNIRYGNPDATDEQVIEAAKKAHAHEFIEKLPEGYRSFLGERGVRLSGGQKQRIAIARAILKDPKILLLDEATSALDSESEHHVQQALEALMKGRTTLIIAHRLSTIQHADKIAVLDNGELVDIGNHHALMQSCELYQRLVALQFKHLN

SEQ ID NO: 3086 - protein, 240 aa, Zea mays
IGPDIDILAPDVYTNEMMMGWMMDQYSIIRRKISPAVVTGKPVTMGGSQGRNTATGTGAFYIMQGMLPKFDQYPENTTVAVQGFGNAGMVVAECLYQDGYKVVAISDSQGGIYNEQGIDIPAVIDYKQRHRTLAGMYCDQAICDLGENQQISNAELLALDVDVLIPAALENQITRDNADQVRARYIFEVANGPTTTAADDILASKGIYVFPDILVNAGGVTVSYFEWVQNRSGLYWSAKE

SEQ ID NO: 3087 - protein, 119 aa, Triticum aestivum
MDPYKYRPSSAYNAPFYTTNGGAPVSNNISSLTIGERGPVLLEDYHLIEKVANFTRERIPERVVHARGISAKGFFEVTHDISNLTCADFLRAPGVQTPVIGRFSTGVHERASPETMRDI

SEQ ID NO: 3088 - protein, 528 aa, Triticum aestivum
  misc_feature (348)..(348): Xaa can be any naturally occurring amino acid
  misc_feature (442)..(442): Xaa can be any naturally occurring amino acid
  unsure (1)..(528): unsure at all Xaa locations
MATESLRMLLGDASPWSVAGAAAAVALLWLGAWVLEWAWWTPRRLGRALRAQGLRGTRYRLFTGDVPENARLSREARLQPLPRGSHDITPRVQPMSCNVIKEHGKMSFTWFGPTPRVTIPDPELVREILSNKFGHYGKQKSSRFGKLLADGVANHEGDKWAKHRRILNPAFHHEKIKRMLPVFSACCEEMITRWENSMPTGGFCEIDVFPEFQNLTGDVISRTAFGSNYQEGMKIFQLQGELCERLIQAFQTLFIPGYWFLPTKNNRRMRAIDREIRTILRGIIGKKERAIKNGEASSDDLLGLLLESNMQQANGKANLGMSIEDIIEECKLFYFAGMETTSVLLTWXTLVVLSMHPEWQEQAREEVLHQFGRTRPDFENLSRLKIVTMILYEVLRLYPPAIFLARRTYKAMELGGIRYPAGVNLMLPLIFIHHDPDIWGKXDAKEFNPQRFADGISNAAKHPAAFFPFGGGPRICIGQNFALLEAKMALSTILQRFSFELSPSYIHAPYTVLILQPQHGAQIRLKKI

SEQ ID NO: 3089 - protein, 486 aa, Listeria monocytogenes EGD-e
MKKETHGEIRRDLKTRHLSMIAIGGSIGTGLFLASGNAIHTAGPGGALVAYVAIGIMVYFLMTSLGEMATYMPVSGSFSTYASRFVDPAFGFALGWNYWFNWAITLAVDISTAAIIVQFWLPNTPAWLWSAIFLILIFGLNALSVKAYGESEYWFSIIKVATVIIFLIVGVLTIVGILGGEVIGFSNFTAGDAPFKGGFFAILGTFLIAGFSFQGTEMVGIAAGESATPETSVPKAIKQVFWRILLFYIFAIFIIGMIIPYTNPNLLSAEATDVAISPFTLVFEKAGLAFAASVMNAVILTSVLSAGNSGLYASTRMLWAMARDKKAPKFLGKVNRRGIPMAALIVTTIVGAMTFITTLTENGTVIYTWLLSASGLTGFIAWVGIAISHYRFRKAFIKQGHDLSELKYKAKFFPFGPILALVLCILVIVGQDYAAFLKPEFTNPAWWQKIGISYIGLPIFLVFWLSFKFTNKTKVIPLEDCKFDQK

SEQ ID NO: 3090 - protein, 466 aa, Caulobacter crescentus CB15
MGPAHEARDDGGGGGGMIAELAKSLSDLLTAERARFTVEHPRSVAMAKAAGAHWRGGAPMHWMNDWASPSPIFAAQGVGAQITDVDGKLYDDFCLGDTPSMFGHGDPSVAAAVSDQIKRGAGFMLPTASAAIVGKLLSERFGLPLWQAATTASDANRAAIRWARAVTGRPVILVFDGCYHGMVDDAFVVLKDGAPVMKPGLLGQVHDLTATTRVVAFNDLAALEAALAPGDVAAVLAEPVMTNCGMILPEPGFLEALRRLTREAGTLLVIDETHTISTGPGGYTRAHGLEPDVFVLGKAVAGGVPAAVWGVTAELSARMDAAQQRIGPGQSGIGTTLSGNALAMAAMRAMLSEVMTEAAYGKMLAGAERLVAGLNAVIAARRLPWSVVHVGARVELVFADPPPKNAAQMRKVLDHEAVEALHLWLINRGVLIAPFHNMMLVSPVTEDAAIDRLVAAVDGFAAAMGE

SEQ ID NO: 3091 - protein, 253 aa, Listeria monocytogenes EGD-e
MTAYPQFDVILKALNLSSVGVIITDPEQKDNPIIFVNTGFENITGYAKEEALGSNCHFLQGDDTDKEEVAKIRHAINEKSTANVLLKNYRKDGTSFMNELTIEPIYDDHEHLYFVGIQKDVTTEHDYQLELEKSLTEIEKLSTPIVPIKENICVLPLIGSLTHDRFQHMSEYVSEYMDHGKEDYLIMDLSGLAEFNEDAVMNLVKFHGFMKLTGVELIITGISPKFAMTLIRYEENLASLTTYSTIKEALQFY

SEQ ID NO: 3092 - protein, 397 aa, Glycine max
MESAFASASAITDQRQKIEQYKQILAAVISSNDIVQARKFIDHMLSDDVPLVVSRQLLQTFAQELGRLEPEIQKEIAHYSLAQIQPRVVSFEEQVLVIREKLAELYESEKQWSKAAQMLSGIDLDSGMRVIDDGFRLSKCVQIACLYLEDDDAVNAEAFINKASFLVSNSQHEVLNLKYKVCYARILDLKRKFLEAALRYYDISQIEKRQIGDEEINEEALEQALSAAVTCTILAAAGPQRSRVLATLYKDERCSKLKIYPILQKVYLERILRKPEIDAFAEELKPHQQALLPDNFTVLDRAMIEHNLLSASKLYTNISFDELGTLLGIPPHKAEKIASRMIYEDRMRGSIDQVEAVIHFDDDTEELQRWDQQIVGLCQALNDVLDSMAKKGFPVPV

SEQ ID NO: 3093 - protein, 474 aa, Campylobacter jejuni RM1221
MKKLTNDFGNIIADNQNSLSAGAKGPLLMQDYLLLEKLAHQNRERIPERTVHAKGSGAYGEIKITADLSAYTKAKIFQKGEITPLFLRFSTVAGEAGAADAERDVRGFAIKFYTKEGNWDLVGNNTPTFFIRDAYKFPDFIHTQKRDPRTHLRSNNAAWDFWSLCPESLHQVTILMSDRGIPASYRHMHGFGSHTYSFINDKNERFWVKFHFKTQQGIKNLTNQEAAELIAKDRESHQRDLYNAIENKDFPKWKVQVQILAEKDIEKLGFNPFDLTKIWPHSLVPLMDIGEMILNKNPQNYFNEVEQAAFSPSNIVPGIGFSPDKMLQARIFSYPDAQRYRIGTNYHLLPVNRAKSEVNTYNVAGAMNFDSYKNDAAYYEPNSYDNSPKEDKSYLEPDLVLEGVAQRYTPLDNDFYTQPRALFNLMNDDQKTQLFHNIAASMEGVDEKIITRALEHFEKISPDYAKGIKKALEK

SEQ ID NO: 3094 - protein, 482 aa, Caulobacter crescentus CB15
MTALNLVETAALIDGQWVRGEASFDVLNPADGTLIAAVADLGAAETTLAIDAAHRALPAWAARTAKERGAILRRWSDLILAHADDLARLMTDEQGKPLAEAKGEVVYGASFIDWFAEEAKRAYGHTIPTPMPGKRLASIKQPVGVCAAIAPWNFPIAMITRKVGPALAAGCTVVVKPAAETPLSALAIARLATEAGVPAGVLNIVTTTRSSEVGKVLCDDSRVRKLSFTGSTPIGKVLYQQCAGTMKKLSLELGGNAPFIVFDDADLEAAVDGAIASKYRNAGQTCVCANRLIVQSGIHDAFAARLAEKVAALKVGPGTGEGVQIGPLINEKALTKVVGLVSGAVQAGAEVLTGGDVHGLGGHFYQPTVLVGATPEMRIFQEEIFGPVAPIVKFETEAEAVELANATPFGLAAYFYSRDVGRCWRVAEQIEAGMVGINEGLISTEVAPFGGVKESGLGREGASEGLDEYLETKYLCFGGVAG

SEQ ID NO: 3095 - protein, 509 aa, Arabidopsis thaliana
MGRDFLVLSILILLLSGIVSSAPSANSPAKILNGFISNHGSSLMKWLWSLKTTTKTTIATRSMVKFENGYSVETVFDGSKLGIEPYSIEVLPNGELLILDSENSNIYKISSSLSLYSRPRLVTGSPEGYPGHVDGRLRDAKLNHPKGLTVDDRGNIYVADTVNNAIRKISEGGVTTIAGGKTVRNGGHVDGPSEDAKFSNDFDVVYVGSSCSLLVIDRGNKAIREIQLHFDDCAYQYGSGFPLGIAVLVAAGFFGYMLALLQRRVGSIVSSHNDQEMFEADPDQKPMKHSRPSLIPAGDEQLEKQEETFVVSLGKLVSNAWESVMEILRKKQTGTSFQQYHGTTKQSAAFSTSTPWPIQESFVIRDEDGPPPVEPRNPTPRKTYAFMSKDAEKMQQLRQSRAFYSSWDAEFPNQQQQQQKQHQKHQHQQQQQQQHRRHYSSIPHTYYEQDSEKSNEIVFGAVQEQSSKRVAKPKPKPIESGDQMNNNTQQNLHYRSHSVSYPYGYYPNT

SEQ ID NO: 3096 - protein, 539 aa, Glycine max
MLEGRSCVVPRLFPSSCQADNKWSFMTYLPDLDIKNGKRPLDTDGEEEPQPRKVNRRVDSRHHGETTRFLFQKQSCHADDSVVPQMDQDRRKDCVLLSNWQRVEKADAFSAQLLDEREQHRAGDSLVVSTDLQSNKKEEDQLEDSSDSGVQQSDEQKMEQEVEGDLLDAGDQQPPDDQEEHHGGDSSDSGSLLPRMNRDSSIACLSRCSRSDYGSLASLNRSFRNTIRSGELYRWRRLNGIIEHWIYFSCALLEWEAYDPIRERWMHLPRMASNECFMCSDKESLAVGTELLVFGREMRSHVIYRYSLLTNSWTSGMRMNAPRCLFGSASLGEIAILAGGCDLDGHILDSAELYNSENQTWELLPSMNKPRKMCSGVFMDGKFYVIGGIGGKDSKLLTCGEEYNIQTRTWTEIPNMSPGRSARGAEMPATAEAPPLVAVVNDELYAADYADMEVKKYDKERRVWVTIGRLPERAVSMNGWGLAFRACGDMLIVIGGPRTHGEGFIELNSWVPSEGPPQWNLLARKRSGNFVYNCAVMGC

SEQ ID NO: 3097 - protein, 439 aa, Caulobacter crescentus CB15
MPDFGANDLDAFWMPFTPNRRFKRHPRMLSSASGMWYRTPESREVLDATSGLWCVNAGHDRPKIREAIQKQAAEMDYAPCFNMGHPLAFQFASRLAQITPKGLDRIFFTNSGSESVDTALKIALAYHRARGKGTKTRLIGRERGYHGVGFGGISVGGIPKNRMYFGSLLTGVDHLPHTHGLPGNTCAKGQPENGAHLADDLERIVALHDASNIAAVIVEPVAGSTGVLIPPKGYLERLRAICDKHDILLIFDEVITGFGRVGAPFAAERFGVTPDLICMAKGLTNAAVPCGAVAASGKIYDAMMDGADAPIELFHGYTYSAHPLACAAGLATLETYREDDLFARAAGLEGYWQDAMHSLADARHVVDVRNLGLVAGIELEPRPGAPTARAMEVFETCFDEGLLIRVTGDIIALSPPLILEKDHIDRMVETIRRVLGQVD

SEQ ID NO: 3098 - protein, 713 aa, Haloferax mediterranei
MSFDRRTFLKGLGLSAIGLAGGTGAGNDDLAFVSQAAAATPPEQTVNFADDVIYQLISDRFRDGNPNNNPTGELASDDCSNLRKYCGGDWQGIIDKIQSGYLTDLGVSAVWISPPFENITAVDSDIGTSYHGYWARDFTDPNEFFGDMETFKQLVDVAHQNGIKVVIDFVPNHTSPSTSDGELEDGALYDNGSYVAAYNDDPKSYFHHNGGTDYSSYEDQIYRNLYNLADFDHHEAYIDQYLKDAIKQWLDAGIDGIRVDAVAHMPPKWQKTLVDTIYDHRPVFTFGEWFLGADQSNPRYYEFSNDSGMSLLDFRFGQEIRQVLRDFTDDWYGFRDMLQETESEHDQVIDQVPFIDNHDMPRFTVADGDTRNTDMALAVLLTSRGTPAVYYGTEQYLTGGNDPDNRKPMPSFDTTTTAYKVIQALTSLRSSNRRSPTADTEERWINSDVFVYEREFGDNVVLVAINRSLDWYDVSGLQTSLPEGTYDDALGGTLDGFSTTVNTDGSIDTFSVGPQTVCVWEHTGTTAEPALGHVGPTMGQPGHTVVLSGDGFGSTEGSVEFGTTSASITSWSNTEIEATVPAVSGGYYDVTVTDANGAQSDPFSGYEVLSGDQISARFVVNDATTDVGENVYVVGNVHELGDWDTDRAVGPFFNQVVHEYPNWYYDVNLPAGTDIEFKFVKIASDGTVTWESGSNRQYTTPTDSTGEYSGTWK

SEQ ID NO: 3099 - protein, 413 aa, Oryza sativa (japonica cultivar-group)
MEAAAAAAAALLSPPAAAAPSRRPGTPGATSLPFARRRGVAAVKGLGRQQLTCRRRGVVVRAASWSPSGPESLPPPPSSSIAPLQMESPVGQFLSQILATHPHLLPAAAEQQLEQLQTDRDAAKDNGGDKPAPSDGDIVLYRRIAEVKEKERKRALEEILYALVVQKFVEAGVSLVPALSHSISSSGRVDQWAESVEGKLEKMHSQEAYEMIENHLALILGQRQADATVAAISKLRVGQVYAASVMYGYFLKRVDQRFQLEKSMKTLPWGSEEEDKLNQVMTTDSRPSPQTSTSHPEMASWTSPNFSAGGPSQSVKPCRLRSYVMSFDSETLQSYATIRSKEAFGIIEKHTEALFGKPEIVITPEGTVDSSKDEHVRISFAGLRRLILEAVTFGSFLWDVESFVDTRYHFVAN

SEQ ID NO: 3100 - protein, 332 aa, Nostoc sp. PCC 7120
MPNSTSQVTKLKSKNNEFSYTADAVSIYLHKIGRVPLLSHEQEIFFAQQVQQMMVMFTAKEELAEKLQREPTLQEWADKMQLKEDVLLQQLSQGQIAKQKMIQANLRLVVSIAKKYQKRNLEFLDLIQEGALGLERGVEKFDPTLGYKFSTYAYWWIRQGITRAIAQQSRTIRLPIHMADKLNKIKCVQRELSQKLGYIAGVTEIAQALNLEPSQIREYLQLVRQPVSLDMRIGFEQDTQLQDLLKDDGMSPERYAERELLYQDIHNLLAKLTPQQKEVLILRFGLAGGCELTLVQISQRMGISRERVRQVEKQALTLLRRYGIDSRSYLAD

SEQ ID NO: 3101 - protein, 632 aa, Yersinia pestis KIM
MLAVSPTDTNPNTLKCGYRLMEQNPQSQLKLLVTRGKEQGYLTYAEVNDHLPEDIVDSDQIEDIIQMINDMGIQVLEEAPDADDLMLAENTTDTDDDAAEAAAQVLSSVESEIGRTTDPVRMYMREMGTVELLTREGEIDIAKRIEDGINQVQCSVAEYPEAITYLLEQYDRVEAGESRLSDLITGFVDPNAEEDIAPTATHVGSELSTEEMDDEDEDEDEDDDAEDDNSIDPELARQKFSDLREQYENARMEIKKNGRNHANAAAEILKLSEVFKQFRLVPKQFDYLVNNMRAMMDRVRTQERIIMKLCVEQCKMPKKNFVTLFSSNETSDTWFNAAVAMGKPWSEKLKDVSEDVQRSLQKLRQIEEETGLTIEQVKDINRRMSIGEAKARRAKKEMVEANLRLVISIAKKYTNRGLQFLDLIQEGNIGLMKAVDKFEYRRGYKFSTYATWWIRQAITRSIADQARTIRIPVHMIETINKLNRISRQMLQEMGREPTPEELAERMLMPEDKIRKVLKIAKEPISMETPIGDDEDSHLGDFIEDTTLELPLDSATSESLRSATHDVLAGLTAREAKVLRMRFGIDMNTDHTLEEVGKQFDVTRERIRQIEAKALRKLRHPSRSEVLRSFLDD

SEQ ID NO: 3102 - protein, 220 aa, Debaryomyces hansenii CBS767
MARRPARCYRYCKNKPYPKSRYNRAVPDAKIRIYDLGRKKATVDEFPLCIHLVSNELEQLSSEALEAARICANKYVTKISGRDSFHLRIRVHPFHVLRINKMLSCAGADRLQQGMRGAWGKPHGLAARVNIGQILMSARTKDSNKDVVIEGLRRARYKFPGQQKIIISKKWGFTPLNRDEYLAKKNNGEVKDDGAYVKFLTKKGKLEQNLRQFPDYQYQV

SEQ ID NO: 3103 - protein, 426 aa, Solibacter usitatus Ellin6076
MDNLPEFEAATASEVLSWAIDTFGESFAIATSFQKEGMAIVDLASRISSEIRVFTLDTGRLPDETYQMMEMVRRRYGIQVEVIFPDRAEVESLVTIHGPNLFYASVPGRERCCEVRKVRPLERKLQSLKAWATGLRRDQSATRSAVPKVARVDGRLKLNPLADWTAAQVEEYLARHNVPLHPLYERGYTSIGCAPCTRPVEPGESERAGRWWWEEDAKKECGIHFAADGSMRRGQAGEAQEDEMHKGFTLWFTGMSGAGKSTISRQLELKLRERGARVEVLDGDVVRTHLSKGLGFSKEDRDENIRRIGFVCELLSRNGVIAIAAAISPYRAVRDEVRARIPNFVEVYVECPVEVLAERDVKGLYKRALAGEIAHFTGISDPYEAPLAPQVTVNSSQETPEQSVEKIWATLERLGLVSFDRSPLAH

SEQ ID NO: 3104 - protein, 255 aa, Arabidopsis thaliana
  misc_feature (175)..(175): Xaa can be any naturally occurring amino acid
  unsure (1)..(255): unsure at all Xaa locations
MAATQLTASPVTMSARSLASLDGLRASSVKFSSLKPGTLRQSQFRRLVVKAASVVAPKYTSIKPLGDRVLVKIKEAEEKTLGGILTFHSTAQSKPQGGEVVAVGEGRTIGKNKIDITVPTGAQIIYSKYAGTEVEFNDVKHLILKEDDIVGILETEDIKDLKPLNDRVFIKVAEXAEEKTAGGLLLTETTKEKPSIGTVIAVGPGSLDEEGKITPLPVSTGSTVLYSKYAGNDFKGKDGSNYIALRASDVMAILS

SEQ ID NO: 3105 - protein, 416 aa, Cryptococcus neoformans var. neoformans JEC21
MPTSLPLESKQPPKPEVFEAKSNLGFMLHSPLKTSFEEQSVPEIGPDEVLVEIKKTGICGSDVHFYNTGKMGLAALTESMCLGHESSGIVVQLGSNIVQQAARSNVMATARGEAEESNKGTVSNRPLQVGDKVALEPGVTCRMCVDCKGGKYQICEHMIFAAYPPSTGGTLQRYYALPADLVYPLPDNVDLSFGAMMEPLSVATHAVANIGGMRTGWNVLITGAGPVGLLAMAVAKGLGAGKVIAVDINEERLHFAKQYAATDTYIPIPPNEGESRGDHAVRAAEDLLRSTGTPARGPGSIDLVVDATGAETCVLMGLNAIKPGGIYVQIGFGPPNVSVPMFRIVTNEITIRGAWRYGSGDYPLAIDMVARGLVNLKPLLTHTFKFEDALEAFEITKNGRDKNGKGVIKCVIDGPE

SEQ ID NO: 3106 - protein, 441 aa, Desulfitobacterium hafniense DCB-2
MKQTGLLFFPAFDWSLGDTHPEREERLLYTQEQLFEEGVMDLPQIKHYAPGLASLKDVQRTQGIFPAPESHDLDAHLIAAGSSLVLGEAWAKKEIHNGFALVRPPGHHSGATVLGNRGFCTLNNEAILINHLRTFHGIKKVAIVDTDVHHGDGTQDIFYHDPNVLFVSIHQDGRTLYPGSGFIYEKGGPNAWETTLDIPLPPGTGDEDLHHVLENWVLPRIYDFQPDLIINSAGQDNHFTDPLASMSVTARGYGRITELLNPDLAVLEGGYSIEGALPYVNLAIVLALAGEDYQGVIEPQKPRHPHSGSNAFRGFLKELKEQYRRAKPDWNIRADSFLPEGKWVYIPHSVYYDTEGFQEGRKDWIRQCNHCGGTVLIESQHTVTGNTFALVRIPFAACEQCTQAGYDLWEHLIGRKTSVLLQDQQHNKVELWHLDKGVTHF

SEQ ID NO: 3107 - protein, 351 aa, Arabidopsis thaliana
MTTICDLPRDLVARILSRVPLTSMRRVRFTCKRWNTISKDPSFAKTHFGKAARQFIMMSQSRVSLMSVKLHGDGNEDELADPYIYEGYRLDVYALGYDKNLKNHKILRFVDSYEPAVKHSIIEHEIFDLKSNAWRVLDATPDWEIDSYQRGVSLKGNTYFFAKEKIVVEGDDVVVIEDFKDFLICFDFTSERFNLDHVCLYRFTLTMERPVREEQLAVLYQQDTCLMEIWVTNKIEPDVVSWSKVFLAVDMEPLTGSFIPFAFFAGSFFIDEEKKIAVVFDKDQEEINDRAYLIGENGYYKEVDLGYMNGYYQQQVDPRGPDPVFPLVCSYSPSLVTIPQGTRGKRKERDY

SEQ ID NO: 3108 - protein, 212 aa, Populus tremula
MLLPLSFLLLASTLLPEAVRASGNPVLDVKGSGLLPGVPYYMISSEWPIVGGVVSLGNDINGTCPLDVILLENFCVTGTPVTFSIASGDQELFITDSTDVYISFDSTSNCTNETMVWMHESINGSSTELLTIGGVEGDVNTLFRIVNVGGSFVSNYKLVAYKLSSYDLALTTSDVGAVFDFTTGIRYLALTEPPLIVGFEVAYDYDGLKAVV

SEQ ID NO: 3109 - protein, 812 aa, Cryptococcus neoformans var. neoformans JEC21
MAPKQRRATNSKAKATPTSVTSPPDQSSPVRSRGGSSSLSPIRSPQENSDLEDNNERHPGTNGSGLKAEDEGSTDLLDRDGDLEEVHACPDSITFRYPSSVPDFTILSPREKAFKVARFLHCTAPSCACTGLEPPAGRTIRITKHDSSNEDEDDEDEDDDVSMEDSENPLDFEDKKDEWRTKEGWWRICGKCGHGWESGGHVWADDVPPKERTRRGKVVGRIEEILEDENKLVEFPTPQPESISSLLKQLHEFVPPPAGKTTISALPPPVDLSTPDDDTQEDNSDGERPRKRRRQASESTHSDIEGEQHRGQGKKKQGKGPAKGAKPRVPRTVVRGAHGFIPMATDPDGNQHVEGHLPISAGGTGADETFEEEEEEEEELSTAKRPELDETERRRRTEIKVKEKEREEELVSRLAAGVNPEDAGGAVEIWEGIELQKLPLRPAAIEQANREIMLPVVSSRNPTPVATILLVGLKNVFQRQLPKMPREYITRLVLDKNHISMAIVKRGYRVVGGICYRPFEARGFAEIVFCAVDSSEQIKGYGSHLMNSLKDHVRKAHPTINVFLTYADNYAVGYFKKQGFTKEISYPRERWVGYIKDYEGGTIMQGRMLPKVKYMEVHQMLADQKAAIIAKIKTLTKSHIIHPGLQIFKERQPDEEIKLTKEQVPGLGKLYLYISLCTHQRADTAIAESGWNPDLDDIVRQPKRNPYHVLLQHVLNDLQNEPSAWPFVKPVDSSVVADYYDVIKDPMDLSTMEYKLENNHYESIEGFVADVKLMCANCRQYNGEKSTYTKQANLLEKALDRILKKRKSVLAD

SEQ ID NO: 3110 - protein, 216 aa, Triticum aestivum
  misc_feature (15)..(15): Xaa can be any naturally occurring amino acid
  misc_feature (113)..(113): Xaa can be any naturally occurring amino acid
  misc_feature (122)..(122): Xaa can be any naturally occurring amino acid
  misc_feature (155)..(155): Xaa can be any naturally occurring amino acid
  misc_feature (157)..(157): Xaa can be any naturally occurring amino acid
  misc_feature (161)..(161): Xaa can be any naturally occurring amino acid
  misc_feature (166)..(166): Xaa can be any naturally occurring amino acid
  misc_feature (176)..(176): Xaa can be any naturally occurring amino acid
  misc_feature (180)..(180): Xaa can be any naturally occurring amino acid
  misc_feature (182)..(183): Xaa can be any naturally occurring amino acid
  misc_feature (186)..(186): Xaa can be any naturally occurring amino acid
  misc_feature (188)..(188): Xaa can be any naturally occurring amino acid
  misc_feature (191)..(191): Xaa can be any naturally occurring amino acid
  misc_feature (197)..(197): Xaa can be any naturally occurring amino acid
  misc_feature (199)..(199): Xaa can be any naturally occurring amino acid
  misc_feature (201)..(201): Xaa can be any naturally occurring amino acid
  misc_feature (208)..(208): Xaa can be any naturally occurring amino acid
  unsure (1)..(216): unsure at all Xaa locations
MASPSVFAGIAAGPXEDPILGVTVAYNKDPSPVKVNLGVGAYRTEEGKPLVLNVVRRAEQMLIQNESRVKEYLPITGLADFNKLSAKLIFGADSPAIQENRVATVQCLSGTGXSLRVGGEFXLARHYHERTIYIPQANLGGNQPKILNFKLGLTXRXYRYXDPATXGLGFPRTPWXLNSXPXXAQXYXLQXISHNPXGXTXLGTWEQXRTNNIAHP

SEQ ID NO: 3111 - protein, 461 aa, Zea mays
  misc_feature (224)..(224): Xaa can be any naturally occurring amino acid
  misc_feature (265)..(265): Xaa can be any naturally occurring amino acid
  misc_feature (424)..(424): Xaa can be any naturally occurring amino acid
  unsure (1)..(461): unsure at all Xaa locations
MARSRQEGEAGGEERKLVLGKYELGRLLGQGTFAKVYYARDLSAAAGTGSTSVAIKVIDKARLRRMEGMVEQLRREISVMRMVRHPNVVGIREVLASRSRVFVVMEYARGGELFAKVARGRLTEDHARRYFQQLVAAVGFCHRRGVAHRDLKPENLLLDEDGRLKVTDFGLAALPEQLRHDGLLHTQCGTPAYVAPEVLRKRGYDGARADLWSCGVVLYVLLCXFLPFQHDNCAKMYQRIFKAEYQVPPWVSGDARRLIARLLVXDPAKRASIPEVMCTPWFRKGFVPPVLSVSPPMTPKKRLDGDDGGGGALFDSSSNSGATSPRSCNAFQLISSMSSGLDLSGLFENEHKAATVFTARAPAATVVEKLESAARALGFETTRGKGWKVRMEAKAGGTNGRLAVTAEVLEVAVDVAVVEFAHDXGPALAFTKFCPVDVRPALPEIVWAWQGDSPAAAVGPA

SEQ ID NO: 3112 - protein, 174 aa, Zea mays
MAKQGAKKMKDENKKRLDLLLRIILISNVIYIVVRMAIMHSSFTWKHWIGLMVTSAAYFLPYKQLASMAKPVYSDNGELLDGGFDLSTGGVCEYLYDVIYITVFVQLMSIISEKFWWTYLVIPAFAGYKISGLLRGAFFSGGSEGEVEDEKTRKKREKMEKKASRGKMIKTRTR

SEQ ID NO: 3113 - protein, 98 aa, Agrobacterium tumefaciens
MTSTNFRPLHDRVVVRRVESEAKTKGGIIIPDTAKEKPQEGEIVAVGSGARDEAGKVVALDVKVGDRVLFGQWSGTEVKLDGEDSSIMKEADIMGIIG

SEQ ID NO: 3114 - protein, 544 aa, Agrobacterium tumefaciens
MAAKEVKPGASAREKMLKGVDILADAVKVTLGPKGRNVVIDKSFGAPPITKDGVSVAKEIELEDKFENMGAQLVREVASKTNDIAGDGTTTATVLAQAIVREGAKAVAAGMNPMDLKRGIDLAVAEVVKDLQAKAKKINTSEEVAQVGTISANGERQIGLDIAEAMQRVGNEGVITVEEAKTAETELEVVEGMQFDRGYLSPYFVTNPEKMVADLEDAYILLHEKKLSNLQAMLPVLEAVVQTGKPLVIIAEDVEGERLATLVVNKLRGGLKIAAVKAPGFGDRRKAMLEDIAILTGGTVISEDLGIKLESVTLDMLGKSKKVSISKENTTIVDGAGQKSDIEGRVAQIKAQIEETTSDYDREKLQERLAKLAGGVAVIRVGGSTEVEVKEKKDRIDDALNATRAAVQEGIVPGGGVALLRSSTKITVKGVNDDQEAGINIVRKALQSLVRQIAENAGDEASIVVGKILDKNEDNYGYNAQTGEYGDLIALGIVDPVKVVRTALQNAASVASVLITTEAMIAELPKKESAMPQMPGGGMGGMDF

SEQ ID NO: 3115 - protein, 158 aa, Nitrosomonas europaea ATCC 19718
MNIYDCGIKTMDGQDKLLGDYKGKVLLIVNTASKCGFTPQYQGLEDLYRRYKDRGFVVLAFPCNQFGHQEPGSESEIQQFCTTRYDVSFPVFAKIEVNGANTHPLYRYLKNEKSGVLGTKAIKWNFTKFLVDRSGHVVRRYAPADKPESLTGDIEQLL

SEQ ID NO: 3116 - protein, 334 aa, Saccharomyces cerevisiae [sequence omitted]

SEQ ID NO: 3117 - protein, 184 aa, Zea mays
MPIILHSALITTLYFISQLLYRKYSGNFLVNLLGKWKESEYSGHSVPVGGLAYYVTAPSSLADVLANPVHALFYVVFMLSACALFSKTWIEVSGSSAKDVAKQLKEQQMVMPGHRESNLQRELNRYIPTAAAFGGVCIGALTVLADFMGAIGSGTGILLAVTIIYQYFETFEKERATELGFFGF

SEQ ID NO: 3118 - protein, 198 aa, Triticum aestivum
  misc_feature (90)..(90): Xaa can be any naturally occurring amino acid
  unsure (1)..(198): unsure at all Xaa locations
MSASRFIKCVTVGDGAVGKTCMLISYTSNTFPTDYVPTVFDNFSANVVVDGNTVNLGLWDTAGQEDYNRLRPLSYRGADVFLLAFSLISXKASYENVSKKWIPELKHYAPGVPIILVGTKLDLRDDKQFFVDHPGAVPITTAQGEELKKLIGAPYYIECSSKTQLNVKGVFDAAIKVVLAPPKAKKKKKAQRGACSIL

SEQ ID NO: 3119 - protein, 262 aa, Brassica napus
  misc_feature (103)..(103): Xaa can be any naturally occurring amino acid
  misc_feature (183)..(184): Xaa can be any naturally occurring amino acid
  unsure (1)..(262): unsure at all Xaa locations
VDPRVRGSNLLIDSNGVLKIADFGLATFFDPRNSVPLTSRVVTLWYRPPELLLGACHYGVGVDLWSAGCILGELYSGKPILPGKTELHITILNPSRNSTSCFXVEQLHKIFKLCGSPTEDYWRKLKLPPSAAFRPSLPYGRHVAEMFKDLPTNVLSLLEALLSIDPEQRGSAAIALESEYFRXXPFACDPSSLPKYSPIKEIDAKLRDEAKRQQRRPQEKQDSLTRRSHERKLIPPVKANPSLAAATENPYLRRCCPGSFNK

SEQ ID NO: 3120 - protein, 405 aa, Shewanella oneidensis MR-1
MNNRVAITQIGLCTPLGQTPEQVLARLIAGDTSAMQTSDSLLFGQSTLVAPVTESLPTIPAALTQFDCRNNQLLLAAALQITDTVELAKQTYGADRIGVVLGTSTSGIAKGELALAYRNQHGHFPADYHYFQQELGSTSDFLRQLFELQGPSYTISTACSSSAKVFASAKRLLEAKLCDMVIVGGIDSLCQLTVNGFHALESVSKGHCNPFSANRDGINIGEGAALFTLTLATDNTANEACVLLAGIGESSDAHHMSAPHPEGAGAIAAMKAALRDAQISAQDIDYINLHGTATPKNDAMESRAVLSVFGDTPPPASSTKPLVGHTLGAAGAIEAAFCYLLLSQHNHSFALPPHRFDGQQDPQDPSIALVAPMQCAEHGKLNYVMSNSFAFGGSNASLIFCRKGA

SEQ ID NO: 3121 - protein, 794 aa, Nitrosomonas europaea ATCC 19718
MTTIDTLATCTQQNRDAVYTLLRRYFTANRTLLLQSDLREGLLQTEQDCGQSDMLRAFVFRLQEGIFSSPWAYLALRPEIAKWEFMRIHQEHLIPEKLTISEFLKFKETVVKGEATESVLEVDFGPFNRGFPRLKESRSIGQGVIFLNRKLSSEMFSRIEAGHTSLLHFLGVHAIEGQQLMFSNNSHDIHAVRNQLRQALEMLETLDGTTPWIELAPKMNQLGFAPGWGHNANRVAETMNMLMDILEAPSPSALEEFLACIPMISRLLILSPHGYFGQDNVLGLPDTGGQVVYILDQVRALEKEMHDRLQLQGVQVEPKILIVTRLIPDAGDTTCNQRLEKVSGCTNTWILRVPFRKHNGEIIPHWISRFEIWPHLEIFAGDVEREALAELGGHPDLIIGNYSDGNLVATLLSRRLGVTQCNIAHALEKTKYLHSDIYWQENEDKYHFSCQYTADLLAMNSADFIVTSTYQEIAGTREAEGQYESYQAFSMPDLYRVIHGIDLFDPKFNIVSPGANADIYFPYSDPNRRLHSLIPEIESLIFDDATNLPARGYLQDPDKPLIFTMARLDRIKNITGLVELYAASPRLRSLANLVIVGGKIDPQHSSDHEEQEQIHRMHQLMDEHELDQQVRWLGMRLDKNLAGELYRYIADKRGIFVQPALFEAFGLTIIEAMASGLPTFATRYGGPLEIIQNNRSGFHIDPNQGAATADLIADFFEKNLENPQEWERISQGALDRVASRYTWKLYAERMMTLSRIYGFWKFVSGLEREETDRYLNMFYHLQFRPLANRLAHEI

SEQ ID NO: 3122 - protein, 432 aa, Oryza sativa (japonica cultivar-group)
MAMSSSRSAAAIRGRRVGALARARRHATRAMASLFGHVEPASKDPILGVTEAFLADPSPDKVNVGVGAYRDDNGKPVVLECVREAERRIAGNLNMEYLPMGGSIKMIEESLKLAYGEDSDFIKDKRIAAVQALSGTGACRLFADFQRRFLPNSQIYIPTPTWSNHHNIWRDAQVPQRTFTYYHPESRGLDFAGLMDDIKNAPNGSFFLLHACAHNPTGVDPTEEQWREISYQFKIKNHFPFFDMAYQGFASGDPERDAKAIRIFLEDGHQIGCAQSYAKNMGLYGQRAGCLSILCEDEMQAVSVKSQLQQIARPMYSNPPVHGALVVSIILNDPELKSLWLKEVKGMADRIIGMRKALRENLEGLGSPLSWDHITNQIGMFCYSGMTPEQVDRLTNEYHIYMTRNGRISMAGVTTGNVAYLANAIHEVTKTK

SEQ ID NO: 3123 - protein, 420 aa, Shewanella oneidensis MR-1
MGEPTNPTRLGRRVVVTGIGGITALGHDWLSIESSLKAQKNCVVTMADWDKYDGLNTRLAAPVTDFEVPSHYSRKKIRSMGRVSIMATRASELALIDAGLLDDPIVTSGEMGIAYGSSTGSTDPITAFGDMLKTGDMSGVTATSYIRMMAHTTAVNVGVFFGLKGRIHTTSSACTSGSQGIGYAYEAIKYGQQTLMLAGGGEELCPTEAVVFDTLFATSTKNTTPELSPRPFDAQRDGLVIGEGACTLVLEELEHAKARGAKIYAEIVGFGTNSDGQHVTQPNSETMEIAIRLALKDAALTPDAIGYVNAHGTATDRGDIAESHATHAVFGADMPISSLKSYTGHTLGACGALEAWVSIEMMNAGWFAPTLNLDNIDPECAALDYIRGEPRALDTDYVMSNNFAFGGINTSLIFKRWKTT

SEQ ID NO: 3124 - protein, 419 aa, Arabidopsis thaliana
MASSTRLTIIQSSFVSARTRLNYVSKTNHSGFACRSLSKPRNLSLSVYSMGSSSSSPKPDNVQEAEKNEFASLSENEWKKRLTPEQYYITRQKGTERAFTGEYWNSKTPGVYNCVCCDTPLFDSSTKFDSGTGWPSYYQPIGNNVKTKLDLSIIFMPRQEVVCAVCNAHLGHVFDDGPRPTGKRYCLNRELLEPTMGKENSKVVVLDFWASPYAMRTKVALREKGVEFEVQEEDLWNKSELLLKSNPVHKKVPVLIHNNTPISESLIQVQYIDETWTDAASFLPSDPQSRATARFWADYADKTISFEGGRKIWGNKKGEEQEKGKKEFLESLKVLEAELGDKSYFGGETFGYVDITLVPFYSWFYALEKCGDFSVEAECPKIVAWGKRCVERNSVAATLPESEKVYQQVLKLRQIFGVE

SEQ ID NO: 3125 - protein, 389 aa, Salmonella enterica subsp. enterica serovar Paratyphi A str.
MTDTTILQNNTHVIKSKKSVALSGVPAGNTALCTVGKSGNDLHYRGYDILDLAEHCEFEEVAHLLIHGKLPTRDELNAYKSKLKALRGLPANVRTVLEALPAASHPMDVMRTGVSALGCTLPEKEAHTVSGARDITDKLLASLSSILLYWYHYSHNGERIQPETDDDSIGGHFLHLLHGEKPTQSWEKAMHISLVLYAEHEFNASTFTSRVIAGTGSDVYSAIIGAIGALRGPKHGGANEVSLEIQQRYETPDEAEADIRKRVENKEVVIGFGHPVYTIADPRHQVIKRVAKQLSEEGGSLKMYHIADRLETVMWETKKMFPNLDWFSAVSYNMMGVPTEMFTPLFVIARVTGWAAHIIEQRQDNKIIRPSANYTGPEDRPFVSIDDRC

SEQ ID NO: 3126 - protein, 139 aa, Triticum aestivum
MKSLVCDLSCLYVRACVYVSLLLASSRKQTMNEWQVDWTPELHRRFVQAVEQLGLDKAVPSRILELMGNEYRLTRHNIASHLQSKESIDAAIGDVLVKPWLPLPLGLKPPSLDSVMSELHKQGIPKVPPAATTNCDGAA

SEQ ID NO: 3127 - protein, 668 aa, Shigella flexneri 2a str. 301
MRFAMSDDMSMGLPSSAGEHGVLRSMQEVAMSSQEASKMLRTYNIAWWGNNYYDVNELGHISVCPDPDVPEARVDLAQLVKTREAQGQRLPALFCFPQILQHRLRSINAAFKRARESYGYNGDYFLVYPIKVNQHRRVIESLIHSGEPLGLEAGSKAELMAVLAHAGMTRSVIVCNGYKDREYIRLALIGEKMGHKVYLVIEKMSEIAIVLDEAERLNVVPRLGVRARLASQGSGKWQSSGGEKSKFGLAATQVLQLVETLREAGRLDSLQLLHFHLGSQMANIRDIATGVRESARFYVELHKLGVNIQCFDVGGGLGVDYEGTRSQSDCSVNYGLNEYANNIIWAIGDACEENGLPHPTVITESGRAVTAHHTVLVSNIIGVERNEYTVPTAPVEDAPRALQSMWETWQEMHEPGTRRSLREWLHDSQMDLHDIHIGYSSGTFSLQERAWAEQLYLSMCHEVQKQLDPQNRAHRPIIDELQERMADKMYVNFSLFQSMPDAWGIDQLFPVLPLEGLDQVPERRAVLLDITCDSDGAIDHYIDGDGIATTMPMPEYDPENPPMLGFFMVGAYQEILGNMHNLFGDTEAVDVFVFPDGSVEVELSDEGDTVADMLQYVQLDPKTLLTQFRDQVKKTDLDAELQQQFLEEFEAGLYGYTYLEDDAANLLI

SEQ ID NO: 3128 - protein, 212 aa, Populus tremula
MLLPLSFLLLTSTLLPEAVRASGNPVLDVKGSGLLPGVPYYMISSEWPIVGGVVSLGNDINGTCPLDVILLENFCVTGTPVTFSIASGDQGLFITDSTDVYISFDSTSNCTNETMVWMHESINGSSTELLTIGGVEGDVNTIFRIVNVGGSFVSNYKLVAYKLSSYDLALTTSDVGAVFDFTTGIRHLALTEPPLIVGFEVAYDYDGLKAVV

SEQ ID NO: 3129 - protein, 308 aa, Glycine max
DGPSEEAKFSGDFDVAYVGSSCSLLVIDRGNRAIREIQLHFDDCAYQYGSGFPLGIAMLVGAGFFGYMLALLQRRLGTIVSSQEAQVPVTVTSSVPPSPYQKPFKSVRPPLIPAECEPDKQEEGFFGSLGKLIANTGVSMVEIMGGLFPSFRRKSLSYQFQRQPLIQQPQKQVNAWPVQESFVIPDEDQPPSIDTRAPTPRKTYPFMSKDAEKMQQLRQSRAFYSGWDGDLQQQQQQKHHHRHQYRSSIPHTYYEQSHETTNEIVFGAVQEQDRKQESVVIKPVDYGESMYEQNIRSRMSSMGYGYRY

SEQ ID NO: 3130 - protein, 514 aa, Bifidobacterium longum NCC2705
MFAERLRNAMNSRGLKQVDLVHAAEHRGVKMGKSHISQYVAGKTMPREDVLEFLASELDVDMNWLRGEESTTQLNSDASNSVTDGEHAATPLATGASKPQTDSEIPVGRRRTFGKSHKLDNVLYDVRGPVADEAMRMEANGTHILKLNIGNPAPFGFRTPDEVVYDMAHQLTDTEGYSPSKGLFSARKAIMQYAQLKNIPNVTIDDIYTGNGVSELINLSMSALLDTGDEVLVPSPDYPLWTACVNLAGGTAVHYLCDEQSEWYPDIDDIRSKITSNTKAIVIINPNNPTGALYPKEVLQQIVDIAREHQLIIFSDEIYDRLVMDGLQHISIASMAPDLFCVTFSGLSKSHMIAGYRIGWMILSGNKRIAKDYIEGLNMLANMRMCSNVPAQSVVQTALGGHQSVNDYIVPGGRVHDQRDLVYDMLNQIPGITAVKPKAAFYIFPKIDVKRFNIHSDEQFALDLLHDKHILISHGGAFNWHRPDHFRVVYLPRMGMLRETMGEISDFFSYYWQS

SEQ ID NO: 3131 - protein, 513 aa, Hordeum vulgare subsp. vulgare
MDGNNRGGGHSEVLKNYNLGKTLGLGTFGDVKVAEHKLTGQRVAIKILNRRKMETMEMEEKANREIKIMRLFIDFIHPHIIRVYEVIETPKDIFVVMEYCNNGELLDYIIENGRLQEDEARRIFQQILAGVEYCHRIMVVHRDLKPENLLLDSKYNVKLADFGLSNVMRDGHFLKTSCGSLNYAAPEIISSKLYAGPEVDVWSCGVVLYALLCGSVPFDDDNIPSLFRKIKGGTYILPSYLSDSARDLIPKLLNIDPMKRITIHEIRVHPWFKNHLPCYLAVPPPYKEQQAKMIDEDILREVVNLGYDKDHVCESLWNRLQNEETVAYYLLLDNRFRSTSGYLGADHQHLMDRSFNEFTLSESASPSTRNYLPGINDSQGGGLRPYYPVQRKWAIGLQSGAHPRDIMIEVLKALKELNVCWKKNGLYNMKCRWCPGFPQVSDMLLDSNHNFVDDSTIMDNGNADGRLPAVVKFEIQLYKTKDNKYLLDIQRVTGPQLLFLEFCGAFLTNLRVL

SEQ ID NO: 3132 - protein, 539 aa, Schizosaccharomyces pombe
MPSSNGSSDFVRKLFNMLEEPEYRHILRWSDSGDSFIVLDTNEFTKTILPRHFKHSNFASFVRQLNKYDFHKVRHEEGAPSIYGEGAWEFRHDDFQLHHKDLLDNIKRKAPSKRNLANENTAPVIENLKQQVDSILDFQKLLDRNLSGLATSYQTILLKMFELKRGIESRDLLMSSIISYLCDLEGSTQRQANPGAMFVPSHPLQELLNAYQALAKGQVATTSPQQIPNQIQQASAATTASSKMTVDTNLGTAQPSLYNTPSSDYELANQEKPADSMASAASLNTPLSSNDHSLNPHAHGSYPMYEKFQPIQHPNPGSFTTHLDSNASMAKSFSQISNDSLAKASSVATSMSQMGAAVPTTGLWKRQPRILLVEDDELSRRMTIKFLTSFDCQVDVAVDGIGAVNKANAGGFDLILMDFILPNLDGLSVTCLIRQYDHNTPILAITSNISMNDAVTYFNHGVTDLLVKPFTKLTLLQLLKKQLLNLLQADNSINMSDVPSTKEAKDDKAPVTFYLENDAPMYPQQMLQDPIQADLQHPH

SEQ ID NO: 3133 - protein, 367 aa, Bifidobacterium longum NCC2705
MTEATQRTSDNGVSIWLDDLSRSRIESGSLQDLIANKNVVGVTTNPSIFQKALSQVGPYDAQLKELGKVDVETAVRELTTTDVRNATDIFREIAEATDFVDGRVSIEVDPRLAHDTENTAKQAVELWEKVNRPNAMIKIPATLEGLPAITATLAKGISVNVTLIFSLERYEQVIDAYIEGIAQAAANGHDLKHIGSVASFFVSRVDTAVDKLLEANGSDEAKALEGKAAVANARLAYELFEKKFAEDPRWADLAAKGAKVQRPLWASTGTKNAAYSDCKYVDELVAKHIVNTMPEKTLNALADHGNGAPSIEGTYEESHAIINKLAELGINLKDVTDKLEADGVAAFIKSWDSVLSDVQSGIDRVNA

SEQ ID NO: 3134 - protein, 563 aa, Gluconobacter oxydans 621H
MTYTVGHYLAERLTQIGLKHHFAVAGDYNLVLLDQLIEQGGTKQIYDCNELNCSFAAEGYARANGAAAAVITFSVGAISAMNGLGGAYAENLPILVISGAPNSNDHGSGHVLHHTIGTTDYSYQMEMAKHVTCAAESITSAETAPAKIDHVIRTMLREKKPAYLEIACNISAAPCVRPGPVSSLHAHPRPDEASLKAALDESLSFLSKANKVAILVGTKLRAAEALKETVELADKLGCPVTVMAAAKSYFPETHPGFRGVYWGDVSSPGAQEIIEGADAVICLAPVWNDYSSGGWKSVVRGEKVLEVDPNRVTVNGKTFEGFRLKEFVKALTEKAPKKSAALTGEYKPVMLPKADPSKPLSNDEMTRQINELVDGNTTLFAETGDSWFNAVRMHLPEGAKVETEMQWGHIGWSVPSMFGNATASPERKHVLMVGDGSFQLTAQEVAQMVRYELPVIIFLVNNHGYVIEIAIHDGPYNYIQNWDYAALMQCFNQGVPGEESGKYGLGLHATTGAELADAIAKAKKNTRGPTLIECKLDRTDCTKTLVEWGKAVAAANSRKPQSV

SEQ ID NO: 3135 - protein, 702 aa, Bifidobacterium longum NCC2705
MTEFKETELDERAIKMAKVLSADAVEKAGSGHPGSPISLAPVAYTLYQHFIKHDPNDPNWEGRDRFILSGGHASLTQYVQLYFSGYGVTLDDLKNFRGGAATRTPGHPEYGLTPGIEMTTGPLGQGFASAIGFAYGERFQRGLLDPETPKEDSPFYHKIWAICGEGDIEEGISGEAASLAANQKLGNLTVIFDANRIQIEGDTNLVLAEDVLKRFQAYGWYTDEFSFIQPDGSYKEDIEGLADVIAKAEKAAPDQPKLIKVHSLIAWPTPGKTNDPSSHGSKLGTEAVAGLKEALGYDPEENFHVDEEALAHARKVAERGLEAHKEWDEKFDAWRKANPDKAALYDRLKAGELPEGFDKALDDLEATFEVGKGVATRGASGSVLNAIAAVMPELWGGSADLGGSNKTDLKGAATFAPAECATKQWPNCNEFGRQLHFGVREFTMGCITNGILLGSHTRPFGGTFFMFSDYERSAVRLAALMEIPNLYIWSHDSVAVGEDGPTHQPVEHLASFRAIPQLEVIRPADAFETAEAYRYFFEKKNTLPGAMVLTRQGVPVLAETAAKAKDGVKKGAYVLVDTEGTPDVILMASGSEVQWAVAAAKTLAGEGVKARVVSVPSMEWFEEQDAEYKEAVLPAAVKARVSVEAGVAMPWYKYLGSYGKPVSIEQFGLQGDGAQNMIDLGITAEHVVEAAKASIAEVEAAK

SEQ ID NO: 3136 - protein, 508 aa, GIBBERELLA ZEAE PH-1
MPRSERRRGERQQREREREQDSQYNGVLHDETSPLLPRISEVSEPETSVSLTDVHSLLAEAKLLCRYSLPLIATYLLQYSFTVITTIVAGRLGAEELAASSLALTTINIIGFTIFEGMATALDTLCAQAYGSGRYTGVGMHIQRMMVLMAIVMVPVGAIWLCSHWILPLLVPQRSLALKAASFLRVSLVGLPGYAFFEAGKRFLQAQGEFGPGMVVLIICAPVNAFLSWYFAVRLNMGLDGAAFGQALANNLRPALLLLYVILIGKKSHRCWGGWDARAAFAVREWGPMIRLSVASTAVNLAEWLAFEILMISTSYIDTPHLAAQTVLNTLSIVTWHVPFSISVAVTTRFGHLVGAGALKEARRAAILYSIVFVGVGILDGAFLFLLRRPLADLFSDDSMVKDLAVGSMVTVACFQIIDSVICGTNGVLRGLAKQSVAAWVVLAVNYLAAVPFAIWLELGSPDLKLDGLWIGLGSGMVIIAGIECAYMKWISWQDCVDDVKEREDDGT

SEQ ID NO: 3137 - protein, 203 aa, Triticum aestivum
MVKQKIVLKLALDDESHASEAFKAAVGMSGVTSATMEGDKIIIVGDGVDPITLTTMLRRSLGYAELLSVSSGDDKKKDGYGAAYGYGGSEKKDGYGAAYGYGGSEKNDGYGAAYGYGGGEKKKDGYGYGGADSSGSGMSFGGKEGGGSKGGGGGGGYSQNAVAPVMYPAYQQYNAMASYPVYSSYPAPPAYQHQEQDPGCSIM

SEQ ID NO: 3138 - protein, 331 aa, Candida albicans
MAIKIGINGFGRIGRLVLRVALGRKDIEVVAVNDPFIAPDYAAYMFKYDSTHGRYKGEVTASGDDLVIDGHKIKVFQERDPANIPWGKSGVDYVIESTGVFTKVEGAQKHIDAGAKKVIITAPSADAPMFVVGVNEDKYTPDLKIISNASCTTNCLAPLAKVVNDTFGIEEGLMTTVHSITATQKTVDGPSHKDWRGGRTASGNIIPSSTGAAKAVGKVIPELNGKLTGMSLRLPTTDVSVVDLTVRLKKAASYEEIAPAIKKASEGPLKGVLGYTEDAVVSTDFLGSSYSSIFDEKAGILLSPTFVKLISWYDNEYGYSTKVVDLLEHVA

SEQ ID NO: 3139 - protein, 453 aa, Campylobacter jejuni RM1221
MSECPFFPKPYKNKASTLLTFLLKRRSWLDGLYERSYKMQTGYVKMPNFDLYVINDTKEVKRMMVDEVREFPKSAFLHELLSPLLGESIFTTNGEVWKKQRELLRPSFEMTRINKVFNLMSEAVADMMDRFSKYPNHAVIEVDEAMTFITADVIFRTIMSSKLDEEKGKKILNAFVTFQEQSVHTAMRRMFRFPKWLSYVLGDCKRAKAGDVIRQVLSDIIKPRYDMADNAEFEDILGSLLLVVDADTNKRFSFEEILDQVAMLFLAGHETTASSLTWTLYLLSLYPKEQEKAYEEITQVLQGGVIEISHLRQFKYLTNIFKESLRLYPPVGFFAREAKKDTQVRDKLIKKGSGVVIAPWLIHRHEEFWTNPHGFNPSRFEGEYKKDAYLPFGVGERICIGQGFAMQEAILILANILKTYKLELEEGFVPDVVGRLTVRSANGMRIKFSKRKL

SEQ ID NO: 3140 - protein, 545 aa, Arabidopsis thaliana
MTNVSLFYASLSILFCCFLFFFNLSPSFFFLRLSRSVTTSFNILNIHLSHFAIRLSSTLVMSRHFLFLGIIILLFSAFVASAPSSTSPAKIVNSFISNHGTSLLKWLWSLSFKTTTKTAVPTKSMVKFENGYSVETVLDGSKLGIEPYSIQVLSNGELLILDSQNSNIYQISSSLSLYSRPRLVTGSPEGYPGHVDGRLRDARLNNPKGLTVDDRGNIYVADTVNNAIRKISEAGVTTIAGGKMVRGGGHVDGPSEDAKFSNDFDVVYLGSSCSLLVIDRGNQAIREIQLHFDDCADQYGSGFPLGIAVLVAAVFFGYMLALLQRRLSSIVSYHTDQEVFEAVPDQDPIKPVRPPLILTGDEQEKQEESFLGTLQIFISNAWVFSVELFSGMFPGLRKKQTVGLNFNHQETKHSAFSTTSWPIQESFVIHNKDEPPPVESRNATPGKIYPFMSKDATEKMQQLRQSRALYRSLDAEFLQEQQQEKHQQYHHRHHSTIPYTLYEQSSEKTNEIVFGPGQEQDQMNTHQNIHHRAHQFVSYPYGYYS

SEQ ID NO: 3141 - protein, 174 aa, Xanthomonas campestris pv. campestris str. 8004
MGGAFGGNDTPAYRALNPNGLVPALQDGALVLWESNAIVRYLAARHAPALYPHSPATRALGDRWMDWTTSTFAGVFRDLFWGVVRTPQAERDATRIATALQRSGELLAVADAALAQQPYLSGDDFAMGDIPLGSFIYAWFEMPIERPELPHLHAWYQRLRARPAYQRGVMTPLT

SEQ ID NO: 3142 - protein, 401 aa, Oryza sativa (japonica cultivar-group)
MATLPGGPHPTGGGAAADPMQVDQPRSAAAAAAVAPAGEKHGASLMEGSDPVTGHIISTTIGGKNGEPKRTISYMAERVVGTGSFGIVFQAKCLETGETVAIKKVLQDKRYKNRELQIMRSMDHCNVVSLKHCFFSTTSRDELFLNLVMEFVPESLYRVLKHYSNMNQRMPLIYVKLYVYQIFRGLAYIHTVPGVCHRDVKPQNLLVDPLTHQVKICDFGSAKMLVKGEANISYICSRYYRAPELIFGATEYTTSIDIWSAGCVLAELLLGQPLFPGESAVDQLVEIIKVLGTPTREEIRCMNPNYTEFRFPQIKAHPWHKIFHKRMPPEAIDLASRLLQYAPNLRCTALEACAHSFFDELREPHARLPNGRPFPPLFNFKQELANLSPELINRLIPEHAR

SEQ ID NO: 3143 - protein, 668 aa, Mesorhizobium sp. BNC1
MATKEKEEVEIERDGTDGPLLDLSDDAVKKMIKLAKKRGYVTMDELNAVLPSGEVSSEQIEDTMAMLSDMGINVVEDEEAGEEAEADSAPEEESGELAETGSAVATVAKKEPTDRTDDPVRMYLREMGSVELLSREGEIAIAKRIEAGRETMIAGLCESPLTFQALIIWREELNDGKILLREIIDLEATYAGPEGKQAPVIARPEDVARPAPEEKLMRRARDDDDITNVGGESRPEEDDEEEDETNLSLAAMEAELKPGFMTTLDFIADTYSKLRKLQDQEVESRLGDSDKLSAGQERRSKELKDELIKAVKSLSLNNQRIETLVEQLYDINKRLVQNELKLFRLAESYGVRREDFLKAYQGSELDPNWGSTVAVLPQPGWRDFVKHEADTIEALRSEIQNLAQETGISIGEFRRIVNQVQKGEREAAIAKKEMVEANLRLVISIAKKYTNRGLQFLDLIQEGNIGLMKAVDKFEYRRGYKFSTYATWWIRQAITRSIADQARTIRIPVHMIETINKIVRTSRQMLHEIGREPTPEELAEKLAMPLEKVRKVLKIAKEPISLETPVGDEEDSHLGDFIEDKSAILPIDAAIQANLRETTTRVLASLTPREERVLRMRFGIGMNTDHTLEEVGQQFSVTRERIRQIEAKALRKLKHPSRSRKLRSFLDS

SEQ ID NO: 3144 - protein, 227 aa, Streptococcus thermophilus CNRZ1066
MEDKNFAERLNILRAGVLGANDGIISIAGVVIGVASATSNIWFILISALSAIFAGAFSMAGGEYVSVSTQKDTEEAAVAKEQALLDRSPESARESLYQTFLSQGDCETEAEVKVNQAFSKNPIKVLVEEKYGVDMEEITNPWHAAVSSFLSFSVGSLPPTLAILLFPDPYRIPITAVVVALTLILTGYVSAKLGKAPVKQAMLRNLAVGLLTMLVTYVVGQVFHVNV

SEQ ID NO: 3145 - protein, 217 aa, Mesorhizobium sp. BNC1
MTPIITAFERSPDRGAGLARDMRVRWALEEVGQPYEVRLLSFKAMKEPAHLALHPFGQIPTYEEGDLTLFESGAIVFHIAERHAGLLPEDENGRARAVAWMFAALNTVEPPIFDRNLAKILERDEPWYEQRLQALEESIRKRLDGLSGHLGNADWLDGAFSAGDLLMVSVLLRLKKSSDILDEYPNLSAYVARGEARAAYKRAFEAQLAVFTAASAD

SEQ ID NO: 3146 - protein, 381 aa, Streptococcus thermophilus CNRZ1066
MTEVFYDHLAKTRHQIHQHPEVSGEEHETTVFLKAYLKNIGVEPLNYPLKTGLIAEIGSGHPIIALRADIDALPIKEKTGLPYASDNGAMHACGHDFHQTSLLGAAQLLKEREAELKGTVRLIFQPAEENFQGAYQVIEAGGIEGVSAIIGYHNNPHLKPGQIGLRSGAILAGVEQFRVDVKGVSSHAARPDLGVDTVLVTTTIINNLQQIVARTVSPFESAVLSVTHIEVGNTWNVLPAAGFFEGTIRTFEPKVREDVIARFEKVVQATADQFGAQVDITWGNSPYVTYNDQTLTPLIFENSKAFAEVIETLPSTGGEDFAAYQKEIPGVFAFVGTNGEEDAPGWHHDDFLVKDEALPVAVNYYVENALFLLDYFKEQDD

SEQ ID NO: 3147 - protein, 363 aa, Debaryomyces hansenii CBS767
MSIDPETRRKLLVLQKNGSNKTCCDCAAPNPQWASPKFGIFICLECAGIHRGLGVHISFVRSITMDQFKPEEVLRMEKGGNEKLKNYFSENGVDLKLDARQKYDNYVAEDYKEKLTCEIEGKEFTPKDHSGQSLPDINAASASDDTTSNSAPKQQEKIQSRRGTPLPSDQKQKNESYFAELGSKNGTRSDSLPPSQGGKYGGFGNTPASQSSNQGGSLSGFTIDNFQSDPFGTLSKGWGLFSNTVAKSVNEVHESVIKPGINQLQESELSGEAKRAMAQFGQKMQETGKYGQETFQKFTNEHNAPDSKFGKLFDGLNVQDESEGVTPAFGLQKPQQKTKLDSLGGGKSKKDDDWKNDDKWDEF

SEQ ID NO: 3148 - protein, 225 aa, Zea mays
MRRLWRWYQQCLAAHPVRTQVVSSGILWGLGDIGAQTVTYYSARPDRRGHDSSPPDPEDKDNKDNKEFKVDWKRVGITSSFGFAFVGPVGHYWYEYLDRIIRRRFQPNTFKFVASKVATDGFLFGPLDLLLFFSYVGLGQGRSIEQVKEDVKRDFIPALVLGGTIWPAVQIANFRFVPVRYQLLYVNLFCLLDSCFLSWIEQQGDASWKRWFTSFQKIEDQKGKV

SEQ ID NO: 3149 - protein, 212 aa, Populus tremula
MLLPLSFLLLASTLLPEAVRASGNPVLDVKGSGLLPGVPYYMISSEWPIVGGVVSLGNDINGTCPLDVILLENFCVTGTPVTFSIASGDQELFITDSTDVYISFDSTSNCTNETMVWMHESINGSSTELLTIGGVEGDVNTIFRIVNVGGSFVSNYKLVAYKLSSYDLALTTSDVGAVFDFTTGIRYLALTEPPLIVGFQVAYDYDGLKAVV

SEQ ID NO: 3150 - protein, 184 aa, Glycine max
MTNYGTIPTSSSPSTNLDFISRAKQRVKEGLGTRRPWKLMFNFRSFGLPAGVGDAVARVRENISYFQMNYAIVVLIVLFLSLLWHPISLIVFVVLMAAWLFLYFLRDEPLIIFGRLISDRVVLIVMAVLTVVLLLLTGAIGNILVALLIGAVLIVAHAALRKTDDLFLDEEEATGFSPPGAPLS

SEQ ID NO: 3151 - protein, 422 aa, Zea mays
MAGGGFVEDMMREQSLLEATCGDLFDHIDDLLDFPNEDSAAAVLLLDAPAPGSPLSARIIDVGRAGNALAPPAAPAQHDASASAFFAAAGNDVFDTKDVVGAHIGSCDDIDMDMAQLEWLSGLFDDASIPHEPVFPGATAGGAAPIMKSSALAAGALLPQDKMEDALLFRSSSPISVLEHGSGGSGSASATGSASSSSSSASSSSESFSGSGSGSGGGHVWSAPVSPRPAPPPVLVIPARARSKRSRSSAFTGAAARAGAETPTILVPTPMYSSGSAHSDPESIAESSPHPAPPMKKKKKAKKPAPPAPAASSDDNDGDADYEEGGELAEPQGGAVRRCTHCQIEKTPQWRAGPLGPKTLCNACGVRYKSGRLFPEYRPAASPTFVPSIHSNSHKRVVEMRQKAVRSGDPSCDLLHFIRRRD

SEQ ID NO: 3152 - protein, 245 aa, Debaryomyces hansenii CBS767
MFRNTFKTLSSKMASQLDQELMSTGAFSIDQLMELAGLSVAQAIYRQYPPTSASSNKVLMLVGPGNNGGDGLVASRHLKIWGYDPVLFYPKKSTKNELYKNLLKQLQDLEIPEIENLEEIKSLLETPKSVKIIVDSLFGFSFKPPIRAPFDDLINYLSTNHSKIPDIVSVDIPSGWDVDKGPVDVDINSTMLISLTAPKPCSEHFLKEGRVHYLGGRFINQKIAQKYDIEDLVKLYKGDELIVKL

SEQ ID NO: 3153 - protein, 211 aa, Capsicum annuum
MALKSKVSSNGSENAKVNGVKEVHYRGVRKRPWGRYAAEIRDPGKKSRVWLGTFDTAEEAAKAYDAAARDFRGPKAKTNFPSPFPLETLNQSPSNSSTLESSSGETGVHAPMEVDLTRRLGAVAPVFHQQPTVAVLPNGQPVLLFDSLWRPGVVVDKAQLSYQVAPMAIEFTGAAGGVSSVSDSSSVVEENQYVGKKGLDLDLNLAPPMEI

SEQ ID NO: 3154 - protein, 212 aa, Populus tremula
MLLPLSFLLLASTLLPEAVRASGNPVLDVKGSGLLPGVPYYMISSEWPIVGGVVSLGNDINGTCPLDVILLENFCVTGTPVTFSIASGDQELFITDSTDVYISFDSTSNCTNETMVWMHESINGSSTELLTIGGVEGDVNTLFRIVNVGGSFVSNYKLVAYKLSSYDLALTTSDVGAVFDFTTGIRYLALTEPPLIVGFQVAYDYDGLKAVV

SEQ ID NO: 3155 - protein, 276 aa, Capsicum annuum
MDTSSLDLIRQHLLDDDVVFMENYCTSSETTSTLYSQSSSSSESLESFVSELKTESNFSFYPESSNLEFCSFFNNNSKMEFNPSEFQVKPQKKKSFNERKPLLNISIPSVKKTDESKTGENSEKKRYRGVRQRPWGKFAAEIRDPNRKGTRVWLGTFDTAVDAAMAYDRAAFKLRGSKAILNFPLEVSNFRQENNEIEKKVNLNSCGKRAREEIENEDQVVMKKEVKREQMVATPLTPSSWAPIWDCGNAKGIFEVPPLSPLSPHPSFGFSQLLVS

SEQ ID NO: 3156 - protein, 227 aa, Triticum aestivum
MDTHVGSVDGPSPAAVNGAVGCPASAPGCPIMSSHPVVSAGEASLGRHLARRLVQVGVSDVFAVPGDFNLTLLDHLVDEPGLRLIGCCNELNAGYAADGYARARGVGACAVTFTVGGLSVLNAIAGAYSENLPVICIAGGPNSNDYGTNRILHHTIGIPDFSQELRCFQTVTCHQAVVTNLDDAHEQIDTAIATALRESKPVYLSISCNLPGLPHPTFTRDPVPFFL

SEQ ID NO: 3157 - protein, 212 aa, Populus tremula
MLLPLSFLLLASTLLPEAVRASGNPVLDVKGSGLLPGVPYYMISSEWPIVGGVVSLGNDINGTCPLDVILLENFCVTGTPVTFSIASGDQELFITDSTDVYISFDSTSNCTNETMVWMHESINGSSTELLTIGGVEGDVNTLFRIVNVGGSFVSNYKLVAYKLSSYDLALTTSDVGAVFDFATGIRYLALTEPPLIVGFEVAYDYDGLKAVV

SEQ ID NO: 3158 - protein, 323 aa, Candida albicans SC5314
MSSNSLEQLKATGTTIVTDTGEFEQIAKYKPQDATTNPSLILAATKNPEYASVIDVAIEYAKDKGSSPKEKAEIALDRLLIEFGKNILDIVPGRVSTEVDARLSFDKEATVKKALELIDLYKQQGIEKDRILIKIASTWEGIQAARELESKHGIHCNLTLLFSFAQAVACAEAGVTLISPFVGRILDWYKASTGEEYTAETDPGVQSVKAIYNYYKKYGYKTIVMGASFRNTGEIKALAGCDFLTISPKLLEQLYNSTEEVPKQLDAATAKDEDVEKVTYVDDESAFRFALNEDAMATEKLSQGIRQFGKDAVTLLTELESRF

SEQ ID NO: 3159 - protein, 147 aa, Pisum sativum
MGFTDKQEALVNSSWESFKQNLSGNSILFYTIILEKAPAAKGLFSFLKDTAGVEDSPKLQAHAEQVFGLVRDSAAQLRTKGEVVLGNATLGAIHVQRGVTDPHFVVVKEALLQTIKKASGNNWSEELNTAWEVAYDGLATAIKKAMT

SEQ ID NO: 3160 - protein, 360 aa, Oryza sativa
MALASLAAAASLLPAAAARSRVSLARCRGMASSSSPSAAAGASAAARVGVVQMTSVGDLDANYATCSRLAKASAPLQLVAVMDGSEWELSFAAFVTTVLIGFCFRERAGSKDGESIKIAEPLDGPIMQRYCSLAKLFKDQCALVVLILKATANKESSMWLSLGGFQEKGPDDSHQYNTHVLIDDSGEIRSSYRKIHLFDVDVPGNMVYKESRFTTAGDTVVAVDSPFGRLGLTVCYDLRFPELYQCLRFKHQAQVLLVPSAFTKVTGEAHWEILLRARAIETQCYVIAAAQAGKHNEKRESYGDSIIIDPWGTVIARLPDRLSTGFAVADVDLSKVEAVRTKMPISEHRKFDSVWKTSSL

SEQ ID NO: 3161 - protein, 294 aa, Arabidopsis thaliana
MALTNNLWAFVFGILGNIISFVVFLAPVPTFVRICKKKSTEGFQSLPYVSALFSAMLWIYYAMQKDGTAFLLITINAFGCVIETIYIVLFVSYANKKTRISTLKVLGLLNFLGFAAIVLVCELLTKGSTREKVLGGICVGFSVSVFAAPLSIMRVVVRTRSVEFMPFSLSLFLTISAVTWLFYGLAIKDFYVALPNVLGAFLGAVQMILYIIFKYYKTPVAQKTDKSKDVSDHSIDIAKLTTVIPGAVLDSAVHQPPALHNVPETKIQLTEVKSQNMTDPKDQINKDVQKQSQV

SEQ ID NO: 3162 - protein, 339 aa, Gluconobacter oxydans 621H
MRVYYDRDADLNLIKSKKVAIIGYGSQGHAHANNLKDSGVSDIVIGLRPTSSAVKKAEEAGFKVMEPGEAAAWADVVMVLTPDEGQGALYKESLEKNLKPGAALAFAHGLSIHFRIIEARPDLDVFLIAPKGPGHTVRSEYLRGGGVPSLVAVAQNASGNALEIALSYASANGGGRAGIIETTFKEEVETDLFGEQAVLCGGLVDLIRAGFETLVEGGYAPEMAYFECLHEMKLIVDLIYEGGIANMNYSISNTAEYGEYVTGPRIITPETKAEMKRVLTDIQDGTFVRNFILENQSGGVGFKAIRARNDAHPIEKTGEKLRAMMPWIAKGKLVDKAKN

SEQ ID NO: 3163 - protein, 499 aa, Zea mays
MVVSVAATGPGTDAEPVSSTFFASRYVRDPLPRYRMPERSIPREAAQQIISDELMLDGNPRLNLASFVTTWMEPECDKLIMDSINKNYVDMDEYPVTTELQNRCVNMIAHLFNAPIKEDETAIGVGTVGSSEAIMLAGLAFKRKWQNKRKEQGKPCDRPNIVTGANVQVCWEKFARYFEVELKEVKLSEGYYVMDPVKAVEMVDENTICVAAILGSTLTGEFEDVKQLNDLLTEKNKETGWDVPIHVDAASGGFIAPFLYPELEWDFRLPLVKSINVSGHKYGLVYPGVGWVIWRSKDDLPEELIFHINYLGTDQPTFTLNFSKGSCQIIAQYYQLIRLGFEGYRNIMENCQENAAILREGIAATGRFDVLSKDAGVPLVAFSLRDSSRFSVFDVSENLRRFGWIVPAYTMPADAEHVAVLRVVVREDFSRSLAERLVSDVRKILRELDARATHAVRVATATAEQSGDGVVAKKSVLEIEREVAARWMNAVNKKKTGVC

SEQ ID NO: 3164 - protein, 154 aa, Lycopersicon peruvianum
MSLIPRIFGDRRSSSMFDPFSIDVFDPFRELGFPGTNSRETSAFANTRIDWKETPEAHVFKADLPGLKKEEVKVEIEEDRVLQISGERNVEKEDKNDTWHRVERSSGKFMRRFRLPENAKMDQVKASMENGVLTVTVPKEEVKKPDVKSIEISG

SEQ ID NO: 3165 - protein, 520 aa, Trametes villosa
MSRFHSLLAFVVASLTAVAHAGIGPVADLTITNAAVSPDGFSRQAVVVNGGTPGPLITGNMGDRFQLNVIDNLTNHTMVKSTSIHWHGFFQKGTNWADGPAFINQCPISSGHSFLYDFQVPDQAGTFWYHSHLSTQYCDGLRGPFVVYDPNDPAADLYDVDNDDTVITLVDWYHVAAKLGPAFPLGADATLINGKGRSPSTTTADLSVISVTPGKRYRFRLVSLSCDPNYTFSIDGHNMTIIETDSINTAPLVVDSIQIFAAQRYSFVLEANQAVDNYWIRANPNFGNVGFTGGINSAILRYDGAAAVEPTTTQTTSTAPLNEVNLHPLVTTAVPGSPVAGGVDLAINMAFNFNGTNFFINGTSFTPPTVPVLLQIISGAQNAQDLLPSGSVYSLPSNADIEISFPATAAAPGAPHPFHLHGHAFAVVRSAGSTVYNYDNPIFRDVVSTGTPAAGDNVTIRFRTDNPGPWFLHCHIDFHLEAGFAVVFAEDIPDVASANPVPQAWSDLCPTYDALDPSDQ

SEQ ID NO: 3166 - protein, 262 aa, Nicotiana tabacum
  misc_feature (218)..(218): Xaa can be any naturally occurring amino acid
  unsure (1)..(262): unsure at all Xaa locations
MDTSHWPQGIGLVKAVEPSKPVPTERKPRPQKEQAINCPRCNSTNTKFCYYNNYSLSQPRYFCKTCRRYWTEGGSLRNVPVGGGSRKNKRSSSSSNNSSSSTSSSYKKIPDLTIPTSSQNPKIINEPHDLNLAFNPSATSNFSNISEFMALPLMNPNSTTSFMSSIMPQLSDSNNIMYSSSSTGLPNLHDLKPTLNFSLDGFDNNNGYGSLQGETAGXKLFFPLDDLKNVSTPNDDHEFDEQNRGQAAESHGFWNGMLGGGS

SEQ ID NO: 3167 - protein, 612 aa, Leifsonia xyli subsp. xyli str. CTCB07
MCGIVGWVSFDRDLTEHRESVDAMTATMACRGPDAEGVWLDRHGALGHRRLAIIDVEGGSQPMSAHTDDGAVTLTYSGEVYNFSELRGELMRRGHRFETRSDTEVVLHGYLEWDEAVAERLNGMYAFAIWDARAEKLVMIRDRMGVKPLYFFTTDDGVLFGSEPKAILAHPLADRAVDLDGLREVVSFAQTPGSAVWCGMREIVPGGVVTVCRAGLREYRYWTLTTRPHTDDLPTTIARVRSLLEDTVGRQLVSDVPRCTLLSGGLDSSAITAFSAAQLAGHGEKVRSFAVDFVGREDDFVADDLRSTPDAPYAREVASHVGSQHETIVLDNDAIADPAVRRAVIAARDNPLSLGDLDASLYLLFQAIRAHSTVALSGESADEVFGGYRWFHQPEVQAAPTFPWMALPVSGSPTRVRDRFTAKITAALDLPAYLRERYTSAIAEVQPLENESAHERRMREICYLHLTRLVRMLLDRKDRISMAVGLEVRVPFCDHRLVEYVYNVPWAMKTFDGREKSLLRAATADLLPESVLQRTKAPYPTTSDPGYARTLIQQSRDLLSADDRVFGLVDRGRLEEITRQDPATMTLDVRNGMETALDLSTWLEIYQPELRM

SEQ ID NO: 3168 - protein, 255 aa, Bradyrhizobium sp. BTAi1
MTGRFDLRGKVAIVTGGNGGIGLGMARGLADSGADIAVVGRNAAKSKTAVADLAGRGVRAIAVTADVSNQYDVAAMVAQVSRELGRIDILINNAGMSIRKPPHLLELEEWREVIDTNLTSAFLCSKAAYPALKANGGGKIINIGSMLSIFGASFAPAYAASKGGIVQYTRACACAWAPDNIQVNAILPGWIDTDLTRAARQQIDGLHDRVLARTPAGRWGDIDDFAGIATFLSSPASDFVTGTAIPVDGGYSISA

SEQ ID NO: 3169 - protein, 599 aa, Solanum tuberosum
MASTFAGMSSAGPLAAPSTSSNKLSSVANISSTSFGSKRNVALRKSRRPTILAAAKELHFNKDGSAIKKLQNGVNKLADLVGVTLGPKGRNVVLESKYGAPKIVNDGVTVAREVELEDPVENIGAKLVRQAAAKTNDLAGDGTTTSVVLAQGLIAEGVKVVAAGANPVLITRGIEKTAKALVAELKNMSKEVEDSELADVAAVSAGNNLEVGSMIAEAMSKVGRKGVVTLEEGKSAENSLRVVEGMQFDRGYVSPYFVTDSEKMSVEYENCKLLLVDKKITNARDLVNVLEDAIRNGYPILIIAEDIEQEALATLVVNKLRGALKVAALKAPGFGERKSQYLDDIATLTGGTVIREELGLTLDKADKEVLGHAAKVVLTKDATTIVGDGSTQEAVNKRVAQIKNLIEAADQDYEKEKLNERIAKLSGGVAVIQVGAQTETELKEKKLRVEDALNATKAAVEEGIVVGGGCTLLRLAAKVDAIKGTLANDEEKVGADIVKRALSYPLKLIAKNAGVNGSVVSEKVLSSDDPKFGYNAATGNYEDLMAAGIIDPTKVVRCCLEHAASVAKTFLMSDCVVVEIKEPEAAVAGNPMDNSGYGY

SEQ ID NO: 3170 - protein, 519 aa, Trametes villosa
MGLQRFSFFVTLALVARSLAAIGPVASLVVANAPVSPDGFLRDAIVVNGVVPSPLITGKKGDRFQLNVVDTLTNHSMLKSTSIHWHGFFQAGTNWAEGPAFVNQCPIASGHSFLYDFHVPDQAGTFWYHSHLSTQYCDGLRGPFVVYDPKDPHASRYDVDNESTVITLTDWYHTAARLGPKFPLGADATLINGLGRSASTPTAALAVINVQHGKRYRFRLVSISCDPNYTFSIDGHNLTVIEVDGINSQPLLVDSIQIFAAQRYSFVLNANQTVGNYWVRANPNFGTVGFAGGINSAILRYQGAPVAEPTTTQTPSVIPLIETNLHPLARMPVPGSPTPGGVDKALNLAFNFNGTNFFINNATFTPPTVPVLLQILSGAQTAQDLLPAGSVYPLPAHSTIEITLPATALAPGAPHPFHLHGHAFAVVRSAGSTTYNYNDPIFRDVVSTGTPAAGDNVTIRFQTDNPGPWFLHCHIDFHLDAGFAIVFAEDVADVKAANPVPKAWSDLCPIYDGLSEANQ

SEQ ID NO: 3171 - protein, 430 aa, Corynebacterium diphtheriae NCTC 13129
MLMNNADVRSQERKQVMVCARAAHRVAPIVAQLTSADKNAVLLDAAAALEAAGAEIIAANQRDIDQGRARGLSEALIDRLSLDSARIAGIAGGLRQVAALSDPVGEVVGGSVMPNGMQMRKVRVPLGVMGMVYEARPNVTIDAFGLALKSGNVALLRGSKSAQHSNAALVAVVHRVLESHGLPHEVVQLLPCETHESVQDLITARGLVDVVIPRGGAGLIEAVVTNATVPTIETGTGNCHFYIDRDVSDLDQAIAMLLNGKTRRCSVCNATETVLIDSALDSAYQLAIITALQEAGVTVHGDVAQLEAVGASGIVPADEHDWAEEYLSLDIACALVDGVDAAMEHIRTYSTKHTEAIATGNIVTAQRFADRVDAAAVMINASTAFTDGEQFGMGAEIGISTQKLHARGPMALPELTTTKWIVQGTGQTRP

SEQ ID NO: 3172 - protein, 376 aa, Corynebacterium diphtheriae NCTC 13129
MNAQHSSADLRDVIRNAKRIVVKIGSSSLTGENFEVSPGRIDRIVEALEDRMHRGSDVIVVSSGAVAAGMAPLGLTSRPKDLATKQAAASVGQVHLANAWGNSFARYNRTIGQVLLTASDAGQRDRARNAQRTIDRLRLLHAVPIINENDTVATSEMHFGDNDRLAAIVSHLVSADALVLLSDVDGLYDKNPADPSARFVSEVRDGNDLKGVIAGDGGAVGTGGMASKVSAARLASRSGVPVLLTSADYVAEALGDAEVGTVFYPKDDRLSAWKFWALYAADTGGALRIDAGAVAAVTAGGNSLLAVGITEVIGDFHAGEIVEILGPEGEIIGRGEVAYDSAVLITMLGKQTAQLPEGLQRPVVHADYLSDYASRA

SEQ ID NO: 3173 - protein, 553 aa, Listeria innocua Clip11262
MKEKDWWKKSVVYQIYPKSFNDSNGDGVGDIQGIIEKLDYLKELGVDVIWLSPVYDSPQDDNGYDIRDYQKIYEEYGDMATFDNLLQGLHDRDMKLVMDLVVNHTSDEHKWFEESRKSKDNPYRDYYFWREENEINNWGSIFSGPAWELDEKTGEYYLHLFSKKQPDLNWENPKLRQDVYNMMKFWLDKGIDGFRMDVINFISKNTAFPDGPVAEGQIYGDAGNDFCNGPRIHEFLQEMNQEVTSKYDVMTVGEMPGASTTDAQIYTNPANNEVDMIFTFEHMNLDSDGDNKWDLKPIYLPDLKENMSEWQVALQENGWNSLYWNNHDQPRIVSRFGNDNRFRVRSAKMLATCLHMMKGTPYIYQGEEIGMTNVHFETLEEYRDIETLNMYKERKEQGHSHESIMQSIYTKGRDNARTPYQWDNSENAGFTTGTPWLKVNPRYTEINNEEALKNPDSIFYYYQNLIKLRKTTEIITTGNYRLLLPKDEAIFAYERYTENEKLVVLCNFTEEEQVLTDENILNDIKKGSVLANNVPDIIEGTLRPYEAIVYQIK

SEQ ID NO: 3174 - protein, 203 aa, Kluyveromyces lactis NRRL Y-1140
MSEENKNTENVPKPPTASVFSMFGGKKPEVKKEEPEVKKEEEESGKAETETTGKDEEDAPESPDVHFEPVVTLEKVDVKTNEENEEVLFKVRAKLFRFDGEAKEWKERGTGDVKFLQHKETKKVRLLMRRDKTLKVCANHIIAPEYVLKPNVGSDRSWVYTCTADIAEGQPEAFTFAIRFGNKENADKFKEEFEKAQNVNKKD

SEQ ID NO: 3175 - protein, 168 aa, Arabidopsis thaliana
MVARSEEIVIVEEDTTAKCLMLLSRVGECGGGCGGDERVFRCKTCLKEFSSFQALGGHRASHKKLINSDNPSLLGSLSNKKTKTSHPCPICGVKFPMGQALGGHMRRHRNEKVSGSLVTRSFLPETTTVTALKKFSSGKRVACLDLDLDSMESLVNWKLELGRTISWS

SEQ ID NO: 3176 - protein, 324 aa, Mannheimia succiniciproducens MBEL55E
MDMKLGIVGTGMIVADLMQTLHKVTLEKLAIWGRDQVKTTQFASENGISQVFADYEAMLNSDLDTIYIALPNHLHFSFAKQALEAGKNVIMEKPITSNTGEFNQLRQLAQTQGVILIEAVTVHYLPAYLAIREKVAELGEIKIVSLNYSQYSSRYDRFKAGETLPAFDPQKSGGALMDLNVYNVHFAVGLFGKPQSCAYAANIQRGIDTSGILLLDYPQFKAVCIGAKDCAAPVMLSIQGDKGNITVPMPANAMNRFTYTPNQGEAQHFEFGDAHRMLPEFERFVEIIDRKDFAQAEKMLDISAAVSEVLEQARKGAGIKFAGE

SEQ ID NO: 3177 - protein, 518 aa, Glycine max
  misc_feature (313)..(313): Xaa can be any naturally occurring amino acid
  misc_feature (327)..(327): Xaa can be any naturally occurring amino acid
  misc_feature (334)..(334): Xaa can be any naturally occurring amino acid
  unsure (1)..(518): unsure at all Xaa locations
MLPPQQQSRVGGLQTSLSLVSSDPRLSPEEPRSNSDNLRESPTESASSRETWPTADAIADEFLEELKNGLRVILEGGNGSQHREEFFILQKLVQSRSDLTAKTLIRAHRVQLEILVAINSGIQGFLHPSISLSQTSLIEIFVYKRCRNIACQNQLPAEDCTCETCANGNGFCNLCMCVICSKFDFEVNTCRWIGCDLCSHWTHTDCAIREQLICMGPSAKNGAGPSEIVFRCQACNRTSELLGWVKDVFQHCAPSWDGEALMRELDFVSRIFHGSKDPRGRKLYWKCDDLKEKLKSGKVESKAACRAILMVFXKLELDSPKSLENGXGGAYVAXQEACNRIAEVVHEAIRKMEIVADEKMRMFKKARLAFDACERELADKAREAGKLKMDRQKKKLQIEELERIVRLKNAEADMFQLKANEAKREAEQLQRIALAKSDKSEEEYTSNYLKQKLSEAEAEKQYLYEKIKLQETSRVSQSSSGGDPSSMLMYSKIHDLLYSVPPKEDGQSNECHPFRTNP

SEQ ID NO: 3178 - protein, 496 aa, Glycine max
MGKVAVGTAVVCAAAACVAAALVVRHRTRSSGKWGRATAIAKELEEQCWTFFSKLRQVADALDVEMHAGLASEGGCKLKMLITYVDNLPSGDEKGLFYALDLGGTNFRTLRVHLGGKEKGVVKIESEEVSIPPHLMTGSSQELFDFIASKLAKFVSSEPEELHPPPGRQRELGFTFSFPVKQTSIASGTLIKWTKGFNIEDAVGEDVVGELTKSMEKIGLDMRVAALVNDTVGTVARARFSNQDVIAGVILGTGTNAAYVECAHAIPKWHGLLPKSGEMVINMEWGNFRSSHLPLTEYDHALDAESLNPGEQIFEKIISGMYLGEIVRRVLLKLAEEVDFFGDTVPPKLRIPFVLRTPDMSAIHQDTSSDLKVVGNKLKDILEINNTSLKMRKIVVELCDIVANRGARLSAAGIFGILKKIGRDTVKDGKKSVVALDGGLFEHYTKFRSSLESTLKELLGDEAAETIGIEQSNDGSGIGAALLAASHSQYLEVQES

SEQ ID NO: 3179 - protein, 273 aa, Capsicum annuum
MTTQDEGLTLELIRRHLLEDFTNTESFINSLNSCFSDHMSPVFITSIVKTEPSTSTSLSDSPNSSYLNEPNSPISRYFNLHSDFPEFKIDSDIILSPTYSSAVSSSTKENKNNELKTAFKTDSDNILSPTYNSSAVSSSTNKNKNNEHKNAFQTDADNILNPTHDNNCAISSSIKENKSTETKKNYRGVRRRPWGKYAAEIRDPSRKGSRIWLGTFDTDVDAARAYDCAAFKMRGRKAVLNFPLDAGKSGAPANIGRRRRRDSKMELMEVLNF

SEQ ID NO: 3180 - protein, 700 aa, Debaryomyces hansenii CBS767
MSKEYIIVTGGAGYIGSHTVIELIENGYEVIIIDNLCNSSYDSVARIEFMVKRSVNFFDIDLRDHEKLTNVFKTFKIKGVIHFAALKAVGESTKIPLEYYDNNINGTINLLKVMKENEVKTIVFSSSATVYGDATRFENMIPIPEHCPNDPTNPYGKTKYMIENIIKDIHTSDKFWRAAILRYFNPIGAHPSGLIGEDPLGIPNNLLPYLAQVAIGRREKLSIFGSDYDSHDGTPIRDYIHVVDLAKGHIAALNYLNELNSNEGLFREWNLGTGRGSTVFDVYHAFCKAVGKELPYEVVGRRDGDVLDLTANATRANNELKWKTNFTIEDACKDLWKWTTENPFGFQIKNYKWKLFNDTDVEDFRNRLHTVSFENFKVSIANYGALIQDVNFNNESLVNGFKTFNDYKSEDNPFFGTTVGRYANRISNGEFQLDGTTYKLTKNENGANTLHGGVNGANTLHGGVNGFDKQYFLGPIAKYHRDHTTLEFVLVDTDGNDGFPGDLETTVKYTIKEDSLEIEYISSLAEGSKRSVTAVNLTNHSYWNISPNKDINGTRIRASTNKCLKVNPKSLLPTGEIIESPHDLTKTVELTPDISFDNCFIANEKGSSLDTRSNELIDVVEATHPSSKTKLSVATTDPAFQLYTGDYTDINDFKSRSGFCVESSRFINAVNNKEWAEQVVLRKGETYGSKLKFSLSSVTT

SEQ ID NO: 3181 - protein, 272 aa, Capsicum annuum
MGSPQENCSFDMIRQHLDDISLMEYYCPENTLYSQSCESLDQTSVSFETSSNLDDISSFFSSSKTDFGCFEFETKPITSAATSISSNSPKKRSFNERKPSLNIAVPVKPVVVQKVEVVREKKHYRGVRQRPWGKFAAEIRDPNRKGTRVWLGTFDTAVDAAKAYDRAAFKLRGSKAILNFPLEVANFKQQNSTVEVPQQVNSSGSKRAREKEELAINKEMKIEEEERVAQTAPLTPSNWSTIWDSGNGKGIFEVPPLSPLSPHMSYSQLVMI

SEQ ID NO: 3182 - protein, 404 aa, Vibrio vulnificus YJ016
MQDILTVILAGGMGSRLSPLTDDRAKPAVPFGGKYRIIDFTLTNCLHSGLRKILVLTQYKSHSLQKHLRDGWSIFNPELGEYITSVPPQMRKGGKWYEGTADAIYHNLWLLERSEAKYVMVLSGDHIYRMDYAPMLEEHIANNAALTVACMDVNCKEAKAFGVMGIDEHHRVHSFVEKPQNPPHLPNDPERSLVSMGIYIFSMEVLQQALIEDADNDASSHDFGKDIIPKLIDTGSVFAYKFCGSKGRVDKDCYWRDVGTIDSFYQANMDLLEPIPPMNLYQKDWGIRTYEPQYPPARTVSSGSGNEGIFINSMISNGVINSGGSVQHSIVSSNVRINDSATIVDSIIFDDVEIGEGCQLVNCIIDKHVKVPPYTQIGLNRLEDAQRFKISENGIVVVPESYQF

SEQ ID NO: 3183 - protein, 212 aa, Populus tremula
MLLPLSFLLLASTLLPEAVRASGNPVLDVKGSGLLPGVPYYMISSEWPIVGGVVSLGNDINGTCPLDVILLENFCVTGTPVTFSIASGDQELFITDSTDVYISFDSTSNCTNETMVWMHESINGSSTELLTIGGVEGDVNTIFRIVNVGGSFVSNYKLVAYKLSSYDLALTTSDVGAVFDFTTGIRYLALTEPPLIVGFEVAYDYDGLKAVV

SEQ ID NO: 3184 - protein, 170 aa, Capsicum annuum
MASSSGTSSGSSFLQNSGSEEDLQLLMDQRKRKRMISNRESARRSRMRKQKHLNDLMAQVSTLRKENDQILTSMNVTTQHYLNVEAENSILRAQLSELSHRLESLNEIIAYMDANNNNNSCSNGLAMDHNEPYSFNFAQSDTVVDGFNMTNSWNYFCSNQPIMTAHVLQY

SEQ ID NO: 3185 - protein, 309 aa, Glycine max
MAITLNNGFKMPIIGLGVWRMEGNEIRDLILNSIKIGYRHFDCAADYKNEAEVGDALKEAFDSGLVKREDLFITTKLWNSDQGHVLEACKDSLKKLQLTYLDLYLVHFPVAVRHTGVGNTSSPLGDDGVLDIDTTISLETTWHAMEDLVSSGLVRSIGISNYDIFLTRDCLAYSKIKPAVNQIETHPYFQRDSLVKFCQKHGICVTAHTPLGGAAANAEWFGTVSCLDDQVLKGLAEKYKKTAAQISLRWGIQRNTVVIPKSSKLERLKENFQVFDFELSKEDMELIGSIDRKYRTNQPAVFWGIDLYA

SEQ ID NO: 3186 - protein, 191 aa, Ustilago maydis 521
MQTIKCVVVGDGAVGKTCLLISYTTNKFPSEYVPTVFDNYAVTVMIGEDPYTLGLFDTAGQEDYDRLRPLSYPQTDVFLVCFSVTSPASFENVKEKWFPEVHHHCPGVPCLIVGTQVDLRDDHAVIEKLARSKQRPVPFEAGERLARELGAVKYVECSALTQKGLKNVFDEAIVAALEPPVIRKKSKCAIL

SEQ ID NO: 3187 - protein, 679 aa, Lycopersicon esculentum
MSGGGCSIVWFRRDLRVEDNPALAAGVRAGAVIAVFIYAPEEEGHYYPGRVSRWWLKQSLAHLDSSLKSLGTSLITKRSTDSISSLLEVVKSTGATQLFFNHLYDPISLVRDHRTKEILTAQGISVRSFNADLLYEPWEVNDDEGRPFTTFSAFWEKCLSMPYDPEAPLLPPKRIISGDASRCPSDNLVFEDESEKGSNALLARAWSPGWSNADKALTTFVNGPLLEYSQNRRKADSATTSFLSPHLHFGEVSVRKVFHFVRIKQVLWANEGNKAGEESVNLFLKSIGLREYSRYMSFNHPYSHERPLLGHLRYFPWVVDEGYFKAWRQGRTGYPLVDAGMRELWATGWLHDRIRVVVSSFFVKVLQLPWRWGMKYFWDTLLDADLESDALGWQYISGTLPDGRELDRIDNPQFVGYKCDPHGEYVRRWLPELARLPTEWIHHPWNAPESVLEAAGIELGSNYPLPIVEIDSAKVRLEQALSQMWQNDAAARAAIENGMEEGHGDSADSPIAFPQAMHMEMDHEPVRNNPVIVTVRRYEDQMVPSMTSSLFRAEDEENSVDIRNSVVESRAEVPTDINVAEVHRRDTRDQAVMQTARTNATPHFNFAVGRRNSEDSTAESSSSTRERDGGVVPTWSPSSSNYSDQYVGDDNGIGTSSSYLQRHPQSHQLMNWQRLSQTG

SEQ ID NO: 3188 - protein, 334 aa, Arabidopsis thaliana
MMDEFMDLRPVKYTEHKTVIRKYTKKSSMERKTSVRDSARLVRVSMTDRDATDSSSDEEEFLFPRRRVKRLINEIRVEPSSSSTGDVSASPTKDRKRINVDSTVQKPSVSGQNQKKYRGVRQRPWGKWAAEIRDPEQRRRIWLGTFATAEEAAIVYDNAAIKLRGPDALTNFTVQPEPEPVQEQEQEPESNMSVSISESMDDSQHLSSPTSVLNYQTYVSEEPIDSLIKPVKQEFLEPEQEPISWHLGEGNTNTNDDSFPLDITFLDNYFNESLPDISIFDQPMSPIQPTENDFFNDLMLFDSNAEEYYSSEIKEIGSSFNDLDDSLISDLLLV

SEQ ID NO: 3189 - protein, 408 aa, Candida albicans SC5314
MDRLNQLSGQLKPTSKQSLTQKNPDDVVIVAAYRTAIGKGFKGSFKSVQSEFILTEFLKEFIKKTGVDASLIEDVAIGNVLNQAAGATEHRGASLAAGIPYTAAFLAINRLCSSGLMAISDIANKIKTGEIECGLAGGIESMSKNYGSPKVIPKIDPHLADDEQMSKCLIPMGITNENVANEFNIPREKQDAFAAKSYSKAEKAISSGAFKDEILPIRSIIRSPDGSEKEIIVDTDEGPRKGVDAASLSKLKPAFGGTTTAGNASQISDGAAGVLLMKRSLAEAKGYPIVAKYIACSTVGVPPEIMGVGPAYAIPEVLKRTGLTVDDVDVFEINEAFAAQCLYSAEQCNVPEEKLNINGGAIALGHPLGCTGARQYATILRLLKPGEIGLTSMCIGSGMGAASILIKE

SEQ ID NO: 3190 - protein, 635 aa, Lycopersicon esculentum
MESNYKTIVWFRRDLRIEDNPALAAAARNGSVLPVFIWCPKEEGQFYPGRVSRWWLKQSLIHLKQSLKSLGAELVLMKAQSTLSALTECVDAVGATKVVYNHLYDPVSLVRDHNIKQKLGDLGISVQSYNGDLLNEPWEVYDDDGKVFTTFDAYWEKSLSIQNEPVSQLPPWRLTQAAGSVKMCSVEELGLENESEKSSNALLGKGWAPGWSNADKALTEFVESNLLAYSKDRLRVGGNSTSLLSPYLHFGEVSVRKVFNSVRLKQILWTKEGNSVGKDSATIYLRAIGLREYSRYICFNFPFTHERSLLNNLRFFPWNADQAHFKAWRQGRTGYPLVDAGMRELWATGWVHNKIRVIVSSFFVKFLLLPWQWGMKYFWDTLLDADLESDIIGWQYISGSLPDGHELERLDNPEVQGFNYDPEGEYVRHWLPELARMPAEWIHHPWDAPLNVLKAAGVELGMNYPNPIIDVDVARDRLMQAIIIMREKEAAVNTSHANGTVEVVFDNSENVGDSASIPKDDVVKGKEPCPSSSSYDQRVPSMQNVGTYRKRPKPEEETKKLNDNKLSYKNERIKMSNVDGDLCSTAESSSMKKQMTVSRNSFSVPRTITMSHDRKSFDDEASSHVKLQKEEEIDT

SEQ ID NO: 3191 - protein, 144 aa, Corynebacterium diphtheriae NCTC 13129
MRWLHYPTMTERTLILIKPDGVERGLIGEIIARIERKGLKISALDLRVADRETAEKHYAEHADKPFFGELVNFITSAPLIAGVVEGPRAIEAWRQLAGGTDPVAKATPGTIRGDFALEVSTNVVHGSDSPESAEREISIWFPNL

SEQ ID NO: 3192 - protein, 442 aa, Leptospira interrogans serovar Copenhageni str. Fiocruz L1-130
MYFESKPKIFVIMAGFFDSLKIGFGGASRILNSSFVFSTKTILLLKDLALGDDTFPIRLREAFEELGATYIKLGQLIASAPSLFPDKFVTEMQKCLDQVRPIPYSMITTIIQKELGGTLSDHFLSVEPIPIASASIAQVHSAVTKDGLDVVIKVQRPDIESTLSADLNLIYFVSVLFEKFAPGLSKSGIADMVEQFQTSILEEIDFYKEADNIEEFEKELLSMGETRARVPKVYRELSTKKILTLERFYGAPITDESSVRRYSSDPQKTLTGALEIWFSTLSRSGFFHADVHAGNLMILRDGTVGFIDFGIVGRISPRVWEGLMIFLEGLSLNRTEKIAKGLIQMDSTAKGVDEKKLSKDLEIVFSKMTEMVLKVQMGDLESLDDKKLNAILFEFREISIQNGLKIPKEFGLLIKQILYFDKYVKTMAPDIDLIRDRDKFLI

SEQ ID NO: 3193 - protein, 510 aa, Zea mays
  misc_feature (30)..(30): Xaa can be any naturally occurring amino acid
  misc_feature (227)..(227): Xaa can be any naturally occurring amino acid
  unsure (1)..(510): unsure at all Xaa locations
MDGSSKGSGHSEALRNYNLGRTLGIGTFGXVKIAEHKLTGHRVAIKIINCRQMRNMEMEEKAKREFKILKLFIHPHIIRLYEVIYTPTDIYVVMEYCKYGELFDYIVEKGRLQEDEARRIFQQIISGVEYCHRNMVVHRDLKPENLLLDSKYNVKLADFGLSNVMHDGHFLKTSCGSPNYAAPEVISGKLYAGPEVDVWSCGVILYALLCGTLPFDDENIPNLFKKXIKGGIYTVPSHLSALARDLIPRMLVVEPMKRITIREIREHQWFQIRLPRYLAVPPPDTTQQAKMIDEDTLRDVVNMGFNKNHVCESLCSRLQNEATVAYYLLLDNRFRATSGYLGADYQESMDRNLNQLASSESSSSGTRNYVPGSSDPHSSGLRPYYPVERKWALGLQSRAHPREIMVEVLKALQELNVRWKKNGHYNVKCRWCPGFPEVNDTLDASNSFLGDSTIMDNDDANGRLPTVIKFEFQLYKTKDDKYLLDMQRVTGPQLLFLDFCAAFLTKLRVL

SEQ ID NO: 3194 - protein, 754 aa, Kluyveromyces lactis NRRL Y-1140
MDGKVNNNPPRSRHRRTSSLEEVVDPFSTPDVYYGPKSDPSKLLSKNRFTRTRTFSVAEPGGGKGHSSSYTSPYFDTTVPLRRRGSEDDSYSASQGQRRFYIEDVDKTLKELLASEDTDGNYQITIEDTGPKVIRVGTVNSNGYKHVHIRGTYMLSNLLQELTLAKLFNRKQVILDEARLNENPVNRMTRLISGQFWKSLTRRIDSNNIAKIAYDTKIDTPKAKNPRIYVPYNCQDEYQQLVQWSEMDPSLQLEVNYLPKDITPEFVKSLNDKPGLLCLAMESHMDPVTGEETWVGFPYAVPGGRFNELYGWDSYFMALGLLESNKLDVARGMVEHFIFEIDHYGKILNANRSYYLCRSQPPFLTDMALQVCRKMGGDKNPVAVDLLRRAFKAAIKEYLTVWTASPRLDEKTGLSCYHPDGIGIPPETEPGHFDSILRKYAEKYNVSIPEFRDLYNSQKVHEPDLDVFFLHDRGVRESGHDTTYRFENVCAYLATIDLNSLLYKYEVDIAYVIKKYFGDNFEGLPEGHRTSNDWEKLAEVRKERIDKYLWDEETGFYYDYNVKTEKRTSYESVTTFWALWAGMSSQEQAQRMVENALPKLEEFGGLVACTARSRGELSLDRPTRQWDYPFGWAPHQILVWDGLVRYGYENHTRRLAYRWLFLMTKAFVDYNGIVVEKYDVTRGTDPHRVDAEYGNQGADFKGVATEGFGWVNSSYLLGMKYMNNFARRALGTCVTPKVFFGRLPPKEKKKYGLE

SEQ ID NO: 3195 - protein, 515 aa, Leifsonia xyli subsp. xyli str. CTCB07
MTTSHDPADELENRLEHLGDVSQAVQDFASEQEGYRKSLSARQVQMIAIGGAIGTGLFLGAGGRLQQSGPLLVFVYAVCGFFAFLVLRALGELVLHRPSSGSFVSYAREFFGEKMAYVAGWMYFLNWAMTAIVDSTAVALYVKYWSLFSSVPQWLLALIALVIVVSLNLISVKVFGEMEFWFALIKVGALATFLVVGIVVLAAGWPTDLGPTGIPMLAENGWLLPNGIATIAMAIVLVQGVVFAYAAVELVGIAAGETEHPEKIMPRAINSVVFRIAVFYCGSVLLLALLLPASAYSGSESPFVTFFSHFGGPQLSAVVGSIMNFVVLTAALSSLNAGMYSTGRILHSMAQTGAAPRFTSRMSKQGVPYGGILLTAAIGVFGVFLNLVVPAQAFNIVLNVAALGIVTSWAMIVLCQMRLRRWSLRGTMKRPAFSLIGAPFTAYLTLAFLLAVLVLMTFDYPTGTWTVASLVVIAPLLVIGWFAQRGRILAIAARREGHTGAYPVIAARPLRRERE

SEQ ID NO: 3196 - protein, 124 aa, Glycine max
MATRYMTLRTSAKTLFHHLQPPVQDSRCAFHLIRTLHSFVARDSDPRKFRNSFFSGTFRGMVSAPNPNFDEAASLALDNRVPATVITGFLGSGKTTLLNHILTSQHGKRIAVIENEFGEGDIDG

SEQ ID NO: 3197 - protein, 326 aa, Corynebacterium diphtheriae NCTC 13129
MTESVKKIAVTGAAGQIAYSLLWRIANGDVYGKNTPVELQLLEIPQAIGGAEGVAMELLDSAFPLLKNIVVTDKAEVAFDGTNAAFLVGAKPRGKGEERADLLTANGKIFGPQGKALNDNAADDIRVLVVGNPANTNALIAQHAAKDIPADRFNAMMRLDHNRGIAQLSEKLGRDKNDIEKFVVWGNHSAGQFPDITYATIGGEAISGLVDHDWYTGEFIPRVAKRGAEIIEVRGKSSAASAASSAIDHMHDWINGTDGQWRTAAIPSDGSYGVPEGLIFGFPTISEDGQWKIVQDLELSDFQKDGIARNVTELEEEREAVKDLLG

SEQ ID NO: 3198 - protein, 548 aa, Rhopalosiphum padi endosymbiont
MAAKDVKFGNEARIKMLRGVNVLADAVKVTLGPKGRNVVLDKSFGAPSITKDGVSVAREIELEDKFENMGAQMVKEVASKANDAAGDGTTTATLLAHSIVNEGLKAVAAGMNPMDLKRGIDKAVISAVEELKNLSVPRSDSKAITQVGTISANADEKVGALIAEAMEKVGNDGVITVEEGTVFKDELEVVKGMQFDRGYLSPYFINKPETGVVELENPYILMADKKISNVREMLPILESVAKSGKPLLIISEDLEGEALATLVVNSMRGIVKVAAVKAPGFGDRRKAMLQDISVLTGGSVISEELAMDLEKSTLEDLGQAKRVVINKDTTTIIGGVGEKSQAIQSRISQIRQEIQEATSDYDKEKLNERLAKLSGGVAVLKVGAATEVEMKEKKARVEDALHATRAAVEEGVVAGGGVALVRVAGKISNLRGHNEDQNVGIRVRLRAMEAPLRQIVSNSGEEPSVVTNNVKDGKGNYGYNAATDEYGDMIDFGILDPTKVTRTALQYAASVAGLMITTDMVTDLPEEDKTSDASSSPAGGMGGMGGMM

SEQ ID NO: 3199 - protein, 548 aa, Sitobion avenae endosymbiont
MAAKDVKFGNEARIKMLRGVNVLADAVKVTLGPKGRNVVLDKSFGAPSITKDGVSVAREIELEDKFENMGAQMVKEVASKANDAAGDGTTTATVIAQSIVNEGLKAVAAGMNPMDLKRGIDKAVISAVEELKFHLSVPCSDSKAITQVGTISANADEKVGSLIAEAMDKVGNDGVITVDEGTGLQDELEVVKGMQFDRGYLSPYFINKPETGIVELENPYILMADKKISNVREMLPILESVAKSKPLLIISEDLEGEALATLVVNSMRGIVKVAAVKAPGFGDRRKAMLQDISILTGGSVISEELAMELEKSTLEDLGQAKRVVISKDTTTIIGGVGEKHTVQSRISQIRQEIQEATSDYDKEKLNERLAKLSGGVAVLKVGAATEVEMKEKKARVEDRLHRTRAAVEEGVVAGGGVALVPVAGKISHLRGQNEDQNVGIRVALRAMEAPLRQIVSNSGEEPSVVTNNVKDGQGNYGYNAATDEYGDMIDFGILDPTKVTRSALQYAASVAGLMITTECMVTDLPKEDKSSDSNSAPAGGMGGMGGMM

SEQ ID NO: 3200 - protein, 150 aa, Staphylococcus epidermidis
ILFGGGVCANVNLKRSAGNGADWIVIAFGWGLAVTMGVYAVGTFSGAHLNPAVTVALAMDGGFSWAQVPGYIVCQMLGGIVGGALVWLMYLPHWKVTEDPAVKLGVFSTAPAIKNYFANFLSEIIGTMALTLGILFIGVNKIADGLNPII

SEQ ID NO: 3201 - protein, 381 aa, Arabidopsis thaliana
  misc_feature (202)..(202): Xaa can be any naturally occurring amino acid
  misc_feature (206)..(206): Xaa can be any naturally occurring amino acid
  misc_feature (208)..(208): Xaa can be any naturally occurring amino acid
  misc_feature (219)..(220): Xaa can be any naturally occurring amino acid
  misc_feature (222)..(224): Xaa can be any naturally occurring amino acid
  unsure (1)..(381): unsure at all Xaa locations
MQIFVKTLTGKTITLEVESSDTIDNVKAKIQDKEGIPPDQQRLIFAGKQLEDGRTLADYNIQKESTLHLVLRLRGGMQIFVKTLTGKTITLEVESSDTIDNVKAKIQDKEGIPPDQQRLIFAGKQLEDGRTLADYNIQKESTLHLVLRLRGGMQIFVKTLTGKTITLEVESSDTIDNVKAKIQDKEGIPPDQQRLIFAGKQXEDGXTXADYNIQKESTXXLXXXLRGGMQIFVKTLTGKTITLEVESSDTIDNVKAKIQDKEGIPPDQQRLIFAGKQLEDGRTLADYNIQKESTLHLVLRLRGGMQIFVKTLTGKTITLEVESSDTIDNVKAKIQDKEGIPPDQQRLIFAGKQLEDGRTLADYNIQKESTLHLVLRLRGGF

SEQ ID NO: 3202 - protein, 313 aa, Chaenomeles speciosa
GGLGDVLGGLPPAMAANGHRVMTVSPRYDQYKDAWDTGVPVEIEVGGRVETVRFFHCYKRGVDRVFVDHPSFLERVWGKTGSKIYGPSAGEDYKDNQFRFSLLCQAALEAPKVLNLNSNKYFSGPYGDEVVFIANDWHTALLPCYLKAIYKPKGIYENAKVVFCIHNIAYQGRFPISDLSVLNLPENLRGSLDFIDGYSKPVKGRKINWMKAGILESDRVVTVSPFYAQELVSGEDKGVELDNIIRKTSITGIVNGMDVQEWNPATDKYLDTKYDNTTVLDAKPLVKEALQAEVGLPVDRNIPVIGFIGRLEE

SEQ ID NO: 3203 - protein, 526 aa, Citrullus lanatus var. lanatus
MASSMAAVGVLRLPTTSASSSSSSNGGSNRARRHSLRSLSFGASHISGDKIDFRASALGSRRVSGGRAVPSIVSPKAVSDSKNTQTCLDPDASRSVLGIILGGGAGTRLYPLTKKRAKPAVPLGANYRLIDIPVSNCLNSNISKIYVLTQFNSASLNRHLSRAYASNMGGYKNEGFVEVLAAQQSPENPNWFQGTADAVRQYLWLFEEQNVLEYLVLAGDHLYRMDYERFIQAHRETDADITVAALPMDEKRATAFGLMKIDEEGRIIEFAEKPKGEQLKTMKVDTTILGLDDARGKEMPFIASMGIYVISKDVMLSLLRDKFPGANDFGSEVIPGATSIGMRVQAYLYDGYWEDIGTIEAFYNANLGITKKPVPDFSFYDRSSPIYTQPRYLPPSKMLDADITDSVIGEGCVIKNCKIHHSVVGIRTCISEGAIIEDTLLMGADYYETDADRRLLAAKGSVPIGIGRNSHIKRAIIDKNARIGEDVKIVNGDNVQEAARETDGYFIKSGIVTVIKDALIPSGTVI

SEQ ID NO: 3204 - protein, 313 aa, Chaenomeles speciosa
GGLGDVLGGLPPAMAANGHRVMTISPRYDQYKDAWDTEVSVELKVGDKTETVRFFHCYKRGVDRVFVDHPLFLERVWGKTASKVYGPVTGVDFKDNQLRFSPLCQAALEAPRVLNLNSSKYFSGPYGEEVVFIANDWHSALLPCYLKAVYKPRGIYSTAKVTFCIHNIAYQGRFASADFALLNLPDEFKSSFDFIDGYEKPEKGRKINWMKAGILESDKLLTVSPYYAEELVSAVEKGVELDNIIRKTGIFGIVNGMDVQEWNPLTDKYTTIKYDASTVADAKPLLKETLQAEVGLPVDRDIPVIGFIGRLEE

SEQ ID NO: 3205 - protein, 526 aa, Citrullus lanatus var. lanatus
MVAMDSCFVSLKSNTHLMKGNWGGLDRCENGFYGEKVRGSFNENAWIKSLKSEKKALKLTPNVAYAVATPNISKQPVSIQVPSIPKVKANPKNVASIILGGGAGTHLFPLTRRSATPAVPVGGCYRLIDIPMSNCINSGINKIFVLTQFNSASLNRHISRTYFGNGVNFGEGFVEVLAATQTSGETGMHWFQGTADAVRQFIWVFEDAKNRNVENILILAGDHMYRMDYMDFVQNHIDRNADISISCAAVGDSRASDYGLVKIDSRGRIIQFSEKPMGANLSAMRVDTTSFGLSREESLKSPYIASMGVYVFKTDILLNLLKWRYPTSNDFGSEIIPAAVKEHNVQAYIFRDYWEDIGSIKTFYDANLALTEEFPKFEFYDPKTPIYTSPRFLPPTKIDKCQIVDAIISHGCFLRECSVQHSIVGERSRLDYGVELKDTIMMGADTYQTEPEIAGLLAEGKVPIGIGRNTKIRNCIIDKNAKIGKDVVIMNKEGVQEADRPEQGFYIRSGITIILEKATIEDGTVI

SEQ ID NO: 3206 - protein, 247 aa, Zea mays
  misc_feature (75)..(75): Xaa can be any naturally occurring amino acid
  unsure (1)..(247): unsure at all Xaa locations
AIGFLEAGPGERNNPQRLGSRKESLLFFVNPPEPALSSSTRLRPCKDMAVERLKTGFEQFKADVYDKKPELFEPXKAHQSPKYMVFACSDSRVCPSVTLGLHPGEAFAVRNIASMVPPYDKTKYAGVGSAIEYAVCALKVEVIVVIGHSRCGGIKALLSLEDGAPDKFHFVEEWVRVGAPAKSKVLADHASAPFEDQCSILEKEAVNVSLENLKSYPFVKEGLEKGTLKLVGGHYDFVNGKFETWEP

SEQ ID NO: 3207 - protein, 313 aa, Chaenomeles speciosa
GGLGDVLGGLPPAMAANGHRVMTISPRYDQYKDAWDTEVTVELKVGDKTETVRFFHCYKRGVDRVFVDHPLFLEKVWGKTASKIYGPTAGVDFKDNQLRFSLLCQAALVAPRVLNLNSSKYFSGPYGEEVVFIANDWHTALLPCYLKAIYKPKGIYKTAKVAFCIHNIAYQGRFAFADFALLNLPNEFKSSFDFIDGYDKPVKGRKINWMKAGILESDKVLTVSPYYAKELVSSVDKGVELDDIIRKTRIQGIVNGMDVQEWNPLTDKYTTVKYDASTVADAKPLLKEALQAEVGLPVDRDIPVIGFIGRLEE

SEQ ID NO: 3208 - protein, 313 aa, Kageneckia oblonga
GGLGDVLGGLPPAMAANGHRVMTISPRYDQYKDAWDTEVTVELKVGDKTETVRFFHCYKRGVDRVFVDHPMFLEKVWGKTASKIYGPVAGVDFKDNQLRFSLLCQAALEAPRVLNLNSSKYFSGPYGEEVVFIANDWHTALLPCYLKAIYKRQGLYKTAKVAFCIHNIAYQGRFAFADFALLNLPDEFKSSFDFIDGYDKPVKGRKINWMKAGILESDKILTVSPYYAQELVSGVGKGVELDNIIRKTGIFGIVNGMDVQEWNPLTDKYTTVKYDASTVADAKPLLKEALQAEVGLPVDRDIPVIGFIGRLEE

SEQ ID NO: 3209 - protein, 313 aa, Kageneckia oblonga
GGLGDVLGGLPPAMAANGHRVMTVSPRYDQYKDAWDASVLVEIEVGGRVETVRFFHCYKRGVDRVFVDHPLFLERVWGKTGSKIYGPRTGVDYMDNQFRFSLLCQAALEAPRVLNLSSNKYFSGPYGDDVVFIANDWHTALLPCYLKTIYKPKGIYKNAKVAFGIHNIAYQGRFPFSDFSLLDLPDNLKVLSTFIDGYKKPVKGRKINWMKAGILESDRVVTVSPYYAKELVSGEDKGVELDNIIRKTGITGIVNGMDVQEWNPAADKYLDIKYDNTTVLDAKPLLKEALQAEVGLPVDRNIPMIGFIGRLEE

SEQ ID NO: 3210 - protein, 334 aa, Debaryomyces hansenii CBS767
MSNLQAAAEPTNDPFYGLSFKVGVAENKNVTYRAKMEDVHTYVANFAEKLDWGYFAIFDGHAGKQTARWCGNNLHTLLEHEIISNEDGNSNNLPNQGNEVDNSAPLSSKCFMQDYLNTTFIKADELIEKEKNGSAGCTAAVAVLRWETDDSKVLPESSQPPENNSGFDFMPSPNHRRMLYTSNVGDLRIVLYRKGKSYRLTYDHKATDSNEINRIRDSGGLIMKNRVNGVLAVTRSLGDSYMKDLVIGNPFTTATEITDEDEFMILACDGVWDVISDIKACQFVAETFKKDGDDQQLAAKKLCQLAMDNSTTDNVTVMIVKFDRKVFASQQNTV

SEQ ID NO: 3211 - protein, 318 aa, Brassica napus
  misc_feature (235)..(235): Xaa can be any naturally occurring amino acid
  unsure (1)..(318): unsure at all Xaa locations
MDVVKIDYNYKGDNALKELERITSKAAEVQDNILCGILEQNKDTQYLSKYMKGSKDVLEFKRSVPIITYKDVCPYIQRIANGEDSSLITGHPITEILCSSGTSGGEPKLMPTISEDLDRRTFVYNLINPIANKYLEGLDKGKTMYLNFVKAETSTPCGLPIRTVLTSYYKSKHFQCRPYDPFNDLTSPIQTILCEDSNQSMYCQLLAALIHRHKVMRLGAVFASAFLRAISYLEXKWSQLCQDIRTGHLSPMITDPGCQTAMTSLLGSPNPDLADEVEEICGRPSWKGILCQLWPQAKFIEAVVTGSMAQYIPALEFF

SEQ ID NO: 3212 - protein, 78 aa, Musa acuminata
MSCSGGNCGCGSSCSCGSGCGGCRMLTDLGEERSSTSQTMIMGVAPQKGHFEELETAAGSDNGCKCGSNCTCDPCNCK

SEQ ID NO: 3213 - protein, 178 aa, Triticum aestivum
  misc_feature (122)..(122): Xaa can be any naturally occurring amino acid
  misc_feature (163)..(163): Xaa can be any naturally occurring amino acid
  misc_feature (170)..(170): Xaa can be any naturally occurring amino acid
  misc_feature (177)..(177): Xaa can be any naturally occurring amino acid
  unsure (1)..(178): unsure at all Xaa locations
SNINPAVTFTNCVFRKHPWHKFPVYLMAQVLGAFCAAGVVYANYKSAIDVFEGGAGIRTVPGYSQNATAGIFATYPQPFMTQTGEFFSEFICATLLMFTIYALKDEKNRYADKFIPLILFFXVFGIGACFGWETGFAINMARDFGPRLMTYCLGYGNEVWTAXGHYFWIXMVAPFLXC

SEQ ID NO: 3214 - protein, 79 aa, Malus x domestica
MSSCCGGKCGCGSVCSCGSGCNGCGMAPDLSYMEGSTTETLVMGVAPQKSHMEASEMGVAAENGCKCGDNCTCNPCNCK

SEQ ID NO: 3215 - protein, 54 aa, Synechocystis sp. PCC 6803
MDIVKIICAILLPPLGVFLQVGIGKDFWINLLLTIFGLYILGLVHAIWVIARER

SEQ ID NO: 3216 - protein, 369 aa, Burkholderia mallei ATCC 23344
MPERDPILLTPGPLTTSRMTRDAMLRDWGSWDAAFNRLTKSVCADLVRIAGGGDAYVCVPLQGSGTFAVEATLGTLVPRDARVLVPNNGAYCARIAAILRRLGIAHVELPFAEDEPASAHAIDAALARDARLTHVALVHLETSAGLLNPLDDIAAVCRARGRALIVDAMSSFGALPIALAASGIDALISASGKCLEGVPGMGFAIVRRSALEAAEGRSPSVALDLHDQYAYMQRTSQWRFTPPTHVLAALRAALDQFFDEGGQPARGARYARNCATLVDGMRALGFEPFLDARAQASVIVTFYAPADPAYAFPAFYAAVRDAGYVLYPGKLTTADTFRVGCIGALGADEMRGAVAAIGGALESLGIAMR

SEQ ID NO: 3217 - protein, 102 aa, Zea mays
  misc_feature (64)..(64): Xaa can be any naturally occurring amino acid
  misc_feature (82)..(82): Xaa can be any naturally occurring amino acid
  misc_feature (101)..(101): Xaa can be any naturally occurring amino acid
  unsure (1)..(102): unsure at all Xaa locations
MASQGSSVFAALEQAPEDPILGVTVAYIPQPTWGNHPKVFTLSGLNVRSYRYYDPATCSLHFEXLLEDLGSAPSGSIVLLHXCAQKPTGVDPTIEQWEQIXQ

SEQ ID NO: 3218 - protein, 267 aa, Anabaena variabilis ATCC 29413
MEDFVTPPAFGEKVRERWTLAGRKALITGATKGIGLAIAQEFLALGAEVIIVARNAEAIEQQINAWDSAGKVHGVTADVSTSEGRQIIHEYVSKTVGELDILVNNVGTNIRKKATDYTEEEFAGIFQINLTSIFELSRLFYPLLKTSKNSSIVNIASVAGLISVRTGAPYGMTKAALVQLTRSLAVEWADDGIRVNAIAPWFIQTPLTEPLLNNPETLSAVLSRTPMKRVGQPEEVASLTAFLCMPTASYITGQCIAVDGGFLAFGF

SEQ ID NO: 3219 - protein, 375 aa, Pseudomonas syringae pv. phaseolicola 1448A
MAEAKVLSGAGLRGQVAGQTALSTVGMAGAGLTYRGYDVRDLAAEARFEEVAYLLLYGELPDKAELSAYMDKLKDLRDLPQALKEVLERIPADTHPMDVMRTGASMLGTLEPERSFDQQRDSTDRLLAAFPAIMCYWYRFSHDGKRIDCTSAEDSIGGHFLHLLLDKAPSELHRKVMDVSLILYAEHEFNASTFTARVCASTLSDLYSCVTAAIGTLRGPLHGGANEAAMEMIQRFASAEEATKGTLGMLERKEKIMGFGHAIYKESDPRNEVIKGWSKKLADEVGDTVLFPVSEAIDKVMWEQKKLFPNADFYHASAYHFMGIPTKLFTPIFVCSRLTGWAAHVFEQRANNRIIRPSAEYTGVEQRSFVPIEQR

SEQ ID NO: 3220 - protein, 412 aa, Oryza sativa (japonica cultivar-group)
MSSKEKPTLGGQRIKTRKRNIAAPLDPASFSDAIVQIYLDNAGDLELVAKSIESSDLNFSRYGDTFFEVVFIGGRTQPGTIKPEEEGERHPYSVLDCAAQREAILPSVLYIQKTLRRRPFLIKNLENVMRKFLQSLEFFEENERKKLAIFTALAFSQKLSGLPPETVFQPLLKDNLVSKGIVLSFITEFFKEYLKENTLDDLIALLKKGKMEDNLLEFFPSAKRTSEALSEHFTKEGLTSLVEYNEKKMFEVKLKEIKLTLTTMINEEAEISEVTEAVKQQVKDAKFPDIEVVRMLWDVLMEAVQWSGKNQQQNSNSALRQVKAWAGLLNAFCTSGRLELELIYKVQTQCYEDAKLMKLFPEIIRTLYDQDVLAEDTILLWFRKGSNPKGRQSFVKALEPFVKWLEEAEEEE

SEQ ID NO: 3221 - protein, 159 aa, Triticum aestivum
HEGTLCNACGVRYRQGRLLPEYRPIASPTFEPSEHANRHSQVLQLHRHRKSQSQSQSHHQQHPLPVEHHPPRAMDVLQFPPQRWHVKEEYPPTPVHQPLSLAGGVGGLMVDAAADADAGQGGDRGKGSDLNNAPSSLDSLLLEGPSAPLLVDGDQPLID

SEQ ID NO: 3222 - protein, 592 aa, Schizosaccharomyces pombe
MRNTHNPNETEASEDAENDTQSESDLSFDHGSSEKLNRASLPKTQNSAIPQSNALNTTPNESTSQIDSSPKIPSAVPHISTPNPSSGASTPNIKRVSDFKFGEILGEGSYSTVLTATENSTKREYAIKVLDKRHIIKEKKEKYVNIEKEALCILSKHPGFIKLFYTFQDAHNLYFVLSLARNGELLDYINKLGRFNEICAQYYAALIVDSIDYMHGRGVIHRDLKPENILLDDNMRTKITDFGSAKILNSSHGSHEEDTHHADKPQAHSRSFVGTARYVSPEVLSDKIAGTASDIWAFGCILFQMLAGKPPFVAGNEYLTFQSILHLSYEIPPDISDVASDLIKKLLVLDPKDRLTVDEIHQHPFFNGIKFDNTLWELPPPRLKPFGHTSVLSLSVPNASNKHENGDLTSPLGVPSMVSASTNAAPSPVGTFNRGTLLPCQSNLEEENKEWSSILQDDEKISKIGTLNVYSMSGINGNDAFRFFSSLFRKRKPRTFILTNFGRYLCVASDGEGRKTVKEEIPIKSVGMRCRMVKNNEHGWVVETPTKSWSFEDPNGPASAWVELLDKASSISLPFGNHSVTSFSRSIARSAV

SEQ ID NO: 3223 - protein, 344 aa, Leifsonia xyli subsp. xyli str. CTCB07
MSWRMPAETAPHERTWIAFPRAGITLGENAASAEEAYAAWTAAAHAVAEFEPVAMVVDPSESERAARMLGSHIDQVEAPLDEFWMRDVGPTFVVDDERPGVLGAVDWTFNGWGGPAWSQWRASAEIARFVAERIGAELISSALVNEGGGIHVDGEGTVLLTETVQLDPRRNPYAGKARVEAELARTIGATHAVWLPRGLTRDYGEFGTNGHVDIVTAIPSPGRLLLHTQRNPGHPDFAVSRELRAFLAGTTDAAGRPWEIVELPAPETLRDEEGFVDWSYVNHLMVGDGIVACGFGEGRANAEAAAILEAAYPGRRVTMVDSRPIFARGGGIHCITQQQPAVAA

SEQ ID NO: 3224 - protein, 589 aa, Ustilago maydis 521
MATLPAMDKRTFWFRDAIVYQIWPASYKDSNNDGIGDIQGIISTLDYVESLGVNTIWLSPMYESPQVDMGYDISDYQNVYAPYGTLQDMDELIRECHAREIKLILDLVINHTSDQHAWFQESKKSKVSPKRDWYIWRPAKYDARTGERRPPNNWRGALNQSAWTWDEATQEYYLHLFTPQQPDLNWSNVECRRTLYSDTIEFWLKRGINGFRVDTVNLYSKPMDFPDAPITDPNAEWQMGDTVFCNGPRMHEYLQEMGVIFAKYDAMTVGELPSTPKIEDVLRYISAERNELSQVFQFDISTLGRDENDFYATHPFSLQELKEVVEKWQRYVEGTDAWPTVFLENHDLPRAISKYASDRPEFIAASGKMLALMEIGLTGTLYIYQGQEIGMTNVPKAWAHEEYKDVIAVNYYRDAVTRSGGDEKVLKKTLEDINKQGRDSARTPVQWSSEPNGGFSTDPNTVPWMRTNDNYTSINVAAQEKDDQSVLAFYRKGLALRKEYACLLARGEFRLLDRENQQVLKYLKIPEGGQEDDNGQRVFVVLNFSNCPQEYTVPEEAGGNKASMLVETLEKGEPGKLRPWEGRMYLYRP

SEQ ID NO: 3225 - protein, 127 aa, Listeria monocytogenes
MGIAVLGGAGYIGSHAVNELITRGYEVVVIDNLRTGHRESIHKKAKFYEGDIRDKAFLSSVFEKEKVDGVIHFAASSLVGESMEVPLDYLNNNVYGTQIVLEVMEEFDVKHIVFSSSAATYGEPERV

SEQ ID NO: 3226 - protein, 660 aa, Xanthomonas oryzae pv. oryzae KACC10331
MRWNCSACWASSASANAGRRRHFDTSLWRASCSGYGARARQIQAAWIRADTPESTRVPATRRIRLLNPVVPVRSLSACRHLTRSRPPLRSFTMPHVVARSGDVMSSAAPPSCTSLLGLSLSMFVAPCTLTAAPLDTPVVNAPAPTPPTPDQAYPELFQAVQSGELFDDQKHFVDFLPLRDPALINADYLAQHDHPGFDLRKFVDANFEESPPVQTDAIRQDTALREHIDLLWPKLVRSQNHVPPYSSLLSLPHPYVVPGGRFREVYYWDSYFTMLGLVKSGQTTLSRQMLDNFAYLIDTYGHIPNGNRSYYLSRSQPPFFSYMVELQAGVEGQAVYQRYLPQLQKEYAYWMQGSDDVQPGQAARHVVRLADGSVLNRYWDERDTPRPEAWLHDTRTAAEVKDRPAAEVYRDLRAGAESGWDYTSRWLADGQNLRTIRTTAIIPIDLNSLLYHLERTLAQACAQPGAACSRDYAALAQQRKQAIDAHLWNKAGYYADYDWQTRTLSDQITAAALYPLFAGLASDDHAKRTASTVRRTLVRPGGLATTAVKTGQQWDEPNGWAPLQWVAVDGLRRYGEQALARTIGERFLAQVQALFAREHKLVEKYGLETNAAGGGGGEYALQDGFGWTNGVTLMLLNLYPGKGAKAAPAKRVRKTEAAAR

SEQ ID NO: 3227 - protein, 352 aa, Gluconobacter oxydans 621H
MGRLIIVSNRTPAPGERTQPAGGLTVGLCDAVQTQETLWFGWSGHQHADAADRPVQSEQVGNVNYVTFDLTQRQYDRFYLNFSNGVLWPLCHYRTNLIRYTREDCDAYYEANEVFADRLVGLLEPDDTVWIHDYHLFPLGKMLRDRGVTGRIGFFLHIPFPPWSVARLLPRLDMLLSGLAACDLIGVQTPEDATNLKGCFEIYGLKAAVEAVPIGIDPVSFRQQAIESASSDEVVKIMDTLEGTRLIMGVDRLDYSKGLPERMKGFEALLKNYPEHRGQVTFLQVTPVSRGGVESYRLLKEELDGLVGTINGAYARRTGCRSATRPGRSGGIFLPGFTGWQMWGLSRRCGMA

SEQ ID NO: 3228 - protein, 293 aa, Triticum aestivum
  misc_feature (217)..(217): Xaa can be any naturally occurring amino acid
  misc_feature (231)..(231): Xaa can be any naturally occurring amino acid
  misc_feature (240)..(240): Xaa can be any naturally occurring amino acid
  unsure (1)..(293): unsure at all Xaa locations
MAKDEVMETGGGGDFAAKDYTDPPPAPLIDAAELASWSLYRAVIAEFIATLLFLYITVATVIGYKHQTDPAVNSAADAACGGVGVLGIAWAFGGMIFVLVYCTAGISGGHINPAVTFGLFLARKVSLVRALLYMIAQCLGAMCGVGLVKAFQSAYFVRYGGGANTLAAGYSKGTGLAAEIIGTFVLVYTVFSATDPKRSARDSHVPVLAPLPIGFAXVFMVHLATIPITGXTGINPARSXLGAAVIYNKDKAWDDQWIFWVGPMIGAAIAAFYHQYILRAGAIKALGSFRSNA

SEQ ID NO: 3229 - protein, 481 aa, Citrullus lanatus var. lanatus
NSNSSPRSTARKLTPGVAYSVLMSEISEVSSTLQAPIFETPRADPKKIASIILGGGAGTRLFPLTSQRAKPAVPIGGCYRLIDIPMSNCINSGIEKIFVLTQFNSFSLNRHLARIYNFGNGVNFGDGFVEVLAATQTSGETGKKWFQGTADAVRQFIWLFEDAKTKNVEHTLILSGDHLYRMDYMDFVQRHIDTNADITVSCIPMDDSRASDYGLMKIDDTGRILHFAEKPKGSDLEAMKVDTTVLGLSNQDARKNPYIASMGVYIFRTDLLLKLLTWSYPSCNDFGSEIIPSAVKDYKVQAYLFNDYWEDIGTVKSFFDANLALTEQPPKFEFYDPKTPFYTSPRFLPPSKVEKCRIVDAIISHGCFLRECSVEHSIVGVRSRLEYGVELKDTMMMGADYYQTESEIASLLAEGKIPIGIGENTKIRNCIIDKNARIGRNVVIANSDDVQEADRPEDGFYIRSGITVTLKNATIKDGTII

SEQ ID NO: 3230 - protein, 118 aa, Brassica napus
GVSILSGNGTVANLTLRQPVTTHGNNGGTEAGAGGVVTLRGRFEILSITGTVLPPPAPPGCGGLSIFVAGEQGRMIGGRVVAPLVASGPVILMAASFSNATFERLPLEDEGGEGGGDV

SEQ ID NO: 3231 - protein, 493 aa, Actinobacillus pleuropneumoniae serovar 1 str. 4074
MANYFNTLNLRQKLDQLGRCRFMDRNEFADGCNFLKGKKIVIVGCGAQGLNQGLNMRDSGLDISYALRAEAIAEKRASFTRATENGFKVGTYQELIPTADLVINLTPDKQHSKVVADVVPLMKQGSAFGYSHGFNIVEEGEQIRKDITVVMTAPKCPGTEVREEYKRGFGVPTLIAVHPENDPKGEGMAIAKAWASATGGDRAGVLKSSFVAEVKSDLMGEQTILCGMLQAGSIVCYDKLVADGKDPAYASKLIQYGWETITEALKQGGITLMMDRLSNAAKIRAFELSEEIKVQLNDLYLKHMDDIISGEFSSTMMADWANGDVNLFKWREETGKTAFENSPKADGIKISEQEYFDNGVVMVAMVKAGVEMAFDAMVASGIYEESAYYESLHELPLIANTIARKRLYEMNVVISDTAEYGNYLFSHVATPILAEKLIPMLQKGDLGEPTPAAEIDNVYLRDINDAIRNHPVELIGQELRGYMTDMKRISSQG

SEQ ID NO: 3232 - protein, 267 aa, Solibacter usitatus Ellin6076
MTRIGRLFDCLKRENRKALIAYLTAGDPTPDHTPGLVEALVRGGADLIELGVPFTDPIADGPVIQRAGERALKAGTTLASVLEIARKIRETSEVPLLLFTYLNPVLRYGLDRLGADAAAAGIDGCLLTDASVEEAESYVAAMHKHGLDTVFLAAPTSTARRIELVARYSTGFVYLVSRTGVTGERESLSASVAPLIQAVRAATDLPLAVGFGISKPEHVAELGSQVEAVVVGSAFVRLIEQNAESAALEIQLESFTRELKRGFGARA

SEQ ID NO: 3233 - protein, 398 aa, Vetiveria zizanioides
SADLVFTAHPTQSARRSLLQKNARIRNCLTQLKAKDITEDDKQELDEALQREIQAAFRTDEIRRAQPTPQDEMRYGMSYIHETVWKGVPKFLRRVDTALKNIGIKERLPYSVPLIRFCSWMGGDRDGNPRVTPEVTRDVCLLSRMMAANLYIDAIEDLMFELSMWRCDDELRARAEEVLSTPSAKKVTKYYIEFWKQIPPNEPYRVILAAVRDKLYNTRERARHLLATGVSEIPEDAVFTNVDEFLEPLELCYKSLCDSGDKAIAEGSLLDLLRQIFTFGLALVKLDIRQESERHTDVVDAITTHLGIGSYRSWPEEKRFDWLLSELRGKRPLLPADLPMTEEIADVVGAMRVLAELPPDSFGPYIISMCTAPSDVLAVELLQRECGIRQPLPVVPLF

SEQ ID NO: 3234 - protein, 313 aa, Kageneckia oblonga
GGLGDVLGGLPPAVAANGHRVMTVSPRYDQYKDAWDTSVLVEIEVGGRVETVRFFHCYKRGVDRVFVDHPLFLERVWGKTESKIYGPRAGVDYKDNQFRFSLLCQAALEAPRVLNLNSNKYFSGPYGDDVVFIANDWHTALLPCYLKTIYKPKGIYKKAKVAFCIHNIAQPGRFPLSDFSLLDLPNNLEGSFDFFDGYNKPVKGRKINWMKAGILESDRVVTVSPYYAQELISGEDKGVELDNIIRKTGITGIVNGMDVQEWNPATDKYLDIKYDNTTVLDAKPLLKEALQAEVGLPVDRNIPVIGFIGRLEE

SEQ ID NO: 3235 - protein, 398 aa, Ischaemum koleostachys
SVDLVFTAHPTQSARRSLLQKNARIRNCLTLLSAKDVAPEDKKELDEALQREIQAAFRTDEIRRAQPTPQDEMRYGMSYIHETVWKGVPKFLRRVDTALKNIGINERLPYNVPLIKFCSWMGGDRDGNPRATPEVTRDVCLLSRMMAANLYIDQVEDLMFELSMWRCNEELRVRAEELHSTPASKKVTKYYIEFWKQIPPNEPYRVILGAVRDKLYNTRERARHLLATGFSEISEESVFTNIDEFLEPLELCYKSLCDCGDKAIADGSLLDLLRQVFTFGLSLVKLDIRQESERHTDVLDAITTHLGIGSYRSWPEDKRMEWLVMELRGKRPLLPPDLPMTEEIADVIGAMRVIAELPSDSFGPYIISMCTAPSDVLAVELLQRECGIRQTLPVVPLF

SEQ ID NO: 3236 - protein, 483 aa, Streptococcus thermophilus CNRZ1066
MIVSTYYPKIFYCDKLILLHLLEESMKNHNYENEGQFQRKMTSRHLFMLSLGGVIGTGLFLSSGYTIAQAGPLGAILSYLVGAVVVYLVMLSLGELAVAMPVTGSFHTYATKFISPGTGFTVAWLYWICWTVALGTEFLGAAMLMQRWFPSVPAWIFAAFFALVILGINALSVRSFAEAESVFSSIKVIAILVFIILGLGAMFGLVRFEGHHEAIMFKHLTANGLFPNGGLAIVSVMLAVNYAFSGTELIGIAAGETDNPKEAVPRAIKTTIGRLVIFFVLTIVVLASLLPMKEAGVSSAPFVDVFDKMGIPFAADIMNFVILTAILSAGNSGLYASSRMLWSLANEGMLNKKLVTINKHGVPMTALLISMAGAVLSLFSSIYAADTVYLALVSIAGFAVVVVWLSIPMAQINFRKQWKLEHSEDELDYKTPFNPILPYITIVLLAISVLGIAWDSSQRAGLYFGIPFMIFCYLYHYLCFNKW

SEQ ID NO: 3237 - protein, 398 aa, Sorghum arundinaceum
SVDLVFTAHPMQSARRSLLQKNARIRNCLTQLSAKDVTVEDKKELDEALHREIQAAFRTDEIRRAQPTPQDEMRYGMSYIHETVWNGVPKFLRRVDTALKNIGINERLPYDVPLIKFCSWMGGDRDGNPRVTPEMTRDVCLLSRMMAANLYINQVEDLMFELSMWRCNDELRARAEEVQSTPASKKVTKYYIEFWKQIPPNEPYRVILGAVRDKLYNTRERARHLLATGFSEISEDAVFTKIEEFLEPLELCYKSLCECGDKAIADGSLLDLLRQVFAFGLSLVKLDIRQESERHTDVIDAITTHLGIGSYRSWPEDKRMEWLVSELKGKRPLLPPDLPLTEEIADVIGAMRVLAELPIDSFGPYIISMCTAPSDVLAVELLQRECGIRQTLPVVPLF

SEQ ID NO: 3238 - protein, 437 aa, Agrobacterium tumefaciens str. C58
MTAITMNDALERAGAGAYQRRLMGIFGLVWAADAMQVLAVGFTAASIAATFGLTVPQALQTGTAFFFGMLLGAAGFGRLADRYGRRRVLIVTVACDALFGVLSIFSPDFTILLVLRFLTGAAVGGTLPVDYAMMAEFLPAKNRGRWLVFLEGFWAVGTLIVALAAWGASLAGVADAWRYIFAVTAFPAVLGLGLRFLVPESPLYLLRTGRSEEAKAVVNRMLVVNGRAPLDAGTGLFQPDVTKGQGIFSPALRQRSMMILAIWFLVSVSYYGVFTWMPAKLAGDGFGFVRGYGFLVLVALAQIPGYAIAAYGVEKWGRKPTLIGFCLLSALGCLLFTLASAGAMIAASLLIMSFALLGTWGALYAFTPELYPTESRATGMGAAGAMARLGGLLAPSLLGYAIAQGFGVAIGIFAGLLVLAAIAATMINAETRQVALT

SEQ ID NO: 3239 - protein, 313 aa, Malus sargentii
GGLGDVLGGLPPAMAANGHRVMTISPRYDQYKDAWDTEVTVELKVGDKTETVRFFHCYKRGVDRVFVDHPLFLEKVWGKAASKIYGPVAGVDFKDNQLRFSLLCQAALVAPRVLNLNSSKYFSGPYGEEVVFIANDWHTALLPCYLKAIYKPKGIYKTAKVAFCIHNIAYQGRFAFADFALLNLPNEFKSSFDFIDGYDKPAKGRKINWMKAGILESDKVLTVSPYYAEELVSSVEKGVELDNILRKSGIQGIVNGMDVQEWNPVTDKYTTVKYDASTVADAKPLLKEALQAEVGLPVDRDIPVIGFIGRLEE

SEQ ID NO: 3240 - protein, 398 aa, Eulalia aurea
SVDLVFTAHPTQSARRSLLQKNARIRNCLTQLKAPDITEDDKQELDEALQREIQAAFRTDEIRRAQPTPQDEMRYGMSYIHETVWKGVPKFLRRVDTALKNIGITERLPYDVPLIKFCSWMGGDRDGNPRVTPEVTRDVCLLSRMMAANLYIDQIEDLMFELSMWRCNDELRARAEELLKTPDAKKVTKYYIEFWKQIPPNEPYRVILGAVRDKLYNTRERARHLLATGYSDIPEDAIFTKVEQILEPLELCYKSLIDCGDKVIAEGSLLDVLRQVYTFGLSLVKLDIRQESERHTDVIDAITTHLGIGSYRSWPEEKRVEWLVGELKGKRPLLPPDLPMTEEIADVVGAMHVLAELPSDSFGPYIISMCTAPSDVLAVELLQRECGIKQTLPVVPLF

SEQ ID NO: 3241 - protein, 330 aa, Agrobacterium tumefaciens str. C58
MGMLVEGVWKDVWYDTKETKGHFKRSASQFRNWVTVDGAVGPSGEGGFEAEKDRYHLYVSFACPWAHRTLIFRKLKKLEDLISVSVVDPLMLENGWEFKPEGERTPGATQDHLFGSSTLWQVYTKADPTYSGRVTVPVLWDKKRGTIVSNESAEIIRMFNVAFNDLTGSDADYYPKALRAEIDALNDVIYDTVNNGVYKAGFATTQDAYQQNAVKVFETLDMLEDRLKDRRFLFGSEQTEADWRLFTTLVRFDPVYVGHFKCNIRRIHDYPHLTGYLRDLYQTPGVPDTVDMRHIKEHYYRSHRTINPTGIVPIGPELDLTMAHGREALS

SEQ ID NO: 3242 - protein, 313 aa, Malus sargentii
GGLGDVLGGLPPAMAANGHRVMTVSPRYDQYKDAWDTGVPVEIEVGGRVETVRFFHCYKRGVDRVFVDHPSFLERVWGKTGSKIYGPSAGEDYKDNQFRFSLLCQAALEAPRVLNLNSNKYFSGPYGDDVVFIANDWHTALLPCYLKAIYKPKGIYENAKVVFCIHNIAYQGRFPISDFSVLNLPENLKGSFDFIDGYNKPVKGRKINWMKAGILESDRVVTVSPFYAQELVSGEDKGVELDNIIRKTGITGIVNGMDVQEWNLATDKYLDTKYDNTTVLDAKPLVKEALQAEVGLPVDRNIPVIGFIGRLEE

SEQ ID NO: 3243 - protein, 313 aa, Oemleria cerasiformis
GGLGDVLGGLPPAMAANGHRVMTVSPRYDQYKDAWDTSVLVELEVDGRIETVRFFHCYQRGVHRVFVDPPSFLERVWGKTGSKIYGPRAGVDYRDNQLRFSLLCQAALEAPRVLNLNSNEYFSGPYGEDVVFIANDWHTALLPCYLKTIYKPEGIYQTAKVAFCIHNIAYQGRFPFSDFSLLDLPDQLKGSFDFIDGYNKPVKGRKVNWMKAGILESDRVVTVSPYYAQELVSGEDKGVELDNIIRKTGITGIVNGMDVQEWNPTRDKYLDVKYDETTVLDAKPLLKEVLQAEVGLPVDRNIPVIGFIGRLEE

SEQ ID NO: 3244 - protein, 178 aa, Triticum aestivum
  misc_feature (100)..(100): Xaa can be any naturally occurring amino acid
  misc_feature (133)..(133): Xaa can be any naturally occurring amino acid
  misc_feature (171)..(171): Xaa can be any naturally occurring amino acid
  unsure (1)..(178): unsure at all Xaa locations
MPPPVMASSATSVAPFQGLKSPAGLPVSRRSNGVSLGSVSNGGRIRCMQVWPIEGIKKFETLSYLPPLSTEALLKQVDYLIRSKWVPCLEFSKVGFIFRXEHNACRGYYDGRYWTMWKLPMFGCTPHTQVINXEVGEVKKEYPDAYVRIIGLDNMRQVQCVSFIAFKPPGXCEESGKA

SEQ ID NO: 3245 - protein, 273 aa, Phaeodactylum tricornutum
MKFATAATVTLLALSTVDALNVKKLFRFGKTSLPKDSSPKPAAKGGYDLDVSELFDGNNKFIADKLAGDPAYFDTLGTVHSPKYLYIGCVDARAPPNMIMGTEAGTMLTVRNIANMVVNNDLAVMSAIQFGINVLKIPNVILCGHYECGGVRASVANVDHAPPLSIWLRNIRDVYRLHAKELDAIKDPEERHRRLVDLNVIEQCVNLFKTGVIQAKRIESYKDGGVAIPQVHPVVFDPKTGEVKKLKVDFDKYMAEINGIYDLYDLENAKVPM

SEQ ID NO: 3246 - protein, 328 aa, Corynebacterium glutamicum ATCC 13032
MVSVGTMKAILVSRTGGPEVLEFTDTDAPKPTDDQVLVEVDMAGVNFIDTYYRQGEYHARLPFIPGFEGTGRVLEDPQGLIAAGTKVAWCDAMGSYAQQVCVPRDRLVAVPEGVSSEVAASMLMQGITAHYLTNGVYELEEGDSCLITAGAGGVGLLATQMAAAKGVRVYSVVSTDEKAELALDAGAYEVFRYSDNLAEQVRRHNGGRGVDVVYDGVGQSTFNESLEAVRPRGTVCLFGAASGPVEPFDPQLLNTHGSIFLTRPSIGAWTSEEGEFAKRAQAVTQAIVEGTLRVRVTGTYSLADAYIAHRDLQARSTSGSLVLEIPKD

SEQ ID NO: 3247 - protein, 972 aa, Triticum aestivum
MALSAPGGGSGKIERLSSIDAQLRLLVPAKVSEDDKLIEYDALLLDRFLDVLQGLHGDDLREMVQECYEVAAEYETKHDLEKLDELGEMITSLDPGDSIVIAKAFSHMLNLANLAEEVQIAYRRRVKLKKGDFADENSAITESDIEETLKRLVFDMKKSPAEVFDALKNQTVDLVLTAHPTQSVRRSLLQKHSRIRNCLVQLYSKDITPDDKQELDEALQREIQAAFRTDEIRRLSPTPQDHMRAGMSDFHETIWKGVPKFLRRVDTALKNIGINERVPYNAPLIQFSSWMGGDRDGNPRVTPEVTRDVCLLARMMAANLYCAQIEDLMFELSMWRCNDELRSRADELHRSSKKDAKHYIEFWKKVPPNEPYRVILGDVRDNLYNTRERSRELLSSGHSDIPEEATLTNLEQLLEPLELCYRSLCACGDRVIADGTLLDFLRQVSTFGLSLVKLDIRQESDRHTDALDAITSYLGIGSYREWSEEHRQEWLLSELNGKRPLFGADLPMTEEVADVMGAFQVIAELPGDNFGAYVISMATSPSDVLAVELLQRECHIKTPLRVVPLFEKLADLEAAPAALARLFSIDWYRERINGKQEVMIGYSDSGKDAGRLSAAWQMYKAQEDLVKVAKQFGVKLTMFHGRGGTVGRGGGPTHLAILSQPPDTINGSLRVTVQGEVIEQSFGEEHLCFRTLQRFTAATLEHGMRPPISPKPEWRALLDEMAVVATEEYRSIVFQEPRFVEYFRLATPETEYGRMNIGSRPSKRKPSGGIESLRAIPWIFAWTQTRFHLPVWLGFGGAFKHILKKDIRNFHMLQEMYNEWPFFRVTIDLVEMVFAKGNPGIAALYDRLLVSEGLQPLGEKLRANYEETQKLLLQVAGHKDLLEGDPYLKQRLRLRDAYITTMNVCQAYTLKRIRDPDYHVALRPHLSKEVMDTSKPAAELVTLNPASEYAPGLEDTLILTMKGIAAGLQNTG

SEQ ID NO: 3248 - protein, 700 aa, Corynebacterium glutamicum ATCC 13032
MTTLTLSPELQALTVRNYPSDWSDVDTKAVDTVRVLAADAVENCGSGHPGTAMSLAPLAYTLYQRVMNVDPQDTNWAGRDRFVLSCGHSSLTQYIQLYLGGFGLEMDDLKALRTWDSLTPGHPEYRHTKGVEITTGPLGQGLASAVGMAMAARRERGLFDPTAAEGESPFDHHIYVIASDGDLQEGVTSEASSIAGTQQLGNLIVFWDDNRISIEDNTEIAFNEDVVARYKAYGWQTIEVEAGEDVAAIEAAVAEAKKDTKRPTFIRVRTIIGFPAPTMMNTGAVHGAALGAAEVAATKTELGFDPEAHFAIDDEVIAHTRSLAERAAQKKAAWQVKFDEWAAANPENKALFDRLNSRELPAGYADELPTWDADEKGVATRKASEAALQALGKTLPELWGGSADLAGSNNTVIKGSPSFGPESISTETWSAEPYGRNLHFGIREHAMGSILNGISLHGGTRPYGGTFLIFSDYMRPAVRLAALMETDAYYVWTHDSIGLGEDGPTHQPVETLAALRAIPGLSVLRPADANETAQAWAAALEYKEGPKGLALTRQNVPVLEGTKEKAAEGVRRGGYVLVEGSKETPDVILMGSGSEVQLAVNAAKALEAEGVAARVVSVPCMDWFQEQDAEYIESVLPAAVTARVSVEAGIAMPWYRFLGTQGRAVSLEHFGASADYQTLFEKFGITTDAVVAAAKDSING

SEQ ID NO: 3249 - protein, 360 aa, Corynebacterium glutamicum ATCC 13032
MSHIDDLAQLGTSTWLDDLSRERITSGNLSQVIEEKSVVGVTTNPAIFAAAMSKGDSYDAQIAELKAAGASVDQAVYAMSIDDVRNACDLFTGIFESSNGYDGRVSIEVDPRISADRDATLAQAKELWAKVDRPNVMIKIPATPGSLPAITDALAEGISVNVTLIFSVARYREVIAAFIEGIKQAAANGHDVSKIHSVASFFVSRVDVEIDKRLEAIGSDEALALRGKAGVANAQRAYAVYKELFDAAELPEGANTQRPLWASTGVKNPAYAATLYVSELAGPNTVNTMPEGTIDAVLEQGNLHGDTLSNSAAEADAVFSQLEALGVDLADVFQVLETEGVDKFVASWSELLESMEARLK

SEQ ID NO: 3250 - protein, 592 aa, Xanthomonas oryzae pv. oryzae KACC10331
MLNLRIGWRRGSGAFRHSFRCPVPGGEREPARLTWMPVSEDLGTVRCEVARVEMAGVSRYRQAELHTVRIVSVGSAVRLERWLRSWGGAGLRRGPCPGRCRDVSITAWHKARPLARMGAISYPDQFAHSSGAVPMSDPSAPDHLQRSLSNRHLQLIAIGGAIGTGLFMGSGKTISLAGPSILFVYLIIGAMLFFVMRAMGELLLSNLEYKSFIDFSTDLLGPWAGFFCGWTYWFCWIITAIADVIAIAAYAQFWFPGLAPWIPAVLCVLLLLSLNLVKVKLFGEMEFWFALIKIIAIAALIMTGAGLVVWGFRSPSGNVASLSNLWNDGGMFPMGIGGFFAGFQIAVFAFVGIELVGTTAAETADPRRNLPKAINSIPVRILIFYVLALIAIMAVTPWRQVVADKSPFVELFVLAGVPAAASLINFVVLTSATSSANSGIFSTSRMLYGLAEEQHAPNGFAKLSRASVPARGLLFSCLCLLLGAMLVYLIPNLVTAFTLVTTLSAVLFMFVWSLILCAYIAYRRKCPEQHAVSAFKMPGGVLMCYVCLSFFAFVIVLLMLQDDTRQALLASPVWFLLLAIGYAVKRRQNRQR

SEQ ID NO: 3251 - protein, 248 aa, Zea mays
MAAGGDDTTIAQVHSGIDSSNKTLLKSEALYKYVLDTSVLPHEPESMRELRLVTDKHEWGFMQSSPDEASLLRMLIKLSGARRTLEVGVFTGYSLLATALALPADGKVIAFDVSREYYDIGRPFIERAGVAGKVDFREGPALEQLDELLADPANHGAFDFAFVDADKPNYVRYHEQLLRLVRVGGTVVYDNTLWAGTVALPPDAPLSDLDRRFSAAIRELNVRLSQDPRVEVCQLAIADGVTICRRVV

SEQ ID NO: 3252 - protein, 515 aa, Podospora anserina
MSKPQPPNLTLEFPSPQPSPGSSVPKMNSVPLLRPALPGGNRSGGRAPRLGLAIPPSPNAKPLSNPGPAPGRPALPTLHLATPMGSSSVVPQEQPQHIKPALSLQSASGGSESSAAHSRSGSFGPFDGRASNPTSAGSQFSALSFAEQYGIGPTRHAGTGDPVSAVGSLYSNASESVGMERENSLHGLESFDKLSLDKARSADVEDLDDEGWRIVSMEKRIVELGSLGEGAGGAVTRCKLKGGNTVFALKVITTNPDPDVKRQIVRELGFNKDCMSEHICRYYGAFVDPSTATISIAMEFCEGGSLDSIYKEVKRLGGRTGEKVLGKISEGVLQGLTYLHSKKIIHRDIKPSNILLCRNGEVKLCDFGVSGEFGTKGDANTFIGTSYYMAPERITGQSYTITSDVWSTGVTLLEVAQHRFPFPADGTEMQPRAGLIDLLTYIVRQPIPKLKDEPEASIFWSDSFKYFIECCLEKDPLRRATPWRMLEHPWMVEMKTKRVNMSKYLTQVWGWDDKK

SEQ ID NO: 3253 - protein, 685 aa, Oryza sativa
MADMSPRTDTSTDDTDDNHMLEPGQLALAAASDSDRSKDKHEDQKTLRRLAQNREAARKSRLRKKAYVQQLENSRLKLTQLEQELQRARQQGIFISSSVDQTHSMSGNGALAFDMEYARWLEEHNRQINELRSAVNAHAGDNELRGVVDKIMSHYEEIFKQKGNAAKADVFHVLSGMWKTPAERCFLWLGGFRPSELLKLLSTQLEPLTEQQLSGIANLQQSSQQAEDALSQGMEALQQSLAETLAGSLGSSGSTGNVANYMGQMAMAMGKLGTLENFLRQADNLRQQTLQQMQRILTTRHTPQWQYIGFFTVMPAYGLTCTGDPITSIGLWCDWLGYGECAGDDWHVIDCGADCHTSELVIENLKPRCISNARRRAVLRASSSPQWARPSHEKEQQRTDCIVTQKLQEYGTKLADGDELGRKMPQHQGREKMLALRREPTPPGYLPDGVYPVMASEKNIKVFQMGTHVEASIPFQTRAAAEHAWKLNGRAIYDGCCWLNIQWAQPSSSTPAAATPLVGITKELIANVLELKAMLKESNASKEVEDGRTKQKVAAVDLAVMAPVAMPLTQMSPPADSLVEQEMATQQKTVEGTTRTLPAVVPSSQFPPSEAGFSNSKEQEAAPAWSSEAGGMAWHEGGSAFCVKVEHSDGACCAQPGFASSHVLAVGLAGSTIAEDNGDLQMVLV

SEQ ID NO: 3254 - protein, 243 aa, Hordeum vulgare
MAAATAPFALVSRLSQAARLPIRAWRAARPAPLWTGRTRPLSVASAAQEDRDNSVDVQVSQARNAGNQQGNAVQRRPRRAGFDISPFGLVDPMSPMRTMKQMSDTMDRLFDDAVGFPTARRSPAAAAGEMPRMPWDIMEDDKEVKMRFDMPGLSREEVKVMVEDDALVIRGEHKKEAGEGQGEAAGGGDGWWKERSVSSYDMRLALPDECDKSQVRAELKNGVLLVSVPKRETERKVIDVQVQ

SEQ ID NO: 3255 - protein, 497 aa, Kluyveromyces lactis NRRL Y-1140
MAGITGITPEFKNSDLIRKGAFVDGQWLETASETFNVTDPATLEVIATLPDQSIEVIHEAIDSAAEAFRLFKKTTPKTRSTWLRNLYNLMMENVDDLAKIITWENGKALSEAQGEVKYAASYFEWYAEEAVRMYGTTIQPNNGSNRAFTVRQPVGVCGIICPWNFPSAMITRKAGAALAAGCTVVVKPDSQTPLSALALAHLAEKAGFPKGVFNVVLTATRTPEFGLALCESPKVKKISFTGSTNVGKILMKQSASTMKKLSFELGGNAPVIVFDDADLEQAVTQTILSKFRGLGQTCVCANRIYVQRTIIDSFAEKLAKQVNEFVIGHGLDSKTTHGCLINENAIKKVEAHVKDALEKGAKTVVAGGRLPELGPNFYAPTVLSHVPSTAVVNKDETFGPLCALIPFDTMEEVVGYANDTELGLASYVFSKNIDTVYTVAEALETGMVSCNTGLFSECTIPFGGVKESGFGREGSLHGIEDYTVIKTITIGNLPAPL

SEQ ID NO: 3256 - protein, 244 aa, Hordeum vulgare
MAAATAPFALVSRLSPAARLPIRAWRAARPAPLWTGRTRPLSVASAAQENTDSSVDVQVSQDRNAGNQQGNAVQRRPRRAAGFDISPFGLVDPMSPMRTMKQMLDTMDRLFDDAVGFPTAGRSPAAAAGEMPRMPWDIMEDDKEVKMRFDMPGLSREEVKVMVEDDALVIRGEHKKEAGEGQGEAAGGGDGWWKERSVSSYDMRLALPDECDKSQVRAELKNGVLLVSVPKRETERKVIDVQVQ

SEQ ID NO: 3257 - protein, 1049 aa, Streptomyces coelicolor A3(2)
MFIQLLQAACLPGAHGDPPPVLVTLGVRADFYDRCLRYPELADALQHRHMVLGPLTTAELREAVTAPARAVGMELEPGLAELIIREVSTDGPRGGCDSHAFRAVGEHDAGVLPLLSHALLATWQRRKAGRLTLAGYRAAGGIQGAVAATAERAWSGLDPAARTAARLLLLRLIRLSEDTQATRRRSTRRRLAEEARDPDKTEESLEALVRARLVTLDADTVEITHEALLHAWPRLRDWIDEDRAGNLLRQRLEEDGLAWEESDRDSALLYRGSRLAQADGWAKSADDTFLTRSAVEFLAAAVRLRRRTVMISRAAVSALVVLALLAVGSAVLAWQQRNDAVFEQVVAEADRVQDTDPSLSAQLDLAAHRLRPDDEDVRNRLISIVNAPLATPLLGHTGAVYLTSFSPDGRILATASYDRTVRLWDVSDPGRPQQLGKPLTGHTSWVSTAVFSPDGRTLASASDDGTIRLWDVTDPGRPRPLGAPLDGHGGTVYLLAFSPDGRTLASAHDDHAVRLWNVADRRAPEALDTLTGSTGAVRSVAFSPDGDTLASGGDDDKVRLWDVSDPRRPEPAGAPLAGHSGLVHSVAFSPDGHTLASGSADDTVQLWDVTDPAGAKPVGAPLTGHSGPVWAVAFSPDGAMLAVSSADSTASLWNVSDPAYPSQVGVPLAGGSGEMYALGFSPDGHTLATGSGDSKVRLWSLPTSDMIGRIGAFRPDGHVLATAARDGRVRLWDVTDPGRPVSLSAPFEPGDGDIRSLVFSPDGGTLAVLVGGRALQLWDVTDPAGPTAHGPPVALSTRYAGPDTLAFSPDGRTLATAHDDRTIQLWNADDPSRPRRLGKPLAGHSGYVNTLAFSPDGRTLASGGADDAVRLWDVTDPAHATRLGAARTGHLGPVNVLAYSPDGHTLASGSDDGTVRLWDVTEPGEGSGGGTTLAGHTDSVVSLTFSQDGDTLASGANDNTVRLWSVTDPAEAAPIGRAMSPNAKTGNFLSFSPVSHMLGVSSGTDTVRLWSLGVDDAIDRICSATRGVLTEEKWHEYLPRLDYEPPCHQ

SEQ ID NO: 3258 - protein, 398 aa, Heteropogon contortus
SVDLVFTAHPTQSARRSLLQKNARIRNCLTQLSAKDTTPEDKKELDEALAREIQAAFRTDEIRRAQPTPQDEMRYGMSYIHETVWKGVPKFLRRVDTALKDIGINERLPYNVPLIKFCSWMGGDRDGNPRVTPEVTRDVCLLSRMMAANLYIDQVEDLMFELSMWRSNAELRARADELLSTPASKKVTKYYIEFWKQIPPNEPYRVILGAVRDKLYNTRERARHILATGVSEIPEESVFTSIEQIIEPLELCYKSLVDCGDKAIAEGSLLDLLRQVFIFGLSLVKLDIRQESERHTDVIDAITTHLGIGSYRSWPEDKRVEWLVSELKGKRPLLPADLPMTEEIADVIGAMKVIAELPSDSFGPYIISMCTAPSDVLAVELLQRECGIKQTLPVVPLF

SEQ ID NO: 3259 - protein, 192 aa, Zea mays
MSKYGTIPTTSSTPAPEGSSQLDFISRAKARGASALATRRPWRELADPRALSVPRGFSDAYRRARANLAHFAANYALVVLLVVFVSLLWRPVSMLVFLACFAAWLVLYFLRDRDVDGTLVICGRGVGDGVVVAVLSAVTLALLLLTGATGFILTSLLVGLLLVLLHALLHRPADSIDDEAGRWYTPVPPSNY

SEQ ID NO: 3260 - protein, 648 aa, Mycoplasma genitalium G37
MKYLYATQHLTLNAIKHAKGGHVGMAIGASPILFSLFTKHFHFDPDQPKWINRDRFVLSAGHGSMALYSIFHFAGLISKQEILQHKHGQINTSSHPEYAPNNFIDASTGPLGQGFGMAVGMVLAQKLLANEFKELSDKLFDHYTYVVVGDGDLQEGVSYEVSQIAGLYKLNKLIVLHDSNRVQMDSEVKKVANENLKVRFENVGWNYIHTDDQLENIDQAIIKAKQSDKPTFIEVRTTIAKNTHLEDQYGGHWFIPNEVDFQLFEKRTNTNFNFFNYPDSIYHWFKQTVIERQKQIKEDYNNLLISLKDKPLFKKFTNWIDSDFQALYLNQLDEKKVAKKDSATRNYLKDFLNQINNPNSNLYCLNADVSRSCFIKIGDDNLHENPCSRNIQIGIREFAMATIMNGMALHGGIKVMGGTFLAFADYSKPAIRLGALMNLPVFYVYTHDSYQVGGDGPTHQPYDQLPMLRAIENVCVFRPCDEKETCAGFNYGLLSQDQTTVLVLTRQPLKSIDNTDSLKTLKGGYILLDRKQPDLIIAASGSEVQLAIEFEKVLTKQNVKVRILSVPNITLLLKQDEKYLKSLFDANSSLITIEASSSYEWFCFKKYVKNHAHLGAFSFGESDDGDKVYQQKGFNLERLMKIFTSLRN

SEQ ID NO: 3261 - protein, 398 aa, Pogonatherum paniceum
SVDLVFTAHPTQSARRSLLQNNARIRNCLTLLSAKDTTPEDKKELDEALQREIQSAFRTDEIRRAQPTPQDEMRYGMSYIHETVWKGVPKFLRRVDTALKNIGINERLPYDVPLIKFCSWMGGDRDGNPRVTPEVTRDVCLLSRMMAANLYIDQVEDLMFELSMWRSNEELRVRAEELLSTPASKKVTKYYIEFWKQIPPNEPYRVILGAVRDKLYNTRERARHLLATGFSDISEDAIFTNIEEILEPLELCYKSLVDVGDKTIADGSLLDLLRQVFIFGLSLVKLDIRQESERHTDVLDAITTHLGIGSYRSWPEDKRVEWLVSELSGKRPLLPPDLPMTEEIADVIGAMKVIAELPSDSFGPYIISMCTAPSDVFAVELLQRECGIKKTLPVVPLF

SEQ ID NO: 3262 - protein, 313 aa, Osteomeles anthyllidifolia
GGLGDVLGGLPPAMAANGHRVMTVSPRYDQYKDAWDTGVAVEIEVGGRVETVRFFHCYKRGVDRVFVDRPSFLERVWGKTGSKIYGPSAGEDYKDNQFRFSLLCQAALEAPRVLNLNSNKYFSGPYGDDVLFIANDWHTALLPCYLKAIYKPKGIYKNAKVVFCIHNIAYQGRFPISDFSVLDLPENLKGSFDFIDGYNKPVKGRKINWMKAGILESDRVVTVSPYYAQELVSGEDKGVELDNIIRKTGITGIVNGMDVREWNPATDKYLDTKYDNTTVLDAKPLVKEALQAEVGLPVDGNIPVIGFIGRLEE

SEQ ID NO: 3263 - protein, 579 aa, Arabidopsis thaliana
MCGILAVLGCIDNSQAKRSRIIELSRRLRHRGPDWSGLHCYEDCYLAHERLAIIDPTSGDQPLYNEDKTVAVTVNGEIYNHKILREKLKSHQFRTGSDCEVIAHLYEEHGEEFIDMLDGMFAFVLLDTRDKSFIAARDAIGITPLYIGWGLDGSVWFASEMKALSDDCEQFMSFPPGHIYSSKQGGLRRWYNPPWYNEQVPSTPYDPLVLRNAFEKAVIKRLMTDVPFGVLLSGGLDSSLVAAVALRHLEKSEAARQWGSQLHTFCIGLQGSPDLKAGREVADYLGTRHHEFQFTVQDGIDAIEEVIYHIETYDVTTIRASTPMFLMSRKIKSLGVKMVLSGEGSDEILGGYLYFHKAPNKKEFHEETCRKIKALHQFDCLRANKSTSAWGVEARVPFLDKEFLNVAMSIDPEWKLIKPDLGRIEKWVLRNAFDDEERPYLPKHILYRQKEQFSDGVGYSWIDGLKDHANKHVSDTMLSNASFVFPDNTPLTKEAYYYRTIFEKFFPKQSAARATVPGGPSIACSTAKAVEWDATWSKNLDPSGRAALGVHVAAYEEDKAAAAAKAGSDLVDPLPKNGT

SEQ ID NO: 3264 - protein, 375 aa, Coix lacryma-jobi
RRSLLQKNARIRNCLTQLSAKDITADDKKELDEALQIGIQAAFRTDEIRRAQPTPQDEMRYGMSYIHETVWKGVPKFLRRVDTALKNIGINERLPYNVPLIKFCSWMGGDRDGNPRVTPEVTRDVCLLARMMAANLYIDQVEELMFELSMWRCNEELRCRAEELQSTPASKKVTKYYIEFWKQIPPNEPYRVILGAVRDKLYNTRERARHLVATGYSEIGEESVFTNVDEFLEPLELCYKSLCACGDKAIADGSLLDLLRQVFTFGLSLVKLDIRQESERHTDVIDAITTYLGIGSYRDWPEEQRMEWLVSELQGKRPLLPPDLPQTEEIADVIGAMRVLAELPSDSFGPYIISMCTAPSDVLAVELLQRECGIR

SEQ ID NO: 3265 - protein, 378 aa, Triticum aestivum
  misc_feature (39)..(39): Xaa can be any naturally occurring amino acid
  misc_feature (348)..(348): Xaa can be any naturally occurring amino acid
  misc_feature (356)..(356): Xaa can be any naturally occurring amino acid
  misc_feature (365)..(365): Xaa can be any naturally occurring amino acid
  unsure (1)..(378): unsure at all Xaa locations
AHKKHPPQPPLARLQRSSTATDMAASADEEACMFALQLXSSSILPMTLKNAIELGLLDTLVAADGKLLSPAELAAKLPSTANPAAPDMVDRMLRLLASYKVVSCTLEEDQDGRLSRRYGAKPVCTFLTPNEEGVSVAPLALMNQDKVLMESWYYLKDAVLDGGIPFNKAYGMSAFEYHGTDPRFNRVFNEGMKNHSIIITKKLLELYKGFNGVGTLVDVGGGIGATVGAITAHYPTIKGINFDLSHVISEAPPFPGVTHVGGDMFQKIPSGDTILMKWILHDWSDEHCATLLKNCYDALPTHGKVMLVECILPVNPEATPKAQGGFHLDMIMLAHNPGGKERYEREFXEALAKGAXGFGAMKTTXYIYANTWVIEFTK

SEQ ID NO: 3266 - protein, 182 aa, Saccharomyces cerevisiae
MSSRKKNILKVIILGDSGVGKTSLMHRYVNDKYSQQYKATIGADFLTKEVTVDGDKVATMQVWDTAGQERFQSLGVAFYRGADCCVLVYDVTNASSFENIKSWRDEFLVHANVNSPETFPFVILGNKIDAEESKKIVSEKSAQELAKSLGDIPLFLTSAKNAINVDTAFEEIARSALQQNQA

SEQ ID NO: 3267 - protein, 313 aa, Osteomeles anthyllidifolia
GGLGDVLGGLPPAMAANGHRVMTISPRYDQYKDAWDTEVTVELKVGVKTETVRFFHCYKRGVDRVFVDHPLFLEKVWGKTASKIYGPTAGVDFNDNQLRFSLLCQAALVAPRVLNLNSSKYFSGPYGEEVVFIANDWHTALLPCYLKAIYKPKGIYKTAKVAFCIHNIAYQGRFAFADFALLNLPSEFKSSFDFIDGYDKPVKGRKINWMKAGILESDKVLTVSPYYAEELVSSVEKGVELDNIIRKTGIQGIVNGMDVQEWNPLTDKYTTVKYDASTVADAKPLLKEALQAEVGLPVDRDIPVIGFIGRLEE

SEQ ID NO: 3268 - protein, 511 aa, Solibacter usitatus Ellin6076
MRPPVHAILYDQDTRHGVGPGDCAIRGQRSRGANFGGEREGQGRNIPDRIVERAMAHLLIVDDDANTLASLARAFRLAGHEATVCDNASRALELVKGQGFDMMLSDVVMPGKDGLTLLEEVRGLGITLPVVMISGQANIEMAVRATRLGAIDFLEKPLSTDKLLLTVDNVLKLKRLEDENRELRQRVGKHEIVHSGERMQRVMAQVDRVAASEARVCILGETGTGKELIARALHERSSRKGGPFVTLNCAAVPAELIESELFGHEKGSFTGAASRHIGKFEQANHGTLFLDEIGDMPILMQAKLLRVLEERQVERVGGDRTIPVDVRVIVATHRNLHELVKKGVFREDLYHRVYVFPLFLPPLRERDGEIAVLVAHFAAQVSEVNGWRPKVFLPEAIQELQRYSWPGNVRELRNVVERLLLLADGAIDAALVRLALPTGESEAGGQTGERGHLGTLAERTDCFEREQILSELKRNNQRMTDTAKALGLERSHLYKKCQALGIDLRAMRKAQ

SEQ ID NO: 3269 - protein, 387 aa, Hyparrhenia rufa
FTAHPTQSARRSLLQKNARIRNCLTQLSAKDTTPEDKKELDEALQREIQAAFRTDEIRRAQPTPQDEMRYGMSYIHETVWKGVPKFLRRVDTALKNIGINERLPYNVPLIKFCSWMGGDRDGNPRVTPEVTRDVCLLSRMMAANLYIDQVEDLMFELSMWRANEELRARADELLSTPASKKVTKYYIEFWKQIPPNEPYRVILGAVRDKLYNTRERARHLLATGFSDISVDSIFTSIEQILEPLELCYKSLVDCGDKTIADGSLLDLLRQVYTFGLSLVKLDIRQESERHTDVIDAITTHLGIGSYRSWPEDKRVEFLVTELKGKRPLLPADLPMTEEIADVIGAMKVIAELPSDSFGPYIISMCTAPSDVLAVELLQRECGIKQTL

SEQ ID NO: 3270 - protein, 313 aa, Physocarpus opulifolius
GGLGDVLGGLPPAMAANGHRVMTISPRYDQYKDAWDTEVTVELNVGEKTETVRFFHCYKRGVDRVFVDHPLFLEKVWGKTASKVYGPIAGEDYKDNQLRFSLLCQAALEAPRVLNLNSSKYFSGPYGEEVVFIANDWHTALVPCYLKAMYKPKGIYKSAKVAFCIHNIAYQGRFAFADFTLLNLPDEFRSSFDFIDGYNKPVKGRKINWMKAGILESDKVLTVSPYYAEELVSGVGKGVELDNIIRKTGIRGIVNGMDVQEWNPLTDKYTIVKYDASTVTDAKPLLKEASQAEVGLPVDRDIPVIGFIGRLEE

SEQ ID NO: 3271 - protein, 648 aa, ASPERGILLUS NIDULANS FGSC A4
MRWIPSPGGSMLVSRGLLHKIRPSPSAQLPLSVFPSSSFVFGSRCHSGAAVTQKSRMARFPSQQSRPVHATPHVNHNGPIEQNYDTANPAYIRKYLRTYGLTPPRPESYETQKTRCLAQLALKQTPIDKFLYLSTLRKNNVHLFYRLVTDHLRELTPLIYTPVVGEACQRWSEIYQQPEGMYLSWEDRGNLASVIANWPQPNVEITCITDGSRILGLGDLGINGMGIPIGKLALYTTCAGIRPEATLPLTLDLGTSNKALREDPLYLGSRRDKITPDEEREFLDELMAALTERWPGIVIQFEDFKNPFPALERYQDVYTCFNDDIQGTGAVILGGVINAVKRSGVPCKDQRAVFFGAGSAGVGVAKQIVAFFMREGMTEDEARSCFWLVDTKGLVTADRGDKLAEHKVYFARTDNAGQQFKTLEEVVDHVKPSILMGLSTQGGVFTPEILRKMAEWNTNPMIFPLSNPSSKSECDFETAVTNTDGRVLFASGSPFPTMSFTNSAGETKMYYPGQGNNMYVFPGIGLGTILSKAVKVTDSMIYASGEALSKALTAEEIERGLLYPDLTRIRKVSVVVARNVIRAAQEAKVDRETTLRTMDDETLDAWIKSRMYDPHTEVQSLEREVGSILSTLGAPQQFVNGSSDEAKL

SEQ ID NO: 3272 - protein, 383 aa, Themeda quadrivalvis
FTAHPTQSARRSLLQKNARIRNCLTQLSAKDTTPEDKKELDEALQREIQAAFRTDEIRRAQPTPQDEMRYGMSYIHETVWKGVPKFLRRVDTALKNIGVNERLPYNVPLIKFCSWMGGDRDGNPRVTPEVTRDVCLLSRMMAANLYIDQVEDLMFELSMWRSNAELRAKADELLSTPASKKVTKYYIEFWKQIPENEPYRVILGAVRDKLYNTRERARHLLATGFSDISEDSVFTSIEQLLEPLELCYKSLIDCGDKAIADGSLLDLLRQVFIFGLSLVKLDIRQESERHTDVIDAITTHLGIGSYRSWPEDKRVEFLVSELKGKRPLLPPDLPMTEEIADVIGAMKVIAELPSDSFGPYIISMCTAPSDVLAVELLQRECGI

SEQ ID NO: 3273 - protein, 313 aa, Prinsepia sinensis
GGLGDVLGGLPPAMAANGHRVMTISPRYDQYKDAWDTEVTVELKVGEKIEPVRFFHCYKRGVDRVFVDHPLFLEKVWGKTASKIYGPIAGEDFKDNQLRFSLLCQAALEAPRVLNLNSSKYFSGPYGEEVVFVANDWHTALLPCYLKSIYQPKGIYKSAKVAFCIHNIAYQGRFAFADFALLNLSDQFKSSFDFIDGYDKPVKGRKTNWMKAGILESDKVLTVSPYYAEELVSTVAKGVELDNIIRKTGILGIVNGMDVQEWNPLTDKYTAVKYDASTVTDAKPLLKEALQAEVGLPVDKDIPVIGFIGRLEE

SEQ ID NO: 3274 - protein, 313 aa, Prunus virginiana
GGLGDVLGGLPPALAANGHRVMTVSPRYDQYKDAWDTNVLVEIEVGGKIETVRFFHCYKRGVDRVFVDHPLFLERVWGKTGSKIYGPKTGEDYRDNQLRFSLLCQAALEAPRVLNLNSNKYFSGPYGEDVVFVANDWHTALIPCYLKTIYKPRGLYKNAKVVFCIHNIAYQGRFSFSDFSLLDLPDQLRSSFDFIDGYDKPVKGRKINWMKAGILESDRVVTVSPYYAQELISGEDKGVELDSIIRKTGITGIINGMDVQEWNPARDKYLDVNYDNTTVLDAKPLLKEALQAEVGLPVDRDIPVIGFIGRLEE

SEQ ID NO: 3275 - protein, 235 aa, Corynebacterium glutamicum ATCC 13032
MVDVVRARDTEDLVAQAASKFIEVVEAATANNGTAQVVLTGGGAGIKLLEKLSVDAADLAWDRIHVFFGDERNVPVSDSESNEGQAREALLSKVSIPEANIHGYGLGDVDLAEAARAYEAVLDEFAPNGFDLHLLGMGGEGHINSLFPHTDAVKESSAKVIAVFDSPKPPSERATLTLPAVHSAKRVWLLVSGAEKAEAAAAIVNGEPAVEWPAAGATGSEETVLFLADDAAGNL

SEQ ID NO: 3276 - protein, 634 aa, Ustilago maydis 521
MCGILGCIHHPDAPAYRGKMLNMSRCIRHRGPDWSGCVVTQEEGSKGSILCHERLAIVGISTGAQPLVSTDGKLILAVNGEIYNHRQLRKNLKDQNAEFKTESDCEVILHLYREHGSDFVKMLDGMFSFILLDTTTTPHRVIAARDPIGITTLYQGASYKYPGAIYFSSELKAIHEECDRIRSFPPGHFYDSSLPEGKETVRYYTPSWLDGDAEGATIPTNPTDLKQIREALEKAVRKRLMSEVPYGVLLSGGLDSSLIASIAARETDKMADLQRKQWEERQARRSRGLTTPAGDANGAKLPVGLDEDADNEVENLAAWPRLHSFSIGLPGSPDLIAARKAAQFLGTVHHEYTFTVQEGLDAIADVIFHLETYDVTTVRASTPMYLLSRKIKAMGVKMVLSGEGSDEIFGGYLYFHAAPDKTSFHQECVRRVKNLHTADCLRANKSTMAWGLEARVPFLDKAFLDVAMNTDAADKMFSKGSLQQVDADGRPRMEKYILRKAFDVIPDDIEAGGDGSGSMLSASAPRKPYLPEDILWRQKEQFSDGVGYSWIDGIKDHAEKTVSDEKFQERAKRYPNDTPDTKEAYMIREIFESWFPSEAAASTAVRWIPRADWGCAADPSGRAVNIHESAYSTE

SEQ ID NO: 3277 - protein, 452 aa, Corynebacterium glutamicum ATCC 13032
MDPSDLAWILAAFALVSLMFPGLSLLYGGMLGGQHVLNTFMMVMSSLGIISLVYIIYGHGLVLGNSIGGWGIIGNPLEYFGFRNIMEDDGTGDLMWAGFYILFAAISLALVSSGAAGRMRFGAWLVFGVLWFTFVYAPLAHWVFAIDDPESGYVGGWMKNVLEFHDFAGGTAVHMNAGASGLALAIVLGRRHSMAVRPHNLPLILIGAGLIVAGWFGFNGGTAGGANFLASYVVVTSLIAAAGGMMGFMLVERVFSGKPTFFGSATGTIAGLVAITPAADAVSPLGAFAVGALGAVVSFWAISWKKGHRVDDSFDVFAVHGMAGIAGALFVMLFGDPLAPAGVSGVFFGGELSLLWREPLAIIVTLTYAFGVTWLIATILNKFMTLRITSEAEYEGIDRAEHAESAYHLNSNGIGMATRTNFGPEIPEETVPDAVQVGVDKQKIADTRKASK

SEQ ID NO: 3278 - protein, 574 aa, Aspergillus oryzae
MSPAPVGEKWWKNSIIYQIYPASFKDSNNDGIGDIPGIISSLDYITSLGVDVIWISPMYDSPQYDMGYDVSDYESVYPPYGTVQDMEVLIDECHRRGLRIILDLVVNHTSHEHKWFKESRSSKASPKRDWYIWKPAKYDANGNRKPPNNWRSIFGGSAWEWDEGSEEYYLHLFCKEQPDLNWENQETRRAIYDSAMEFWLQKGVDGFRVDTVNMYSKHPEYPDAPVIDPKSETQMSPALFCNGPRIHEYLSEMNEVLAKYDAMTVGELPNTHTVDGILRYVSAAQNQLNMVFQFDIVDLGQGKDYKFLTTLPGWTLPELKTAVKGTQVIMKGTDGWSTVFTENHDQGRSVSRFGSEKTPELRVTSAKMLAMMQGTLSGTQFIYQGQEIGMVNAPESWTIDEYKDVDSTNYYQMVQKISNNDPLELETAMKSLQRFARDHARLPMQWSSETHGGFSSSEKTWMRVHDNYPEINVKVQEKDDSSVLSFWKQVIQLRKEYADLFVFGDFEILDEANEKVFTYIKRGQKQSALIVLNFSDDTLKFKQPAGVQDAKVLLRNVEGDLNELQPFEGRVLLF

SEQ ID NO: 3279 - protein, 195 aa, Acinetobacter sp. ADP1
MPKLPFIQRVSDLYDQFQKHDAKQTDRLLRYRNIEPDSAQFLSMLIRIQHSKNILEIGTSTGHSTLWLAEAAQQTQGKVTTLEIEPARSQQAAMFAQELGVNQYVDFWIGDAADYLSESIEVFDLILLDAERSFYSGYWEDLKRLIKPHGGILIVDNVISHATEVKPFLEIIRHDSRFMSTTIALGAGLFMVVSQ

SEQ ID NO: 3280 - protein, 397 aa, Candida albicans SC5314
MRGIKGLVWEGSVLDPIEGIRFRGRTIPDIQKELPKAPGGEEPLPEALFWLLLTGEVPTDAQTKALSEEFAARSALPKHVEELIDRSPSHLHPMAQFSIAVTALESESQFAQAYAKGANKSEYWKYTYEDSIDLLAKLPTIAAKIYRNVFHDGKLPAAIDSKLDYGANLASLLGFGDNKEFVELMRLYLTIHSDHEGGNVSAHTTHLVGSALSSPFLSLAAGLNGLAGPLHGRANQEVLEWLFKLREELNGDYSKEAIEKYLWETLNSGRVVPGYGHAVLRKTDPRYTAQREFALKHMPDYELFKLVSNIYEVAPGVLTKHGKTKNPWPNVDSHSGVLLQYYGLTEQSFYTVLFGVSRAFGVLPQLILDRGIGMPIERPKSFSTEKYIELVKNINKA

SEQ ID NO: 3281 - protein, 919 aa, Corynebacterium glutamicum ATCC 13032
MTDFLRDDIRFLGQILGEVIAEQEGQEVYELVEQARLTSFDIAKGNAEMDSLVQVFDGITPAKATPIARAFSHFALLANLAEDLYDEELREQALDAGDTPPDSTLDATWLKLNEGNVGAEAVADVLRNAEVAPVLTAHPTETRRRTVFDAQKWITTHMRERHALQSAEPTARTQSKLDEIEKNIRRRITILWQTALIRVARPRIEDEIEVGLRYYKLSLLEEIPRINRDVAVELRERFGEGVPLKPVVKPGSWIGGDHDGNPYVTAETVEYSTHRAAETVLKYYARQLHSLEHELSLSDRMNKVTPQLLALADAGHNDVPSRVDEPYRRAVHGVRGRILATTAELIGEDAVEGVWFKVFTPYASPEEFLNDALTIDHSLRESKDVLIADDRLSVLISAIESFGFNLYALDLRQNSESYEDVLTELFERAQVTANYRELSEAEKLEVLLKELRSPRPLIPHGSDEYSEVTDRELGIFRTASEAVKKFGPRMVPHCIISMASSVTDVLEPMVLLKEFGLIAANGDNPRGTVDVIPLFETIEDLQAGAGILDELWKIDLYRNYLLQRDNVQEVMLGYSDSNKDGGYFSANWALYDAELQLVELCRSAGVKLRLFHGRGGTVGRGGGPSYDAILAQPRGAVQGSVRITEQGEIISAKYGNPETARRNLEALVSATLEASLLDVSELTDHQRAYDIMSEISELSLKKYASLVHEDQGFIDYFTQSTPLQEIGSLNIGSRPSSRKQTSSVEDLRAIPWVLSWSQSRVMLPGWFGVGTALEQWIGEGEQATQRIAELQTLNESWPFFTSVLDNMAQVMSKAELRLAKLYADLIPDTEVAERVYSVIREEYFLTKKMFCVITGSDDLLDDNPLLARSVQRRYPYLLPLNVIQVEMMRRYRKGDQSEQVSRNIQLTMNGLSTALRNSG

SEQ ID NO: 3282 - protein, 506 aa, Perilla frutescens var. crispa
MALYAALFLLSAAVVRSVLDRKRGRPPYPPGPFPLPIIGHLHLLGPRLHQTFHDLSQRYGPLMQLRLGSIRCVIAASPELAKECLKTHELVFSSRKHSTAIDIVTYDSSFAFSPYGPYWKFIKKLCTYELLGARNLAHFQPIRTLEVKSFLQILMRKGESGESFNVTEELVKLTSNVISHMMLSIRCSETESEAEAARTVIREVTQIFGEFDVSDIIWLCKNFDFQGIRKRSEDIQRRYDALLEKIITDREKQRRTHGGGGGGGEAKDFLDMFLDIMESGKAEVKFTREHLKALILDFFTAGTDTTAIVCEWAIAEVINNPNVLKKAQEEIANIVGFDRILQESDAPNLPYLQALIKETFRLHPPIPMLARKSISDCVIDGYMIPANTLLFVNLWSMGRNPKIWDYPTAFQPERFLEKEKAAIDVKGQHFELLPFGTGRRGCPGMLLAIQEVVIIIGTMIQCFDWKLPDGSGHVDMAERPGLTAPRETDLFCRVVPRVDPLVVSTQ

SEQ ID NO: 3283 - protein, 523 aa, Perilla frutescens var. crispa
MISAAVSLIICTSILGVLVYFLFLRRGGGSNGRPLPPGPRPWPIVGNLPQLGPKPHQSMAALARVHGPLMHLKMGFVHVVVAASATVAEKFLKVHDTNFLSRPPNSGAEHIAYNYNDLVFAPHGPRWRLLRKICALHLFSSKALDDFRHVREEEVGILIRNLASVGEMPASIGQMMYVCATNAISRVMLGRHVLGDEHRGAAGGGDTTAEEFKAMVVELMALAGVFNVGDFIPPLKGLDLQGVVAKMKKLHQRFDAFFSGILHDHKINGSNAAEGHVDLLTTLISLKDVDNNGEGGKLTDTEIKALLLNLFTAGTDTTSSTVEWAITELIRNPNILARVRKELDLIVGKDKLVKESDLGQLTYLQAVIKENFRLHPSTPLSLPRVAQESCEINGYYIPKDSTLLVNVWAIGRDPNVWPDPLEFRPERFLMGGEKPNVDVRGNDFELIPFGSGRRICAGMNLGIRMVQLLIATMVHAFDFELANGQLAKDLNMEEAYGITLQRADPLVVHPRPRLARHVYQAQV

SEQ ID NO: 3284 - protein, 405 aa, Populus nigra
MGFLCCSGKPSKRLESSSINENNSNIKRKDQTHVTSGSLKMKPYVNNLSKEGESKDDQLSLDVKSLNMKDEISKDRRSNGKQAQTFTFEELAAATSNFRSDCFLGEGGFGKVYKGYLDKINQAVAIKQLDRNGVQGIREFVVEVVTLSLADHPNLVKLIGFCAEGDQRLLVYEYMPLGSLENHLHDIPPNRQPLDWNTRMKIAAGAAKGLEYLHNEMKPPVIYRDLKCSNILLGEGYHPKLSDFGLAKVGPSGDKTHVSTRVMGTYGYCAPDYAMTGQLTFKSDIYSFGVVLLELITGRKAIDQRKERGEQNLVAWARPMFKDRRNFSCMVDPLLQGQYPIRGLYQALAIAAMCVQEQPNMRPAVSDLVMALNYLASHKYDPQVHSVQDSRRSPSRPGLDKDRGQ

SEQ ID NO: 3285 - protein, 409 aa, Bradyrhizobium sp. BTAi1
MNYDSYFDRALDQLHQERRYRVFADLERLAGRFPRAIWHAPDGPKDVVIWCSNDYLGMGQHPKVIGAMVDVAARMGTGAGGTRNIAGTNHPLIELERELADLHGKQAALVFTSGYVSNETGISTIAKLLPNCLLLSDALNHNSMIEGVRKAGTEKQVWRHNDIAHLEELLRAADPDRPKLIVCESLYSMDGDVAPLHRICDLAERYGALTYVDEVHAVGMYGPRGGGIAERDGAMARIDILEGTLAKAFGCLGGYIAANANLIDAVRSYAPGFIFTTALPPPVCAAATAAIRHLKTSQWERDRHQDRAARLKAVLNAAGLPVMPSDTHIVPVHVGDPEKCKTASDLLLSEHGIYIQPINYPTVPRGLERLRITPSPYHDDGLIDALAEALVDVWDRLGLARAPQALAAE

SEQ ID NO: 3286 - protein, 1069 aa, Ustilago maydis 521
MDLRNANLSPPPTPGPSSFAPCPTHSNKPSRAPARSLSLRIPEDGQAFAGLTQPLPPLAVAPSPAAAHASTPILSLPLANKQPGQSTLAPPLLSRLARKRPSRLNLAPPSLSDEPGQSSRSMPNSPVAPSRSHPKTEHVDGTAPPATAISEAVKHLSSTLRGTPRRRPSMPFKNASAQESAGAEPSSAASSRNRPPEAFRDPSEHILSGKGSTLQHARSVYSQGPVQVLPGLFLGDEHNARDTDTLSALGITTILNVAKETVLDFDSQPGPSSIYPSAPRATWSNSATNLARPNPDARSAVNASAQHLTSIANQHEPLTPNTYFTPPATATLSKPQDHREASSPRDAISVSVLRNTSSTPNLLTHFLNSEAADPSSFLPKQGTEAHSISTTDLRTLTAQDVLHYRSLRRTSDSSSDDAFDTASSPSSSRAASTCTSTATELTPPALQHVKTDTDASGQPNATSCYAFENESQGSPCAWYTKVELPSNATAITVSASIGDGPERHEMRYVKLPWTHDETDLAAGRGGFAQGIALIAEALGIDDRYWYAAKIAEDQEACAALQDDSVSLQHILTHPSPGKILVHCQCGVSRSATLVIAFVMQAAAMRYGFETARSLLGMHDCYNMVKEKSASISPNISLIYQLVEWERYLSSAAGRLRDVLGMVNTGSEGDAGGGSPADGQTTLVAPGWSTEPMDEAMWSKMRLEEEEKEAAEEAKRREERLTEAMRLAAERRAAQDRLEGRVPDIAIDAPEAGVGSLMQRRRKTRAPPLQLQTSATPAAMGAPTAIPPAPSPGLQRRRPPALQLDAAKRAGADNSGCSEVETPFQTARMEAWTAHEHDVDGDVTMADSLEPPQTPPRSSAADSDVVSTPTARSTSAVYGSESASCTLRTPNASSAWNSSAKLTGAAEPDEPSEAMQLSSTSSMSSTELRVATRRGSVQGGVPTTSLSPSSPSLPPAMSWSHSMGSRPNRFSFGGAPLGGSLAARLGSDSEPSSRSRTRPDSMQSTLSSSSSSTALFGVAALSHEERKKQHRRTFSSDWPTLRANLASQRRKSKVDILLVPPAIGDSDSLS

SEQ ID NO: 3287 - protein, 406 aa, Populus nigra
MGFLCFSGKSSKRSENSSIDENNSNIKRKDQTQLTSGSMKVKPYVNDSREEGASKDDQLSLDVKSLNLKDEISKDIRNNGNPAQTFTFEELVAATDNFRSDCFLGEGGFGKVYKGYLEKINQVVAIKQLDQNGLQGIREFVVEVLTLSLADNPNLVKLIGFCAEGDQRLLVYEYMPLGSLENHLHDIPPNRQPLDWNARMKIAAGAAKGLEYLHNEMAPPVIYRDLKCSNILLGEGYHPKLSDFGLAKVGPSGDHTHVSTRVMGTYGYCAPDYAMTGQLTFKSDVYSFGVVLLELITGRKAIDQTKERSEQNLVAWARPMFKDRRNFSGMVDPFLQGQYPIKGLYQALAIAAMCVQEQPNMRPAVSDVVLALNYLASHKYDPQIHPFKDPRRRPSHPGLDKDNGRT

SEQ ID NO: 3288 - protein, 352 aa, Lagenaria siceraria
MVPPYALDSLYCSEDHWENDDEEEERGFHEQPYSNLTTESSSPILAVAEQDLFWENDELISLFSREKPNELFKTIQIDPSLAAARRSAVGWMLKVNAHYSFSALTAVLAVDYLDRFLSCFHFQRDKPWMSQLAAVACISLAAKVEETQVPLLLDLQVEDSRYLFEAKTIKKMELLVLSTLQWRMNPVTPFSFVDYISRRLGFKEHICWEILWQCERTILSVILESDFMSFLPSVMATATMLHVFKAMEEPTLSVEYDSQLLNILGIDKGNVEECCKLISNASRRNGNQFKKRKIGSIPGSPNGVMDVSFSSDSSNDSWSVASSVSSSPEPLTKKNRANGSMSGDCETFRTLS

SEQ ID NO: 3289 - protein, 701 aa, Gluconobacter oxydans 621H
MSTDKRKTVTIGDQTFERGPQGATHQVASGETPTLTTQQGVPVSDDQNTEKAGARGPALLEDFHFREKIFHFDHERIPERVVHARGYGAHGFFELTDSLADYTTASVLGKIGKRVPAFVRFSTVAGGRGSFDVARDVRGFAVKLYTEEGNWDLVGNNMPVFFIQDAIKFPDMVHAVKEEPDSGFPQAQSAHDNFWDFASLSPETVHMLMWIMSDRAIPRSFRFMEGFGVHTFRLVNAEGKSTYVKFHWKPKQGLQSVVWNEAVKINGADPDFHRRDLWESINSGDFPEWELGVQLFDDDFADKFDFDILDATKLIPEELIPVRRIGRLVLNRTVDNFFAETEQVAFCTQNVVPGIAFTNDPLLQGRNFSYLDTQTKRLGGPNFTHIPINAPKCPFHNFQQDGHMAMHNPKGRANYEPNSWGMGPRENPQTGYKPYAEELNGRKTRERGELFADHYSQARQFYTSQTPTEQTHIKNAFVFELSKCLTPAIRARVVAHLLNVDEKLAKGVAEGLRLEKMPAPAPAARTPLTDLPASDPLSILKNGPKTFKGRNLGVLVTDGTDADLLAALMKAAEAEGTIVELVAPAVGGVKTTDGKLVPAGQKIVGAPSVLYDAVVLLPSAAGAKLLTGEATARDFVADAFAHAKFIGYGPDAKPLLAKGGITPEDMDDGIIPLEAPSDLKTFITLCRKLRFWDREARTHAV

SEQ ID NO: 3290 - protein, 443 aa, Gluconobacter oxydans 621H
MSIAARIERLPFTRFHWKLLFLGGLGYTFDGLDSAIVAFALPMLKNQWHLSGPELGLLGSATYLGYGLGALLSGWWGDRSGRRRVMMSALAIYAIGSLLSAGSSSFAGFFLCRLLSGIGAGAEATIIAPYLSEFVAARYRGAFTAALTGFYSFGYVTAAIMGFMLVPAMADGWRWALALTGFPVLMLLWWRRALPESPRWLDERGQTAEACRIVGDIEESAGLAVGLTTTTDRGAPSIRPVRDLFAPNLRRSTFMSWAMWLAITFSFYAFFTWIPTLMIERGMTVTRSFGYAISIYFAQLPGYASAAFLTDRLGRRGTVALFMVAGAISAIGMATSQTPTEVLIFGILLSFFMNGTFGGIYAYTPELFPTSLRARGMGLASAIARLGAIASPVLIGWLYPLAGFPGVFGLTTLILLSGATVTLVFGPRTEKRPLDDEQAFAQT

SEQ ID NO: 3291 - protein, 106 aa, Eulalia aurea
VETQQLLLQIAGHKEILEGDLYLKQGLRLRNPYITTLNVFQAYTLKRIRDPSFKVTPQPPLSKEFADENKPAGLVKLNPASEYPPGLEDTLILTMKGIAAGMQNTG

SEQ ID NO: 3292 - protein, 106 aa, Vetiveria zizanioides
VETLQLLLQIAGHKDILEGDPYLKQGLRLRNPYITTLNVFQAYTLKRIRDPSFKVTPQPPLSKEFADEKEPAGLVKLNPASEYPPGLEDTLILTMKGIAAGMQNTG

SEQ ID NO: 3293 - protein, 313 aa, Rhamnus cathartica
GGLGDVLGGLPPAMAANGHRVMTVSPRYDQYKDAWDTEVTIELKVGEKLEKVRFFHCYKRGVDRVCVDHPLFLEKVWGKTKSKIYGPIAGEDYQDNQLRFSLLCQAALEAPRVLNLTSSKYFCGPYGDDVVFVANDWHTAPIPCYLKSLYKARGIYKSARVAFCIHNIAYQGRFAFADFSLLNLPDEFKSSFDFIDGYDKPVKGRKINWLKAGVLESDKVLTVSPYYAKELVSSVEKGVELDIILRKTGITGIVNGMDVQEWNPLTDKYTSVKYDASTVLDAKPILKEALQAEVGLPVDRKIPVVGFIGRLEE

SEQ ID NO: 3294 - protein, 396 aa, Paspalidium geminatum
TVELVFTAHPTQSIRRSLLQKHARIRNCLTQLYAKDISEDDKKELDEALQREIQACFRTDEIRRAQPTPQDEMRYGMSYFHETIWKGVPKFLRRVDTALKNIGIDERLPYNVPLIKFSSWMGGDRDGNPRVTPEVTRDVCLLARMMAANMYFSQIEELMFELSMWRCNDELRARAGELYASSQKISKHYIEFWRQIPANEPYRVVLGYVRDKLYNTRERSRHLLTSGFSDIPEDSAFTSVEQFLEPLELCYKSLCDSGDKTIADGSLLDFMRQVSTFGLSLVKLDIRQESERHTDVIDAITTHLGIGSYREWSEEKRQEWLISELKGKRPLLSPDMPQTEEIADVLGCFQVLAELPRGSFGPYIISMATAPSDVFAVELLQRECHVKQPLPVVPLF

SEQ ID NO: 3295 - protein, 313 aa, Rosa multiflora
GGLGDVLGGLPPAMAANGHRVMTVSPRYDQYKDAWDTEVTVELKVGQKIETVRFFHCHKRGVDRVFVDHPLFLEKVWGKTASKIYGPSAGEDYTDNQLRFSLLCQAALEAPRVLNLTSNQYFSGPYGEDVVFIANDWHTALLSCYLKAIYQPKGIYKSAKVAFCIHNIAYQGRFAFADFSLLNLPAAFKSSFDFIDGYDKPVKGRKINWMKAGILESDKVLTVSPYYAKELLSSIEKGVELDNIIRKTGILGIVNGMDVQEWNPLTDKYTDVKYDATTVTDAKPILKEALQAEVGLPVDKNIPVIGFIGRLEE

SEQ ID NO: 3296 - protein, 396 aa, Melinis repens
TVDLVLTAHPTQSLRRSLLKKHTKIRNCLTQLYAKDISEDDKKELDEALQREIQAAFRTDEIRRAQPTPQDEMRYGMNYIHETIWKGVPNFLRRVDTALKKIGIDERLPYDVPLIKFSSWMGGDRDGNLRVTPEVTRDVCLLARMMAANLYISQIEELMFELSMWRCNDELRAKAEELHDASKKVVKYYTEFWKEIPINEPYRVVLASVRNKLHNTRERSRDLLANGFSEIPESAAFTNVKEFLEPLELCYKSLCDSGDKTIADGSLLDFMRQVATFGLSLTKLDIRQESDRHTEVIDTITTHLGIGSYRSWPEEKRVEWLVSELQGKRPLLSPDLPQSEEVADALGTFRALAELPRDSFGPYIISMATAPSDVLAAELLQRECKIADPLPVVPLF

SEQ ID NO: 3297 - protein, 312 aa, Rubus odoratus
GGLGDVLGGLPPTMAAIGHRVMTISPRYDQYKDAWDTEVTVELQVGQKSETVRFFHCYKRGVDRVFVDHPLFLEKVWGKTASKIYGPMAGEDYKDNQLRFSLLCQAALEAPRVLNLTNNFFCGPYGEDVVFIANDWHTALIPCYLKARYQPNGIYKSAKVAFCIHNIAYQGRFAFADFALLNLPNKFKSSFDFIDGYDKPVKGRKINWMKAGILESDKVLTVSPYYAKELVSGDDKGVELHNIIRKPGIVGIVNGMDVQEWNPLTDKYTDVKYDATTVMDAKPILKEALQAEVGLPVDKNIPVIGFIGWLEE

SEQ ID NO: 3298 - protein, 396 aa, Panicum maximum
TVDLVLTAHPTQSLRRSLLKKHTRIRNCLTQLYAKDITEDDKKELEEALQREIQAAFRTDEIRRAQPAPQDEMRYGMNYIHETIWKGVPKFLRRVDTALKNIGIDERLPYDAPLIKFSSWMGGDRDGNPRVTPEVTRDVCLLARMMAANLYISQIEELMFELSMWRCNDELRARADELDGASRKVVKHYTEFWRQIPTNEPYRVVLADVRDKLYNTRERMRHLLATGFSEIPEDATVTDVAKFLEPLELCYKSLCDSGDKTIADGSLLDLMRQVSTFGLSLTKLDIRQESDRHTEVIDTITTHLGIGSYRSWPEEKRQEWLLSELQGKRPLLSPDLPQSEEVADALGTFRVLAELPRDSFGPYIISMATAPSDVLAVELLQRECKVADPLPVVPLF

SEQ ID NO: 3299 - protein, 313 aa, Vauquelinia californica
GGLGDVLGGLPPAMAANGHRVMTISPRYDQYKDAWDTEVTVELKVGDKIETVRFFHCYKRGVDRVFVDHPLFLEKVWGKTASKIYGPITGVDFKDNQLRFSLLCQAALEAPRVLNLNSSKYFSGPYGEEVVFVANDWHTALLPCYLKAIYKPKGMYKTAKVAFCIHNIAYQGRFAFADFALLNLPDKFKSSFDFIDGYDKPVKGRKINWMKAGILESDKVLTVSPYYAEELVSSVEKGVELDNIIRKTGIQGIVNGMDVQEWNPLTDKYTTVKYDASTVADAKPLLKEALQAEVGLPVDRDIPVIGFIGRLEE

SEQ ID NO: 3300 - protein, 313 aa, Vauquelinia californica
GGLGDVLGGLPPAMAANGHRVMTISPRYDQYKDAWDTEVTVELKVGDKTETVRFFHCYKRGVDRVFVDHPLFLGKVWGKTASKVYGPVAGVDFKDNQLRFSLLCQAALKAPRVLNLNSSKYFSGPYGEEVVFIANDWHTALLPCYLKAIYKPKGIYYTAKVAFCIHNTAYQGRFAFADFALLNLPDDFKSPFDFIDGYDKPVKGRKINWMKAGILESDKVLTVSPYYAEELVSAVEKGVELDNIIRQTGIFGIVNGMDVQEWNPLTDKYTTVKYDASTVADAKLLLKEALQAEVGLPVDKDIPVIGCIGRLEE

SEQ ID NO: 3301 - protein, 98 aa, Musa acuminata
KSPIQFRLLLVLLCVVDEREMSCSGGNCGCGSSCSCGSGCGGCRMLTDLGEERSSTSQTMIMGVAPQKGHFEELETAAGSDNGCKCGSNCTCDPCNCK

SEQ ID NO: 3302 - protein, 220 aa, Zea mays
MGRRPARCYRQIKNKPCPKSRYCRGVPDPKIRIYDVGMKRKGVDEFPYCVHLVSWERENVSSEALEAARIVCNKYMTKSAGKDAFHLRVRVHPFHVLRINKMLSCAGADRLQTGMRGAFGKPQGTCARVDIGQVLLSVRCKDNNAAHASEALRRAKFKFPARQKIIESRKWGFTKFSRADYLKYKSEGRIVPDGVNAKLLANHGRLEKRAPGKAFLDAVA

SEQ ID NO: 3303 - protein, 429 aa, Mycobacterium bovis AF2122/97
MDNDGTIVDVTTHQLPWHTASHQRQRAFAQSAKLQDVLYEIRGPVHQHAARLEAEGHRILKLNIGNPAPFGFEAPDVIMRDIIQALPYAQGYSDSQGILSARRAVVTRYELVPGFPRFDVDDVYLGNGVSELITMTLQALLDNGDQVLIPSPDYPLWTASTSLAGGTPVHYLCDETQGWQPDIADLESKITERTKALVVINPNNPTGAVYSCEILTQMVDLARKHQLLLLADEIYDKILYDDAKHISLASIAPDMLCLTFNGLSKAYRVAGYRAGWLAITGPKEHASSFIEGIGLLANMRLCPNVPAQHAIQVALGGHQSIEDLVLPGGRLLEQRDIAWTKLNEIPGVSCVKPAGALYAFPRLDPEVYDIDDDEQLVLDLLLSEKILVTQGTGFNWPAPDHLRLVTLPWSRDLAAAIERLGNFLVSYRQ

SEQ ID NO: 3304 - protein, 355 aa, Pseudomonas fluorescens Pf-5
MIKALQWHAARDLRLTQLEPRQPGPGEVLLQVAYCGICGSDLHEYADGPHSIPQQVANPLSGCRAPLTLGHEFCGQVVALGPGVDARLLGQRVAVEPEYRCGECSYCQMGQYNLCESMGFIGLMGDGGFAEQAVVPAYMLHLLPDSVSFKQAAVLEPAAVAYHALNQSSLMAGDSCAVFGLGPIGLLLVLLARLRGVERIYAVDLDPERRRLALEFGASEALDGADPQLQARLRQLSAGGIDSAFEAAGSQQTLSHALHCLRKGGEAVLVGLMGDVQFDAFHLVNNELRLLGSVGYRHVYPELIQLLASGRLDLSRAVTRCLTLEQAVEQGFQALLQDKSQIKVLVNPTPALADA

SEQ ID NO: 3305 - protein, 380 aa, Lagenaria siceraria
MKKMALHSNKHRTQRLHNSLFFFDFLHCTEQQHLQTEHPIFLNNGGTNDFPLFQQTTTHFLVYEDEELNHLLSKEKDQNLQTGAVLKTLVQTDNALSLARTEAIDWLLKVNAFYGFSSLTALLAINYLDRILSGPYFQRDKPWMLQLAAVTCISLAAKVEEIRVPLLLDLQVEDSKYIFEAKTIQRMELLVLTALQWKMHPVAPVSFLGIITKGLGMKNQYIQREFLRRCERILLSLVSDSRSVGILPSIMAVSAMVSVVEEMGNCNPLEEFQDQLLNALKINKGRVKECCKVIMEAKIKGSGKRKHVEEEAEAEAESESSEAETEGEAEAEAGSPNGVMEANFSCESSNDSWEMGTIVSEYTHFSSSSSSSSKRIRPTR

SEQ ID NO: 3306 - protein, 142 aa, Zea mays
  misc_feature (15)..(15): Xaa can be any naturally occurring amino acid
  unsure (1)..(142): unsure at all Xaa locations
SWGSLQRQTSPDSDXDPRYAAVTDERKRKRMISNRESARRSRMRKQKQLGDLINEVTVLKNDNAKITEQVDAATRKYVEMESRNDVLRAQASELTERLRSLNSVLEMVEEISGQALDIPEINPWQVSCPMQPIRASADMFDC

SEQ ID NO: 3307 - protein, 399 aa, Yersinia pestis biovar Medievalis str. 91001
MGIVSSIGNNQQEVLASLQEGRSGITFAQEFKDAGMRSHVWGDVKLQSEPKDLIDRKVLRFMSDASIYAYLAMQEAIADSGLSDSQVSNFRSGLVVGSGGGSPRNQVAGSDAMRTPRGLKGVGPYMVTKAMASGVSACLATPFKIKGVNYSISSACATSAHCIGHALELIQLGKQDIVFAGGGEELCWEMACEFDAMGALSTKYNDTPAKASRTYDQDRDGFVIAGGGGMVVVEELEHALARGAHIYAEIVGYGATSDGADMVAPSGEGAVRCMQMAMAGVDTPIDYMNVHGTSTPVGDVKELGAIREVFGNNTPAISSTKAMTGHSLGAAGVHEAIFSLLMVEHGFIAPSINIDNLDEQAQGMNIITETTQRELTTVMSNSFGFGGTNATLVMRKYQK

SEQ ID NO: 3308 - protein, 497 aa, Rubrivivax gelatinosus PM1
MDKASGKTLDAALVWCRRDLRAHDHAALYHALRAARRVWVAFVFDTEILDPLPRTDRRVEFIRDSLVDLDAQLHTLGRSHGTEGVGLIVRHGRARDEIPRLAAALHVQAVYANTDYEPAAVARDAQVRGALAQTGIAFHPAKDQVVFDTDEVLTGAGTPYGVFTPYKNAWLKKLEPFYLQAYPVGRHAGALAPRPAGEAAGVPTLAAIGFEPTNLAALKLAPGTAGGRALLEDFGDERIDRYDQTRDFPAVKGPSYLSVHLRFGTLSIRELARLAWDRARAGSRGAEVWLSELIWRDFYHQVLHHHPQVVERSFKPEYDKIKWEHGKHADALFAAWCEGRTGYPLVDAAMLQINQTGYMHNRLRMVVASFLCKDLGLDWRRGERYFAEKLNDYDLAANNGGWQWASSSGCDAQPYFRIFNPVSQSQKFDAQGKFIRRYLPQLAALPDAALHAPWDAKPLDLVAAGLVLGRDYPEPIVRHELARERTLARYAVVKGAR

SEQ ID NO: 3309 - protein, 381 aa, Oryza sativa (japonica cultivar-group)
MQIFVKTLTGKTITLEVEFSDTIDNVKAKIQDKEGIPPDQQRLIFAGKQLEDGRTLADYNIQKESTLHLVLRLRGGMQIFVKTLTGKTITLEVESSDTIDNVKAKIQDKEGIPPDQQRLIFAGKQLEDGRTLADYNIQKESTLHLVLRLRGGMQIFVKTLTGKTITLEVESSDTIDNVKAKIQDKEGIPPDQQRLIFAGKQLEDGRTLADYNIQKESTLHLVLRLRGGMQIFVKTLTGKTITLEVESSDTIDNVKAKIQDKEGIPPDQQRLVFAGKQLEDGRTLADYNIQKESTLHLVLRLRGGMQIFVKTLTGKTITLEVESSDTIDNVKAKIQDKEGIPPDQQRLIFAGKQLEDGRTLADYNIQKESTLHLVLRLRGGL

SEQ ID NO: 3310 - protein, 753 aa, Escherichia coli O157:H7 EDL933
MTILNHTLGFPRVGLRRELKKAQESYWAGNSTREELLAVGRELRARHWDQQKQAGIDLLPVGDFAWYDHVLTTSLLLGNVPARHQNKDGSVDIDTLFRIGRGRAPTGEPAAAAEMTKWFNTNYHYMVPEFVKGQQFKLTWTQLLDEVDEALALGHKVKPVLLGPITWLWLGKVKGEQFDRLSLLNDILPVYQQVLAELAKRGIEWVQIDEPALVLELPQAWLDAYKPAYDALQGQVKLLLTTYFEGVTPNLDTITALPVQGLHVDLVHGKDDVVELHKRLPSDWLLSAGLINGRNVWRADLTEKYVQIKDIVGKRDLWVASSCSLLHSPIDLSVETRLDAEVKSWFAFALQKCHELALLCDALNSGDTAALAEWSAPIQARRHSTRVHNPAVEKRLAAITAQDSQRANVYEVRAEAQRARFKLPAWPTTTIGSFPQTTEIRTLRLDFKKGNLDANNYRTGIAEHIRQAIVEQERLGLDVLVHGEAERNDMVEYFGEHLDGFVFTQNGWVQSYGSRCVKPPIVIGDVSRPAPITVEWAKYAQSMTDKPVKGMLTGPVTILCWSFPREDVSRETIAKQIALALRDEVADLEAAGIGIIQIDEPALREGLPLRRSDWDAYLQWGVEAFRINAAVAKDDTQIHTHMCYCEFNDIMDSIAALDADVITIETSRSDMELLESFEEFDYPNEIGPGVYDIHSPNVPSVEWIEALLKKAAKRIPAERLWVNPDCGLKTRGWPETRAALANMVQAAQNLRRG

SEQ ID NO: 3311 - protein, 284 aa, Oryza sativa
MLHEQHAPPPQPEPEVSLQLSAPATAADDVAAGDDEEVTVVTTYRDIHPLTPPSPTTTTTPPTRLGSAAYSWDTASSHRSVSSEEQFMTMSREFTAMVAAGTTMQTGPNDGNNGGDQLTSIGEDELEETNPLAIVPDSHPIATPARSRASQLEVVPAAGPSPAPPVEARQVKKEEVETKVSAWQTAEVAKINNRFKREEVVINGWETEQVEKASAWLKKIERKLDEQRAKALERTQNDIAKARRKAEEKRASAEAKRGLKLAKVLELANFMKAVGRVPTKRSFF

SEQ ID NO: 3312 - protein, 382 aa, Paspalum paniculatum
HPTQSVRRSLLQKNAKIRNSLKQLYAKDITADEKQELDEALQRQIQAAFRTDEIRRTQPTPQDEMRYGMSYFHETIWKGVPRFLRRVDTALKSIGINERLPYNAPLIRFSSWMGGDRDGNPRVTPEVTRDVVLLARMMAANLYISQIEDLMFELSMWRCTDELRARAEEWYHVSSKIEKHYIEFWKQIPLDEPYRVILGYVRDKLYATRERSRQLLIDGFSNIPESSAFTNVEEFLEPLELCYRSLCASGDKAITDGSLLDFLRQVSTFGLSLGKLDIRQKSERHTDVIDAITTHLGIGSYREWDEDKRIEWLLSELRGKRPLLAPDMPQTDEIADVLGALRVIAELPSDSFGPYIISMATATSDVLTVHLLQRECRVPKPD

SEQ ID NO: 3313 - protein, 381 aa, Aristida mauritiana
QSVRRSLLQKHARIRSCLTQLDAKDITEDDKKELDEALQREIQAAFRTDEIRRAQPTPQDEMRYGMSYFHETIWKGVPKFLRRVDTALKNIGIDERFPYRAPLIKFSSWMGGDRDGNPRVTPDVTRDVVLLARMMAADLYYSQIEDLMFELSMWRCNDELRARAEELYGASKKAATKHYIEFWKQIPPSEPYRVVLGDVRDKLYYTRERSRHLLTSGSSEIPEDATFTDVEQFLEPLELCYRSLVACGDKPIADGSLLDFLRQVATFGLSLVKLDIRQESERHTDVIDAITTHLGIGSYRSWSEEKRQEWLLSELSGKRPLLAPDMPQSDEVADAIGTFRVLAELPADSFGPYIISMATAPSDVLAVELLQRECQIRKPLP

SEQ ID NO: 3314 - protein, 511 aa, Triticum aestivum
MIARGLLRSNSSTQASKLVKYLTSAGSLQGHAESLSDASVRHFSSASSPQTNSTEENGFKGHGMLAPFTAGWQSNDVHPLVIDRSEGSYVYDINGNKYLDSLAGLWCTALGGSEPRLVKAATDQLNKLPFYHSFWNRTTKPTLDLADDLLSMFTASKMGKAFFTNSGSEANDSHVKLVWYYNNALGRPNKKKFIARSKAYHGSTLISASLTGLPALHQKFDLPAPFVLHTDCPHYWRFHLPGETEEEFATRLAKNLEDLILKEGPETIAAFIAEPVMGAGGVIPPPKTYFDKVQAVVKKYDILFIVDEVITAFGRLGTMFGSDMYNIKPDLVTLAKALSSAYVPFGATLVSPEIAAVVDSQSNKLGSFAHGFTYSGHPVACAVAIEALKIYRERNIPDHVKQIAPRFQEGTKAFAGSPIVGEIRGVGLILGTEFANNKSRDDPFPAEWGVGAIFGQECQKRGMLVRVAGDSIMMSPPLTMTPGEVDELVSIYGEAMKSTEERVAELKSKKN

SEQ ID NO: 3315 - protein, 313 aa, Vauquelinia californica
GGLGDVLGGLPPALAANGHRVMTVSPRYDQYKDAWDTGVLVEIEVGGRVETVRLFHCYKREVDRVFVDHPLFLERVWGKTGSKIYGPRAGVDYKDNQFRFSLLCQAALEAPRVLNLNSNKYFSGPYGDDVVFIANDWHTALLPCYLKTIYKPKGIYKNAKVVFCIHNIAYQGRFPFSDFSLLDLPDNLKGSFDFIDGYNKPVKGRKINWMKAGILESDRVVTVSPYYAQELVSGEDKGVELDNIIRKTVITGIMNGMDVQEWNPATDKYLDIKYDSTIVLDAKPLSKEALQAEVGLPIDRNIPVIGFIGRLEE

SEQ ID NO: 3316 - protein, 104 aa, Triticum aestivum
PTRPPTRPEPGWRDVPVHDPVVKDAASHAVKSIQQRSNSLLPYELVEIVRAKAEVVEDFAKFDILMKLKRGTKEEKMKAEVHKNLEGAFVLNQMQPEHDESSSQ

SEQ ID NO: 3317 - protein, 395 aa, Chloris barbata
TVELVLTAHPTQSLRRSLLQKHTKIRNCLTQLYAKDITDDEKKELDEALQAEIHAAFRTDEIRRSQPTPQDEMRYGMSYFHETIWKGVPKFLRRVDTALKSIGISERLPYDVPVIKFSSWMGGDRDGNPRVTPEVTRDVCLLARMMAANLYVSSIEDLMFELSMRRCNDELRARADEHLASRETKKHYIEFWRAIPATEPYRVLLGYVRDKLYNTRERALHMLTKGYSEIKEESTITTVEEFMEPLEVCYKSLCDCGDKTIADGLLLDFMRQVNTFGLSLAKLDIRQESERHTDAVDAITTHLGIGSYKEWPEEKRQEWLLSELQGKRPLLVPDMPVSEEVEAVLGCFKVLAELPRDSFGPYIISMATAPSDVLAVELLQRECGVRQPLPVVPLF

SEQ ID NO: 3318 - protein, 313 aa, Vauquelinia californica
GGLGDVLGGLPPAMAANGHRVMTVSPRYDQYKDAWDTSVLVDIEVGGRVETVRFFHCYKRGVDRVFVDHPLFLERVWGETGSKIYGPRTGMDYTDNQFRFSLLCQAALEAPRVLNSNSNKYFSGPYGDDVVFIANDWHTALLPCYLKTIYKPKGIYKNAKVAFCIHNIAYQGRFPSSDFSLLDLPDNLKGSFDFIDGYHKPVKGRKINWMKAGILESDRVVTVSPYYAQELVSGEDKGVELDNIIRKTGITGIVNGMDVQEWNPATDKYLDIKYDNTTVLDAKPLLKEALQAEVGLPVDRNIPVIGFIGRLEE

SEQ ID NO: 3319 - protein, 396 aa, Eragrostis tenuifolia
TVELVLTAHPTQSLRRSLLQKHTKIRNYLTQLYAKDITEDEKKELDEALQAEIQAAFRTDEVRRAQPTPQDEMRYGMSYFQENIWKGVPKSLRRVDTALKSIGIDERLPYDAPLIKFSSWMGGDRDGNPRVTPEVTRDVCLLARMIAANLYISEIEDLMFELSMWRCNDELRARADELLSAPKKASKHYIEFWRAIPSTEPYRVLLGDLRDKLYNTSERWRDLLATGFSEVPEKPTIKSIQEFLEPLEVCYRSLVEVGDKTIADGVLLDFMRQVSTFGLTLAKLDIRQESERHTDAIDAITTHLGIGSYREWPEEKRQEWLLSELQGKRPLLVADLPVSEEVADVLGCFRVLAELPSDSFGPYIISMATAPSDVLAVELLQRECGIRNPLPVVPLF

SEQ ID NO: 3320 - protein, 386 aa, Eleusine indica
VLTAHPTQSLRRSLLQKHTKIRNCLTQLYAKDITEDEKKELDEALQAEIQAAFRTDEIRRAQPTPQDEMRYGMSYFHETIWKGVPKFLRRVDTALKSIGINERLPYNAPLIKFSSWMGGDRDGNPRVTPDVTRDVCMLARMIAANLYVAQIEDVMFELSMWRCNDELRAEAEKHLATRETKKHYIEFWRQIPATEPYRVLLGHVRDKLYNTRERALHMLTKGFSEIPLDTTIRSVEEFMAPLELCYKSLCDCGDKTIADGVLLDFMRQVSTFGLSLAKLDIRQESERHTDAIDAITTHLGIGSYKEWPEEKRQEWLLSELQGKRPLMVPDMPVSDEVADVLGCFKVLAELPSDSFGPYIISMATAPSDVLAVELLQRECKVRNPLP

SEQ ID NO: 3321 - protein, 5541 aa, Streptomyces sp. FR-008
MSNEDRLRAYLKRAVTDLQEARQQLSDAENRDREPVAVVAMACRYPGGVRTPQDLWELARDGVDAISAFPANRGWDLDHLFHPDPAHHGTTYTREGGFLHDAGEFDPAFFGISPREALAMDPQQRLLLETSWEALERAGILPDTLAGSTTGVFVGTGHGDYDGASRGRQKEVAGHLLTGNTVAVASGRLSYTYGFEGPAVTVDTACSSSLVALHLAVRSLRQGECSLALAGGATVMSTPKMFTEFSRQQGLAADGRCKPFAAGADGTAWSEGVGLILLERLSDAQRNGHEILAVIRGSAINQDGASNGLTAPNGPSQQRLIRQALIDAGLTSGEVDVVEAHGTGTTLGDPIEAQALLNTYGQDRGDAHPLLLGSLKSNTGHTQAASGVAGVIKMVQAMRHGTLPKSLHVDAPTPHADWATGGVELLTESTTWPETGRPRRAAVSSFGVSGTNAHLILEQAPEDQTPRAEEPGTEPSADDSADTVRSWMVSGKSRAAVGEQAARLAASVRASDASVLDVAHALVSSRVAMDRRAVVVGSDREELLAGLDALAAGEPSVRVVEGTAGEGAGDVAFVFPGQGSQWVGMAVELLGSSPVFAGRVAECAAALEPFTEWSLLDVLNGVEGAASLERVDVVQPVLWAVMVSLAEVWRAQGVEPGAVIGHSQGEIAAAVVAGGLSLEDGARVVALRSRALRALSGLGGMVSVARNVDEVRGLLAGWEGRISVAAVNGPSSVVVSGDAEALDEFVAACDASGVRARRVAVDYASHSAHVERIEEELAGLLAPVAPRSCDVPFYSTLSGGVIDTAGLDAGYWYRNLRGTVEFEAGTRALLADGFRVFVEVSAHPVVATGVQETIEDASVQAGVVGTLRRDEGGLERFALSLGEAWALGAEVDWETHYAGTRPRHVDLPTYPFRRDWYWLTPAESAAAAATGDPADGDFWSAVESGDLTRLSSVLEVTGDDVEAFGTLLPALASWRRRRTLRSTLDTWRHRVTWTALTGADDAVPAGRWPALVPAGHADDPWVHAVLGALTGRGLRVERHDLTGDEDTAALTALLTGTGDTEPDGAEGIAGVLSLLALDERPHPDHPAVPRGLATAKELLHALSGTEASVWALTRGAVAVDSRDRLTSPVQAETWGFGRAVALELPDAWGGLADLPADPDARSLARLATLLGGPEDQIAVRSSGAYARRLARMPLPEPARVTDVDAELAVRAADDDGIGGWGDHDTVLITGGTGALGAHVARSLAASGARHLVLTSRRGPGSPGAVGLVAELEELGARVTVADCDVADRDQLARLLDSLPAGLPLTGVVHAAGVLDDGVLDALTLDRFEAVLRPKTLGTAHLHELTRDHDVTLFVLFSSIVGVLGNAGQANYAAANAYLDAVAEQRRAEGLPVTSVAWGPWADAGMATADVLADRMSHDGLAPMDPVTAVAALRAAVAEGVPHATVLDVDWRAYGTAMTAARPSPLVGDLPEVRRALEAAAATAPDTHALRDRLRGLAPAEQDRLLTDLVRAEVATALRHSSPEAVDVNRAFKDLGFDSLTAVEVRNRITAATDVKLPTTLLFDYPNTTAVVAHLRTLLLGDERPVAAPVVVSAGVTDEPMAVVAMACRFPGGVTTPEELWHLMAAEVDAVSTPPEDRGWDLDALYDPDPERHGTTYSREGGFIQDVAGFDPVFFGISPREALAMDPQQRLLLETSWETFERAGIDPGTLRNSATGVFVGSITTDYQVRLGGAAAQEQLAGHLMTGNASSIASGRLSYTYGFEGPAVTMDTGCSSSMVALHLALQSLRTGECTMALAGGVTVMSTPEPYVEFSRQRGLAADGRCKAFAEGADGMGFAEGVGLVLLERLSDARRNGHPVLAVVRGSALNQDGASNGLTAPNGPSQQRVIRQALANAGLAPGEVDVVEAHGTGTPLGDPIEAQAILATYGQDRDPARPLLLGSLKSNIGHTQAAAGVAGMMKMILAMRQGTLPKSLHITRPTSVVDWSSGAVRLVTESTPWPETGRPRRAGVSSFGISGTNGHLILEEAPAPEPAEDEPADPFTEPSADDSADTVRSWMVSGKSRAAVGEQAARLAASVRTSDASVLDVAHALVSSRVAMDRRAVVVGRDGEELLAGLDALAAGEPSPRLVEGSVGDGSGKVAFVFPGQGSQWVGMAVELLGSSPVFAGRVAECAAALEPFTEWSLLDVLNGVEGAASLERVDVVQPVLWAVMVSLAEVWRAQGVEPGAVIGHSQGEIAAAVVAGGLSLEDGARVVALRSRALRALSGLGGMVSVARNVDEVRGLLAGWEGRISVAAVNGPSSVVVSGDAEALDEFVAACDASGVRARRVAVDYASHSAHVERIEEELAGLLAPVAPRSCDVPFYSTLSGGVIDTAGLDAGYWYRNLRGTVEFEAGTRALLADGFRVFVEVSAHPVVATGVQETIEDASVQAGVVGTLRRDEGGLERFALSLGEAWALGAEVDWETHYAGTRPRHVDLPTYAFQRQHYWPRFAELGGDVSSAGLDSPDHPLLGASVELAGGDGLVATARWSLRTHPWLADHAVSGTVIVPGTALVESVIRAGDVLGCGRIEELALQAPVVLQERGEAQVQIGVGEPDASGRRPVTVHTRTTGPDGATEDLWTLRAQGTLTEPGAPAVDRPEEFTSWPPPGATAVAAEGFYELLAGRGYEFGPVFQGVRATWSRGEDLYAEVVLPEQVRGDAGRFGIHPALLDAALHAAHLAPGSAGRTVVPFTWSGVCLHAAGATALRVRVSPAGQDAISVQLTDPTGAPVATIDALAVREIAPDTLDPSARAARDWLFRLDWTPVTPPAAVPAATGWAVLGTPADPVTAPDGSGTTLPAFATPGALAEHTEANGHRPDAVLLFAGAAASGTAAAPDAEPGVPDAVLDDVLATVQSWLADETTEGVPLVVVTRGAVPTGPADPAHDLPGAAVWGLVRSAQSQHPGRLVLVDLDIHDDSWLALPAALAAGEPQLALRQGAAYAPRLVRPRTSDALTVPEGTGNWRLDIPEKGSVDRLDLVAAPGTAEEPAAGEVVIEVRAAGLNFRDVLNTLGMYPGPAVLLGAEAAGVVTAVGEGVTGFAPGDRVMGLVSGGFAPRAVADARMLAPVPDGWTWAQAASVPVAFLTAYYGLRDLAHLDAGESVLVHAAAGGVGMAAAQLARHWGAEVYGTAGDHKRTLLRADGWDDAHLASSRTLAFEDRFRTTSGGRGVDVVLNSLAGDYIDASLRLLAPGGRLVDMGKTDVRDPGQVLRDHPAAALYQAYELREAGEDRIQEMFRDLSELFASGALRPLPTVTWDVRHAREAFRHMAQAKHYGKIVLTLPRAWDPEGTVLVTGGAGVLGGILARHLVTRHGMRHLVLTGRRGPDTPGAGELAAELRELGAEVTLAACDAADADALAAVLAAVPAEHPLTAVVHAAGVLDDGVLESLTPDRLRTVLAPKADAARHLHRLTRDLDLTDLVLFSAGAGVFGNAGQANYAAANTYLDALAHRRRADGLPTTSLSWGLWADTSALTGQLDDTDLARVRRSGVLPLSAADGMVLFDAALTEQRPHLVPVRLETGQLRASGDEVPPLLRSLYRGPVRRTAEAGAATGTDGLRARLAGRSAEDRLSTLRDLVGAHAAAVLGHDDTEPFHAGRAFRDLGFDSLTAVELRNRLSAATGLRLPATLVFDHPTVAALAAHLDGELSDGTPAALPAAPAPAPAAPGDDDPFAIVGMACRLPGDIHSPEDLWRLLADGADAVAPFPDDRGWDLARLYDSVPEGQGSSRTREGGFLHDAADFDADFFGISPREALAMDPQQRLLLETAWETFERAGIDPRSVRGSRTGVFAGLSSSDYLKRVTHVPDEIAGYVNNGNANSIVSGRVSYTLGLEGPAVTVDTACSSSLVALHMALQALRRGECTMALAGGVTVMSSPEIIVDFSRQRGLAADGRCKPFAEAADGTGFSEGVGLILVERLSDARRNGHQVLAVVRGSAVNQDGASNGLSAPNGPAQQRVIRQALADAGVGAAEVDVVEAHGTGTRLGDPIEAQALLATYGRDRDGGHPLFLGSVKSNLGHTQAAAGVAGVMKMVLALRHRLLPESLHIDAPTPHVDWADSGVRLLTEATAWPEAGASRPRRAAVSSFGISGHQRPRHPGGGPPPPPARTAASRSPPAPDAAETRPAPLPWVLSARSEAALRGQAKALLTHLDAHPGTDPADIAHTLVTRRAQLEKRAVVVGSATGDFRAGLAALAEGSPAAHVVTGGRGAGRDRRTVLVFPGQGSQWAGMGAELLDASPAFADRVAACEEALAPYVDWSLTAVLRQEEGAPALDRVDVVQPVTWAVMVALAEVWRAHGLRPAAVLGHSQGEIAAAAVAGALSLADAARIVAVRSRAIARELSGHGGMVAVTAPHDEVTALLADLPGVCVAAVNGPSSVVVSGDTGGLDTLLAACEEQGVRARRVPVDYASHSAHVDRLAESLPAALDGIEPRDGDIPFFSTVTADWHPGTGLGAAYWHRNLRGTVRLEESLRALVEQGHDVFVECGPHPVLTVGIEDTVAALGADAVALGSLRRDDGGPARVLTALAAAHVEGVPVDWRPAVSHGTAVDLPTYAFQRRRYWLDAGTPQGDPAGLDSVVRLADGGAVLSGSLSLTTQPWLDAHRTHGAAVVPTTALLDWAVRAGDETGLPVVAALDEHSPLVVPEEGHVEIQLTVSAADTDSRPFSVHSRLHAADAGEPATPWTRNATGDLTDRPTTTPQASGTWPPADAVAADPAPVRALAEDRGLDLAAPFDTVRSLWRAGTDVLAEVALPDAAHADAARFRLHPALLQTPLALAATTEEATAPVLPAAWRDVTVHATGASRLRVRLTPGDDATWSVEARDAAGDLVLTGTAVTRSAGPDRLPATAGPDAPHRVAWLPWTDTTSSATPEPHGPWAVIGAPGRLTAALERSGATVQLHPDLAALTTALDNDEAAPPALVVAFHGHDSGEDPTKAAHTSAARALTLSTAWLREPRLADARLLLVTEGAVATGPDDTVPGLADATAWGLLRSAQTEHPGRFLLADLDPAPGDTDEDSAADALIAAAAAAARTGEHQFAVRAGTVTVPRLVPAGHPEGAPAPAATAPWGEGTGAGTVLITGGTGTLGALVARHLVTRHGVRHLLLTSRRGPGAPGAAALREELAALGAEAEIVACDVADREQLAGVLDAVPAEHPLTAVVHTAGVLDDGTLDGLTADRVAHVLRPKADAAWHLHELTRDTKLTAFVMFSSYAGVAGGPGQANYAAANAFLDALAQHRRASGLPAHSLAWGLWEDRSDLTGALDTTGLARLERSGIRPLTAGQGLALLDASTALDTAHLVPVRLDTRTLRADEVPPLLRALARPAVRRAADSGPGAATGAPADLRERLAGLSGPQQRALLHRTVLGHLAAVLGHASAASLDADRGFLDLGMSSLTAVELRNRLNADTGLSLPTTLIFDHPDPAALVRHLQTELGTGAGEPDQAVFAELAALEAAVGGAALDDQDRARLAQRLKALGWKLDATSQDADEPDDDSDLDTTTDDEMFDLIDNELGLA

SEQ ID NO: 3322 - protein, 180 aa, Musa acuminata
  misc_feature (29)..(29): Xaa can be any naturally occurring amino acid
  misc_feature (128)..(128): Xaa can be any naturally occurring amino acid
  misc_feature (168)..(168): Xaa can be any naturally occurring amino acid
  misc_feature (170)..(170): Xaa can be any naturally occurring amino acid
  unsure (1)..(180): unsure at all Xaa locations
MAKSYPTVSEEYQKAVEKAKRKLRGLIAXKNCAPLMLRLAWHSAGTYDVVSKTGGPFGTMRFPAELAHGANNGLNIAVRLLEPIKEQFPILTYADFYQLAGVVAVEVTGGPEIPFHPGREDKPEPPVXGRLPDATKGSDHLRDVFGHMGLSDRISLHYLVDTHWEGAXRXDLVSKGLGLP

SEQ ID NO: 3323 - protein, 313 aa, Aruncus dioicus
  misc_feature (118)..(118): Xaa can be any naturally occurring amino acid
  unsure (1)..(313): unsure at all Xaa locations
GGLGDVLGGLPPAMAANGHRVMTVSPRYDQYKDAWDTSVLVELEVGGRTETVRFFHCYKRGVDRVFVDHPLFLERVWGQTGSKIYGPRAGVDYNDNQLRFRILCQAALEAPRVLNLNXNEYFSGPYGEEVVFIANDWHTALLPCYLKAIYKPKGIYYTAKGGFGIHNIAYQGRFRFMEFSELDLPEEFKSSFDFIDGYNKPVKGRKINWMKAGILESDRVVTVSPYYAQELISGEDKGVELDTVIRKTGITGIVNGMDVQEWNPATDKYLDVKYDSTTVMDAKPLLKEALQAEVGLPVDRDIPVIGFIGRLEE

SEQ ID NO: 3324 - protein, 7771 aa, Streptomyces sp. FR-008
MTTPSEKVVEALRASLKETERLRRQNRDLAAAASEPVAVVAMSCRYPGGVTSPEDLWHLVASGTDAVGGFPTDRGWDLDALRDAGVDARGHSVSQRGGFLDGVADFDAAFFGVSPREAVSMDPQQRLLLETSWEAVERAGIDPRSLRGSRTGVFVGTNGQDYAYLLVRSLADATGDIGTGIAASATSGRLSYTLGLEGPAVTVDTACSSSLVALHAAAHALRAGECGLALAGGVNVMSAPGSLMEFSRAGGLAGDGRCKAFADEADGTGWSEGVGVLLLERLSDARRNGHPVLAVLRGSAVNQDGASNGFTAPNGPSQQRVIQQALAAAGLTAADVDAVEGHGTGTPLGDPIEAQALLATYGQGRPEDRPLLLGSVKSNIGHAQAAAGVAGVIKMIMAMRHGVVPRSLHADHPSRHVDWDSGAVRLLSEAVEWPETGRPRRAGVSSFGISGTNAHVVIEQAGPAAEPESPAEPETVPTVVPWPVHARSEASLDAQIEAVTALTDATPLDIGHSLATGRSLFEHRAVLLSGLDGVPAEAARGRATERSLAVLFSGQGAQRAEMGRELYARFPVFAKALDEITALLDPRLDRPLREVMFARRRTPEAALLDTTGYTQPALFAVEVALHRLVESWGVVPDFVAGHSIGEIAAAHVAGVFSLEDACTLVAARARLMQELPAGGAMVAVQATEAEAAPRLTEGVALAAVNGPDSVTLAGEEAQVLALAAEFAAEGRKTQRLAVSHAFHSPLMEPMLAEFRRVAESLTYHEPVLPVVSNVTGALADDRLLCDPEYWVDHVRSTVRFADGVRALAGAGADTFVELGPDGILTALAQQCLDGPDVVAVPVLRKDRAEERALLTALARLHVAGVDIDWAACFEGTGARRTELPTYRWQHERYWPVLMAAAGDVSAAGLVSAEHPLLGAAVSLAGSDGVLFTGRLSAQTHPWLLDHTVGGMVAFPGTGFLELAVRAGDQVGCDRVEDLTLAKPLILTENSAAVVQVHVGAADADGARRVTVYSQAVDDPEQRWTEHASGLLTRGERVTGFDSTVWPPRGAVAADLEGFYARTEYGPVFQGLRAVWTRDDEAFVEVALPPQVDDAEYYGMHPALLDAAVQSVGFAGLGDGKKLVPFSWSGVSLHAGGASVVRVRVARVGEDTVSIAAVDVEGAPVLSADSLILRAPSALRAPTLHSSEQDGLLRLEWVAAPEGGAAPVRAVTLGTDRAWPGPLASLADAAAVTPAPDLVLVPLEGVEDDTPTAVHAATARTLALIQEWLEPATSAAGRLVFVTRGAVATGTDTGVSDLAAAAVHGLVRSAEAENPGRFALLDLDAGTAAPSGELLAQLPPLLAAGDTQFAVRDEAVLVARLARLSTGASLLPVPGLPWRLDTTVPGSIDGLSLVPAPEALDEPEGRAVRVEVRAAGLNFRDVLNALGMYPGEAGLLGSEAVGLVTAVGPDVTGIAVGDRVTGMIPGGLADTVLVDERYVTRVPEEWSDEDAASVPLVFLTALYAFRDLASVQAGERVLIHAGAGGVGMAAIQLARHMGAEVFATASEPKWETLRGLGLDDAHIASSRDLGFEEKFREVTGGAGMDVVLNALAGDFVDASLRITAPGGRFLEMGKTDIRDPQTTGEVRYRAFDLGEAAPERIGEMLTELLGLFAEGALQPLPVRAWDVRRAREAFRFMSQARHVGKIVLTMPPRWNPEGTVLVTGGTGGLGREVARHLVSARGVRRLLLVSRRGPAAEGVDAFREELAGLGAHVDVVACDVADRAAVAGLLGSVPVGHPLTAVVHTAGVLDDGVVTGLSPERLSGVLRPKVDAAWHLHELTRDMGLAGFVMFSSVSGVMGSAGQANYAAANVFMDALAQYRRAEGLAGLSLAWGAWEQTSGMTGTLTEADMQRVTASGAAPLTVEQGLALLDAATGSDEPLVVPIGAPSGDQRVLGLVPPLLRNLVRGTRRSAATAAGGASTAADLARRLLALPAEDRVRHAVELVRTEAAAVLGHASARAVEPGREFRELGFDSLTAVELRNRLTTVTGLRLTATLVFDYPTPHGLAEHLVAELLDEHGETGTPVVAADVADDPVVIVGMACRMPGGIETPDDLWRMLADGEDRITGFPTDRGWDLDALFGGGGDNRGVSATRRGGFLHDVGGFDAGFFGISPREAMAMDPQQRLLLETSWEALERSGIDPTGLRSSATGIFVGTTGQDYANLVMTSREDVEGHASTGLATSVISGRVSYALGLEGPALTVDTACSSSLVALHLAAQSLRSGESSLALAGGVTVLSTPMNFFGFTRQGGLAGDGLCKAFADAADGTGWSEGVGMLVLERLSDARRNGHDVLAVVRGSAINQDGASNGLTAPNGPSQQRVIRQALATAGLSADEVDAVEAHGTGTTLGDPIEAQALLATYGQDRPEDRPLLLGSIKSNIGHTQAAAGVAGVIKMVLAMRHGALPRSLHIDQPSTHVDWEAGAVRLLTETTGWPETGRPWRAGVSSFGLSGTNAHVILEQPEPETADTESPEPQAEPEALARVVPWPVSARTEEALPGQLARITALDAAPLDIGHSLATGRASFDHRVVLLAGADGEDEPVEVARGRAVERRLAVLFSGQGSQRAGMGRELYGRFPVFTKALDEVLALLDPKLDRPLREVLFAEEGSETAALLDTTGYTQPALFAVEVALYRLVESFGVVPEFVAGHSVGEISAAHIAGVLSLEDACTLVAARARLMQELPAGGAMVAVQATEAETAGRLTGGLSLAAVNGPDSVVIAGPDHEVDALASEFAAEGRKVQRLAVSHAFHSALMEPMLDAFHDVAKGLGYGEPRIPVVSDVTGTLAEPGQLSRPEYWVEHVRSTVRFADAVHALDQAGANAYLEIGPGGVLTVLAQQTLDAAGTASDSVTAPALRKDRAEEPALLTALATLHVTGVPVDWAGCFEGTGARRVELPTYAFQHERYWPRPSAHGGDVTGAGLSPAAHPLLGAATGLAASEGVLFTGRLSLTTHPWLADHTVGGGMVLFPATGFLELAVRAADEVGCDRVEEFTLATPLLLPADTAVVVQVWAGAPDESGARTVSLYSRSADVPDATWTQHATGVLTSGAVTLPAVAEIWPPKGAVAVGLEDFYDRTEYGPVFRTIRAVWKRGDEAFVEAALPPQADDAEYYGMHPALLDAAVQSVGFAGLDDEHQLLPFLWAGVSLHAGGASVVRFRVARTGEDSVSIAAVDVEGAPVLSAESLVLRVPAGDHAPAARRTELDSLLRLEWTAGPETGDAPAARHTTAGALGTGGAAATLAPLTGEEDLVLVEVPAPAEGADVPAATHERAAQALALAQEWLADERFADTRLVFVTRGAVCARPGERVDDLPAAAVWGLVRAAQSENPTRFALLDLDDTTPVETALPQLLGPLSGGDAQFVVREGAVLVGRLDRAVTAPSLLPPADGPWRLDSPSRGSLDALTLRPCPEELAEPQERQVRVEVRAAGLNFRDVLNALGMYPGEAGLLGAEAAGFVTAVGPEVTGLSVGDRVMGMVPGGLATETLIDERFLTRVPEEWSDEDAASVPLVFLTAYYALTELAGLSAGERVLIHAGAGGVGMAAIQLARHMGAEVFATASEPKWETLRGLGLDDAHIASSRDLGFEEKFREETGGAGMDVVLNALAGDFVDASLRITASGGRFLEMGKTDIRDPHAVGDVRYRAFDLGEAGPDRTGEMLSELLGLFAEGALRPLPVRAWDVRRAREAFRFMSQARHVGKIVLTMPPRWNPEGTVLVTGGTGGLGREVARHLVSARGVRRLLLVSRRGPAAEGVDAFREELAGLGAHVDVVACDVADRAAVAGLLASVPVGHPLTAVVHTAGVLDDGVVTGLSPERLSGVLRPKVDAAWHLHELTRDMGLAGFVMFSSVSGVMGSAGQGNYAAANVFMDALAQYRRAEGLAGLSLAWGAWEQTSGMTGTLTDAGVRRMSASAAPALTVEQGLALLDAAVVSDEPHLVPLGASGSTRMPGEVPPLLRNLVRGTRRAAATAVGGAGTADELTRRLLDLREDERLRFAVNLIRAEAASVLGHSSAQAIDAERDFHDLGFDSLTAVELRNRLTGATGLRLPATLVFDHPTPGVLAEHLIAALLDEQRATGATAPTPVAAALAEDPVVIVGMACRMPGGVSSPEELWQLVLDGQEGISAFPTDRGWDLDTLQRGGESGHGRSATSEGGFLYDVADFDAGFFGISPREALAMDPQQRLLLETTWEAFERAGITPTEVRGSRTGVFVGTSGQDYTTLVMNSRQDAEGHAPTGLATSVISGRLSYTFGLEGPAVTIDTACSSSLVALHWAAHALRSGEADLALAGGVTVMSTAMGYAGFTRQGGLATDGRCKAFADAADGTGWSEGVGMLVVERLSDARRNGHPVLAVLRGSAVNQDGASNGLTAPNGPSQQRVIRQALASAGLSTDEVDAVEAHGTGTTLGDPIEAQALLATYGQDRPGDRPLLLGSIKSNIGHAQAAAGVAGVIKTVMAIRHGVLPRSLHIDRPSTHVDWTEGDVRLLTETTEWPETGRPRRAAVSSFGISGTNAHTIIEQAPEIVEATPAAASAPAPAAVPWPVSAKSPEALDAQLARIATVTGATPLDIGHSLATGRASFEYRAVLLAGTGAEDEPVEVARGRAVERRLAVLFPGQGSQRAGMGRELYERYPVFAKALDEITALLDPELDRPLREVLFAEEGSETAALLDTTGYTQPALFAVEVALHRLLESQGVSPEYVAGHSVGEIAAAHVAGVFSLEDACRLVAARARLMQELPAGGAMAAVQATEAEIAPRLTEGLSLAAVNGPDSVVVSGPESEVTALAAEFVAEGRKTQRLQVSHAFHSALTEPMLDAFREVARSLAYAEPRLPVVSNVTGALAAPGQLTDPEYWVRHVRETVRFADGVRALAEAGADAYLEAGPGGVLTALARQTLGTDSEAVTAPALRKDRAEEPALLTALATLHVTGVPVDWAACFEGTGARRVDLPTYAFQRVRHWPDTRRPGTGGGSSDPLDGAFWTAVEGEDLTRLATDLAVDTEALGAVLPALSTWRRRRRDQAMVDSNRHHETWKPLSLPPGAPAPAGTWLAVVPAAYGEDPWTAAVLDAVGTDVVRLTVDTVERHALADRLRALSADGAALAGVVSLLALADTPEAAVSGDPAGAPAAPTAVLFQALLDAGVDAPLWCLTRGAVAVAGSEAVTAPAQAAVWGLGRVAALEHPAVWGGLVDLPSAWDERAARRFAAVLAGHDGEDQVAVRSSAAFARRLVPAPAAEPGDGWQPRGTVLVTGGTGGRGAHVARWLAGAGAAHLVLLGRRGPDAPGADALRAELEAAGARVTLVACDAADRDALAAVLDGIPADTPLSAVVHAAAVVDDGVLDDLTPERFAAPHHARTAPALHLDELTRGLDLDVFALCSSVAGTVGTAGRANLAAATAVLDALARSRRSEGLPATSMAWGAWIGDADETGGDDAPAAPRAGAGHPAVHPDLALAALRQAVTRPEAAPVLFDPRQPQVLDGLIGMRGNALLRDLPDARQALADAETTRDRARTAASGLAERLRGLPADERTDSVTELVRTHAAAVLGHPGPEAVAADRNFRDLGFDSLTAIELPNRIALATGLRLPATTVYDYPTAQALAEHLLAELLGEQDTPGSGRATPAALAEDPVVIVGMACRLPGGVRSPQDLWAMVSEGRDGIEAFPEDRGWDLATLTTGGADGRGRSATLRGGFLSGAADFDAAFFGISPREALAMDPQQRLLLETTWEAFERSGIDADQLRGSRTGVFVGTNGQDYSTLVMNSREDLEGHAGTGLAASVVSGRLAYTFGLEGPAVTVDTACSSSLVALHWAMQALRAGECDLAVAGGITMMSTPSAFSGFTLQNGLAVDGRCKAYADAADGTGWSEGVGLIVVERLSDARRNGHEVLAVVRGSAINQDGASNGLTAPNGPSQQRVIRQALAGGGLTPSDIDAVEGHGTGTPLGDPIEAQALLATYGQDRPADRPLLLGSIKSNIGHTQAAAGVAGIIKTVMAMRHGVLPRTLHVDRPSTHVDWESGAIRLLTEESAWPDSGRPWRAGISSFGISGTNAHTIIEQAPAPEPAEPGAALLPGPTPTVVPWPVSAKSEEALDGQIAAVTALDGAAPLDVGHSLATGRARFDHRAVLLARPGTTPWEAARGRAAVRSLALLFSGQGSQRAGMGRELYDRFPVFAEALDAVLARLDTGLTPSLREVLFAEEGSGTAALLDTTGYTQPALFAVEVALYRLVESWGVRPGHVAGHSVGEIAAAHVAGVFSLEDACRLVAARARLMQELPSGGAMVAVRATEAEVVPRLTEGLSLAAVNGPDSVVIAGTEDEALALAEAFAAEGRKTQRLPVSHAFHSPLMEPMLDAFRQVAESLEYAEPRIPVVSDVTGALAEPGQLTRAAYWVEHVRATVRFADGVRALAGAGANAFLEIGPGGVLTALAQSVLEADDRDEAVVLPALRKDRDEETALLTAVAGLHVSGVRVDWSAWFTGTGARRTELPTYAFQRERYWPRPAALTGDISTAGLISAEHPLLGAAVPLADSEGVLFTSQISMQVHPWLLDHRVGGTVIMPGTGYLEMAIRAADQVGCARVEELVLAAPMVLDEKHPVSVQVVVGAPDDTGTRPVTFYSRPSDAVDAPWSRHADGFLAVQERTDSFEAPVWPPADAVSVEFDGDYSRTGYGPSFQGLRQVWLRGEEAFVEVALPEEVAGDAQYFGMHPALLDAVQHANGYLGVGSEENPLLPFAWNGVSLHARGATTLRVRITRLGDESVRLTAVDAEGVPVLCAESLVLRAPTVPSAPVATGGQEPVFRLDWTAAPAVKPTEGLTAATLGEDVFGVGTALASLTELTGPDADPSAAPDFVLVPLAGAGDAAGAGDPDAHGADVPAAVHALTTRTLDLLQQWQAAERLGHSRLVFVTTGAVAAHDTETVRDLAAGAAWGLVRSAQSENPDRFVLLDLDGADAPDTLRALLPDLPGLLGSGDAQFAVREGTALVGRLERLTTAPGLLAPTGTPWRLDTTGKGSLDNLVLAPCPEVLQPLGAHEVRIDVEAAGLNFRDVLNALGMYPGESGPMGTEAAGVVTAVGEAVTGLAPGDRVLGTVPGGFGPVVVADQHYVTQVPEGWTMRDAASVPLVFLTALYAFRDLASVQAGERVLIHAGAGGVGMAAIQLARHVGAEVFATASEPKWETLRSLGLDDAHIASSRDLGFEEKFREVTGGAGMDVVLNALAGDFVDASLRITAPGGRFLEMGKTDIRDPQTTGEVRYQAFDLGEAGPERNKALLGELLDLFAEGALRPLPVRTWDVRRAREAFRFMSQAKHTGKIVLTMPPRWNPEGTVLITGGTGALGGHLARRFARAGMRHLLLTSRRGADAPGAAELAAELRELGAEVTVAACDTADREATAALLDAVPAAHPLTAVVHTAGILDDGVIASLTPERLAAVLRPKVDAAWHLHELTRDLDLAAFLPFSSVAGVMGSPGQGNYAAANSFLDALTRHRRHLGLAGTSLAWGPWAHDGGMTSTLSDTDMRRMQSGGLPPLAVDQGLELFDIARGSDESFLVLVGLAAGAMRGAAPEDLPPLFRSMVRSGRRTAASTDAAGASAALGAKLAGLGAAERVRYVTDLVREQAARVLGHASPKSVDVSQEFRELGVDSLTALELRNHLATATGLRLPATLVFDYPTPTALAEHFVAELAGDDAVPQGPSLLAELDRFETLLSAGDPDEITRAGLALRLGQMLDQVRGNAPEQAGSSLDDDFESASTDEVFAFIDNELGRLGDL

SEQ ID NO: 3325 - protein, 68 aa, Musa acuminata
  misc_feature (17)..(17): Xaa can be any naturally occurring amino acid
  misc_feature (37)..(37): Xaa can be any naturally occurring amino acid
  unsure (1)..(68): unsure at all Xaa locations
FAPFPKGCFFTTSGGLXSFEHPLNELKAMPRVDSQGXVCGATYKVDDQAKKETRMPRVDSAANWSSEY

SEQ ID NO: 3326 - protein, 580 aa, Agrobacterium tumefaciens str. C58
MHVRSSGLRGRKGFIFSRRDTLRRSPMTLPHAPVHKPQAQSDWWKGAVIYQVYPRSFQDTTGDGYGDLAGVTKRLPYIASLGVDAIWLSPFFTSPMADMGYDVSDYCNVDPMFGTLADFDALMAEAHRLGLKVIIDQVISHTSDKHPWFVDSRASRINSKADWYVWANPKPDGTAPTNWLSVFGGPAWEWDGVRKQYYMHSFLASQPDLNFHNPEVQDAVLETVRFWLDRGVDGFRLDTVNHYFHDKLLRDNPPLVDDESFGLDASDVNPYGMQDHLYDKTRPENVAFLKRFRALLDDYEGRATVGEVGDGARSLKTVAAYTSGNDKLNMCYTFDLLGPDFSAKHLRGSVETFGKVVTDGWVCWAFSNHDVVRHLSRFSEGPEEQTRVAKLAICVLASLRGSICLYQGEELGLTEAELAFEDLRDPYGIRFWPAFKGRDGCRTPMVWETGKPNAGFSTAEKPWLPVPYVHAMQAVDAQERKPDSVLNHYRAVLSFRKTHGALRDGDMHFIKTNLDVLAFTRQRGDEKLLFVFNLTREPVEFPVPKAMSVTDILQMPGFAPLYDAGIVKLEGLDVFCGIVA

SEQ ID NO: 3327 - protein, 217 aa, Oryza sativa
MANINMADTAPSCDTYLLFNGETLLPIGVRAFIYTAVLAYCFIGTSFPQISLATIDAIRNLGQLTAGGLGPGTLVGSAAFDLFPIHAVCVVMPRAGSKKKISDLGVWLVELFWSFWAYIWLYIILEVWTPRVITLWEALLTVLQYGLLLLHAYAQDKRWPYVSIPLARGDRPEDWVPAEDASVDYDDNYDGIGDILPGQNEDIVDIFSAHSYSNEGY

SEQ ID NO: 3328 - protein, 162 aa, Musa acuminata
  misc_feature (81)..(81): Xaa can be any naturally occurring amino acid
  misc_feature (93)..(93): Xaa can be any naturally occurring amino acid
  misc_feature (124)..(124): Xaa can be any naturally occurring amino acid
  misc_feature (136)..(137): Xaa can be any naturally occurring amino acid
  misc_feature (142)..(142): Xaa can be any naturally occurring amino acid
  misc_feature (150)..(151): Xaa can be any naturally occurring amino acid
  misc_feature (154)..(154): Xaa can be any naturally occurring amino acid
  unsure (1)..(162): unsure at all Xaa locations
HTGPLPCYLKSMYQSHGIYKNARVAFCIHNISYQGRFAFSDFALLNLPDKFKSSFDFTDGSNRPVKGRKINWMKAGIIESXRVVTVSPYYAQXLVSGVERGVELENALRMTGITGIVNGMDTNXWNPSIDKYISVXXDATNXMDAKPLNXXPYXLNLVCLLT

SEQ ID NO: 3329 - protein, 289 aa, Malus x domestica
MEGKEEDVRLGANKYSERQPIGTSAQSQDDGKDYKEPPPAPLFEPGELTSWSFYRAGIAEFIATFLFLYITILTVMGVVKSKSKCTTVGIQGIAWAFGGTIFALVYSTAGISGGHINPAVTFGLFLARKLSLTRAVFYIVMQTLGAIAGAAVVKGFEKSSTFEMLGGGANSVAHGYTKGQGLGAEIIGTFVLVYTVFSATDAKRSARDSHVPILAPLPIGFAVFLVHLATIPVTGTGINPARSLGAAIIYNKKHAWDDHWIFWVGPFIGAALAALYHVVVIRAIPFKSK

SEQ ID NO: 3330 - protein, 487 aa, Mycobacterium bovis AF2122/97
MPPLDITDERLTREDTGYHKGLHSRQLQMIALGGAIGTGLFLGAGGRLASAGPGLFLVYGICGIFVFLILRALGELVLHRPSSGSFVSYAREFYGEKVAFVAGWMYFLNWAMTGIVDTTAIAHYCHYWRAFQPIPQWTLALIALLVVLSMNLISVRLFGELEFWASLIKVIALVTFLIVGTVFLAGRYKIDGQETGVSLWSSHGGIVPTGLLPIVLVTSGVVFAYAAIELVGIAAGETAEPAKIMPRAINSVVLRIACFYVGSTVLLALLLPYTAYKEHVSPFVTFFSKIGIDAAGSVMNLVVLTAALSSLNAGLYSTGRILRSMAINGSGPRFTAPMSKTGVPYGGILLTAGIGLLGIILNAIKPSQAFEIVLHIAATGVIAAWATIVACQLRLHRMANAGQLQRPKFRMPLSPFSGYLTLAFLAGVLILMYFDEQHGPWMIAATVIGVPALIGGWYLVRNRVTAVAHHAIDHTKSVAVVHSADPI

SEQ ID NO: 3331 - protein, 202 aa, Triticum aestivum
  misc_feature (79)..(79): Xaa can be any naturally occurring amino acid
  unsure (1)..(202): unsure at all Xaa locations
QVCTKKQAGTGPEFPGYRRPTRPNMEKKKEHQRKFTPSVIEPSLGIGRIIYCLFEHCFYQRTGKTDDEQLNVFRFPPLXVAPIKCTVFPLVKVEKFDVVAKKISKALTTAGISHIIDITGTSIGKRYARTDEIGVPLAITVDSTTSVTVRDRDSKDQIRVEVEEVASVVKEVTDGQSTWADIMWRYPAHTALATDEEEASET

SEQ ID NO: 3332 - protein, 2100 aa, Zea mays
  misc_feature (1712)..(1712): Xaa can be any naturally occurring amino acid
  misc_feature (1721)..(1721): Xaa can be any naturally occurring amino acid
  misc_feature (2059)..(2059): Xaa can be any naturally occurring amino acid
  misc_feature (2068)..(2068): Xaa can be any naturally occurring amino acid
  unsure (1)..(2100): unsure at all Xaa locations
MTRVIHDSGDDMQKEALDLVSSDVNFPKGHFPDYRIGPNNQIIDPEETHEAVPLKEIVAKETAQLLEQHKRLSVRDLKEKFEKGLSGASKLSEEAKRREAASLDRQVLLKKLRDVLDTLKGRVAGRNRDDAEEAISLVEALAVQLTQREGELIYEKAEVKKLANFLKQATEDARKVAEEERALALAEIEKARAAIEKVEKAWRVHDFASSSREKAEIEELRKEVREARRIKMLHQPSKVMDMEFELQALRTLISEKTQLCNQLKKELAMIKRLEDDSSGLFELEGSNTLGSQLCIIPRVDGASNITNCPIQWYRVISGGTRELISGATKFMYAPEPFDVGRLLQAEIVLNADKIIVQTDGPVDNVLSEPTLAVSRAVMWGRTYMRARDARRAEARAFKVGANSNSPKEGSSKESGNSSTKEAMGDSNDFKAFAEALKSLQACVVANAQAIASLTADRTSASGHKIGYDEHHGDRPPRFQKLDFPRYDGKTDPLIFINRCESYFHQQRIMEEEKVWMASYNLEHGAHMWYIQVQTDEGTPSWRRFKELLNLRYDPPLRAAPLFELADCRRTGSVADYRDLFQALLPRAGPLDEAQWVQLFTGGLRPPLSLDVQRYTRGHNRVCTRIFYINDVELDTADESATGDDHDTETPMFSLDAVAGVFVGNTVQLQVVVGAATFVALIDTGSTHIFIGEAAARRSGLTIEPRPRLTTTVANGERVACPGVLRQAPVDMGSMVFGVDLFVMPLAGSRTGRGASASTPRALNALTVKDAFPIPIVDELLDELHGARLFTKLDLRSGYHQVQMRQEDVHKTAFCTHDGLYEFLVMPFGLCNAPATFQALMNDVLRTYLRRFVLVFFDDILIYNTSWADHLRHLRVVLNTLRQHRLFVKRSKCSFGVDFVAYLGHVISAAGVAMDPAKVQAIHDWPQPRSARAVRGFLGLAGYYRKFVHNYGAIAAPLTTLLKKEGFVWPDEATAAFSALKGAVTTTPVLTLPDFTKSFVVECDASTYGFRVVLIQEAHPIAFFNRPVAPRHRSLAAYERELIGLVLAVRHWWSYLWGRRFIVKTDHYNLKYLLDQRLATISQHHWVGKLLGFDFSVEYKSGATNTDFVRACPTCQRYKSEHLHPAGLLTPLPIPTVVWADIGLNFIEALPRVNVKSVILSVVDRFSKYCHFIALGHPYTAESSDGQTEAANRVIIMYLRCFTGDRTRQWLRWLPWAEYVYNTAYQSSLRETPFRVVYGRDPPSIRSYEPGETRVDAVARDMEEREAFLADVRHRPEQAHAVQKRHYDKQHRPVTYAVGDWALLRLRQRAPSSLPQQTMGKLKPRFLGPYRVIELINNVVVRLELPPHARIHDVFHVGTLKFVLVQWRGEPTTSATWEDLDKFRATYPDFQLEDELDLEGGRDVMWGRTYMRARNARRAEARAFKVGANSSSPKEGSSKESGSSSTKEVSSKEESGSSSTKEAAGLERYVDSLMKRTDIEFNVVVTQMNGKDYSSNSVHVFHIGKLRIKLRKGWSTKARESYSTTMKLCGSRGGGNAAARAVFWHPRKGSSYTLAFETDRDRNAAIMIARKFASNCNHFDSLCHFDTPNGWDLHKDMVVKYKRGCFGSGSAVAAHAGGEEESRAARLQSFFASVLSGLFGQAEAEDEDEDEEMPTRNHNAAAAAAPQHHHHNRGGAPALGKSKAVPGRADAMNRRAPLGDIGNLVSVRPAEGXLSCRSRSIXPITRSFGAQLVKNVQANAAIKNAAILPARHAPRQERKAPAKQPPPEDVIVLSSDSEQSRTQLESSASSVRSRKKVINTLSSVLSARSKAACGITDKRRQVAVIEDIDKLDVNNELAVVEYIEDIYTFYKIAQHDRRPCDYIDTQVEINPKMRAILAGWIIEVHHKFELMPETLYLTMYIIDQYLSLQPVLRRELQLVGVSAMLIACKYEEIWAPEVNDFILISDSAYSREQILSMEKGILNSLEWNLTVPTVYMFLVRFLKAAALGNKVEKEMENMVFFFAELALMQYGLVTRLPSLVAASVVYAARLTLKRAPLWTDTLKHHTGFRESETELIECTXCWSAHTRPXADSKLRSVYKKYSSEQFGGVALRPPAAAVEIK

SEQ ID NO: 3333 - protein, 289 aa, Malus x domestica
MEGKEEDVKLGANKFSERQPIGTSAQTQDEGKDYKEPPPAPLFEPGELTSWSFYRAGIAEFIATFLFLYITILTVMGVVKSKSKCTTVGIQGIAWAFGGTIFALVYSTAGISGGHINPAVTFGLFLARKLSLTRALFYIVMQTLGAIAGAAVVKGFEKSSTFEMLGGGANSVAHGYTKGQGLGAEIIGTFVLVYTVFSATDAKRSARDSHVPILAPLPIGFAVFLVHLATIPVTGTGINPARSLGAAIIYNKRHAWDDHWIFWVGPFIGAALAALYHVVVIRAIPFKSK

SEQ ID NO: 3334 - protein, 577 aa, Oryza sativa
MVKEEQGGEVAMAAAAAVTTTVAPALPTQEHRLPLSNLDLLLPPLDVSVFLCYRHPAPSAAALKEALAKALVPFYPLAGEVVANGDGEPELLCSGRGVDFTESVAGEEMRGLRIGMVDERVEKLVPAKKAASVMAVQVTKFKCGGAVVGCTFDHRVCDAYSFNMFLVAWAAAARDGHGGGTAPPPPTIPSFRRSIVAPRDPPPPRSPSTDALIDRLFAPLGSAPPPPDDAAAAAVNRIYRVAAADAASLQDSVGPGRTKLEAFTAHLWQLNARAAAAERERPCCMGVVVDGRGRMFPDGAMRAYFGNVLTIPYGVMGSCELRAAALADVAGDVHRWVAEAATGDHFRGLVDWVEARRPKPAAARAYLGGTGGGDAAACIVSSGMGFPVGEADFGTGAPAFASYHFPWPAGAGYVMPMPSARGDGDWVVYVHVSPELAVAMDEEPTVFRSLDNSYVWCADARDLAHVRRRCPRSLRSCASPIPVVRRPPSALPLYAWLLAIREGWSRAQTTAAQRPRASPCGAGAQDPWLALALASMRDDVKPVAVDNRVVFLFEFVLGEIKDSAMSLLSVSGDTVGD

SEQ ID NO: 3335 - protein, 322 aa, Candida albicans SC5314
MSVKRILGGLYLSSIDPIFKEIDLKSEYGITHILSVVPGTMKESYFSDYEWKQIEITDEETTNVIQYFPESYAFIESALFQNSNDKKHQSCVLVHCSQGVSRSATFIIAYLMQKYHLSIDQALHAVKRKCPGAEPNPGFMNQLKLYNEMGFKIDESNQKYNEILKSNSLKTDPTGRSLRDMIMEKSGSPKEVKEESLYELRCKRCRQILASSVHIENHDIPESDSRQSSFIKTAPNSRRIISVERASSICSHYFFKEPVKWMKQELDKAEMEGKFSCPKCSSKVGGYSWRGSRCSCGKWMVPAIHLQEAKVDYIKRESTLRN

SEQ ID NO: 3336 - protein, 721 aa, Myxococcus xanthus
MLGVGSATGSCAGRRGLCRGHAPGDESGMRLRSWWWVLVLLTVSCAGRRSSSEDLGGRDARSELFRARGDAAIETKQWALAAGYFASARHTEDSPTARWGQVWAEKRASSLEWAKQFEGSVLALAFSPDGRLLASGGYDAVVRVWDVAAGAQVAELKGHEAELHAVAFSPDGRWLAAAGRPGALWLWDWKQGRRVALLSGHTDVVRGLAFSPDGEWLASGGLDRTVRVWRIRDGAEVLRFTHDDIVIAVAFSPDGGRLVSSSMDRTARVWELTARRELHRLTGHGDKVESCAFSADGERVMTASADRAIRFWDARTGALLDVQRNTGALSAVAIDAGFQQLVQAGWEGRVQRVDVRGGGEVLERLDAHRTFVMAVALSPDGRTFASGGMDGVLKVWSRPEVPPDVLLRELPAWPEVLTSVGPDAFVSGGEDGLRSWSVSAGGELHSRLEAPDAVGAVAVSADRRLLAVGTLKGEVRVRDVRSGNQLMVIPAARESIRALAFSPDGALLAAGVAQDVVLWAVPSATQVARLTGHTGKAWALAFDATGQRLASGAADHTVRIWDVARGTVIRVLEAGDRVRAVTFLASGELLTAGMRQPIRLWSPDDGRVLTSMDSLTVGVLSLAMAPQGAFVASGGVGGEMKVWRLPDGALMGEVPGLQGFVSAVTFSSDGAWLAAAASDRTFHLLGFDAFALPPPVEPDLTRILRRHGLAWDDLRGAFTLH

SEQ ID NO: 3337 - protein, 168 aa, Solanum melongena
IVRGGRDLFKYLPDAFKGIKQIGVIGWGSQGPAQAQNLRDSLAEVKSDIVVKIGLRKGSSSFAEARTAGFTEENGTLGDIYETISGSDLVLLLISDAAQADNYEKVFSHMKPNSILGLSHGFLLGHLQSMGLDFPKNISVIAVCPKGMGPSVRRLYVQGKEVNGAGIN

SEQ ID NO: 3338 - protein, 216 aa, Bacillus clausii KSM-K16
MKFFVDTANINEIKEANELGILDGVTTNPSLVAKEGVDFHERIAEIAKLVPGSVSAEVISLDAEGMIEEGKTLAAISENITVKVPMTVDGLKAVKAFAELGIKTNVTLIFSVPQALLAARAGATYVSPFLGRLDDIGHDGLQLISDIADIFSTHGLPTQIIAASVRHPVHVSEAAKRGAHIATIPLNVIKQLTGHPLTDKGIEKFLADWNKENVEK

SEQ ID NO: 3339 - protein, 363 aa, Chlorobaculum tepidum
MITSTTSVVDFDKALLDFRYLLDCFIEVLENLGQEALARHIGGDSKTPIREFDCAERAIQAWSIVFQLLNMAEENSAAQYRRRIESSEGVESLSGLWGEALRHLKNLGVTEAEIAAELPQIEVEPTLTAHPTEAKRRTVLEQHRELYLLLVKRENRMWTPAERDKIRTDIKVVLERLWRTGEILLQKPEVSAERQNVLHYLHTIFPDILPILDNRLEKAWAVAGFDPAITADPRNLPRLSFGSWVGGDRDGHPLVTAETTQETLQEMRRHAIELVHRQLERLASMLSLSGRLQSPSRAMEERMETLRHKLGKAGALAFERNLHEPWRQFVNLMIAALPAGTTENEHYCYRRHTELLKDLELLM

SEQ ID NO: 3340 - protein, 120 aa, Bacillus clausii KSM-K16
MSHKVLIVDDQFGIRVLLTEVLQKDGYEMFQAASGKEALAIQEEEEIDIVLLDMKIPGMDGIEILKKLKEKQPGIKVIMMTAYGELNLVNEAMDHGAVSYMAKPFDIQEVRATIRDNLQA

SEQ ID NO: 3341 - protein, 534 aa, Bacillus clausii KSM-K16
MAAKYIFVTGGVVSSLGKGITAASLGRLLKNRGLKVTIQKFDPYINVDPGTMSPYQHGEVFVTDDGAETDLDLGHYERFIDINLSQNSNITTGRVYSTVLKKERRGDYLGGTVQVIPHVTNEIKERVFRAGRETGADVVITEIGGTVGDIESLPFLEAIRQIKSDVGMENVLYLHCTLIPYLKAAGEMKSKPTQHSVKELRSLGIQPNVIVVRTERKVPQDMKDKIALFCDIKKEAVIEAWDADTLYQVPLDLQAQNLDQIVCDHLQLNCPEANMTEWKELVNRVSHLSEKVRIAIVGKYVELQDAYLSVAEALRHAGYHVDADIDIDWVYAEQVNDENVDELLNKADGILVPGGFGDRGIEGKITAIRYARENKVPFLGICLGMQLASVEFARTVLGLKGANSAELNPQTPYPIIDLLPEQKDVEDLGGTLRLGLYPCKLQEGTAARAAYGEEVVYERHRHRYEFNNEYREQMEKAGFVFSGTSPDGRLVEVIEVTDHPFFVASQFHPEFVSRPTRPQPLFREFVRNALAAQA

SEQ ID NO: 3342 - protein, 332 aa, Sulfolobus solfataricus P2
MSKLPLLPTTVIGSYPRPKWLRESIRLHKAGKMSNEDLQEAFNDAVIAVFQDHYKAGVDVPTDGEVRRDEMVEFFAERIKGFKFYGPVRVWGTAYYRKPSVVSKIEYREPMLVDEFTFAKSVSYTDNLKITITGPYTIAEWSYNEYYRNKKDLVFDLAKAINQEIKNLVEAGAKIIQIDEPALHTRKEDVSWGVEAVNEAVKGVNAKLVMHICYGDYSFVAPYFNEIKVDQINFALKIYNYKPLELLKKYGFDKELGAGVVDVHNRKVETSEEVANDIRKILEYFPPEKVWINPDCGLKLLSRKIAYQKLVSMVEGTKVVREELKRKGYSVD

SEQ ID NO: 3343 - protein, 247 aa, Rubrivivax gelatinosus PM1
MTQLVLIRHGESTWNLENRFTGWTDVELTPTGVAQAQQAGRLLKQAGIDFDTVYTSVLKRAIWTAWHCLDGMDRTWLPVIKDWRLNERHYGGLQGLNKADMAKQFGDEQVLLWRRSYDVPPPPLEANDPRSERSDVRYAKLAANQVPLTECLKDTVARVLPLWYGTLAPAIAAGQRLVIVAHGNSIRALVKHLNNISDADIVGVNIPNGIPLVYDLDANLKPTSKYYLGGADAAAQAASVSALQADG

SEQ ID NO: 3344 - protein, 446 aa, Shewanella sp. MR-7
MSEAKLLLVEDDASLREALLDTLMLAQYDCIDVASGEEAIIALKQHQFDLVISDVQMQGIGGLGLLNYLQQHHPKLPVLLMTAYATIGSAVSAIKLGAVDYLAKPFAPEVLLNQVSRYLPLKQSSDQPVVADEKSLALLSLAQRVAASDASVMILGPSGSGKEVLARYIHQHSSRADQAFVAINCAAIPENMLEATLFGYEKGAFTGAYQACPGKFELAQGGTLLLDEISEMDLGLQAKLLRVLQEREVERLGGRKTIKLDVRVLATSNRDLKAVVAAGQFREDLYYRINVFPLTWPALNQRPADILPLARHLLAKHAKALNVLDLPEFDEAACRRLLSHRWPGNVRELDNVVQRALILRAGAVITANDIIIDAQDVPLSSDDAEYVNEPEGLGEELKAQEHVIILETLAQCQGSRKLVAEKLGISARTLRYKMARMRDMGIQLPN

SEQ ID NO: 3345 - protein, 116 aa, Triticum aestivum
  misc_feature (102)..(102): Xaa can be any naturally occurring amino acid
  unsure (1)..(116): unsure at all Xaa locations
MGLSVIAPPAGDSASPAHRRARRAFLVSNYMILGAASGCGFLTLSLRLVPSVDGFLLILLHALTVAAAVAGCAVIAAPDPPRGRVYTAHMSATVVVSILQGXAAVLAFSRTAEFLA

SEQ ID NO: 3346 - protein, 366 aa, Frankia sp. EAN1pec
MSAVVDTSTGVSSVFEAGAEHEQVVFCSDRASGLRAVIAIYSTALGPALGGTRFHAYPDEASALADALALSRAMAYKAACAGLDLGGGKAVILGDPARDKTEALLRAYGRFIASLGGRYVTACDVGTYVEDMDTIARETRWVTGRSPAHGGSGDSGVLTAYGVFEGMRACARHRWGTPSLAGRRVAVSGVGKVGLRLVGHLVEEGATVLAGDTDPGALRRLGARHPDVQLVADPDELLRAEVDIYAPCALGGVLTDEVVPALRAEIICGGANNQLAHPGMDKVLADAGVLYAPDFVVNAGGLIQVADEIEGYSPERARARAARIFDTALDIFRLAEAEGATPAVAAGRFAERRMTDIGRLRGILLP

SEQ ID NO: 3347 - protein, 518 aa, Arabidopsis thaliana
  misc_feature (288)..(288): Xaa can be any naturally occurring amino acid
  unsure (1)..(518): unsure at all Xaa locations
MGVVSISSSAARSPLGLGNDLLTHRSSLKKPSIVAFKADDSSNSALIIPPREQVLIPAEKHNEKKREVTRRKPCKTPKKPLSLEHNSAPSCSLGVDYNEAAARLESIYKLSPATTTLVEDDVEDGGSKAKVSRRRKRKESGEEKKVVVRNNVKKEKRMSLDKRIALKRNVQEKPVVASVDKKVTKRQQEEEKIERLVRDYSASNDIVSLDWKKMKIPPVLSSTEHAWLFKLMQPMKALLEVKDVLQKSLGREPREAEIAGEINMTAGEVKKKIEIGRAARNKLIKHNXLRLVLFVMNKYFHEFTNGPKFQDLCQAGMRGLITAIDRFEPKRKFRLSTYGLFWIRHAIIRSMTTSNFTRVPFGLESVRVEIYKAKTELWFEMGRPPTEDEVVERLKITPERYREVLRAAKPVLSLNSKHSVTQEEFINGITDVDGVGANNSRQPALLRLALDDVLDSLKPKESLVIRQRYGLDGKGDRTLGEIAGNLNISREMVRKHEVKALMKLKHQARVDYLRQYIV

SEQ ID NO: 3348 - protein, 387 aa, Escherichia coli O157:H7 EDL933
MEQVVIVDAIRTPMGRSKGGAFRNVRAEDLSAHLMRSLLARNPALEAAALDDIYWGCVQQTLEQGFNIARNAALLAEVPHSVPAVTVNRLCGSSMQALHDAARMIMTGDAQACLVGGVEHMGHVPMSHGVDFHPGLSRNVAKAAGMMGLTAEMLARMHGISREMQDAFAARSHARAWAATQSGAFKNEIIPTGGHDADGVLKQFNYDEVIRPETTVEALATLRPAFDPVNGTVTAGTSSALSDGAAAMLVMSESRAHELGLKPRARVRSMAVVGCDPSIMGYGPVPASKLALKKAGLSVSDIGVFEMNEAFAAQILPCIKDLGLIEQIDEKINLNGGAIALGHPLGCSGARISTTLLNLMEHKDVQFGLATMCIGLGQGIATVFERV

SEQ ID NO: 3349 - protein, 457 aa, Frankia sp. CcI3
MTRVVARARVAELAARESARLDVRTRGSEALHARAVRSMTSGVPSSYQVRDPWPIYLTRGLGSKVWDVDGNEYSDFHNGFGSMVQGHAHPAIVRAVTERVALGTHFAMPTEDCVVVSEELARRFGLPQWRYVNSGSEATMDAIRIARGVTGRDTIVKIFGSYHGHHDYVMVSIGTPYDDIGPAENMNSLGYGAGIPRVVVDLTVPVPFNDAPAMERRIAALAAEGRLPACVIMEPAMMNLGVVLPEPGYLAAVREITSRYGVILIFDEVKTGLCVAAGGATERFGVRPDLVTLAKALGGGLPSGAIGATAELMEAVASDRVKQVGTYNGNPLTMAAARASLFEVLTPDAYTHLDRLGGRLTAGCDEILTRHGIPGYTVGISSKGCVHFTDAPIRDYTSFMAHQNAELPELAWLYNANRNVLMAPGREEEWTLSVQHTDADVDRYLDSLDQMARDLVG

SEQ ID NO: 3350 - protein, 335 aa, Fusobacterium nucleatum subsp. nucleatum ATCC 25586
MQKTKIIFFDIKDYDKEFFKKYGADYNFEMTFLKVRLTEETANLTKGYDVVCGFANDNINKETIDIMAENGIKLLAMRCAGFNNVSLKDVNERFKVVRVPAYSPHAIAEYTVGLILAVNRKINKAYVRTREGNFSINGLMGIDLYEKTAGIIGTGKIGQILIKILRGFDMKVIAYDLFPNQKVADELGFEYVSLDELYANSDIISLNCPLTKDTKYMINRRSMLKMKDGVILVNTGRGMLIDSADLVEALKDKKIGAVALDVYEEEENYFFEDKSTQVIEDDILGRLLSFYNVLITSHQAYFTKEAVGAITVTTLNNIKDFVEGRPLVNEVPQNQ

SEQ ID NO: 3351 - protein, 524 aa, Glycine max
MAAVKPEEISHPPMDQLQGLEYCIDSNPSWAETIALGFQHYILALGTAVMIPSFLVPVMGGSDDDKVRVVQTLLFVEGINTLLQTLFGTRLPTVVGGSYAFMVPVISIIRDPSFATIEDPHLRFLSTMRAVQGALIVASSIQIILGFSQIWAICSRFFSPLGMVPVIALVGFGLFDRGFLVVGTCVEIGIPMLILFIAFSQYLKNFQIRQVPILERFALLISTTVIWAYAHLLTASGAYKHRPDLTQHSCRTDRANLISSAPWIKIPYPLEWGAPTFDAGHAFGMMAAVLVSLVESTGAYKAASRLASATPPPAHVLSRGIGWQGIGILLNGLFGTLTGSTVSVENVGLLGSNRIGSRRVIQVSAGFMIFFSMLGKFGALFASIPFPMFAAVYCVLFGIVASVGLSFLQFTNMNSMRNLFICGVSLFLGLSIPEYFREYTIRAFHGPAHTNAGWFNDFLNTIFFSSPTVALIVAVFLDNTLDYKDSAKDRGMPWWAKFRTFKGDSRNEEFYTLPFNLNRFFPPS

SEQ ID NO: 3352 - protein, 313 aa, Exochorda racemosa
GGLGDVLGGLPPAMAANGHRVMTVSPRYDQYKDAWDTSVLVELEVDGRIETVRFFHCYKRGVDRVFVDHPLFLERVWGKTGSKIYGPRTGVDYKDNQLRFILLCQAALEAPRVLNLNNNEYFSGPYGDDVVFIANDWHTALLPCYLKTLYKPRGIYQTAKVAFCIHNIAYQGRFPFSDFSLLDLPDQLKGSFDFIDGYNKPVKGRKINWMKAGILESDRVVTVSPYYAQELVSGEDKGVELDNIIRKTGITGIVNGMDVQEWNPTTDKYLDVKYDETTVLDAKPLLKEVLQAEVGLPVDRNIPVIGFIGRLEE

SEQ ID NO: 3353 - protein, 133 aa, Brassica napus
SVRNPLSPDLGGRFDRSLWQAYVSVNKIFADRIMEVINPEDDFVWIHDYHLMVLPTFLRKRFNRVKLGFFLHSPFPSSDIYRTLPIIEELLRALLNADLIGFHTFDYARHFLSCCSRMLGLTYESKRGYIGLE

SEQ ID NO: 3354 - protein, 548 aa, Legionella pneumophila str. Lens
MAKELRFGDDARLQMLAGVNALADAVQVTMGPRGRNVVLEKSYGAPTVTKDGVSVAKEIEFEHRFMNMGAQMVKEVASKTSDTAGDGTTTATVLARSILVEGHKAVAAGMNPMDLKRGIDKAVLAVTKKLQAMSKPCKDSKAIAQVGTISANSDEAIGAIIAEAMEKVGKEGVITVEDGNGLENELSVVEGMQFDRGYISPYFINNQQNMSCELEHPFILLVDKKVSSIREMLSVLEGVAKSGRPLLIIAEDVEGEALATLVVNNMRGIVKVCAVKAPGFGDRRKAMLQDIAILTKGQVISEEIGKSLEGATLEDLGSAKRIVVTKENTTIIDGEGKATEINARITQIRAQMEETTSDYDREKLQERVAKLAGGVAVIKVGAATEVEMKEKKARVEDALHATRAAVEEGIVAGGGVALIRAQKALDSLKGDNDDQNMGINILRRAIESPMRQIVTNAGYEASVVVNKVAEHKDNYGFNAATGEYGDMVEMGILDPTKVTRMALQNAASVASLMLTTECMVADLPKKEEGVGAGDMGGMGGMGGMGGMM

SEQ ID NO: 3355 - protein, 389 aa, Glycine max
MEEGKRKLAMKRKRESTGGGKDRLSELPDSVLVHIMELMETRNAVQTCVLSQRWKNLWRRMTRLSFNHPRTFSRYHNFVSHVLSGRDHSVSLIDLLFVVLHSTSATLLHDVISYAVSHNVQQLTIYIDTLDCINGATPSFQLSKTPFVPLLFPSPSLTSLKLSSVFIGYSLELPKSLLLPSLKTLHLTNVHFTASDHNNNFVEPFSTCHMLNTLVIQYCFMHTSAQVLSISNSNLSSLTLDTFQEHIVLSTPNLTSLTIRDGFHFTLLQLSSTCDLSLLKEADIETRVDIHYSVIITWLRLMTNVKMLTISSATLKAILNDLSDPAAATVQPPCFGRLESLKVKMHPHVNISKEEVSRTLEHLLVNSPPPTRVYLINVSLSHQELVRYA

SEQ ID NO: 3356 - protein, 408 aa, Streptomyces nodosus
MNGSGVRVAVTGLGVVAPNGLGAEAYWTATRKGTSGIGRISRFVPDGYPAQLAGEIEGFAAAEYLPGRLLPQTDRMTQLALVAADWAFEDAAVRPGELPEFEMGVITASSSGGFEFGQRELQALWSQGSRYVSAYQSFAWFYAVNSGQISIRNGMRGPSGVVVSDQAGGLDAVAQARRQIRKGTRLVMSGAVDASICPWGWVAQMASNRLSTRTDPERAYLPFDAAANGHVAGEGGALLVLEELEQARARGAKQIYGEIAGYGSTLDPRPGSERPAGLRKAIELALADAGATPGEIDVVFADAAAIPELDRIEAAAINEVFGAGAVPVTAPKTMTGRLYSGAAPLDLAAAFLAMRDGVIPPSIGVTPSPEHGLDLVVDQERTATVRSALVIARGHGGFNSAIVVRSAA

SEQ ID NO: 3357 - protein, 345 aa, Glycine max
MGVPEKDPLSQLSLPPGFRFYPTDEELLVQYLCRKVAGHHFSLPIIAEIDLYKFDPWVLPSKAIFGEKEWYFFSPRDRKYPNGSRPNRVAGSGYWKATGTDKIITTEGRKVGIKKALVFYIGKAPKGTKTNWIMHEYRLLDSSRKNTGTKLDDWVLCRIYKKNSSAQKTAQNGVVPSNEHTQYSNGSSSSSSSQLDDVLESLPAIDERCFPMPRVNTLQQQQHEEKVNVQNLGEGGLLDWTNPSVLNSVVDFVSGNNNHNQLVQDQTQGMVNYNACNDLYVPTLCHVGTSVPQKMEEEVQSGVRNQRVQNNSWFLQNDFTQGFQNSVDTSGFKYPVQPVGFGFRN

SEQ ID NO: 3358 - protein, 574 aa, Frankia sp. CcI3
MSEIPRRAVVRTAKLATLPIGIAGRATLGVGKRIGGRPAEAVASELQQRTAAQIFRVLGELKGGAMKLGQALSVFEAVLPDDVAGPYRAALTRLQEAAPPLPAAVVHRVLAEELGADWRSLFTSFDDVPAAAASIGQVHRAVWADGRAVAVKVQYPGAGPALLADLTQLGRAARLFGAVTPGLDIKPLVEELKARIAEELDYRLEAAWQGAFAEAYADEPDVVIPRPLAGSGRVLVSEWIEGIPLSVIIADGTPQQRDTAGLLLVRFLYSCPGRAGLLHADPHPGNFRLLSDGRLGVLDFGAVNRLPDGLPAPIGRLARQTLAGDADAVEQGLRREGFIPPSAEIRAEDLLDYLAPMLEPIAVEEFTFSRGWLRKEAARLGDWRSAAAQLGRQLNLPPSYLLIHRVTLGAIGILCQLGSTGRFRDEMERWQPGFAEPGTATARAAEDANRPGRPLPALPVQDEAGIVRPLDGPVVLAGGLPGPRKPRRPGRTGRTTKARKAGRSAADTAPATADDRATAPAALPLQAEPAEPSRPSTPANRSAAARPGSGRKAAPRRAPDEESFSDPATVTDAY

SEQ ID NO: 3359 - protein, 258 aa, Zea mays
  misc_feature (187)..(188): Xaa can be any naturally occurring amino acid
  misc_feature (224)..(224): Xaa can be any naturally occurring amino acid
  misc_feature (241)..(241): Xaa can be any naturally occurring amino acid
  misc_feature (245)..(245): Xaa can be any naturally occurring amino acid
  unsure (1)..(258): unsure at all Xaa locations
MSTAATKQQPEITKWASKDGEFRRQVSSFRDFVSRDKNARFAAEPDRYHLYISWACPWAHRTAIVRQLKGLDKIIGLSVVDYLLLDKGWKFSTSEETPGAIPDNVNHANYIREIYFKANPDYEGRFTVPVLWDKKHATIVSNESSEIIRMFNEEFNEFIDEDKKKLNYYPENLRSDIDALNEWVYDXXNNGVYKSGFATKQAAYENNVYPLFKSLDRLEKILAXNEYLVGGTFTEADIRLXDTIXRFDPVYVGHFNGN

SEQ ID NO: 3360 - protein, 315 aa, Vitis vinifera
MEIDSIECVSSTDGIYEEEIHHHHHQFSSSSKPHSNVVSPAISPATSVHELLECPVCTNSMYPPIHQCHNGHTLCSTCKSRVHNRCPTCRQELGDIRCLALEKVAESLELPCKYCSLGCPEIFPYYSKLKHEAQCNFRPYNCPYAGSECAVVGDIPFLVSHLRDDHKVDMHTGCTFNHRYVKSNPREVENATWMLTVFNCFGQYFCLHFEAFQLGMAPVYMAFLRFMGDEIEARNFSYSLEVGANGRKLIWEGTPRSIRDSHKKVRDSHDGLIIQRNMALFFLWWGQEGAEASGHRTNMEGTTKSRCRGVHTQSL

SEQ ID NO: 3361 - protein, 138 aa, Vibrio vulnificus CMCP6
MTKESKVVLKSDQQWREQLSEQEYHVCREQGTEPPFSGKLLHNKDSGEYACTCCHAPLFSSVNKYDSGCGWPSFDAPINETAVLYLDDFSHGMKRVEIRCARCDSHLGHVFPDGPKTTGERFCVNSVSLIFNKIETNE

SEQ ID NO: 3362 - protein, 331 aa, Vibrio vulnificus CMCP6
MTIKVGINGFGRIGRFVFRAAQERADIEVVGINDLIDVDYMAYMLKYDSTHGRFNGTVEVEGGNLIVNGKTVRVTAERNPEDLKWDAIGVDVVAEATGLFLDDATARKHITAGAKKVVLTGPSKDATPMFVMGVNHTSYAGQDIVSNASCTTNCLAPIAKVLNDKFGIESGLMTTVHATTATQKTVDGPSAKDWRGGRGASQNIIPSSTGAAKAVGVVLPELNGKLTGMAFRVPTANVSVVDLTVNLKNGASYEAICAAMKEASEGELKGVLGYTEDAVVSQDFIGEVQTSVFDAKAGIALTDNFVKVVSWYDNEIGYSNKVLDLIAHISK

SEQ ID NO: 3363 - protein, 315 aa, Vitis vinifera
MAPGGSTYKEVLESHSTVTDYDIAMTKADTNLTPAKTTAGLSGKKGISSPNGVHELLECPVCTSLMYPPIYQCPSGHTLCSNCKSRVHNCCPTCRHELGDIRCLALEKVAESLELPCRYQSLGCHDIFPYYSKLKHEQQCRFHPYNCPYAGFECSVTGDIPTLVEHLKGDHKVDMHDGCTFNHRYVKSNPQEVENATWMLTVFNCFGKQFCLHFEAFQLGTAPVYMAFLRFMGDDNEAKKFSYSLEVGGNSRKLIWQGVPRSIRDSHRKVRDSQDGLIIQRNLALYFSGGDRQELKLRVTGRIWKESELWKDNGC

SEQ ID NO: 3364 - protein, 319 aa, Pimpinella brachycarpa
MMVQERDELGLSLSLSFPGSSHEQNKSNTTNNKHNQMPHASTPLELNLMPSQPLNLLHNNTTTTWTHPASHDRKMEACRVDRRSLLTGIDVNRIPAMTVDMEEETGVSSPNSTISSLSGNKRSLVNERSELANGDEILECSRSDDEDGDNSRKKLRLTKDQSAILEESFKEHNTLNPKQKIALAKRLGLRPRQVEVWFQNRRARTKLKQTEVDCEFLKRCCQTLTEENRKLQKEVQELRALKSSPQFYMQMTPPTTLTMCPSCERVGGLQSATTTSSAGPSITQAEPLRSHPMNSNHHRLPFNPWASPQRPLDALHPRS

SEQ ID NO: 3365 - protein, 222 aa, Xanthomonas oryzae pv. oryzae KACC10331
MPISTQCLHAAGSALSFKLQGKPQVAVACCCGDGGSSKIDFYAALNSAGAYTLPLILCVINNGWAISVPRSAQTGAQTLAQRGLAGGLQCLQVDGNDLVAVLEAMRQARVRALAGDGGTVIEFLTYRLSDHTTADDARRYRGEEELKQGWARELLLRLRRYLTAQGLWDNAQEDAWKAECSARVDEEVNAYLNTPVQPVEAMFDYLYGDPPAEVMALESRHG

SEQ ID NO: 3366 - protein, 544 aa, Bacillus cereus G9241
MAKDIKFSEEARRSMLRGVDTLANAVKVTLGPKGRNVVLEKKFGSPLITNDGVTIAKEIELEDAFENMGAKLVAEVASKTNDVAGDGTTTATVLAQAMIREGLKNVTAGANPMGLRKGIEKAVTAAIEELKTISKPIEGKSSIAQVAAISAADEEVGQLIAEAMERVGNDGVITLEESKGFTTELDVVEGMQFDRGYASPYMITDSDKMEAVLDNPYILITDKKISNIQEILPVLEQVVQQGKPLLIIAEDVEGEALATLVVNKLRGTFNVVAVKAPGFGDRRKAMLEDIAILTGGEVITEELGRDLKSATVESLGRAGKVVVTKENTTVVEGIGNTQQIEARIGQIRAQLEETTSEFDREKLQERLAKLAGGVAVIKVGAATETELKERKLRIEDALNSTRAAVEEGIVAGGGTSLMNVYTKVASIVAEGDEATGINIVLRALEEPVRQIAINAGLEGSVVVERLKGEKVGVGFNAATGEWVNMLETGIVDPAKVTRSALQNAASVAAMFLTTEAVVADKPEPNAPAMPDMGGMGMGGMGGMM

SEQ ID NO: 3367 - protein, 195 aa, Arabidopsis thaliana
MDPATNSPIMPIDLPIMHDSDRYDFVKDIGSGNFGVARLMTDRVTKELVAVKYIERGEKIDENVQREIINHRSLRHPNIVRFKEVILTPSHLAIVMEYAAGGELYERICNAGRFSEDEARFFFQQLISGVSYCHAMQICHRDLKLENTLLDGSPAPRLKICDFGYSKSSVSSFPTKVNCWYSCIHCTRDSSSTGI

SEQ ID NO: 3368 - protein, 493 aa, Zea mays
MDPYKHRPSSAFNAPYWTTNSGAPVWNNDSSLTVGARGPILLEDYHLVEKLANFDRERIPERVVHARGASAKGFFEVTHDITHLTCADFLRAPGVQTPVIVRFSTVIHERGSPETLRDPRGFAVKFYTREGNWDLVGNNFPVFFIRDGIKFPDMVHALKPNPRTHIQDNWRILDFFSHHPESLHMFSFLFDDVGIPADYRHMDGSGVHTYTLVSRAGTVTYVKFHWRPTCGVRSLMDDEAVAVGGANHSHATKDLTDAIAAGNFPEWTLYIQTMDPEMEDRLDDLDPLDVTKTWPEDAFPLQPVGRLVLNRNIDNFFAENEQLAFCPGLIVPGIYYSDDKLLQTRIFSYSDTQRHRLGPNYLLLPANAPKCAHHNNHYDGSMNFMHRTEEVDYFPSRYDAVRNAPRYPIPTAHIAGRREKTVISKENNFKQPGERYRAMDPARQERFITRWVDALSDPRLTHEIRTIWLSNWSQADRSLGQKLASRLSAKPSM

SEQ ID NO: 3369 - protein, 146 aa, Brassica napus
  misc_feature (133)..(133): Xaa can be any naturally occurring amino acid
  misc_feature (143)..(143): Xaa can be any naturally occurring amino acid
  unsure (1)..(146): unsure at all Xaa locations
MTGGAMSLLSKLRYITVDVTGTLIAYKGELGDYYCMAAKAIGLPCPDYKRVHEGFKLAYTDMAQKYPCFGFSAKIPNLVWWKTVVRDSFVKAGYEYDEETFEKVFKRIYSTFGSAAPYSVFQDSRPFLRWARXKGLIVGLVSXAEY

SEQ ID NO: 3370 - protein, 186 aa, Anabaena variabilis ATCC 29413
MIKTEFTLTYFLNMMRTNERLKPGSDSQENLRGVKDMTIIRWNPWQDLNTLQRQLNHLFEEDMLPSTVLERTLTRVPAAEIHETAEAIHLKLELPGIDAKDVDLQVTDKAVYISGERKSETKTEDKGVVKSEFQYGKFQRVIPLPTRIQNTNVKAEYKDGILNLTLPKAEAEKNKVVKVNIESAVG

SEQ ID NO: 3371 - protein, 462 aa, Nicotiana sylvestris
MVASPDNNAADGRTVKNKRPIDEWLPITSSRNGQNGGYSAFHNVTAMVGAGVLGLPYAMSELGWGPGVTVMVVSWVITLYTLWQMVECKKCPGMLAGTCIDDHKLAVSNVFGNKLGLWIVVPQQLVVEVGIDIVYMVTGGKSFQKSIVLVCKDNCKDIKLTYYIMIFASVHFVLSHLPNFNAISGVSLVAAIMSLSYCTIAWGASIVLGVQPDVEYEYRAENTGEGIFNFFSGLGEVAFAYAGHNVVLEIQATIPSTPEKPSKGPMWKGVLVAYIIVALCYFPVAIIGYWIFGNSVSNNILISLEKPTWLIVLANAFVVITLLGAYQLYAIPVFDMLETYLVRKLKFKPTWYLRFMTRNLYVAFTMFVGIIFPFLWGLLGFLGGFAFAPTTYFLPCIMWLSIYKPKRWGLSWTSNWICIIVGVMLTVLAPIGGLRTIIIQAKDYNFFYWDSLSGSLAFGKKG

SEQ ID NO: 3372 - protein, 338 aa, Arabidopsis thaliana
MRETKKEEEEVEEEEAMNALAATNRNFKLAARLLGLDSKLEKSLLIPFREIKVECTIPKDDGTLASFVGFRVQHDNARGPMKGGIRYHPEVDPDEVNALAQLMTWKTAVAKIPYGGAKGGIGCDPSKLSISELERLTRVFTQKIHDLIGIHTDVPAPDMGTGPQTMAWILDEYSKFHGYSPAVVTGKPIDLGGSLGRDAATGRGVMFGTEALLNEHGKTISGQRFVIQGFGNVGSWAAKLISEKGGKIVAVSDITGAIKNKDGIDIPALLKHTKEHRGVKGFDGADPIDPNSILVEDCDILVPAALGGVINRENANEIKAKFIIEAEIIQLIRTRMRS

SEQ ID NO: 3373 - protein, 761 aa, Beta vulgaris
MISDLATEIFIPVCAVIGYISCYQWFLVSKVKVSTDRHVNNGGSAKNGFNDYLIEEEEGVNDQNVVAKCAEIQNAISEGATSFLFTEYQYVGVFMCAFAVLIFVFLGSVEGFSTESQPCTYSPLKKCKPALATALFSTVSFLLGAITSVVSGFLGMKIATDANARTTLEARKGVGKAFIIAFRSGAVMGFLLAANGLLVLYIAINLLKLYYGDDWEGLFEAITGYGLGGSSMALFGRVGGGIYTKAADVGADLVGKVERNIPEDDPRNPAVIADNVGDNVGDIAGMGSDLFGSYAEASCAALVVASISSFGINHEFTAMCYPLLISSMGIIVCLVTTLFATDFFEIKAVKEIEPALKKQLIISTVLMTVGIAIITWIALPSSFTIFNFGTQKVVHNWQLFLCVCVGLWAGLIIGFVTEYYTSNAYSPVQDVADSCRTGAATNVIFGLALGYKSVIIPIFAIAVSIFVSFSFAAMYGVAVAALGMLSTIATGLAIDAYGPISDNAGGIAEMAGMSHRIRERTDALDAAGNTTAAIGKGFAIGSAALVSLALFGAFVSRAAISTVDVLTPKVFIGLIVGAMLPYWFSAMTMKSVGSAALKMVEEVRRQFNTIPGLMEGTAKPDYATCVKISTDASIKEMIPPGALVMLTPLIVGIFFGVETLSGVLAGSLVSGVQIAISASNTGGAWDNAKKYIEAGASEHARSLGPKGSEPHKAAVIGDTIGDPLKDTSGPSLNILIKLMAVESLVFAPFFATHGGLLFKLF

SEQ ID NO: 3374 - protein, 150 aa, Brassica napus
  misc_feature (31)..(31): Xaa can be any naturally occurring amino acid
  unsure (1)..(150): unsure at all Xaa locations
HLVRPSLRTRRPPTFQGRGGAMDDPVERLKXGFHKFKTEVYDKKPELFEPLKAGQAPKYVVFACSDSRVCPSVTLGLQPGEAFTVRNIAAMVPAYDKTKYTGIGSAIEYAVCALKVEVLVVIGHSCCGGIRALLSLQDGAPDNFHFVENW

SEQ ID NO: 3375 - protein, 765 aa, Beta vulgaris
MGAALLPDLITEIIIPVCAVIGIAFSLLQWYIVLRVKLSPDSTRNNNNKNGFSDSLIEEEEGLNDQSVVAKCAEIQNAISEGATSFLFTEYQYVGIFMVAFAVLIFLFLGSVEGFSTSSQECTYDKTRRCKPALATAIFSTVAFLLGAITSLGSGFFGMKIATYANARTTLEARKGVGKAFIVAFRSGAVMGFLLAANGLLVLYITILLFKIYYGDDWEGLFEAITGYGLGGSSMALFGRVAGGIYTKAADVGADLVGKVERDIPEDDPRNPAVIADNVGDNVGDIAGYGVLIFLDSYAESSCAALVVRSISSFGISHDLTAMMYPLLVSSVGIIVCLITTLFATDFFEIKAVKEIEPALKKQLIISTALMTVGVAVISWIALPTSFTIFDFGSQKEVQNWQLFLCVAVGLWAGLIIGFVTEYYTSNAYSPVQDVADSCRTGAATNVIFGLALGYKSVIIPIFAIAISIFVSFSFAAMYGIAMAALGMLSTIATGLAIDAYGPISDNAGGIAEMAGMSHRIRERTDALDAAGNTTAAIGKGFAIGSAALVSLALFGAFVSRASIQTVDVLTPKVFIGLIVGAMLPYWFSAMTMKSVGSAALKMVEEVPKQFNTIPGLLEGTAKPDYATCVKISTDASIKEMIPPGALVMLTPLIVGTFFGVETLSGVLAGSLVSGVQIAISASNTGGAWDNAKKYIEAGASEHARTLGPKGSDAHKAAVIGDTIGDPLKDTSGPSLNILIKLMAVESLVFAPFFATHGGLLFKYL

SEQ ID NO: 3376 - protein, 155 aa, Glycine max
GSSASKGKPPLSAGNNNNGGWDNWDPDDGFGPPRTRRGGGSDLRRNQSTGDVRGFGGGGNVARSKSTQDIYTRAELEASAANKEEFFARKRAENESRPEGLPPSQGGKYVGFGSGPAPPQRGNQQNDYFSVVSQGLGKLSLAAASAANVVQAGTN

SEQ ID NO: 3377 - protein, 394 aa, Legionella pneumophila str. Lens
MLERFINYLQNELETLKADGLYKSERVISSQQQADVKVNEREVINLCANNYLGLANDPELIAEGQAALAKYGYGMASVRFICGTQTPHKQLEQKISHFLSKEDTILYSSCFDANTGLFETLLTEEDAIISDALNHASIIDGVRLCKAARYRYANNDMKALEEQLIAAKNARFRLIATDGVFSMDGILANLPAICELADKYDAMVMVDDSHAVGFMGKTGRGTPEHFGVSDRIDIVTGTLGKALGGASGGYTASNQVVIDWLRQRSRPYLFSNTLAPVIAHTSCVVLDKLSTNNSLAEKLKRNSHYFREGMTQLGFELIPGEHPIIPVMLGDASLAGRIANRLLELGVYVVGFSYPVVPKGLARIRTQMSAALELHHLDKALKAFETVGKEFSVI

SEQ ID NO: 3378 - protein, 484 aa, Glycine max
MEESGDARDLQKPFLHTGSWYKMGSRQSSIMGSSTQVIRDGAVSVLFCVLIVALGPIQFGFTCGYSSPTQGAIVRDLNLSISEFSFFGSLSNVGAMVGAIASGQIAEYIGRKGSLMIAAIPNIIGWLAISFAKDSSFLYMGRLLEGFGVGIISYVVPVYIAEIAPQNLRGGLGSVNQLSVTIGIMLAYLLGLFVNWRVLAILGILPCTVLIPGLFFIPESPRWLAKMGMIDEFETSLQVLRGFDTDISVEVHEIKRSVASTGKRAAIRFADLKRKRYWFPLMVGIGLLVLQQLSGINGILFYSTTIFANAGISSSEAATVGLGAVQVIATGISTWLVDKSGRRLLLIISSSVMTVSLLIVSIAFYLEGVVSEDSHLFSILGIVSIVGLVAMVIGFSLGLGPIPWLIMSEILPVNIKGLAGSIATMGNWLISWGITMTANLLLNWSSGGTFTIYTVVAAFTIAFIAMWVPETKGRTLEEIQFSFR

SEQ ID NO: 3379 - protein, 390 aa, Arabidopsis thaliana
  misc_feature (335)..(335): Xaa can be any naturally occurring amino acid
  unsure (1)..(390): unsure at all Xaa locations
NTYIIHPQPMEESINQNPEAMEALISNLFGNISSLKSAYIELQSAHTPYDPEKIQAADKVVISELKNLSEMKHFYRENNPKPVCVSPQDSRLAAEIQEQQSLLKTYEVMVKKFQSEIQNKDSEITQMLQKIEEANQKRLKLDKNLKLRGMSTNEGSNGDGNMQFPDLTTELYVSTYEAAAKAVHDFSKPLINMMKAAGWDLDSAANSIEPDVVYAKRPHKKYAFESYICQRMFSGFQQKNFSVNSESAAVMADDDTDTFFRQFLALKDMDPLDALGTNPDSNFGIFCRSKYLLLVHPKMEASFFGNLDQRDYVTGGGHPRTAFYQAFLKLAKSNXIFHKLGYSFDSAGKNQLPAIKAKAKKKAPTANATSIPLLLYQNLQNSLHNSLFPL

SEQ ID NO: 3380 - protein, 340 aa, Legionella pneumophila str. Lens
MKSLVKAKKEPGIWMQDIPVPEYGVNDVLIKIKRTAICGTDIHIYSWDEWAQATIPVPMTVGHEFYGEIVEVGKEVQGLKVGQRVSGEGHITCGFCRNCRAGKRHLCRNTLGVGVNRPGCFAEYLALPATNVIALPDNITEEQAAILDPFGNAAHCALAFDVVGEDVLITGAGPIGIMAAAIVRHIGARHVVITDVNDHRLELARKMGVSRAVNVKYQKLSDVANELGMLEGFDVGLEMSGNPMALNDMMKAMNHGGHVALLGIPPQETPIDWNQVIFKGLVIKGIYGREMFETWYKMIAMLQSGLNISPVITHNFPVDEYQHAFQIMASGQSGKVILNW

SEQ ID NO: 3381 - protein, 705 aa, Arabidopsis thaliana
  misc_feature (289)..(289): Xaa can be any naturally occurring amino acid
  unsure (1)..(705): unsure at all Xaa locations
MLRLPSSMPIVSFPANPNLLINPQPSWPSRRGNSAVVVSAASRDVDSFTSKSGYLFSLSADEADSLSEYNFPRIDGMYKKKPLILLRRLAQIGTTFSYWFGLRLADEALERSDQMFKVRAAELRKLLVELGPAYVKIAQAVSSRPDLIPPIYLDELSLLQDQITPFSTEVAFNMIEDELGLPIDELFSEISPEPVAAASLGQVYQARLRRSGKVVAVKVQRPGVRAAIALDTLILRYIAGLIKKAGRFNSDLEAVVDEWATSLFKVKDTLLSQEMDYLNEAQNGIKFRXILLRKLYGGIKDVLVPKMYTEYSTSKVLVMEWVEGQKLNEVNDLYLVEVGVYCSFNQLLEYGFYHADPHPGNFLRTYDGQLAYLDFGMMGDFRPELRDGFMEACLHLVNRDFKALAKDFVTLGLLPPTAEKSAVTKALTDVFQDAISRGVRNISFGDLLGDLGKTMYRFKFRIPPYFSLVIRSLAVLEGIAIGISPNYKVLGSTYPWIARKILTDSSPQLKSSLQNLLYEEGVFRIDRLESLLSESLRTETALVQKPVVGTESNIAMKQMLAFTFTEQGSFVREILLREFAKGLDAYGLATLDSFTFSGSGPSSSLTEEDMTNLRTFYRLISLFSGMQKAKSQVKAVSKYGEALTPLDEASLVMYQLPSAQEMLPILSILPELPQESQQRLLQLPGDLVGRLVTRAFARTIRRIFL

SEQ ID NO: 3382 - protein, 115 aa, Solanum melongena
TIISEHNQRQGSWIPISWESSLGGPLGEVLHSTNSSLGDCKNKSALNLMTEGWDRSPCMVSSPTGVLQKSSFGSLSNSSAGSSPRAENSKMTNEGSSLCNGLLVTTLMNPTLPAM

SEQ ID NO: 3383 - protein, 365 aa, Iris hollandica
MDSTPVIQIPTPYPFSDEEACLYAMQLRSFSVLPMTLKAAIELDLLEIIAKAGPGAYLSPAEISSQLPTENPEAPAMIDRMLRLLACYSVVSCRVDAAGDDGKPRRRYGAERVVKYLTKNEDGVSMAALTLMNQDKVFMESWYHLKDAVLEGGIPFKKAFGMSPFEYQGTDPRFNKVFNEGMRNHSAFIMKKILETYQGFDSVKLLVDVGGGLGGTMKAIVTKYPHIEGINFDLSHVISEAPPIPGVKHVGGDMFESVPSGDAIFMKWILHDWSDAHCLKLLSNCWKALPEDGKVIVMEGILPTIPEPTSAAQGVVHIDLVMMAHNPGGKERTKAEFESLARDAGFSGSKALCSYANCWILEFYK

SEQ ID NO: 3384 - protein, 589 aa, Glycine max
MEPAKTIHNNVKYSPIFLAIFVLILASALSSANAKIHEHEFVVEATPVKRLCKTHNSITVNGQYPGPTLEINNGDTLVVKVTNKARYNVTIHWHGVRQMRTGWADGPEFVTSVPDCPGGSYTYRFTVQGQEGTLWWHAHSSWLRATVYGALIIRPREGEPYPFPKPKRETPILLGEWWDANPIDVVRQATRTGGAPNVSDAYTINGQPGDLYKCSSKDTTIVPIHAGETNLLRVINAALNQPLFFTVANHKLTVVGADASYLKPFTTKVLILGPGQTTDVLITGDQPPSRYYMAARAYQSAQNAAFDNTTTTAILEYKSPNHHNKHSHHRAKGVKNKTKPIMPPLPAYNDTNAVTSFSKSFRSPRKVEVPTEIDQSLFFTVGLGIKKCPKNFGPKRCQGPINGTRFTASMNNVSFVLPNNVSILQAHHLGIPGVFTTDFPGKPPVKFDYTGNVSRSLWQPVPGTKAHKLEFGSRVQIVLQDTSIVTPENHPIHLHGYDFYIVAEGFGNFDPKKDTAKFNLVDPPLRNTVAVPVNGWAVIRFVADNPGAWLLHCHLDVHIGWGLATVLLVENGVGKLQSIEPPPVDLPLC

SEQ ID NO: 3385 - protein, 529 aa, Zea mays
MAATAAAAGVEFPLIGVAVATLIVTVLVAAVMRRRRRPWHQAPLVEGKPAPEAGCAVSDGGTDVIIVGAGVAGSALAYTLGKDGRRVHVIERDLTEPDRIVGELLQPGGYLKLIELGLQDCVEEIDAQRVLGYALFKDGRNTKLAYPLEKFHFDVAGRSFHNGRFIQRMRQKAASLPNVQLEQGTVTSLLEENGTVKGVQYKTKSGEELKAYAPLTIVCDGCFSNLRRALCSPKVDVPSCFVGLVLENCQLPHPNHGHVILANPSPILFYPISSTEVRCLVDVPGQKVPSIATGEMANYLKTVVAPQIPPEIYDSFIAAIDKGSIRTMPNRSMPAAPHPTPGALLMGDAFNMRHPLTGGGMTVALSDIVVLRNLLKPLRNLHDASSLCKYLESFYTLRKPVASTINTLAGALYKVFSASPDQARNEMRQACFDYLSLGGVFSNGPIALLSGLNPRPLSLVAHFFAVAIYGVGRLMLPLPSPKRMWIGARLISGACGIILPIIKAEGVRQMFFPATVPAYYRAAPTGEKA

SEQ ID NO: 3386 - protein, 321 aa, Oryza sativa
MGRKPCCSKEGLNRGAWTAMEDDILVSYIAKHGEGKWGALPKRAGLKRCGKSCRLRWLNYLRPGIKRGNISGDEEELILRLHTLLGNRWSLIAGRLPGRTDNEIKNYWNSTLSKRVAMQRTAAATSMPAAATTSSNADAAGAAARRRRSPEPRTVVVSPIRTKALRCNNNSSSGIVVVQQAGACSHGGRPPESGAPGDAAADKVATPQAVQQQQQQELAGAEDDDDLPVPAVCIDLDLDDIELGGLDGFLISPWRGGGHDDGNAAAGAVPNLPMPIGYELGGAGGGGEAGAVDLEALLGQLEAEEDDDGDHHHHHHHHHHQ

SEQ ID NO: 3387 - protein, 420 aa, Brassica napus
MALKLNPLASQPYKLPSSARPPISTLRSPKFLCLASSSSPALSSSTKEVESLKKPFTPPKEVHVQVLHSMPPQKIEIFKSMEDWAEQNLLTHLKDVEKSWQPQDFLPDPASDGFEDQVKELRERARELPDDYFVVLVGDMITEEALPTYQTMLNTLDGVRDETGASPTSWAVWTRAWTAEENRHGDLLNKYLYLSGRVDMRQIEKTIQYLIGSGMDPRTENNPYLGFIYTSFQERATFVSHGNTARQAKEHGDLKLAQICGTIAADEKRHETAYTKIVEKLLEIDPDGTVVAFADMMRKKISMPAHLMYDGRDDKLFDNFSSVAQRLGVYTAKDYADILEFLVGRWKIESLSGLSGEGNKAQEYLCGLTPRIRRLDERAQARAKKGPKIPFSWIHDKLIAVFYNGHKTLLNPFFFFFYGH

SEQ ID NO: 3388 - protein, 390 aa, Argania spinosa
MALKLCFPPHKMPSFPDARIRSHTVFMASTIRSPSMEVGKVKKPFTPPPEVHVQVTHSLAPEKREIFNSLNNWAQENILVLLKDVDKCWQPSDFLPDSASEGFDEQVMELRTRCKEIPDDYFILLVGDMITGEALPTYQTMLNTLDGVRDETGASLTPWAIWTRAWTAEENRHGDLLNKYLYLSGRVDMKQIEKTIQYLIGSGMDPRTENNPYLGFIYTSFQARATFISHGNTARLAKEHGDLKLAQICGIIAADEKRHETAYTKIVEKLFEIDPDGTVLALADMMRKKVSMPAHLMYDAQDDNLFENFSSVAQRLGLYTAKDYADILEFLVGRWDIEKLTGLSGEGRKAQDYVCTLPPRIRRLEERAQSRVKNASATPFSWIFGREINL

SEQ ID NO: 3389 - protein, 416 aa, Zea mays
MGGVGEGDAWADQEQGNGGGSRGVGGGGGEAKRSEIYTYEAAWHIYAMNWSVRRDKKYRLAIASLLEQVTNRVEVVQLDEASGDIAPVLTFDHQYPPTKTMFMPDPHALRPDLLATSADHLRIWRIPSSDDAEDGAASANNNNGSVRCNGTQQPGIELRSELNGNRNSDYCGPLTSFDWNDADPRRIGTSSIDTTCTIWDVEREAVDTQLIAHDKEVYDIAWGGAGVFASVSADGSVRVFDLRDKEHSTIIYESGSGGSSGGGSNSGAGDGGTASPTPLVRLGWNKQDPRYMATIIMDSPKVVVLDIRYPTLPVVELHRHHAPVNAIAWAPHSSCHICTAGDDMQALIWDLSSMGTGSNGSGNGNGNTAAGAAAEGGLDPILAYTAGAEIEQLQWSATQPDWVAIAFANKLQILRV

SEQ ID NO: 3390 - protein, 142 aa, Thiobacillus denitrificans ATCC 25259
MAVQRTFSIIKPDAVAKNVIGKIVSRFETNGLKVVASKMKHLSRQEAEGFYAVHKDRPFFKDLVDFMVSGPVVLQVLEGEDAIAKNRTLMGATDPKKAEPGTIRADFAESIDANAVHGSDAPETAAVEIAYFFPASEVYAGR

SEQ ID NO: 3391 - protein, 259 aa, Nicotiana tabacum
MAPKQQGGAVAVTAAVGKVNGISKEVHYRGVRKRPWGRYAAEIRDPGKKSRVWLGTFDTAEEAAKAYDAAAREFRGAKAKTNFPPPDEENLKIAQNNLGVKINKNINDDNNRSPSQSSTVESSSRDGLSPAVMVDSSPLDLSLGVKFPFQNHQFRTSPISGGFSGCGFTGATPAVNHHMYYLEALARAGVINLEKHQQRKTVDFLGGNGGHGGSSGGSGSGTQSEFDSSSVIDFMRNDVKPPTRTTFNLDLNFPPPEKV

SEQ ID NO: 3392 - protein, 241 aa, Yarrowia lipolytica CLIB122
VQNIPYVFKQRADGVNIINVGKTWEKIQLAARIIAAVPNPADVVAISARTYGQRAVLKFANHCGATAIAGRFTPGSFTNYITRSFKEPRLLIVTDPRTDHQAIKEASYVNIPVIALVDTDSPVEFVDVAIPCNNKGRHSVGLVWWMISREVLRLRGALEDRNTEWSVMPDLYFYRDPEEPENTEEAAEEAATEEVVETAAAEAAAATNADNWDVAPDAGAGAADWAATDDWSESAPAPVAA

SEQ ID NO: 3393 - protein, 446 aa, Brassica napus
  misc_feature (198)..(198): Xaa can be any naturally occurring amino acid
  misc_feature (239)..(239): Xaa can be any naturally occurring amino acid
  misc_feature (321)..(321): Xaa can be any naturally occurring amino acid
  misc_feature (359)..(359): Xaa can be any naturally occurring amino acid
  misc_feature (372)..(372): Xaa can be any naturally occurring amino acid
  unsure (1)..(446): unsure at all Xaa locations
MREILHIQGGQCGNQIGAKFWEVICGEHAIDPTGQYCGETDLQLERINVYYNEASGGKYVPRAVLMDLEPGTMDSLRSGPFGQIFRPDNFVFGQSGAGNNWAKGHYTEGAELIDSVLDVVRKEAENCDCLQGFQVCHSLGGGTGSGMGTLLISKIREEYPDRMMMTFSVFPSPKVSDTVVEPYNATLSVHQLVENADXVLVLDNEALYDICFRTLKLTTPSFGDLNHLISATMSGVTLXLRFPGQLNSDLRKLAVNLIPFPRPHFFMVGFAPLTSRGSQQYSALGGPELTQQMWDAKNMMCAADPRHGRYLTASAVFRGKXAPRRSDEQMMNIRTKNSSYFVEWIPNNVKSSVCDLAPXGLKMASTFIGNSXTSIQEMFRRVSEQFTAMFRRKAFLHWYTGEGMDEMEFPEAESNMNDLVAEYQQYQDATAGEEEYEDEEEEYDEA

SEQ ID NO: 3394 - protein, 628 aa, Thermus thermophilus HB8
MAKRFTLKDAEELYLVPHWSGGFFRVGEKGDLEVTPLGPKGPAASLLEIVEALRDEGRPLPLVLRFPQILEARVRDLNEAFLEAMAKYGYQGTYRGVYPVKVNQRRLVLETVARAGRPYHLGLEAGSKPELALILAQDLSEEALITTNGFKDDDFVRLALMGRKLGRNVVITLEKFAELFRVLRLSKELGVKPLLGIRYKLKAKGAGQWEASGGENAKFGLTTPEIVRAVEVLQEEGLLDALVMLHAHIGSQVTDIRRIKAAVREAAQTYVQLRKLGAPLRYLNLGGGLAVDYDGSKTNFYASANYTLSEYAENLVYVTKEVVEAQGEPHPILVTESGRAITAYHEVLVLQVIDVIAPPGEARPSPPPPEAHPLVKELWESLQSLSPKNFQEVYHDAFADKETLQTLYDLGLVSLRDRALAEEIFYHIARRVQTIAQNLPYVPDELEDLEKLLADKLVCNFSVFQSLPDAWAIHQLFPVVPLSRLLEPPTRRATLVDISCDSDGKMDRFIDLHDVRQTLPVHPVRPGEPYYLGVFLVGAYQDVLGSNHNLFGQVGEAHVRVEEEGFAIERFVGGETAERVIEKMGFTARELMLGVERLVRQSRLSPVEKGAFLERYARELQGYTYLED

SEQ ID NO: 3395 - protein, 458 aa, Oryza sativa
MAASGEGASLASAAGGEDGRRRRVSYFYEPSIGDYYYGQGHPMKPHRIRMAHSLVVHYGLHRLLELSRPYPASDADIRRFHSDDYVAFLASATGNPALLDARAVKRFNVGEDCPVFDGLFPFCQASAGGSIGAAVKLNRGDADITVNWAGGLHHAKKGEASGFCYVNDIVLAILELLKFHRRVLYVDIDVHHGDGVEEAFFTTNRVMTCSFHKYGDFFPGTGHITDVGAGEGKHYALNVPLSDGIDDDTFRDLFQCIIKKVMEVYQPDVVVLQCGADSLAGDRLGCFNLSVKGHADCLRYLRSFNIPMMVLGGGGYTIRNVARCWCYETAVAVGVEPDNKLPYNDYYEYFGPDYNLHIQPRSVENLNSTKDLENIKSMILDHLSKIEHVPSTQFHDRPSDPEAPEQEEEDMDKRPPQRSRLWSGGAYESDTEDPDNMKTETNDLSASSVMKDESNDDS

SEQ ID NO: 3396 - protein, 362 aa, Xanthomonas campestris pv. campestris str. ATCC 33913
MLKVGSSLLAADGGGLSPRFALGLAQFVSANLAAGREVVIVSSGAVAAGRAILPKAAEAGAAIAARQALAALGQAQLIALWQRFFERPVAQVLLTHDDLRNRRRYLNARATLGELLRLGALPVINENDTVSVDELKLGDNDNLAAIVAALVDADALFIATDIDGLYSADPRSNPLARPLDEVAELSAEVLAMAGGSGSSVGTGGMRTKLEAAAKAGAAGIETYLFNGRSAEVVRGLAQDRLCGTRIHAARTRIAARKYWLRHAPVEPGTILIDAGAALALTDKGASLLPGGVAGAEGDFRRGDMVEIHLRDSVGSRCLARGVSQYSALDVRRIARRHSREIEPILGYSYGENVVHRDDLVVL

SEQ ID NO: 3397 - protein, 121 aa, Mycoplasma gallisepticum
MAKKKKTVASNGIAHIHATSNNSIITITDINGNAITWSSSGAIGYKGAKKKTPYSSGVAAEKAAKEAMAMGLSTIKIYVNGVGRGKETAIRSLAACGLTITEIHDVTPIPHNGCRPPKKPR

SEQ ID NO: 3398 - protein, 206 aa, Oryza sativa (japonica cultivar-group)
MSFTGTQDKCKACDKTVHFIDLLTADGVSYHKTCFKCSHCKGTLSMCNYSSMDGVLYCKTHFEQLFKETGSFSKKFSQGGKSSEKSDQGRAPSKLSSAFSGTQDKCAACQKTVYPLEKLTLEGESYHKSCFKCSHGGCILTTSSYAALNGILYCKIHFSQLFKEKGSYNHLIQTAQSKQKESEEAAPVAATEASEKEQEVPPQDAT

SEQ ID NO: 3399 - protein, 322 aa, Bartonella sp.
TYIDGDKGLLLYRGYPIDQLAEKGDFLESCYLLLYGELPTKQEKNDFDRCIMQHTMVHEQFARFFHGFRRDSHPMAVMVACLGAMSAFYHDSIDITDPQQRMIASVRLISKVPTLAAMAYKYSIGQAFVYPRNDLSYAANFLRMCFSVPCEEYKTNPVLTRAMDQIFILHADHEQNASTSTVRLAGSSGANPFACIAAGVACLSGPAHGGANEACLKMLQEIGSVKRIPEFIARAKDKNDPFRLMGFGHRVYKNYDPRAKIMQKTCHKVLKELNIQDDPLLDIAIELEKIALNDEYFVEKKLYPNVDFYSGITLKALGFPTE

SEQ ID NO: 3400 - protein, 259 aa, Listeria innocua Clip11262
MWKLALCQTDVVFKYPDANYARIEKAIVEAAENGADIAVLPEMWNTGYALNELAGVADLNGERTKEFLAGLSEKHQIAIIGGSVSISEGSKFSNTMYAFDKYGGLLSSYKKVHLFQLMNEHLYLEPGNDKNLFRLDGISCAGFICYDIRFPEWIRKHTSEGSEVIFVSAQWPAERIKQWEQLLIARAIENQAFVVAVNRVGDDPNNHFNGHSLVIDPLGNVIVHGGEEEGNIYAEIDLNLVAETRGIIPVFTDRRPELY

SEQ ID NO: 3401 - protein, 358 aa, Mycobacterium leprae TN
MATLQVDAVVLVGGKGTRLRPLTLSAPKPMLPTAGLPFLTHLLSRIAAAGIEHVILSTSYRDAVFEAEFGDGSKLGLQIDYVIEESPLGTGGGIANVIDQLRHDTVMVFNGDVLSGVDLGQLLGFQRTNFADVTLHLVRVGDPRAFGCVSTEDGRVTAFLEKTQDPPTDQINAGCYVFERNVIDRIPRGREVSVEREVFPTLLSDADVKVCGYVDATYWRDMGTPEDFVRGSADLVRGIAPSPALGGHRGEHLVHDGAAVSPGAVLIGGTVVGRGAEIGPGVRLDGAVIFDGAKVEAGSVIERSILGFGVRIGPRALIRDGVIGDGADIGARCELLRGARVWPGVSIPDGGIRYSSDV

SEQ ID NO: 3402 - protein, 234 aa, Arabidopsis thaliana
MGRGKIVIRRIDNSTSRQVTFSKRRSGLLKKAKELSILCDAEVGVIIFSSTGKLYDYASNSSMKTIIERYNRVKEEQHQLLNHASEIKFWQREVASLQQQLQYLQECHRKLVGEELSGMNANDLQNLEDQLVTSLKGVRLKKDQLMTNEIRELNRKGQIIQKENHELQNIVDIMRKENIKLQKKVHGRTNAIEGNSSVDPISNGTTTYAPPQLQLIQLQPAPREKSIRLGLQLS

SEQ ID NO: 3403 - protein, 459 aa, Arabidopsis thaliana
MDVDNQIAKLMVELSRSQDYEIGDGTTGVVVMAGALLEQAERQLDRGIHPIRIAEGYEMASRVAVEHLERIAQKFEFDVNNYEPLVQTCMTTLSSKIVNRCKRSLAEIAVKAVLAVADLERRDVNLDLIKVEGKVGGKLEDTELIYGILIDKDMSHPQMPKQIEDAHIAILTCPFEPPKPKTKHKVDIDTVEKFETLRKQEQQYFDEMVQKCKDVGATLVICQWGFDDEANHLLMHRNLPAVRWVGGVELELIAIATGGRIVPRFQELTPEKLGKAGVVREKSFGTTKERMLYIEHCANSKAVTVFIRGGNKMMIEETKRSIHDALCVARNLIRNKSIVYGGGAAEIACSLAVDAAADKYPGVEQYAIRAFAEALDSVPMALAENSGLQPIETLSAVKSQQIKENIPFYGIDCNDVGTNDMREQNVFETLIGKQQQILLATQVVKMILKIDDVISNSEY

SEQ ID NO: 3404 - protein, 533 aa, Arabidopsis thaliana
MGNCCASPGSETGSKKGKPKIKSNPFYSEAYTTNGSGTGFKLSVLKDPTGHDISLMYDLGREVGRGEFGITYLCTDIKTGEKYACKSISKKKLRTAVDIEDVRREVEIMKHMPRHPNIVSLKDAFEDDDAVHIVMELCEGGELFDRIVARGHYTERAAAAVMKTILEVVQICHKHGVMHRDLKPENFLFANKKETSALKAIDFGLSVFFKPGEGFNEIVGSPYYMAPEVLRRNYGPEVDIWSAGVILYILLCGVPPFWAETEQGVAQAIIRSVIDFKRDPWPRVSETAKDLVRKMLEPDPKKRLSAAQVLEHSWIQNAKKAPNVSLGETVKARLKQFSVMNKLKKRALRVIAEHLSVEEVAGIKEAFEMMDSKKTGKINLEELKFGLHKLGQQQIPDTDLQILMEAADVDGDGTLNYGEFVAVSVHLKKMANDEHLHKAFSFFDQNQSDYIEIEELREALNDEVDTNSEEVVAAIMQDVDTDKDGRISYEEFAAMMKAGTDWRKASRQYSRERFNSLSLKLMREGSLQLEGEN

SEQ ID NO: 3405 - protein, 499 aa, Zea mays
MARSRTSGGGEYESGSDHDGALQKPLLPNSGSWYRMGMGSRQSSLNAAGTSSMAVLRESHVSAFLCTLIVALGPIQFGFTGGYSSPTQASIIRDLNLSISEFSVFGSLSNVGAMVGAIASGQMAEYVGRKGSLMIAAIPNVIGWLAISFAKDSSFLYMGRLLEGFGVGIISYVVPVYIAEISPQNMRGALGAVNPLSATFGVMFAYVLGLFFPWRLLALIGTLPCILLIPGLFFIPESPRWLARMNMMDDCETSLQVLRGLDADITVEANDIKIAVASANKSGAMSFQELNQKKYRTPLILGMGLLVLQQLSGINGIIFYAGSIFKAAGLKNSNLDTCILGVLATAVTTKILDRAGRRILLIISSFGMTLSLLVVAVVFYIKDNISHDSDLYDILSMVSLVGVVAYVIAFSFGMGAIPWIIMSEILPVSIKSLAGSFATLANWLTSFGITMTANLLISWSAGGTFTSYMIVSAFTLVFVIVWVPETKGRTLEEIQWSFR

SEQ ID NO: 3406 - protein, 452 aa, Pseudomonas fluorescens Pf-5
MAYDFDLYVIGAGSGGVRCARFAAGFGAKVAVAESRYLGGTCVNVGCVPKKLLVYGAHFAEDFEQASGFGWSLGEANFDWATLIANKDREINRLNGIYRNLLVNSGVTLHEGHAKLIDPHQVEVNGQRYSAKHILIATGGWPQIPDIPGREHAISSNEAFFLNELPKRVLVVGGGYIAVEFAGIFHGLGADTQLLYRGELFLRGFDGAVRKHLQEELTKRGLGLQFNADIERIDKQADGSLEVTLKDGRKLVADCVFYATGRRPMLDNLGLENTGVKLDKRGFIEVDEQYQSSEPSILAIGDVIGRVQLTPVALAEGMAVARRLFKPEQYRPVDYQMIPTAVFSLPNIGTVGLTEEQAREAGHKVQIFESRFRPMKLTLTDCQERTLMKLVVDADSDKVLGCHMVGPDAGEIVQGLAIALKAGATKRDFDETIGVHPTAAEEFVTMRTPVAG

SEQ ID NO: 3407 - protein, 424 aa, Xylella fastidiosa 9a5c
MSNSPQTPLATRQRLSEVRYEIRGELARRARELEAEGRKLIKLNIGNPGAFGFRAPEHLQRAIADDMGRTDPYTHQQGLPIAREAIAAAYVRRHYPDADADRVFVGNGVSELIDLSLRALLNPGDEVLVPSPDYPLWSAATILNDGRPVYYRCAPENGFQPDAVEIETLVSSRTRAIVLINPNNPSGANYSQELLERIVAIAVKHHLLLLVDEIYDQILYDGAVFVPVAPLAGTHPCITFSGLSKVHRACGWRVGWALLSGSSIQIDNLRNAMDLLGALRLCANVPGQYAIDAAVNGPDTITPLCSPGGPLYETRRAVIEACVVSEHLSLVVPAGALYAFPSVVGPAARHFDDYAFALELMNDEGVLVVPGSSFNVPYRDHFRVTLLPDAALIREVFSRIDRALSRRAEVAEKVVPLKSRSAAA

SEQ ID NO: 3408 - protein, 272 aa, Pseudomonas aeruginosa UCBPP-PA14
MSSTIHPLPSFGLGTFRLTGQVVVDSVRSALELGYRAIDTAQIYGNEADIGRAIAESGVPRSELFLTTKVWVDNYACEKLLASLRESLEKLRTDRLDLVLIHWPAPGNGVELAEYMAALAEAKSLGLTRRIGVSNFNIELTRQAIAAVGAGEISTNQIELSPYLQNRALTAYLEEQGIAVTSYMTLAYGKVLKDPALAGIAARHRATVAQVALAWAMQLGYAVIPSSTRRENLASNLLARDLRLDAEDMARIAGLERNGREVSPQGLAPAWD

SEQ ID NO: 3409 - protein, 384 aa, Glycine max
MAKEGPNWDGLLKWSIAHSDGTSPTRNLSEEDRKWFMEAMQAQTIDVVKRMKEITLVMQTPEQVLKDQGVTPADIEDMLEELQEHVESIDMANDLHSIGGLVPLLGYLKNSHANIRAMAADVVTTIVQNNPRSQQLVMEANGFEPLISNFSSDPDVTVRTKALGAISSLIRHNKPGITAFRLANGYAALKDALASENVRFQRKALNLIHYLLHENNSDCNIVNELGFPRMLMHLASSEDSDVREAALRGLLQLAHNAKDGKDGNEKDSAKIKQLLQERINNISLMSAEDLGVVREERQLVDSLWRTCFNEPSSLREKGLLVLPGEDVPPPDVASKYFEPPLRSSTANPSSKKDPEKNEIPLLLGSGPSPTYTNNQGSNKGDASS

SEQ ID NO: 3410 - protein, 178 aa, Triticum aestivum
  misc_feature (117)..(117): Xaa can be any naturally occurring amino acid
  misc_feature (139)..(139): Xaa can be any naturally occurring amino acid
  misc_feature (149)..(149): Xaa can be any naturally occurring amino acid
  misc_feature (160)..(160): Xaa can be any naturally occurring amino acid
  unsure (1)..(178): unsure at all Xaa locations
PPKLAEGYFEIEAIRRRRLRKGQLQYLVKWRGWPESANTWEPLENLKACSDIVDAFNKRSRSPRSCGKRKRKTPTTPTSDPNPSRGKRGRPPRSEARSMHSIHASEVKKLPCRTSSXRANNNSNKTSPGGLGAAMNLLXGQRIVQEGSXGVAQLGFISRXPLSVNLTDQQDANTCYGQ

SEQ ID NO: 3411 - protein, 414 aa, Oryza sativa
GRVMMALAVDVSRFEGVPMAPPDPILGVSEAFKADQNDLKLNLGVGAYRTEELQPYVLNVVKKAETLMLEKGENKEYLPIEGLAAFNKATAELLFGADNPVLKQGRVATLQSLSGTGSLRLAAAFIQRYFPEAKVLISSPTWGNHKNIFNDAKVPWSEYRYYDPKTVGLDFEGMIADIQAAPDGSFVLLHGCAHNPTGIDPTPEQWEKIADVIQEKKHMPFFDVAYQGFASGSLDEDASSVRLFVQRGLEVFVAQSYSKNLGLYAERIGAINVVCSTPEVANRVKSQLKRLARPMYSNPPIHGARIVANVVGDPTMFGEWKQEMEEMAGRIKNVRQKLYDSLSAKDDSGKDWSFILRQIGMFSYTGLNKTQSDNMTDKWHIYMTKDGRISLAGLSLAKCEYLADAIIDSFHNVS

SEQ ID NO: 3412 - protein, 527 aa, Neurospora crassa
MAATALDHLSLGGKIQWLAQLNTEFQPAREFRRTSIICTIGPKTNSVEAINKLRDAGLNVVRMNFSHGSYEYHQSVIDNARQAEKVHPGRPIAIALDTKGPEIRTGNTKNDEDIPISAGTILNITTDEKYKDECTIEHMYVDYVNITKVIAPGRIIYVDDGVLAFEVLEIVDDKTIKVKARNNGYISSRKGVNLPNTDVDLPALSEKDKADLRFGVKNKVDMVFASFIRRGQDIKDIREVLGEDGKQIQIIAKIENRQGLNNFAEILAETDGVMVARGDLGIEIPAAEVFAAQKKIIAMCNIAGKPVICATQMLESMIKNPRPTRAEISDVGNAVTDGADCVMLSGETAKGAYPTEAVREMSEAVLKAENTIPYVSHFEELCSLAKRPVSIVESCAMASVRASLDLNAAAILVLSTSGESARLISKYRPVCPIIMITRNDSASRYAHLYRGVYPFLFPESKPDFSKVNWQEDVDRRIKWGLSHGIGLKVLNEGETVVVVQGWKGGMGNTNTFRIVKADVNHLGLGQP

SEQ ID NO: 3413 - protein, 287 aa, Yarrowia lipolytica CLIB122
MSRQELVQWVNELLQTEISKVEECGKGAIYCQIMDSIYGDVPMSKVKFNVKAEYEFLNNYKVLQGVFNRHKIDRQIPVEKLVKCRFQDNLEFLQYCKKHWDANWSGQEYDAVGRRAGRVATVPSTAPGSTPNATSGRTSVQSQTSGRSSVVRSRPSVASGAAGSVGVGAGAGAGTGAGSLSGASGRASVSRRPGASGSSQASSAALAKAQQQIATLEADAVEYQQVLEGLETERNFYFNKLREIEVLVQENAEQMDTVQVEGMIREIQTILYSTEEGFQVPEEEEVF

SEQ ID NO: 3414 - protein, 110 aa, Stenotrophomonas maltophilia
MKAPVRVAVTGAAGQIGYALLFRIASGEMLGKDQPVILQLLELPVDKAQAALKGVMMELEDCAFPLLAGMVGTDDAEVAFKDADIALLVGARPRGPGMERKDLLLENAKI

SEQ ID NO: 3415 - protein, 128 aa, Pseudomonas syringae pv. phaseolicola 1448A
MAYSEKVIDHYENPRNVGKMNAEDPDVGTGMVGAPACGDVMRLQIKVNEQGVIEDAKFKTYGCGSAIASSSLATEWMKGKTLDEAETIKNTQLAEELALPPVKIHCSVLAEDAIKAAVRDYKQKKGLL

SEQ ID NO: 3416 - protein, 151 aa, Cucumis sativus
MLVVGCVAYRYKTTKKSTLDNIEELEVLVISSQKGKGMLFPKGGWETDESITEAASRETLEEAGVRGIVQGELGSWSFKSKTYDTFYEGYMFPLLVKEQLEFWPEKNFRQRVWMSAHEAREVCQHWWMKEALDILVGRLSSQKKQHIPPPT

SEQ ID NO: 3417 - protein, 228 aa, Zea mays
  misc_feature (13)..(13): Xaa can be any naturally occurring amino acid
  unsure (1)..(228): unsure at all Xaa locations
MAFSFANVNSEAXGLKKLDEYLLTRSYITGYQASKDDLAVYSSFSAAPSSKYINVARWFTHIDALLRLSGVTAEGLGVKVESSAVPSASTPDVAEAPAADDDDDDDVDLFGEETEEEKKAAEERAAAAKASGKKKESGKSSVLLDVKPWDDETDMAKLEEAVRSVQMEGLLWGASKLVPVGYGIKKLQIMMTIVDDLVSVDTLIEDHLCAEPVSEYVQSCDIVAFNKI

SEQ ID NO: 3418 - protein, 243 aa, Cucumis sativus
DDVGIPINYRHMEGFGVQAYSLINKSGKARLVKFHWKPTCGVKSMLEEEAIRIGGTNHSHATQDLYESIAAGNFPEWRLYIQTIDYDDQNNFDFEPLDTTIEWPEDVIPLQPVGRLVLNKNIDNFFAENEMLAFSMSLVPGIHYSDDKMLQARSFAYADTQRHRLGPNYLQLPVNAPKCPHHNNHHEGFMNFMHRDEEVNYFPSRYDPCRHAEKFPMPPNVLSGKRERCVIPKENHNFKHAGS

SEQ ID NO: 3419 - protein, 340 aa, Mycoplasma genitalium G37
MIGAKTRVAIVGGIGYIGSCFASFIKEQNDKLIVTVIDNNKNNHVIKLLKKIGIEFYFADLLDRHKLTEVIAAIQPDVVFHFAAKTSVSESVHNPLKYFDCNVIGTLNLISAISNLQKPIKLFFASSAAVYGQTTNSYISEEIVITETQATNPYGLSKFLDELILNAVAKNSQLQVVCLRFFNVAGAILPFGNFNGNTTLLIPNLVKAFLKQTPFFLYGNDYATKDGSCIRDYIHVYDICNAHFLLWKWLNDHRQIKFETFNLGSGIGTSNLEVIDIAKKVFYPSRLNLEIRPKRSWDPAILVANVAKAKQTFQFKITRNLKDMISDERNFYENFYNDAY

SEQ ID NO: 3420 - protein, 321 aa, Bartonella sp.
YIDGNAGVLLYRGYPIDQLAEKGDFLESCYLLLYGELPTKQEKNDFDRCIMQHTMVHEQFARFFHGFRRDSHPMAVMVACLGAMSALYHDSIDITDPQQRMIASVRLISKVPTLAAMAYKYSIGQAFIYPRNDLSYAANFLRMCFSVPCEEYKTNPVLTRAMDRIFILHADHEQNASTSTVRLAGSSGANPFACIAAGVACLWGPAHGGANEACLKMLQEIGSVERIPEFIARAKDKNDPFRLMGFGHRVYKNYDPRAKIMQKTCHEVLKELNIQDDPLLDIAIELEKIALNDEYFVEKKLYPNVDFYSGITLKALGFPTE

SEQ ID NO: 3421 - protein, 222 aa, Bacillus thuringiensis serovar konkukian str. 97-27
MKFFIDTANLEDIKKAYKLGVLAGVTTNPSLVAKEGIKFEDRIAEICQAVPKVESVSAEVTPDAVTAEEMIAQAEELIKINGGDEKVTIKLPMTLAGLEACRYLTEKGVKTNVTLIFTVNQALLAARAGATYVSPFLGRLDDISEDGVLLVAKIAELFDVHQLDTQIIAASVRHPDHVTRVAMAGAHIATIPYKVIEQLAMHPLTDQGIEKFAADWVKAPKL

SEQ ID NO: 3422 - protein, 574 aa, Sulfolobus solfataricus P2
MSEVIDKVLDLAKRRGIFWLSYEIYGGVAGFYDIGPVGVRIKNRIVELWRKYFVKDNGDFVVEIESPMIGPAKVFEASGHVESFTDPIVECNNCKRIYRADHLIEDILKKSVEGLKPEELTRIIKENNIRCQYCGGELGEVRLFNLLFTTNIGPYTGNLGYIRPETAQGMFTAFKRVYEATRQRLPIGIAQIGKVGRNEISPRQGLIRMREFTIMEIEFFIDPEDNNIENIPLYRFKDTKLNILTASEKEKDGKPQEFKLEESVREKIIIQPWMAYWMAVASSFVKALGINEFYFEEKLPYERAHYSKQTFDQIAVINGIKVEISGHAYRGDYDLSRHMKYSGQDLTIFRKYKEPKMIKKKTVIVNNTKLKDKELRKKIMELLNGKSAEEIEQMIRNNVMIDDKPLSEFINIVEREEKVHGEHFIPHVVEPSFGVERTLFLTILSAYKEKEGRVLLSLPRHLAPYDIAVFPLLEREELIRKSVEIRESLSEKYEVLYDDSGSIGRRYARADEIGIPFAITVDPQTLVDNSVTIRDRDSWKQVRVKIDDLKISLEKLFRGEAFNKIGIEVNDSNE

SEQ ID NO: 3423 - protein, 322 aa, Bartonella taylorii
TYIDGNKGILLYRGYPIDQLAERGDFLESCYLLLYGELPTKQEKHDFDRCIMQHTMVHEQFARFFHGFRRDSHPMAVMVACLGAMSAFYHDSIDITDPQQRMIASVRLISKVPTLAAMAYKYSIGQAFVYPRNDLSYAANFLRMCFSVPCEGYNINSVLTRAMDRIFTLHADHEQNASTSTVRLAGSSGANPFACIAAGVACLWGPAHGGANEACLKMLQEIGSVERIPEFIARAKDKNDPFHLMGFGHRVYKNYDPRAKIMQKTCHEVLKELNIQDDPLLDIAMELEKIALNDEYFVEKKLYPNVDFYSGITLKALGFPTE

SEQ ID NO: 3424 - protein, 551 aa, Thermus thermophilus HB8
MELFLETEAREGVLLYERDGELQKKPMAPWERGLKARVPVHASPFRYCFRLPQGYLGSHGLERTLPRYDRFFHLLAKPLPPEWALGAVFYQIFPDRFRQGRPELAPKEGAWLYGGRPIRKKAWHEPPGEDGAREFYGGDLFGVLEALPYLEALGVEALYLTPIFQSPSSHRYDTEDYHRVDPHLGGEEALRALYEALEARGMKLILDGVFNHVGATHPWFQKALEDPSSPERGMFTFYPDGSYASFWGVKHMPKLDYASALTQERFVFGKEAPVRYWMRLAHGWRLDVAHSIGEGGTNRKNARWLRALARAAKEEREDALVFGELSYDTVPTLRAHTLDGAMHYAGFAHPVMEWLSGRDLHGNPVELEAEDLWRALFDHYAALPLQLRHAMYTLLSSHDIPRALWRLRGDKERFKTAYALLFAFPGSPAVYYGDEVGLSQPNPYEVWRGDPYCRAPFPWDEALWDKDLLAFLRRLILLKKTHPALRLGGLLPLKAPPGVLAFRRRHRGREVWAFFAKEEVRLSLPRGVDLLSGREVAGEVEARYLLLEPLE

SEQ ID NO: 3425 - protein, 806 aa, Nostoc punctiforme
MSELLQAVLDSEERSDLRSFLSELRQQEKKYLLRNDILNVYSEYCSKSQKPEAYYTTSELGKLIYYTQEIIQEDSNFCFIIRSKIASQEVYWLTSDLSIEPMTVQDLLDLRDRLVNKFHPNDGDLLELDFGPFYDYTPIIRDPKNIGKGVQFLNRYLSSKIFQDSKQLLENLLNFLRLHHYNGVQLLVNDRIQSQQQLSEQVKKAIGFVNNRPDDEPYEQFRFQLQSMGFEPGWGNTAARVRETLNILDELIDSADPQTLEAFISRVPMIFRIVLVSAHGWFGQEGVLGRPDTGGQVVYVLDQAKSLEKQLQEDVLLAGLEKLNVEPKVIILTRLIPNSDGTLCNQRLEKVHGTENAWILRVPLRDFNPNMTQNWISRFEFWPYLETFAIDSERELRAEFQGTPDLIVGNYTDGNLIAFLLARRLKVTQCNVAHALEKSKYLFSNLYWQELEEKYHFSLQFTADLIAMNAANFVVSSTYQEIVGTPDSVGQYESYKCFTMPELYHVTNGIELFSPKFNVVPPGVNENNYFPYTRTKDRVESDRQRLAETLFTLEDPTQIFGKLDDPNKRPLFSMARLDHIKNLTGLAECYGQSKELQEHCNLILVAGKLRVEESGDNEERDEIIKLYNIIDEYNLHGKIRWLGVRLSKTDSGEIYRVIADRQGIFVQPALFEAFGLTILESMVSGLPTFATQFGGPLEIIQDKVNGFLINPTNLDETATKIVDFITKCEQNPNYWNEISQRGIDRVYSTYTWKIHTSKLLSLARIYGFWNFTSKENREDLLRYLEALFYLIYKPRAQQLLEQHKYR

SEQ ID NO: 3426 - protein, 610 aa, Listeria innocua Clip11262
MHKMRFFQSVQFKLVIMYLLLIIVAMQVIGAYFVRELEGQLEKNFQDSITNSITLLDYNAREEIIKNSDNSVKLQNDIRELLVDYSRASSNIIEVRIVDDKGKILGTSNLDNQGIVWQKSNDPLVKRTLSLGTTSEDKIYKDESNKNNRVWVNVSSIKNKGQVIGAIYLVADIESVYKQVDDITNIFITGTLIAMIITAVLGILLSRTITKPIIEMKRQAYAMARGNYSRKVKVYGVDEIGELADSFNTLTKRVQEAQAMTEGERRKLSSVLAYMTDGVIATDRRGKVILINTPAEKMLRVKHESANGRSIIDVLDIGDTYQFEDLMEVDGSLTMDRSTLDKPYVLRANFSVIQRETGFNNGVIAVLHDITDQEKVDQERRDFVSNVSHELRTPLTSMHSYLEALSDGAWEDKEIAPRFLEVTQNETERMIRLVNDLLKLSRMDGGREQLEKSFVNFTDFFNHIIDRFEMMKKETIMFKRHIPKEPVIIEIDEDKVMQVLDNIISNANKYSPDGGRISFYLKKFEDEIEVSIADEGLGVPDEDLANVFDRFFRVDKARSREMGGTGLGLAIAREVIEAHGGRIWAERNKSKGTIIKFTLPYSDLPEDDWE

SEQ ID NO: 3427 - protein, 215 aa, Novosphingobium aromaticivorans DSM 12444
MKLYGALLSPFVRKIAVVATEKGLSFEMARGGPGSTDPEFIACSPLGKIPAIDDGGFQLADSSAIAVYLDARYPEPRLIPEDPQLRGKAVFWDEFADTVLGASGLKILFNRLVGPKLLKTGGDEAIALQGEAELPRWVDWFESVVPGQGWLLGETFSLADIAVASTFRTLAYVGHGVDAGARPGTASWYDRVTARPAWAAVAEQEEVTARRIMAL

SEQ ID NO: 3428 - protein, 339 aa, Pseudomonas putida KT2440
MFALMQSTRTQSLHLFNDPPTGLKAVVAIHSEHLGPAMGGCRYLPYADDESAMTDAIRLAQGMSYKAALAGLPMGGGKAVIMRNPHVENRAALFEAFGRFIDTLHGRFIIAVDSGTSTLDMDCIAHSTPYVTSTTASGDPSPHAAMGVFAGIRATTSFRLGSDDLRGLRVAVQGLGNVGYALAEQLHAVGAELLVSDLDPGRVRLAMEQFDAKPVTNDALISTPCDIFAPCGVGPVLNGQSVMQLRCAAVAGAANNQLTTLQVADQLESRGILYAPDYVINAGGLIYVALTHRGEDQRTITAHLARIPSRLTEVFGHAQAEKRSPARVAQMLAERLLYG

SEQ ID NO: 3429 - protein, 300 aa, Escherichia coli O157:H7 EDL933
MTMIRVACVGITVMDRIYYVEGLPTESGKYVARNYTEVGGGPAATAAVAAARLGAQVDFIGRVGDDDTGNSLLAELESWGVNTRYTKRYKQAKSSQSAIMVDAKGERIIINYPSPDLLPDAEWLEEIDFSQWDVVLADVRWHDGAKKAFTLARQAGVMTVLDGDITPQDISELVALSDHAAFSEPGLARLTGVKEMASALKQAQTLTNGHVYVTQGSAGCDWLENGGRQHQPAFKVDVVDTTGAGDVFHGALAVVLATGGDLAESVRFASGVAASKCTRPGGRAGIPDCDQTRSFLSLFV

SEQ ID NO: 3430 - protein, 215 aa, Photorhabdus luminescens subsp. laumondii TTO1
MPTSANKSLSIDPHSALPGRTEPLKVSPNHAVTDHTIEPVPENMEVAYFGMGCFWGVERLFWQQPDIYTTSAGYSGGTTANPTYEEICSGLTGHAEVVRIVYDPAKNSYENLLKLFWENHDPAQGMRQGGDIGSQYRSAIYTVSPQQHELALASREHFQKAMQQQSDNRPITTEITEAGPFYFAEDYHQQYLFKNPEGYCGLGGIGVCLPKMNEN

SEQ ID NO: 3431 - protein, 499 aa, Listeria innocua Clip11262
MDEKEKNLNENSENESTPKREVEETLHTKDSSQPVQETPIVEGVTPEGEQFAGATEEAAEASSTNAFFEEASSKEPEPARPAPGPRRPSGAGGGTIPPNRVNNGGGGSGNQPPKRNKHLLGYFLTALIGVIIGGLIIFFVAWDNGDNADTTSNSNNKPTKVEKVSVNTTSDVTKAVDKVQDAVVSVLNYQSSSSLDGTTSSEKEASSGSGVIYKKANGKAYIVTNNHVVADANKLEVTFTNGKKSEAKLLGTDEWNDLAVLEIDDKNVSTVATFGDSDSLKLGEPAIAIGSPLGTEFSGSVTQGIISGLNRAVPVDTNGDGTEDWEADVIQTDAAINPGNSGGALINIEGQVIGINSMKISMENVEGISFAIPSNTVEPIIEQLETKGEVERPSLGVSLRDVDTIPETQQKNILKLPDSVDYGAMVQQVVSGSAADKAGLKQYDVIVELNGEKVTNSMTLRKILYGNDVKIGDKVKVKYYRDGKEQSTDIKLEAAKTTT

SEQ ID NO: 3432 - protein, 434 aa, Fusobacterium nucleatum subsp. nucleatum ATCC 25586
MVFKNSIDLYKKAVELIPGGVNSPVRAFKSVNREAPIFIKKGQGAKIWDEDDNEYIDYICSWGPLILGHNHPKVIEEVKKIIENGSSYGLPTKYEVDLAELIVDIVPSIEKVRLTTSGTEATMSAVRLARAYTQRNKILKFEGCYHGHSDALLVKSGSGLLTEGYQDSNGITDGVLKDTLTLPFGDIEKVKEILKNKDVACVIVEPIPANMGLIETHKEFLQGLGKVTEKTGTILIFDEVISGFRLALGGAQEFFGITPDLTTLGKIIGGGYPVGAFGGKKEIMDLVAPVGRVYHAGTLSGNPIASKAGFATISYLKENPNIYKELEEKTNYLIDNIEILAKKYSVNVCVNSMGSLFTIFFVDIDKVENLEDSLKSNTENFSIYFNTMLENGIVIPPSQFEAHFLSMAHTKKELNRTLEVIEMAFKKIGEKSGK

SEQ ID NO: 3433 - protein, 284 aa, Geobacter sulfurreducens PCA
MSMSLPVVADSLTVYLREIRKFPVLTPEEEYRFAVKFYEDKDLEAAHSLITSNLRFVVKIAAEYRSYGLKMLDLIQEGNVGLMMAVRKFNPYKGIRLISYAVWWIRAYIQNHIISAWSLLKIGTTQAQKKLFFKLNQAKNAIKGLTGTDDIEATATSLHVKESEVLEMDQRMRGDFYLDAEIKNGDGLTILETLADERQNQEDTLAELQESELLKQHIAGALGKLNEKERFIVEQRVTADTPLTLQEIADRFSISRERVRQIEEAALRKIKSYLIPIIAETRPV

SEQ ID NO: 3434 - protein, 525 aa, Cryptococcus neoformans var. neoformans B-3501A
MASPPIPTFQNGRSICLATSTATLVEPTERTPLLKEVQNGTGKPVSPPQYDHEEEGAEGKEVELLVPGKSNFSQTLLNVLGDLIGTGLLACPIAIAHAGWVLGPLLLCLVSGITLWTLKILIRIIEKDRSMRNFADVARYSLGARAEKWTTAMFVSDCCIWIIALIVLFSDSFEVVLPMFTSNQWKVIGLVVIVPLNFIPLRFLAWTSALGITSTWTLVAILIFTGLATPNSPGSVLDPAPTDLWPAHGLVKLGLSFGLLISGFGGHFLVPNLIRDMKHPEQAERVCEVGYGICIIVYALVSVFGYLMFGRDVSDEISRDLAKTSAFSPLMAQIAVWMVAINPLTKLPLGLRPLTDIVYSALRLQSTTFVPKIHVSYAESSEPDEEDDELCSPITSNSPTVLSSFSASTISAATSITLENEHYSHALSTAQRRHDRREQLKAIFRALITIVLLGVFVLGALAFPSFETLMSIMGGGMSIITCILIPIAAGANIWGWRWYSILLFGLSAVVCVIGVVCACLNNGDA

SEQ ID NO: 3435 - protein, 392 aa, Mycobacterium avium subsp. paratuberculosis K-10
MSLADAATSWLAAHNQDLIEWRRHIHRYPELGRQEYATTQFVAERLAEAGLNPKVLPGGTGLTCDLGPEHEPRIALRADMDALPMAERTGAPYASTMPNVAHACGHDAHTAILLGTALVLASVPELPVGVRLIFQAAEELMPGGAIDAIAAGAITGVSRIFALHCDPRLEVGQIAVRHGPITSAADQIEITLYSPGGHTSRPHLTADLVYGLGTLITGLPGVLSRRIEPRNGTVLVWGAVNAGVAANAIPQTGVLAGTVRTASRQTWVGLEEVIRETVSGLLAPLGIEHTLQYRRGVPPVVNEDVSTRILTHAIEALGPDALADTRQSGGGEDFSWYLEEIPGAMARLGVWPGVGPQLDLHQPTFNLDERALAIGVRVMANIVEQSALFQVF

SEQ ID NO: 3436 - protein, 688 aa, Escherichia coli CFT073
MINANWKIFLPPNYKPATECYMSRKDLANAIRALSMDAVQKANSGHPGAPMGMADIAEVLWNDFLKHNPTDPTWYDRDRFILSNGHASMLLYSLLHLTGYDLPLEELKNFRQLHSKTPGHPEIGYTPGVETTTGPLGQGLANAVGLAIAERTLAAQFNQPDHEIVDHFTYVFMGDGCLMEGISHEVCSLAGTLGLGKLIGFYDHNGISIDGETEGWFTDDTAKRFEAYHWHVIHEIDGHDPQAVKEAILEAQSVKDKPSLIICRTVIGFGSPNKAGKEEAHGAPLGEEEVALARQKLGWHHPPFEIPKEIYHAWDAREKGEKAQQSWNEKFAAYKKAHPQLAEEFTRRMSGGLPKDWEKTTQKYINELQANPAKIATRKASQNTLNAYGPMLPELLGGSADLAPSNLTIWKGSVSLKEDPAGNYIHYGVREFGMTAIANGIAHHGGFVPYTATFLMFVEYARNAARMAALMKARQIMVYTHDSIGLGEDGPTHQAVEQLASLRLTPNFSTWRPCDQVEAAVGWKLAVERHNGPTALILSRQNLAQVERTPDQVKEIARGGYVLKDSGGKPDIILIATGSEMEITLQAAEKLAGEGRNVRVVSLPSTDIFDAQDEKYRESVLPSNVSARVAVEAGIADYWYKYVGLKGAIVGMTGYGESAPADKLFPFFGFTAENIVAKAHKVLGVKGA

SEQ ID NO: 3437 - protein, 400 aa, Mycobacterium avium subsp. paratuberculosis K-10
MPPVGSDSPLDSVEDVVRRRGADLVELSHAIHAEPELAFAEHRSCAKAQALVAERGFEITAAAGGLDTAFRADFGSGQLTIGVCAEYDALPEIGHACGHNIIAASAVGTALALVEVADDLGLRVALVGTPAEEAGGGKALLLKAGVFDDISAAVMLHPGPADIAAARSLALSEAIVRYRGKESHAAVAPHLGVNALDAVTVAQVAVGLLRQQLAPGQLVHGIVTDGGQAVNVIPGHASLQYAMRAVESDSLRELEGRMYACFAAGAMAAGCEYEIDNPAPAYDELKPDAWLANIFREEMCRLGRQPVAPEYEAALPMGSTDMGNVTQALPGIHPVVGVESGGAMVHQRAFADAAAGPSADRAVIEGAIMLARTVVALAQTPAERDRVLAAHERRRGGAHP

SEQ ID NO: 3438 - protein, 222 aa, Oryza sativa
MAPRNAAEAVAVAVAEGGGAGMEPRFRGVRKRPWGRYAAEIRDPARKARVWLGTFDTAEAAARAYDSAALHFRGPKAKTNFPVAFAHAHHHAPPPPLPKAAALAVVSPTSSTVESSSRDTPAAAPVAAAAKAQVPASPSLDLSLGMSAMVAAQPFLFLDPRVAVTVAVAAPVPRRPAVVSVKKEVARLDEQSDTGSSSSVVDASPAVGVGLDLNLPPPIEEA

SEQ ID NO: 3439 - protein, 148 aa, Fagus sylvatica
MADQLTDDQISEFKEAFSLFDKDGDGCITTKELGTVMRSLARTQLRQSCRTLINEVDRDGNGTIDFPEFLNLMARKMKDTDSEEELKEAFRVSTKDQNGFISAAELRHVMTNLGEKLTDEVDEMIREADVDGDGQINYEEFVKVMMAK

SEQ ID NO: 3440 - protein, 319 aa, Acinetobacter sp. ADP1
MQHVRITCTEKQYLGNQTFRFNFPVNYTEFEKLTQQQFYDQVKDQHVLIVNDLKVDQQVMDNNPELQLIALCSTGFDHVDIGLAKQRNIKVCNIKGYAGDTVAEHAFLLMLNLVKNLQFYQNSVVSGLWSDSNCFCYQDHHFPIYDLKDKTLVIVGRGEIGQSLALKAQAFGMQVFFSERPNQEGCREGYIPFQTALQIADVLSLHCSLNADNRHMLNQETLNLMKPNSFIINVSRGGLVNEHDLLIALRTGRIAGYGADAMTQEPPPRDNPLLKSGLPNILLTPHIAWASEEAKQRMIEILVQNIHLNLDGIDHNRIV

SEQ ID NO: 3441 - protein, 119 aa, Oryza sativa
  misc_feature (49)..(49): Xaa can be any naturally occurring amino acid
  unsure (1)..(119): unsure at all Xaa locations
MALSLFGGRRSNVFDPFSLDIWDPLEGLGTLANIPPSARETTAIANTRXDWKETPEAHIFIADLPGLKKEEVKVAVDDGKVLQISGERSREQEEKNDKWLRIERSTGKFSRRFMLPDNA

SEQ ID NO: 3442 - protein, 421 aa, Bacillus clausii KSM-K16
METVLMDNLWLTISAILVLLMQGGFILLEAGSTRMKNAGHIAGKTIFTVGIASLVFWAVGYGFIYGDGNPFIGMADFFFGNYADGVGSVDFFFQLTFAAIALTIAFGGFAERGKLAAYAIFAVLFSAFVYPLVAHWIWSDQGWLANLGKQDFAGSTVVHLTGAMAALAATLMLKPRLGKYDKNGKVNDLFGHNQVYTALGVLILWVGWFGFNAGSTGGVADAFFGYVALNTQLAAGAGTIAALFLVWALNGKADVPTTLNGTLAGLVAITASCAFVAPWAAVLIGVIGGLIVVVSMNMFDKLKIDDPIFALSVHGVAGVWGTLSNGLFATPELAEMNGGLPGLFYGGGFEQLGVQLLSVVVCGVFAFVASYVLLFITKGLLGGNLRVTEEEEILGLDMSEHGSYGYPETVQSEKTSTQTGS

SEQ ID NO: 3443 - protein, 173 aa, Brassica napus
MQDQLVCHGCRNTLMYPRGATNVRCALCHIVNMVPLHPHPPPPHHAHAGMDMAHIVCGGCRTMLMYTRGASSVRCSCCQTVNLVPGPPPSNQVAHINCGNCRTTLMYPYGASSVKCAVCQFVTNVNMSNGRVPLASNRPNGTASPGTMPSTSTQSTPPSQTQTVVVENPMSVN

SEQ ID NO: 3444 - protein, 338 aa, Citrus sinensis
MGSIAETVCVTGASGFIGSWLIMRLLERGYAVRATVRDPDNKKKVKHLLELPKASTHLTLWKADLAEEGNFDEAIRGCTGVFHLATPMDFESKDPENEVIRPTINGMVSIMRACKNAKTVRRLVFTSSAGTLDVEEHRKPVYDETSWSDLDFVRSVKMTGWMYFVSKTLAEQAAWKFAEENNIDFISIIPSLVVGPFLTSSMPPSLITALSPITRNEAHYPIIKQGQFVHLDDLCSAHIFLFEHPNAKGRYICSSHPATILELAKFLREKYPEFNVPTEFEDVDENMKNMLFSSKKLTDLGFKFKYSLDDMFTGAVDTCRAKGLLPLLCENHVSEVSI

SEQ ID NO: 3445 - protein, 281 aa, Zea mays
MLLNPASMLDTIRQHLLEEPPAAADESFGILVADQWSDSLPFRTDDADDMVVFGALQDAFAYGWLPDGSFAHVKPEPVRSPDSSYYSYDGSCFGGLPYPEQPLTPGSEGEAAATPSPRREEAAAAVARGKHYRGVRQRPWGKFAAEIRDPAKNGARVWLGTYDTAEDAALAYDRAAYRMRGSRALLNFPLRIASEIAAAAAGDKRPLALPEPATSSDSSSSSSSTGGSPKRRKRGEAAAANMAMALVPPPSQLSRPAQPWFPAAAPVEQAAMPPRVEQLVI

SEQ ID NO: 3446 - protein, 555 aa, secondary endosymbiont of Bemisia tabaci
MAAKDLKFGNDARKKMLKGVNILANAVKVTLGPKGRNVVLDKSYGAPSITKDGVSVAREIELEDKFENMGAQMVKEVAFKANDAAGDGTTTATVLAQSIVTEGLKAVAAGMNPMDLKRGIDKAVEAAVEELKIIPKPCKDSKEIAQVGTISANADAKVGKLISDAMKRVTNEGVITVEEASGLEDDLIVVEGMQFDRGYLSPYFINKQESSSIEFDNPYILLVDKKISNIRDMLSILEVVAKEGKPLLIIAEDVEGEALATLVVNTMRGIVKVSAVKAPGFGDRRKEMLQDIAVLTHGHVISEETGDSLEKATKENLGNAKRVVITKDATTIIDGAGEKSKIEARIQNIKKQIENATSDYDKEKLQKRVAKLSGGVAVIKVGAPTEIAMKEKKARVEDALQATRAAVEEGVVPGGGVALIRVASKIANSSLKGDTEDQNVGIRVALRAMESPLRQIVVNAGEEASVIANKIKENKGNDNYGYNAQTEAYGDMIEMGILDPTKVTRSALQYAASIAGLMITTECMVTDLPKEEKASDMGAGGMGGIGGMGGMNGMM

SEQ ID NO: 3447 - protein, 555 aa, secondary endosymbiont of Bemisia tabaci
MAAKDLKFGNDARKKMLKGVNILANAVKVTLGPKGRNVVLDKSYGAPSITKDGVSVAREIELEDKFENMGAQMVKEVAPKANDAAGDGTTTATVLAQSIVTEGLKAVAAGMNPMDLKRGIDKAVEAAVEELKIISKPCKDSKEIAQVGTISANADAKVGKLIPDAMKRVTNEGVITVEEASGLEDDLIVVEGMQFDRGYLSPYFINKQESSSIEFDNPYILLVDKKISNIRDMLSILEVVAKEGKPLLIIAEDVEGEALATLVVNTMRGIVKVSAVKAPGFGDRRKEMLQDIAVLTHGHVISEETGDSLEKATKENLGNAKRVVITKDATTIIDGAGEKSKIEARIQNIKKQIENATSDYDKEKLQERVAKLSGGVAVIKVGAPTEIAMKEKKARVEDALQATRAAVEEGVVPGGGVALIRVASKIANSSLKGDNEDQNVGIRVALRAMESPLRQIVVNAGEEASVVANKIKENKGNDNYGYNAQTEAYGDMIEMGILDPTKVTRSALQYAASIAGLMITTECMVTDLPKEEKASDMGAGGMGGIGGMGGMSGMM

SEQ ID NO: 3448 - protein, 104 aa, Brassica napus
  misc_feature (42)..(42): Xaa can be any naturally occurring amino acid
  misc_feature (54)..(54): Xaa can be any naturally occurring amino acid
  misc_feature (65)..(65): Xaa can be any naturally occurring amino acid
  unsure (1)..(104): unsure at all Xaa locations
WKRHMVQAFDKLRNYFWRQLGLSFIYSMERLTPLDALIYLTXTPSDLHFPSLPXMIKNLKYKAMXIIIKDKTINEEKLQKILLSRLTQTRIIWLLNKQEFLSAF

SEQ ID NO: 3449 - protein, 142 aa, Pseudomonas putida KT2440
MINAQLLQSMVDASNDGIVVAEKEGDDTILIYVNAAFEYLTGYSRDEILYQDCRFLQGDDRDQLGRARIRKAMAEGRPCREVLRNYRKDGSAFWNELSITPVKSDFDQRTYFIGIQKDVSRQVELERELAELRARPKPDERA

SEQ ID NO: 3450 - protein, 572 aa, Arabidopsis thaliana; identical to SEQ ID NO: 1089

SEQ ID NO: 3451 - protein, 367 aa, Triticum aestivum
AGLEVNVLLNPKDEQVICYPDQDVQGMDQKVGAGLVAPLPQSAVKMDEIPVAPLPQSAAKMEDEIPVAAVPLSLSVAISLPPSVKEVDKAQVAAVPLPLAVEEDVPKPTQKVFKRTQSTQKVLSDKMPSKKLKLSQDLTTKNMPSKKLKLSQDLTTQSMAPVPDVKVRSVPSAQLPTRQADRSKWFKPQPWHEKLAQADREGRLVYIQNLDIRFGASEIVELIREALQLSCTAKPINHPTYDDPNNGKAYVVFNSRNIADDAVMKINSGLVVGGRPLYCSKGLLKVPKPASGALVGHLTISNQKMNPRQREEQKKAVSTSHCSQPNTIEYDLALDWMLVREKQAMKFSMLHKRHAGERKSFAAKMEK

SEQ ID NO: 3452 - protein, 240 aa, Escherichia coli K12
EFRNVTFTYPGRDVPALRNINLKIPAGKTVALVGRSGSGKSTIASLITRFYDIDEGEILMDGHDLREYTLASLRNQVALVSQNVHLFNDTVANNIAYARTEQYSREQIEEAARMAYAMDFINKMDNGLDTVIGENGVLLSGGQRQRIAIARALLRDSPILILDEATSALDTESERAIQAALDELQKNRTSLVIAHRLSTIEKADEIVVVEDGVIVERGTHNDLLEHRGVYAQLHKMQFGQ

SEQ ID NO: 3453 - protein, 243 aa, Triticum aestivum
  misc_feature (127)..(127): Xaa can be any naturally occurring amino acid
  unsure (1)..(243): unsure at all Xaa locations
MENHQLPYTTQPPATGAAGGAPVPGVPGPPPVPHHHLLQQQQAQLQAFWAYQRQDPAPASASDFKNHQLPLARIKKIMKADEDVRMISAEAPVLFAKACELFILELTIRSWLPAEENKRRTLPRNDXAAAFARTDVFDFLRRLCAPRGGPRRSPAAQPSGLPPGGVGAAGGGPAAGLPYYYPPMGQPAAPMMPAWHVPAWEPAWQQGGAGVDQGAGSFGEEGQGFTGGHGGSAGFPPGPPSSE

SEQ ID NO: 3454 - protein, 397 aa, Sulfolobus tokodaii str. 7
MINMDAYIVSAVRTPIGKFGGVFKDLPPYELGAIAIKEALKRANVDPAKVDITIMGNILRAGHGQDLARQAAIRAGIPMEIDGYCVDMVCSSGMVSVINAVQMIKSGDADIVVAGGMESMSQAMLAIRSEARWGVKMLLGKKLDFIDTMLIDGLTDPFNMKLMGQEADMVAKSHNISRRELDEVAYESHKRAIIATEKGYFAKEIVSVKVDGKEVTQDEGIRRDTSIEKLSQLKPAFSPDGVHTAGNSSQISDGSSALVIVSEKIVKEYKLEPIAKILGYSWVGIESWRFTEAPIFAVKKLLQKLNMEISHFDYFENNEAFAVNNVLYNKYLGVPYDRLNVFGGAIALGHPIGASGARIITTLINVLSTMGGKRGIASICHGTGGSTAIAIELLRPL

SEQ ID NO: 3455 - protein, 682 aa, Pisum sativum
MSSGGCSIVWFRRDLRVEDNPALAAGVRAGAVVGVFIWAPEEEGQYYPGRVSRWWLKNSLSQLDSSLRNLGTPLVTKRSTDSISSLLEVVKSTGATQIFFNHLYDPLSLVRDHRAKEILTAQGITVRSYNSDLLYEPWDVNDEHGQPFTTFDSFWERCLSMPYDPQAPLLPPKRIIPGDVSRCPSDTLVFEDELEKSSNALLARAWSPGWSNANKALTTFINGPLIEYSVNRRKADSATTSFLSPHLHFGEVSVKKVFHLVRIKQVFWANEGNKAGEESVNLFLKSIGLREYSRYISFNHPYSHERPLLGHLKFFPWVVDEGYFKAWRQGRTGYPLVDAGMRELWATGWLHDRIRVVVSSFFVKVLQLPWRWGMKYFWDTLLDADLESDALGWQYISGTLPDGREFDRIDNPQFEGYKCDPNGEYVRRWLPELARLPTEWIHHPWNAPESVLQAAGIELGSNYPLPIVEIDAATVRLEEALIQMWQLEAASRTAAENGTEEGLGDSTESAPIAFPQDIQMEERHEPVRNNPPHGTRRYQDQMVPSMTYSRVRVEDEETSSVRNSAGDSRAEVPTNANTQQNGREPMDQGMLQNVNRNTRQRRNNTTTTFWLRNAAEDSTAESSSSTRRERDGGVVPEWSPQASNFSDQFVDDENGIGATSPYLQRHPQTHQMMSWTRLPQTG

SEQ ID NO: 3456 - protein, 682 aa, Pisum sativum
MSSGGCSIVWFRRDLRVEDNPALAAGVRAGAVVGVFIWAPEEEGQYYPGRVSRWWLKNSLSQLDSSLRNLGTPLVTKRSTDSISSLLEVVKSTGATQIFFNHLYDPLSLVRDHRAKEILTAQGITVRSYNSDLLYEPWDVNDEHGQPFTTFDSFWERCLSMPYDPQAPLLPPKRIIPGDVSRCPSDTLVFEDELEKSSNALLARAWSPGWSNANKALTTFINGPLIEYSVNRRKADSATTSFLSPHLHFEEVSVKKVFHLVRIKQVFWANEGNKAGEESVNLFLKSIGLREYSRYISFNHPYSHERPLLGHLKFFPWVVDEGYFKAWRQGRTGYPLVDAGMRELWATGWLHDRIRVVVSSFFVKVLQLPWRWGMKYFWDTLLDADLESDALGWQYISGTLPDGREFDRIDNPQFEGYKCDPNGEYVRRWLPELARLPTEWIHHPWNAPESVLQAAGIELGSNYPLPIVEIDAATVRLEEALIQMWQLEAASRTAAENGTEEGLGDSTESAPIAFPQDIQMEERHEPVRNNPPHGTRRYQDQMVPSMTYSRVRVEDEETSSVRNSAGDSRAEVPTNANTQQNGREPMDQGMLQNVNRNTRQRRNNTTTTFWLRNAAEDSTAESSSSTRRERDGGVVPEWSPQASNFSDQFVDDENGIGATSPYLQRHPQTHQMMSWTRLPQTG

SEQ ID NO: 3457 - protein, 596 aa, Arabidopsis thaliana
MEAKIVKVLDSSRCEDGFGKKRKRAASYAAYVTGVSCAKLQNVPPPNGQCQIPDKRRRLEGENKLSAYENRSGKALVRYYTYFKKTGIAKRVMMYENGEWNDLPEHVICAIQNELEEKSAAIEFKLCGHSFILDFLHMQRLDMETGAKTPLAWIDNAGKCFFPEIYESDERTNYCHHKCVEDPKQNAPHDIKLRLEIDVNGGETPRLNLEECSDESGDNMMDDVPLAQRSSNEHYDEATEDSCSRKLEAAVSKWDETDAIVVSGAKLTGSEVLDKDAVKKMFAVGTASLGHVPVLDVGRFSSEIAEARLALFQKQVEITKKHRGDANVRYAWLPAKREVLSAVMMQGLGVGGAFIRKSIYGVGIHLTAADCPYFSTNYELVYSARYCDVDENGVRYMVLCRVIMGNMELLRGDKAQFFSGGEEYDNGVDDIESPKNYIVWNINMNTHIFPEFVVRFKLSNLPNAEGNLIAKRDNSGVTLEGPKDLPPQLESNGARGSGSANSVGSSTTRPKSPWMPFPTLFAAISHKVAENDMLLINADYQQLRDKKMTRAEFVRKLRVIVGDDLLRSTITTLQNQPKSKEIPGSIRDHEEGAGGL

SEQ ID NO: 3458 - protein, 315 aa, Zea mays
FTIYNFGTQKEVSNWGLFFCVSIGLWAGLIIGFVTEYYTSNAYSPVQDVADSCRTGAATNVIFGLALGYKSVIIPIFAIAVSIYVSFSIAAMYGIAVAALGMLSTIATGLAIDAYGPISDNAGGIAEMAGMSHRIRERTDALDAAGNTTAAIGKGFAIGSAALVSLALFGAFVSRAGVKVVDVLSPKVFIGLIVGAMLPYWFSAMTMKSVGSAALKMVEEVRRQFNTIPGLMEGTAKPDYATCVKISTDASIKEMIPPGALVMLTPLIVGTLFGVETLSGVLAGALVSGVQICICGFNTGCAWDNAMKYPSRRAL

SEQ ID NO: 3459 - protein, 229 aa, Magnolia praecocissima
MARGKIQIKKIDNVTARQVTFSKRRRGLFKKAEELSILCDAEVALIIFSATGKLFEYSSSSMKEIIERHTMHSKNLQKLDQQPSLELQLENSNYNRLSKQVAEKSHLIRQMRGEDIQGLTVEELQKLEKTLETGLSRVMERKAEQIMKEISGLQIKGVKLMEENMRLRQRIIEMSRGDSKGDRQIIESEIVVNEDGQSSDSVTNACNSGAPQDYESSDTSLKLGVPFSS

SEQ ID NO: 3460 - protein, 503 aa, Zea mays; identical to SEQ ID NO: 940

SEQ ID NO: 3461 - protein, 150 aa, Brassica napus
MSRRKTREPKEETVTLGPAVRDGEQVFGVVHIFASFNDTFIHVTDLSGRETLVRITGGMKVKADRDESSPYAAMLAAQDVAQRCKELGITAMHVKLRATGGNKTKTPGPGAQSALRALARSGMKIGRIEDVTPVPTDSTRRKGGRRGRRL

SEQ ID NO: 3462 - protein, 584 aa, Agrobacterium vitis
MSLLQIYWRALQYLAAYRLKVSLVVAANIILAVITIAEPILFGWIIDAISSGKPDKDILFLWGGFGIFNTIAFVLVAREADRLAHGRRASLLTEAFGRIISMPLSWHHQRGTSNALHTLLRASETLFGLWLEFMRTHLATAVALVLLVPTAFSMDVRLTLVLIVLGLIYVAIGKMVMDKTKDGQASVESHYHTVFSHVSDTISNVSVVHSYNRIQAETSALKTFTSKLLDAQYPVLDWWAIASGLNRIASTASMLIILIIGTMLVQSGELRVGDVIAFIGFANLLIARLDQMRQFSTQIFEARAKLEDFYVLEDSVQDRDEPVGNRDLKSVRGDVEFRHVSFDFANTTQGVKDVSFTVKAGQTIAIVGPTGAGKTTLINLLQRVHEPQQGQILIDGADISTITRQSLRNSIATVFQDAGILNRSIADNIRIGRENATDEDIVKAAEAAAATDFIESRLSGFDTDVGERGNRLSGGERQRIAIARAILKDAPILVLDEATSALDVETEERVKSAIDRLRQNRTTFIIAHRLSTVREADQVLFLDHGRIVEMGGYDELSAKGGRFAALLHTSGLLNDDDKTAVKVG

SEQ ID NO: 3463 - protein, 369 aa, Capsicum annuum
MCGGAIISDLVPPSRISRRLTAELLWGNSDLSKKKKNPGNYYSKPLNRSKFIDLDEEFEADFQDFKDYADDDVDDVKPFGSKSVKSGDSSCDTEKSSKRKRKNQYRGIRQRPWGKWAAEIRDPRKGIRVWLGTFNSAEEAARAYDVEARRIRGKKAKVNFPDGSPASASRRAVKPNPQEALREEILNTVQPNTTYINNLDGGSDDSFGFFEEKPAAKQYGYENVSFTAGDMGLGSISPSTGTTNVYFSSDEGSNTFDCSDFGWGEPCPRTPEISSVLSEVLECNGTQSDEDARPEKKLKSCSNASLPDEDNTVHTLSEELSAFESQMKFLQIPYLEGNWDASVDAFVNTGAIQDGGNAMDLWPSMMFLL

SEQ ID NO: 3464 - protein, 546 aa, Thiobacillus denitrificans ATCC 25259
MTKYVFVTGGVVSSLGKGIASASLAALLESRGLRVTLLKLDPYINVDPGTMSPFQHGEVFVTDDGAETDLDLGHYERFSSARMSKRNNFTTGQIYKSVIDKERRGDYLGGTVQVIPHITDEIKLSIREGAKGADVALVEIGGTVGDIESLPFLEAIRQMGFEDGPANTCFIHLTLLPYIPTAGELKTKPTQHSVKELREIGIQPDILLCRADREIPLDERRKIALFTNVRPEAVIEVLDADSIYKIPAMLHEQMLDEIVCHKLNILARAADLSVWKRLVDALEHPEHTVNIAFVGKYVDLTESYKSLSEAMIHAGMHTKSRVKIHYVDSEQIEKSGVDCLRGMDAILVPGGFGKRGVEGKIAAIRYARENRVPYLGICLGMQLAVVEFARDVAGMADAQSTEFDPTTNHPVIGLITEWLDRTGQVEKRSEQSDLGGTMRLGGQPCTLKNGTLAREIYGADSIVERHRHRYEVNNTLLSELEAKGLVVAGRAPGTELCEMVELPPAVHPWFVGCQFHPEFTSNPRNGHPLFISFVRAALAHQQKDSA

SEQ ID NO: 3465 - protein, 453 aa, Treponema denticola ATCC 35405
MYDLIVLGGGPGGYVAAIKAGRAGLKTALIEKNRLGGTCLNKGCIPTKYLLHTAEVFGSFAENDLGLSGENLKYDIKAIYEKKNAVVDKLVGGIEKLIENAGVDFYNGEGKITSKSSVSVNGKELEFKNLIIATGSSVFAPPIAGIETAMTSDDILGKEPVDFKSVIIIGGGVIGIEFATVYANLGKEVTIVELEKTILPPFDRDIAMQQAIVLKKRGVKIINGAMVTKIEKTGCTFTLKEKEESITADAVIVCIGRIAEIKDIGLDSAGIEYDKRGIITDACMKTNVEGIYAIGDAVKGNVMLAHNAENQGHLVVENIVNNTKHEKQDVIPSCVYSTPEIAGVGLSEKEAEAKGITVKIGKVPMGSNGKSVLSGLDVGFIKVLFNEEDRIVGCQMMCDSATDMIGAIGTLVTNKAKRENILKSMYPHPTVVEAFYEAVEDVEKSATHMIYKK

SEQ ID NO: 3466 - protein, 491 aa, Bacillus clausii KSM-K16
MKIEINRHSDIPIAQQIQENIADRIRSNLLEEGSKLPSVRKLAEQTGVSLMTANKAYNHLEKQGLIEKVQGKGTFVRKSSGASKTENEKKLLSYDWQLTVTDYLPRAQYMQFNTGKEKIQFSSSKIWPNLLPNRYLIKETIQILSEEPYILSTYGEGRGDITLRKEMSAYLKHLKIAIEPDDIVITNGVQQGIDIVARSFVGPGDVVVTETPTYSAAIDVFRGRGASIVSIPVDENGMRVDLLPSLKNKPKVIYTIPSFQNPTGTLLSKKRRQLLLDFAQSNEIIIIEDDSWSEIYFDSKPPLPIKSLDEYGHVIYLKGLSKTLSPGCRIGVMATSGTNLNRIIAAKTITDLGTPLLNQKAVLSFLRSNRMKEHIKKLRIALKLRRDRVIDLLTVYAPKEVTWIVPKGGVNIWISLPPWVDTNEMLFEAKKFGISFLPGSACYPKEPAMNHLRLCFAAVDDQLLETGIKTLCKIFTTFIEERNEESNMPLV

SEQ ID NO: 3467 - protein, 208 aa, Glycine max
  misc_feature (151)..(151): Xaa can be any naturally occurring amino acid
  unsure (1)..(208): unsure at all Xaa locations
MLIRGSTPLYSRSSSFGRLYPCLSNDWGELPLMEDDSEDMLLYGVLRDAVNVGWVPSLDASSPESFSSAFMPPVTVKSETDLFPAPEPICNPPVVQGPAPAVVPAKGKHYRGVRQRPWGKFAAEIRDPAKNGARVWLGTFETAEDAALAYXDRAAYRMRGSRALLNFPLRINSGEPEPVRVTAKRASAEPCSSSESGSWVKKRKKVVG

SEQ ID NO: 3468 - protein, 217 aa, Frankia sp. CeD
LFASEKLAVATKKTSPQMRRDLEAIERDGQIAKRKLVEANLRLVVSIAKRYVGRGMLFLDLIQEGNLGLIRAVEKFDYTKGYKFSTYATWWIRQAITRAIADQARTIRIPVHMVETINKLIRIQRQLLQDLGREPSPEEIAKEMDLTPDKVREILKVSQEPVSLETPIGEEEDSHLGDFIEDCDAVVPVDAASFILLQEQLDSVLHTLSDREKKVIQ

SEQ ID NO: 3469 - protein, 577 aa, Francisella tularensis subsp. tularensis SCHU S4
MTKEDLLSDLKDLMIDGRERGYLTRADILDALPGDVSEDPKIYEEIEAILIDAGIDVYDRTPQIEEDDERKVSEANLDDLKGKTSDPIRMYMREMGIVDLLDKKGETDIAIRIEEGTTEVFSTILSYPIVIKTYIERFRELEEKAIDYMNSQDIENEPVARYIRFNEVMAGFSDEQVTEEKVAEDDHEEKIDTQRAYEFFTNLEKMFEEYQDKPNKKLYTKIVKEFDNLRLSTSHLQKLVDYIRLPYARVKEFERKILRLCVERSKTPRQEFIKVYKVGSLEWLEPLTKKYKFTENTIREIKNLTKQINQFQILMMMDIEELKQVNLEISRSEAKITQAKKEMIEANLRLVVSEAKKYTNRGLHFLDIIQEGNIGLMKAVDKFDYRKGFKFSTYATWWIRQAITRSIADQARTIRVPVHMIETINKVNRIKRQILQEKGREATEEEIIEHTPNMTKEKLKKILNISHTPISMESPIGDDEDSTVGDFIEDKSNYSPIEAANLENLREAIKELIETGLTEREAKVLMMRFGIGMNTDHTLEEVGKQFNVTRERIRQIEAKALRKLKHPSRSAFLKTFL

SEQ ID NO: 3470 - protein, 242 aa, Arabidopsis thaliana
MCALVPPLYPNFGWPCGDHSFYETDDVSNTFLDFPLPDLTVTHENVSSENNRTLLDNPVVMKKLNHNASERERRKKINTMFSSLRSCLPPTNQTKKLSVSATVSQALKYIPELQEQVKKLMKKKEELSFQISGQRDLVYTDQNSKSEEGVTSYASTVSSTRLSETEVMVQISSLQTEKCSFGNVLSGVEEDGLVLVGASSSRSHGERLFYSMHLQIKNGQVNSEELGDRLLYLYEKCGHSFT

SEQ ID NO: 3471 - protein, 750 aa, Nicotiana sylvestris
IQAAFRTDEIRRTPPTPQDEMRAGMSYFHETIWKGVPKFLRRVDTALKNIGIDERVPYNAPLIQFSSWMGGDRDGNPRVTPEVTRDVCLLARMMAANLYYSQIEDLMFALSMWRCNDDCRVRSDEVLHSSSRRDAKHYIEFWKQVPPNEPYRVILGDVRDKLYQTPERARQLLAHGYSEIPEEATYTNIEQFLEPLELCYRSLCACGDRSIADGSLLDFLRQVSTFGLSLVRLDIRQESDRHTDVLDAITQHLEIGSYREWSEERKQEWLLSELSGKRPLFGPDLPKTEEIADVLDTFHVIAELPADCFGAYIISMATAPSDVLAVELLQRECRVKQPLRVVPLFEKLADLDAAPAAVARLFSVEWYRNRINGKQEVMIGYSDSGKDAGRLSAAWQLYKAQEELVKVAKEYGVKLTMFHGRGGTVGRGGGPTHLAILSQPPDTIHGNLRVTVQGEVIEQCFGEEHLCFRTLQRFTAATLEHGMHPPVSPKPEWRALMDEIAVVATEKYRSIVFKEPRFVEYFRLATPELEYGRMNIGSRPSKRKPSGGIESLRAIPWIFAWTQTRFHLPVWLGFGAAFKYAINKDIKNLRMLQEMYNAWPFFRVTIDLVEMVFAKGNPSIAALYDKLLVSEDLWSFGEQLRSNYEETKSLLLQIAGHKDLLEGDPYLRQRLRLRDSYITTLNVCQAYTLKRIRDPNYSVTPRPHISKEYMESKPAAELVKLNPTSEYAPGLEDTLILTMKGIAAGMQNTG

SEQ ID NO: 3472 - protein, 269 aa, Pseudomonas syringae pv. syringae B728a
MSRLEHRFAQLKTEGRAALVTFITAGDPGYDTSLKVLKGLPAAGADVIELGMPFTDPMADGVAIQLATLRALDAGQTLQKTLQMVSEFRVDDQTTPIVLMGYYNPIHRFGVEAFVAQAKEAGVDGLIIVDLPPEHDAELATPAQASGIDFIRLTTPTTDDARLPRVLERSSGFVYYVSVAGVTGAGSATTEHVTEAIARLRRHTDLPISVGFGIRTPEQAAAIARLADGVVVGSAFVDKIASAESPEHAIDGVLTLCAALAEGVRSARR

SEQ ID NO: 3473 - protein, 217 aa, Frankia sp. ARgP5ag
LFASEKLAVATKKTSPQMRRDLEAIERDGQIAKRKLVEANLRLVVSIAKRYVGRGMLFLDLIQEGNLGLIRAVEKFDYTKGYKFSTYATWWIRQAITRAIADQARTIRIPVHMVETINKLIRIQRQLLQDLGREPSPEVIAKEMDLTPDKVREILKVSQEPVSLETPIGEEEDSHLGDFIEDCDAVVPVDAASFILLQEQLDSVLHTLSDREKKVIQ

SEQ ID NO: 3474 - protein, 555 aa, secondary endosymbiont of Bemisia tabaci
MAAKDLKFGNDARKKMLKGVNILANAVKVTLGPKGRNVVLDKSYGAPSITKDGVSVAREIELEDKFENMGAQMVKEVASKANDAAGDGTTTATVLAQSIVTEGLKAVAAGMNPMDLKRGIDKAVEAAVEELKIISKPCKDSKEIAQVGTISANADAKVGKLISDAMKRVTNEGVITVEEASGLEDDLIVVEGMQFDRGYLSPYFINKQESSSIEFDNPYILLVDKKISNIRDMLSILEVVAKEGKPLLIIAEDVEGEALATLVVNTMRGIVKVSAVKAPGFGDRRKEMLQDIAVLTHGHVISEETGDSLEKATKENLGNAKRVVITKDATTIIDGAGEKSKIEARIQNIKKQIENATSDYDKEKLQERVAKLSGGVAVIKVGAPTEIAMKEKKARVEDALQATRAAVEEGVVPGGGVALIRVASKIANSSLKGDNEDQNVGIRVALRAMESPLRQIVVNAGEEASVIANKIKENKGNDNYGYNAQTEAYGDMIEMGILDPTQVTRSALQYAASIAGLMITTECMVTDLPKEEKASDMGAGGMGGIGGMGGMNGMM

SEQ ID NO: 3475 - protein, 443 aa, Escherichia coli CFT073
MCVPEMIKKELVMVSLEKNDHLMLARQLPLKSVALILAGGRGTRLKDLTNKRAKPAVHFGGKFRIIDFALSNCINSGIRRMGVITQYQSHTLVQHIQRGWSFFNEEMNEFVDLLPAQQRMKGENWYRGTADAVTQNLDIIRRYKAEYVVILAGDHIYKQDYSRMLIDHVEKGARCTVACMPVPIEEASAFGVMAVDENDKIIEFVEKPANPPSMPNDPSKSLASMGIYVFDADYLYELLEEDDRDENSSHDFGKDLIPKITEAGLAYAHPFPLSCVQSDPDAEPYWRDVGTLEAYWKANLDLASVVPELDMYDRNWPIRTYNESLPPAKFVQDRSGSHGMTLNSLVSGGCVISGSVVVQSVLFSRVRVNSFCNIDSAVLLPEVWVGRSCRLRRCVIDRACVIPEGMVIGENAEEDARRFYRSEEGIVLVTREMLRKLGHKQER

SEQ ID NO: 3476 - protein, 555 aa, secondary endosymbiont of Bemisia tabaci
MAAKDLKFGNDARKKMLKGVNILANAVKVTLGPKGRNVVLDKSYGAPSITRDGVSVAREIELEDKFENMGAQMVKEVASKANDAAGDGTTTATVFAQSIVTEGLKAVAAGMNPMDLKRGIDKAVEAAVEELKIISKPCKDSKEIAQVGTISANADAKVGKLISDAMKRITNEGVITVEEASGLEDGLIVVEGMQFDRGYLSPYFINKQESSSIEFDNPYILLVDKKISNIRDMLSILEVVAKEGKPLLIIAEDVEGEALATLVVNTMRGIVKVSAVKAPGFGDRRKEMLQDIAVLTHGHVISEETGDSLEKATKENLGNAKRVVITKDATTIIDGAGEKSKIEARIQNIKKQIENATSDYDKEKLQERVAKLSGGVAVIKVGAPTETAMKEKKARVEDALQATRAAVEEGVVPGGGVALIRVASKIANSSLKGDNEDQNVGIRVALRAMESPLRQIVVNAGEEASVIANKIKENKGNDNYGYNAQTEAYGDMIEMGILDPTKVTRSALQYAASIAGLMITTECMVTDLPKEEKASDMGAGGMGGIGGMGGMNGMM

SEQ ID NO: 3477 - protein, 469 aa, Agrobacterium tumefaciens str. C58
MSAVAFMGVRSVMNEVSKPMSNLAAIDAAHHLHPFSDMGKLNAAGTRIIERAEGVFIYDSTGKKYLDAFAGLWCVNIGYGRREIADVVQRQMNELPYYNAFFGTTTPPATLLAQKIASRAGPKMNHVFFTNSGSEATDTWFRMARVYWKALGHPTKTRVIARRNGYHGSTVAGASLGGMKWMHEQGNLPIEGIAHIGQPYWYAEGGDLSPAEFGLKVARELDAKIDELGEENVAAFVAEPIQGAGGVIVPPETYWPEIARICKARNILLVSDEVICGFGRLGSWFGYQHFGVEPDLAPVAKGLSSGYLPIGGVIVSDRVAEVMLSEVGDFNHGFTYSGHPVCAAAALENLRIIEDEGLVERVRDDIGPYFSEGWKSLADHELVGEAVNVGLMGGLQLTADKATRRRFAKPDDIGTAVRNHCLANGLVMRATGDRMLASPALTVSRSEVDEIIETLRQGLNHLRDTREHF

SEQ ID NO: 3478 - protein, 106 aa, Arabidopsis thaliana
  misc_feature (7)..(8): Xaa can be any naturally occurring amino acid
  misc_feature (17)..(17): Xaa can be any naturally occurring amino acid
  misc_feature (21)..(21): Xaa can be any naturally occurring amino acid
  misc_feature (30)..(30): Xaa can be any naturally occurring amino acid
  misc_feature (34)..(35): Xaa can be any naturally occurring amino acid
  misc_feature (42)..(42): Xaa can be any naturally occurring amino acid
  misc_feature (51)..(51): Xaa can be any naturally occurring amino acid
  misc_feature (69)..(69): Xaa can be any naturally occurring amino acid
  unsure (1)..(106): unsure at all Xaa locations
GNNRHYXXRMMVLRAIXLMGXCNGSEITCXKFLXXVVEASKXRVPNIKFNXVAKLLQSLIPIVDQSVVXKTIRQCLVDLSEDPDVDVRYFANQALNSIDGSTAAQS

SEQ ID NO: 3479 - protein, 84 aa, Zea mays
AADWWDAEIKSPYGRIQRGRIAYRSAYEFKAHTDKNGVPLDAHEKFSKPKQVEKPVIDPSKKDLGLALNGNQKIVLEALEAISE

SEQ ID NO: 3480 - protein, 274 aa, Pseudomonas putida KT2440
MALAHNLGFPHIGRDRELRARHWQVQKDAGIELLPVGDFAWDSHVLSAGDQPFVLNWEPLFEEVEHAKALGHAVKPVVIGPLTYLWQGQTLGGDFDKLELLDRLLPVYDQLLNRLAALGVEWVQIDEPILAQALPQDWKNAYERVYNILQRAPLKKLIATYFGGLEGNLGLAANLPVDGLHVDLVQAPEQYQTILDRLPAYKVLSLGLVDGRNASPCDLGKTLGLLHEAHERLGERLWLAPACSLLEIPVELAVQKCQEVAVLAASLEQDRVAA

SEQ ID NO: 3481 - protein, 629 aa, Pisum sativum
MGSNRTIVWFRRDLRIEDNPALAAAARDGSVFPVFIWCPKEEGQFYPGRVSRWWLKQSLAHLDQSLKSLGAKLVLIKTDSTLNALLECVNAIQATKVVFNHLYDPVSLVRDHNIKEKLVELGISVKSYNGDLLYEPWELYDEKGHAFTTFDPFWERCLHKQMEPVSLIPPWQLIPAKGKVERCSIEDLGLENELEKPSNALLGRAWSPGWGNANKALTEFMDKQLLNYSKNRQKVGGDSTSLLSPYLHFGELSVRKVFQMARVKQISWGNEGNSVGKESVTLFLRAIGLREYSRYLCFNFPFTHERALLGHLSFFPWNADPSNFKTWRQGRTGYPLVDAGMRELWATGWMHNRIRVIVSSFAVKMLLLPWKWGMKYFWDTLLDADLECDILGWQYISGCLPDGHELERLDDPEILGAKFDPEGEYVRQWLPELARMPTEWIHHPWNAPLSVLRASGVELGQNYPNPIIDIDLAREKLTQAIFKMWEIQAASKASGSEARDEVVVDNENQDIPKVILKDKGPCVTISANDQKVPALPDPKNELPVRKRKKGMEEKGKEQESSVNNEKDSKVSSPDQETCSTADSSACKKQCSTSTYTFSVPQQCSSSSNLKWSWQEQIDMEQSSGKDGPT

SEQ ID NO: 3482 - protein, 174 aa, Triticum aestivum
  misc_feature (28)..(28): Xaa can be any naturally occurring amino acid
  unsure (1)..(174): unsure at all Xaa locations
MEINSSGEETVIKVRKPYTITKQRERWXTDAEHKRFLEALKLYGRAWQRIEEHVGTKTAVQIRSHAQKFFTKLEKEAINNGTSPGQAHDIDIPPPRPKRKPNCPYPRKGCLSSETPTREVPKSSVSLSNSNAEMASNGTLQLTCIRKLQRKELSENGSCSKVINIFREAPSASF

SEQ ID NO: 3483 - protein, 323 aa, Pseudomonas putida KT2440
MPIPVTVLTGFLGAGKTTLLKYMLKAEHGLKLAVIENEFSEAGIDSQLLGEQPVQVMTLANGCVCCSIHGDLTRALYLLLERLDAGEIAFDRLVIECTGLADPAPVAQTFFIDEELRERYILDGIITLVDAAHAELHLTQTIAQAQVGFADRLLLSKTDLVEPAAVEALRERLARINSRAAIRVVEHGCIDLAELLDVRGFNLNPDLGVNLKPMLRPVLKPATPDRISTMVLRTEAPLDIDRLSSFMNELLETHGKQLLRYKGVLNIAGEERKLVFQGVLKLYGFDWDAEWAAGEARESVMVFIADELPEATIRAGFEAMAAG

SEQ ID NO: 3484 - protein, 421 aa, Sinorhizobium meliloti
MRRVVITGTGMVSPLGCGTEVSWARLLTGDNAARKVTEFEVEDLPAKIACRIPFGDGSDGTFNADDWMEPKEQRKVDPFIVYAMAAADMALADAGWKPESDEDQISTGVLIGSGIGGLEGIVDAGYTLRDKGPRRISPFFIPGRLINLAAGQVSIRHKLRGPNHSVVTACSTGAHAIGDASRLIALGDADVMVAGGTESPICRISLAGFAACKALSTQHNDNPEKASRPYDADRDGFVMGEGAGIVVLEELEHARARGAKIYAEVIGYGLSGDAFHITAPSEDGEGAYRCMQMALKRAGVTAADIDYINAHGTSTMADTIELGAVERLVGDSASRISMSSTKSAIGHLLGAAGAVEAIFSALAIRDNIAPPTLNLDNPSVETKIDLVPHVARKREINVALSNSFGFGGTNASLILRRYTGH

SEQ ID NO: 3485 - protein, 607 aa, Solanum tuberosum
MASITASHHFVSRSQTSLDTKSTLSQIGLRNHTLTHNGLRAVNKLDGLQSRTNTKVTPKMASRTETKRPGCSATIVCGKGMNLIFVGTEVGPWSKTGGLGDVLGGLPPALAARGHRVMTISPRYDQYKDAWDTSVAVEVKVGDSIEIVRFFHCYKRGVDRVFVDHPMFLEKVWGKTGSKIYGPKAGLDYLDNELRFSLLCQAALEAPKVLNLNSSNYFSGPYGEDVLFIANDWHTALIPCYLKSMYQSRGIYLNAKVAFCIHNIAYQGRFSFSDFPLLNLPDEFRGSFDFIDGYEKPVKGRKINWMKAGILESHRVVTVSPYYAQELVSAVDKGVELDSVLRKTCITGIVNGMDTQEWNPATDKYTDVKYDITTVMDAKPLLKEALQAAVGLPVDKKIPLIGFIGRLEEQKGSDILVAAIHKFIGLDVQIVVLGTGKKEFEQEIEQLEVLYPGKVKGVAKFNVPLAHMITAGADFMLVPSRFEPCGLIQLHAMRYGTVPICASTGGLVDTVKEGYTGFHMGAFNVECDVVDPADVLKIVTTVARALAVYGTLAFAEMIKNCMSEELSWKEPAKKWETLLLGLGASGSEPGVEGEEIAPLAKENVATP

SEQ ID NO: 3486 - protein, 598 aa, Pisum sativum
MGMNRTIVWFRRDLRIEDNPALAAAARDGSVFPVFIWCPKEEGQFYPGRVSRWWMKQSLVHLDQSLKSLGAGLVIIKTDSTLKALLECVNAVQATKVVFNHLYDPVSLVRDHNIKEKLVEQGVSVQSYNGDLLYEPWEIFDESGHAFTTFDPFWNTCLHMQMKTYSPIPPCQLILAQGKVEKHSIEQLGLEDELEKSSNSSLGRSWSPGWSKSDKALAEFIENYLLHYSGNRLNLGGDSTSLLSPYIHFGELSVRKVFQLARTKQILWTHEGNIIGEESATLFLRAIGFREYSRYLCFSFPFTLERPLLGNLKFFPWNNDPSNFKAWRQGRTGYPLVDAGMRELWATGWIHNKMRVIVSSFAVKMLLIPWKWGMKYFWDTLLDADLESDILGWQYISGSLPDGHKLERLDDPEVLGRKYDPAGEYIRQWLPELARMPAEWIHHPWDAPLTVLTASGVELGQNYPKPIIDIDLAREQLTQAILKMWETEAATEASSSQDRHEVVDENEKLLIPKVFLKDKVPRGATSANDQTVPILQNLKSDDPPNKRQKCTAEEDRKPDKSRNRSDHTEVSCIDQEDCSTAESSSKRQSSSTSSFSVP

SEQ ID NO: 3487 - protein, 208 aa, Magnolia praecocissima
NRQVTFCKRRNGLLKKAYELSVLCDAEVALIVFSSRGRLYEYANNSVRNTIDRYKKACADSSSLGCVSEANSQYYQQESSKLRQQIALLQNANRHLMGEALSSMTVKELKQLENRLEKGISRIRSKKNELLFAEIEYMQKREVDLQNDNMYLRAKITENERAQQQMGMLPAPEYDVMPGFDSRNFLQVNLMDSSHHYSHQEQTALQLG

SEQ ID NO: 3488 - protein, 505 aa, Pseudomonas putida KT2440
MTTSPSTSPAKRPEDENLGLGANLAYGLQHVLTMYGGIVAVPLILGQAAGLNGAEIGMLIAASLFAGGLATLLQTLGLPFFGCQLPLVQGVSFAGVATMGAILSSEGGGGLPGVLGAVMAASLIGFLITPVFSRITKFFPPLVTGIVITTIGLTLMPVAARWVMGGNSASPEFGSMANIGLAALTFAIVLLLSKLGSATISRLSILLAMVVGTLIAWALGMTDFSKVGEGPMFAFPTPFHFGMPEFHIAAILSMCIVIMVTLVETSADILAVGEIIDTKVDSKRLGNGLRADMASSILAPIFGSFTQSAFAQNVGLVAVTGVKSRYVVATGGVILVVLGLLPVMGRVIAAVPTPVLGGAGIVLFGTVAASGIRTLSKVSYKNNVNLIIVAASLGFGMIPIAAPTFYHHFPNWFETIFHSGISSAAIMAILLNLIFNHFTTGNSENQSVFAAAYERTIQYSDISALRDGDYFKDGKLFDAEGNEVPMLELDEHGNETVRRTAVAEH

SEQ ID NO: 3489 - protein, 340 aa, Rhodobacter sphaeroides 2.4.1
MRVYYDRDCDINLIKDKKVAILGYGSQGHAHALNLRDSGAKNVVVALREGSPSAKKAEAEGLKVMGIAEAAAWCDLIMFTMPDELQAETYRKYVHDNLREGSAIAFAHGLNVHFGLIEPKPGVDVIMMAPKGPGHTVRGEYVKGGGVPCLVAVHNDATGKAMEIGLSYCSAIGGGRSGIIETNFRQECETDLFGEQAVLCGGLVELIRMGFETLVEAGYEPEMAYFECLHEVKLIVDLIYEGGIANMNYSISNTAEYGEYVSGPRILPYEETKARMKAVLTDIQTGKFVRDFMQENAVGQPFFKATRRINDEHQIEQVGEKLRGMMPWISKGKMVDRARN

SEQ ID NO: 3490 - protein, 494 aa, Brassica juncea
MVLSRAATESGENVCSTFGSRYVRTALPKHKIGESSIPKEAAYQIIKDELMLDGNPRLNLASFVTTWMEPECDKLIMESINKNYVDMDEYPVTTELQNRCVNMIARLFNAPLEETETAMGVGTVGSSEAIMLAGLAFKRNWQNKRKAEGKPYDKPNIVTGANVQVCWEKFARYFEVELKEVKLSEGYYVMDPDKAAEMVDENTICVAAILGSTLNGEFEDVKRLNDLLVKKNEETGWNTPIHVDAASGGFIAPFIYPELEWDFRLPLVKSINVSGHKYGLVYAGIGWVVWRTQQDLPDELIFHINYLGADQPTFTLNFSKGSSQIIAQYYQLIRLGFEGYKNVMENCRENMVVLREGIEKTERFNIVSKEVGVPLVAFSLKDHSFHNEFEISEMLRRFGWIVPAYTMPADAQHITVLRVVIREDFSRTLAERLVADIVKVLHELDTLPSKISKKMGAEDFGNVKGKKVDRDVLMEVIVGWRKFVKDRKKMNGVC

SEQ ID NO: 3491 - protein, 371 aa, Frankia sp. CcI3
MSNPLSELSAAGVAVWLDDISRDRLRTGNLAHLVENRGVVGVTSNPTIFQKAISSSDLYDEQLHDLAIRGVDVGEAVRAITAADVRDACDVLRGVYDASGGVDGRVSLEVDPRLAHEAERTLAEARALWWLVDRPNLFIKIPATRAGLSAITETLAQGISVNVTLIFGLDRYDAVIDAFMTGLEKALAAGRDITDLASVASFFVSRVDTEVDQRLEKIGTSEAKALRGRAAVANARLAFERYEKAFATPRWAALAAAGAKPQRPLWASTSTKDPSLPDTIYVTELIAPGTVNTMPEATLEAFADHGSVTGETIRPRYEEAHEVFAQLTAVGIDLDDVIETLESQGVQKFEDSWTQLLDTIAAHLGSAGSSA

SEQ ID NO: 3492 - protein, 584 aa, Mycobacterium avium subsp. paratuberculosis K-10
MIQQHRYDVVIVGAGGAGMRAAVEAGPRVRTAVLTKLYPTRSHTGAAQGGMCAALANVEEDNWEWHTFDTVKGGDYLADQDAVEIMCKEAIDAVLDLEKMGMPFNRTPEGRIDQRRFGGHTRDHGKAPVRRACYAADRTGHMILQTLYQNCVRHDVQFFNEFYALDLVLTQTPSGPVASGVVAYELATGDIHVFHAKAVVLATGGSGRMYKTTSNAHTLTGDGIGIVFRKGLPLEDMEFHQFHPTGLAGLGILISEAVRGEGGRLLNGEGERFMERYAPTIVDLAPRDIVARSMVLEVLEGRGAGPHKDYVYIDVRHLGEDVLESKLPDITEFARTYLGVDPVHELVPVYPTCHYVMGGIPTTVTGQVLRDNTSTVPGLYAAGECACVSVHGANRLGTNSLLDINVFGRRAGIAAANYARGHDFVDMPPDPAAMVVRWVADILSEHGNERVADIRGTLQQSMDNNAAVFRTEETLKQALTDIHACKERYSRIRIHDKGKRFNSDLLEAIELGFLLELAEVTVVGALNRKESRGGHAREDYPNRDDVNYMRHTMAYKQGTDLLSDIALDFKPVVQTRYEPKERKY

SEQ ID NO: 3493 - protein, 215 aa, Rhodobacter sphaeroides 2.4.1
MVADRFSHVRGWVFDLDNTLYPPSARLFDQIERRMTDWVMTELRVVREEADRLRRHYWSTYGTTLAGLMAEHGVDPAPYLSHVHDISLDHLERDMILAARIRALPGRKIVYTNGCAPYAERVLEARGLANLFDAVYGVEHAGFRPKPDRAAFETVFAADRLAPGTAAMFEDDSRNLLAPHEMGMRTVHVAPEALPAPHIHHHTLDLSEFLALLQP

SEQ ID NO: 3494 - protein, 185 aa, Dechloromonas aromatica RCB
MFSSLKRCFGIAALITVGVVPVAAAAECPPLLNHSFASLQDGKPMPLCQYAGKVILVVNTASYCGFTSQYDGLEKLYARLKDKGLVVLGFPSNDFGEQEPGSEKEIADFCRLTYGVEFPMVSKTVVKGKGAHPFYLKLAEITGSKPKWNFHKYLINRDATQVVAYTSFTKPDDKDLLKKIDEFLK

SEQ ID NO: 3495 - protein, 173 aa, Magnolia praecocissima
  misc_feature (171)..(171): Xaa can be any naturally occurring amino acid
  unsure (1)..(173): unsure at all Xaa locations
KKAYELSVLCDAEVALIVFSPRGKLYEFGNAGMQKTIDRYLKHSKDTNINKAAVEQNVQLWKYEAAHMSKKIEILEDSKRKLLGESLESCSIEELQHIENQLERSLKNIRGRKSQLYVEQIKQLKEKERILSEENTVLIEKCGLRPQEPSTIQREIVPYDQGTQDQEVELXCT

SEQ ID NO: 3496 - protein, 482 aa, Pseudomonas aeruginosa UCBPP-PA14
MEEKTRLTTAAGAPVVDNQNVQTAGPRGPMLLQDVWFLEKLAHFDREVIPERRMHAKGSAAYGTFTVTHDITPYTRAKIFSQVGKKTDMFLRFSTVAGERGAADAERDIRGFSMRFYTEQGNWDLVGNNTPVFYLRDPLKFPDLNHVVKRDPRTNLRNATFKWDFFSHLPESLHQLTIDFSDRGLPKSYRHIHGFGSHTFSFINANNERFWVKFHFKTQQGIENLTNAEAAEVIAQDRESSQRDLYESIEKGDFPRWKMYVQIMPEKEAATYRYNPFDLTKVWPHGDYPLIEVGFFELNRNPDNYFAEVEQAAFTPANVVPGIGFSPDKMLQGRLFSYGDAHRYRLGVNHHQIPVNAARCPHQVYHRDGGMRVDGNNAHQRVTYEPNSFNQWQEQPDFSEPPLSLEGAADHWNHRVDDDYYSQPAALFHLFTDEQKQRLFANIAEDIRDVPEQIQRRQIGLFLKVDPAYGKGVADALGLKLD

SEQ ID NO: 3497 - protein, 820 aa, Nicotiana sylvestris
RLVVALKKSPQEVFDALKNQTVDLVFTAHPTQSIRRSLLQKHARIRNCLAQLYAKDITPDDKQELDEALQREIQAAFRTDEIRRTPPTPQDEMRAGMSYFHETIWKGVPKFLRRVDTALKNIGINERVPYSAPLIQFSSWMGGDRDGNPRVTPEVTRDVCLLARMMAANLYYSQIDDLMFEMSMWRCNDELRVRADELHSSSKRDEKHYIEFWKQIPPSEPYRVILGDVRDKLYHTCERTRQLLSNGFSDIPEEATYTNIEQFLEPLELCYRSLCLVGIDPLLMEAFLHFLRQVSTFGLSLVRLDIRQESDRHTDVLDAITQHLEIGSYREWSEERRQEWLLSELSGKRPLFGPDLPKTEEIAEVLDTFHVISELPSDCFGAYIISMATAPSDVLAVELLQRECHVKRPLRVVPLFEKLDDLEAAPAAVARLFSIEWYKNRINGKQEVMIGYSDSGKDAGRMSAAWQLYKAQEELIKVSKQYGVKLTMFHGRGGTVGRGGGPSHLAILSQPPDTIQGSLRVTVQGEVIEQSFGEEHLCFRTLHGFTSATLEHGMNPPLSPKPEWRALLDEIAVIATEKYRSIVFKEPRFVEYFRLATPELEYGRMNIGSRPSKRKPSGGIESLRAIPWIFAWTQTRFHLPVWLGFGAAFKYALNKDVKNLHILQDMYNKWPFFRVTIDLVEMVFGKGDPGIAALYDKLLVSEDLWSFGELLRANYEETKSLLLQIAGHKDLLEGDPYLKQRLRLRDSYITTLNVCQAYTLKRVRDPNYLVTLRPHITKEYMESKPAAELVKLNPRSYAPGLEDTLILTMKGIAAGMQNTG

SEQ ID NO: 3498 - protein, 140 aa, Lotus corniculatus
NEVIKPTINGVLDIMKACQKAKTVRRLVFTSSAGTLNAVEHQKQMFDESCWGDVEFCRRVKMTGWMSLGSKTLAEQEAWKFAQEHDIDFITIIPSLVVGSFLMPTMPPSLTTALSPITGNEAHYSIIKQGQYVHFDDLCP

SEQ ID NO: 3499 - protein, 481 aa, Xylella fastidiosa Temecula1
MRPLPTLLTLSIAAAFGGFAATGMNAWLDNRAEAASNTNAISPISSLPTGTVPQTTATNQPLPSLAPMLQQVMPAVVSINSKQVVRVRNPFFDDPILRRLFPEIPQERINESLGSGVIIDARNGYVLTNHHVIENADAVQVTLADGRSFKAEFLGSDADTDIALIRIKANKLTEIKLADSNKLRVGDFVVAIGNPFGFTQTVTSGIVSAVGRSGILGLGYQNFIQTDASINPGNSGGALVNLHGQLVGINTASFNPQGSMAGNIGLGLAIPSNLARNVVEQLVTKGVVVRGTIGVQTQNIDARMAQSLGLSNPHGALVTRVLPNSAGAAAGLQPGDVILAANDQRVDNAETLHNYEGLQPVGSSVTLEVHRGGKPLKIRLTLKELPRAIAGETLDSRLSGAIFVDLPESLRQSGIGGVMVNKIKHGSRAAANGLVAGDVIIAASIGEFSDLASWRASFSHPPQRLILRVLRGNAQYDALMR

SEQ ID NO: 3500 - protein, 443 aa, Escherichia coli CFT073
MSKAPITHNTEDNTMTRRAIGVSERPPLLQTIPLSLQHLFAMFGATVLVPVLFHINPATVLLFNGIGTLLYLFICKGKIPAYLGSSFAFISPVLLLLPLGYEVALGGFIMCGVLFCLVSFIVKKAGTGWLDVLFPPAAMGAIVAVIGLELAGVAAGMAGLLPAEGQTPDSKTIIISITTLAVTVLGSVLFRGFLAIIPILIGVLVGYALSFAMGIVDTTPIINAHWFALPTLYTPRFEWFAILTILPAALVVIAEHVGHLVVTANIVKKDLLRDPGLHRSMFANGLSTVISGFFGSTPNTTYGENIGVMAITRVYSTWVIGGAAIFAILLSCVGKLAAAIQMIPLPVMGGVSLLLYGVIGASGIRVLIESKVDYNKAQNLILTSVILIIGVSGAKVNIGAAELKGMALATIVGIGLSLIFKLISMLRPEEVVLDAEDADITDK

SEQ ID NO: 3501 - protein, 214 aa, Frankia sp. ACN14a
GRGNSIATKKTSPQMRRDLEAIERDGQIAKRKLVEANLRLVVSIAKRYVGRGMLFLDLIQEGNLGLIRAVEKFDYTKGYKFSTYATWWIRQAITRAIADQARTIRIPVHMVETINKLIRIQRQLLQDLGREPSPEEIAKEMDLTPDKVREILKVSQEPVSLETPIGEEEDSHLGDFIEDCDAVVPVDAASFILLQEQLDSVLHTLSDREKKVIQ

SEQ ID NO: 3502 - protein, 345 aa, Prochlorococcus marinus subsp. pastoris str. CCMP1986
METHVERISNLQDFKKAKLDRETGLFLYEDMTLGRRFEDKCAEMYYRGKMFGFVHLYNGQEAISTGVIGAMKRKHDWFCSTYRDHVHALSAGVPSFEVMSELFGKATGCSKGRGGSMHLFSKEHHLLGGYAFIGEGIPVALGSAFSSKYKKEVVGDNQSDSVTAAFFGDGTCNNGQFFECLNMAQLWKLPIIFVVENNKWAIGMAHDRATSNPEIWRKASAFGMHGEEVDGMDVLAVRGAAQRAVERARAGEGPTLLECLTYRFRGHSLADPDELRAEEEKEFWAKRDPIKKLANQIIEGNFAQEEELKSIEKKIDLEISESVKNALDAPEPPSNELTKYIWAED

SEQ ID NO: 3503 - protein, 313 aa, Prochlorococcus marinus subsp. pastoris str. CCMP1986
MAASATTSTEPQKRRGNDPISWYLSNIGRVPLLTPAEEIELGNQVQKMMVLTEDGQLNEKTKEFTPQDKRTIKIGRRAKERMMKANLRLVVSVAKKYQGKGLELLDLVQEGSLGLERAVEKFDPTRGYKFSTYAFWWIRQSMTRAIACQSRTIRLPVHLSERLATIRKISRELAHKLGAMPSRIEIAEAMEIDVEELDSVLRQALSTSSLDAPVNGDDGRSFLGDLIADSNNEEPLDQVEQKMHQEQLGKWLSHLSEQEQHVLKLRFGLDGNERHTLAEIGRLLEVSRERVRQVELKALRKLRNLTRKLPSGI

SEQ ID NO: 3504 - protein, 255 aa, Frankia sp. ACN1ag
  misc_feature (214)..(214): Xaa can be any naturally occurring amino acid
  unsure (1)..(255): unsure at all Xaa locations
AEEEVDLAKRIEAGLFASEKLAVATKKTSPQMRRDLEAIERDGQIAKRKLVEANLRLVVSIAKRYVGRGMLFLDLIQEGNLGLIRAVEKFDYTKGYKFSTYATWWIRQAITRAIADQARTIRIPVHMVETINKLIRIQRQLLQDLGREPSPEEIAKEMDLTPDKVREILKVSQEPVSLETPIGEEEDSHLGDFIEDCDAVVPVDAASFILLQEXLDSVLHTLSDREKKVIQLRFGLTDGHPRTLEEVGREFGVTR

SEQ ID NO: 3505 - protein, 299 aa, Arabidopsis thaliana
MNSPPVDAMITGESSSQRSIPTPFLTKTFNLVEDSSIDDVISWNEDGSSFIVWNPTDFAKDLLPKHFKHNNFSSFVRQLNTYGFKKVVPDRWEFSNDFFKRGEKRLLREIQRRKITTTHQTVVAPSSEQRNQTMVVSPSNSGEDNNNNQVMSSSPSSWYCHQTKTTGNGGLSVELLEENEKLRSQNIQLNRELTQMKSICDNIYSLMSNYVGSQPTDRSYSPGGSSSQPMEFLPAKRFSEMEIEEEEEASPRLFGVPIGLKRTRSEGVQVKTTAVVGENSDEETPWLRHYNRTNQRVCN

SEQ ID NO: 3506 - protein, 939 aa, Thiobacillus denitrificans ATCC 25259
MNAPQNLLTDDDLRAQVKLLGTLLGQVLLQFAGEDVFEAVETLRRGFADLQQQEDQQRRSELMAMIDAMPAGKIELVVRAFSSYFMLVNVAEESFAHRNRRRMLSHGMTLWEGSFDHTLADLKAQGLSAGTLQGLINRLHFAPVFTAHPTEARRRAVMEAMRRIFLICDQLYSPSLGVNDQRELEAQLAAEIQIMWRTDELRSAKLEVRDEVRNGLYYVRESLFEAVPKAYSFFERALRKHYGVNGDGAAPISVPSFIRFGSWIGGDRDGNPFVTADVTEWTVHTQMQAALDEYRARVRELRQTLTHSSGWCTPSAPFLERLAEYEAEFGEQVFRGTAVQIYSREPYRRMAAMMLARLDANLSYVHQCLADVPSFTSHLAYEDAAAFLADLYLIRDSLISHGDRIIAMQDLQALIRLVESFGFHLLQLDIRQESTIHTRTVAAVLQQIDPDFDYKGADEAERLKRLSAWTGHIDPIEIDDSLLDDEARETVAVFRRMAKLKSEVGDEVFGTYIISMTHSASHVMEVMLLARLVGLCGHNGDAWFCRILVAPLFETVDDLQRSQAILDELLSNKVYRALVAADGNRQEVMLGYSDSCKDGGILASNWNLYQAQLSIIALTRRHGVECRLFHGRGGTVGRGGGPTHEAILSQPPGTVNGEIKFTEQGEMLYYKYSNPETANYEIGMGVTGLLKASATLLKKCEVRYPQDYLDWMRDIAAAGETTYRALIATPGFIDYFYENTPVTEIGTLNIGSRPSHRKKADRSLGSIRAIPWVFGWAQSRHTLPAWYGIGSALKSFVDQHPEGLAHLRAMYAEWPFFRGLLSNVQMALTKADMEIAEEYARLCDHPGTPDIYRAIADEFALTVAGVKQVAQIENLLEDNQPLALSISRRRPYIDPINHIQVRLLKRYRSESVWESEQDSWLTPLKRSINAIAAGMRNTG

SEQ ID NO: 3507 - protein, 255 aa, Frankia sp. HRX401a
AEEEVDLAKRIEAGLFASEKLAVATKKTSPQMRRDLEAIERDGQIAKRKLVEANLRLVVSIAKRYVGRGMLFLHLIQEGNLGLIRAVEKFDYTKGYKFSTYATWWIRQAITRAIADQARTIRIPVHMVETINKLIRIQRQLLQDLGREPSPEEIAKEMDLTPDKVREILKVSQEPVSLETPIGEEEDSHLGDFIEDCDAVVPVDAASFILLQEQLDSVLHTLSDREKKVIQLRFGLTDGHPRTLEEVGREFGVTR

SEQ ID NO: 3508 - protein, 481 aa, Bradyrhizobium japonicum USDA 110
MYLGIDLGTSAVKTVLVDSAQRVIASESRPLATASPRPGYSEQDPAQWVEATFATLDALKATHAGALAVVEGIGLSGQMHGATLLDASARPLRPCILWNDGRSVAECRILEQRWPALRATTGNKAMPGFTAPKLLWIATHEPEVFAATKRVLLPKAYLRLVLTGEAVEDVSDASGSLWLDAARRDWSDAALAATGLSRDHMPRLVEGCAPAATLRSELAQRWGMVRRPSFAGGAGDNPAGAVGIGAIRAGTAFISLGTSGALLVPTSRIAANPDRGVHTFCHAIPGMWIQAGAILSAASCLAWISRLFGIAEAELLAPLGSRPQVPSPVSFLPYLAGERTPHDDPVVRGMLDGLSHGTDREAIVQAVLEGVAFALADCRDVLADAGITVAEADAIGGGSRSRFWLSVLASVLNVPIHRFAEGETGAAFGAARLGRLAVTGEAIDAVCTPPRRIETFEPDRVLVDAYADRLPAWRELYRPRR

SEQ ID NO: 3509 - protein, 255 aa, Frankia sp. Flec
AEEEVDLAKRIEAGLFASEKLAVATKKTSPQMRRDLEAIERDGQIAKRKLVEANLRLVVSIAKRYVGRGMLFLDLIQEGNLGLIRAVEKFDYTKGYKFSTYATWWIRQAITRAIADQARTIRIPVHMVETINKLIRIQRQLLQDLGREPSPEEIAKEMDLTPDKVREILKVSQEPVSLETPIGEEEDSHLGDFIEDCDAVVPVDAASFILLQEQLDSVLHTLSDREKKVIQLRFGLTDGHPRTLEEVGREFGVTR

SEQ ID NO: 3510 - protein, 345 aa, Escherichia coli CFT073
MVINCAFIGFGKSTTRYHLPYVLNRKDSWHVAHIFRRHAKPEEQAPIYSHIHFTSDLDEVLNDPDVKLVVVCTHADSHFEYAKRALEAGKNVLVEKPFTPTIAQAKELFALAKSKGLIVTPYQNRRFDSCFLTAKKAIESGKLGEIVEVESHFDYYRPVAETKPGLPQDGAFYGLGVHTMDQIISLFGRPDHVAYDIRSLRNKANPDDTFEAQLFYGDLKAIVKTSHLVKIDYPKFIVHGKKGSFIKYGIDQQETSLKANIMPGEPGFAADDSVGVLEYVNDEGVTVREEMKPEMGDYGRVYDALYQTITNGAPNYVKESEVLTNLEILERGFEQASPSAVTLAR

SEQ ID NO: 3511 - protein, 463 aa, Haemophilus influenzae R2846
MKKTRFVLNSIALGLSVLSTSFVAQATLPSFVSEQNSLAPMLEKVQPAVVTLSVEGKAKVDSRSPFLDDIPEEFKFFFGDRFAEQFGGRGESKRNFRGLGSGVIINASKGYVLTNNHVIDGADKITVQLQDGREFKAKLVGKDEQSDIALVQLEKPSNLTEIKFADSDKLRVGDFTVAIGNPFGLGQTVTSGIVSALGRSTGSDSGTYENYIQTDAAVNRGNSGGALVNLNGELIGINTAIISPSGGNAGIAFAIPSNQASNLVQQILEFGQVRRGLLGIKGGELNADLAKAFNVSAQQGAFVSEVLPKSAAEKAGLKAGDIITAMNGQKISSFAEIRAKIATTGAGKEISLTYLRDGKSHDVKMKLQADDGSQLSSKTELPALDGATLKDYDAKGVKGIEITKIQPNSLAAQRGLKSGDIIIGINRQMIENIRELNKVLKTEPSAVALNILRGNSNFYLLVQ

SEQ ID NO: 3512 - protein, 349 aa, Vibrio salmonicida
MKTLISNTLLPTSTAGSLLKPVWLAQPQTLWSPWKLQDDELIEGKQDALRLSLHDQQQAGIDIVSDGEQTRQHFVTTFIEHLNGVDFEKRKTVKIRDRYDASVPTVVGPVSRQKPVFVEDAKFLRQQTNQPIKWALPGPMTMIDTLYDDHYKSREKLAWEFAIILNQEAKELEAAGVNIIQFDEPAFNVFFDEVNDWGIACLERAIEGLKCETAVHICYGYGIKANTDWKKTLGSEWRQYEEAFPKLQQSNIDIISLECHNSHVPMELLELIRGKKVMVGAIDVATDTIETPEEVANTLREALKYVDADKLYPCTNCGMAPLARNVANAKLNALSAGAEIIRKELANKS

SEQ ID NO: 3513 - protein, 966 aa, Medicago sativa
MANKMEKMASIDAQLRQLVPAKVSEDDKLIEYDALLLDRFLDILQDLHGEDLKDSVQEVYELSAEYERKHDPKKLEELGNLITSFDAGDSIVVAKSFSHMLNLANLAEEVQIAHRRRNKLKKGDFRDESNATTESDIEETLKKLVFDMKKSPQEVFDALKNQTVDLVLTAHPTQSVRRSLLQKHGRVRNCLSQLYAKDITPDDKQELDEALQREIQAAFRTDEIKRTPPTPQDEMRAGMSYFHETIWKGVPKFLRRVDTALKNIGINERVPYNAPLIQFSSWMGGDRDGNPRVTPEVTRDVCLLARMMAANLYYSQIEDLMFELSMWRCNDELRVRAEELHRNSKKDEVAKHYIEFWKKIPLNEPYRVVLGEVRDKLYRTRERSRYLLAHGYCEIPEEATFTNVDEFLEPLELCYRSLCACGDRAIADGSLLDFLRQVSTFGLSLVRLDIRQESDRHTDVMDAITKHLEIGSYQEWSEEKRQEWLLSELIGKRPLFGPDLPQTDEIRDVLDTFRVIAELPSDNFGAYIISMATAPSDVLAVELLQRECKVRNPLRVVPLFEKLDDLESAPAALARLFSIDWYINRIDGKQEVMIGYSDSGKDAGRFSAAWQLYKAQEDLIKVAQKFGVKLTMFHGRGGTVGRGGGPTHLAILSQPPETIHGSLRVTVQGEVIEQSFGEEHLCFRTLQRFTAATLEHGMRPPSSPKPEWRALMDQMAVIATEEYRSIVFKEPRFVEYFRLATPEMEYGRMNIGSRPAKRRPSGGIETLRAIPWIFAWTQTRFHLPVWLGFGAAFRQVVQKDVKNLHMLQEMYNQWPFFRVTIDLVEMVFAKGDPGIAALNDRLLVSKDLWPFGEQLRSKYEETKKLLLQVAAHKEVLEGDPYLKQRLRLRDSYITTLNVFQAYTLKRIRDPNYKVEVRPPISKESAETSKPADELVTLNPTSEYAPGLEDTLILTMKGIAAGMQNTG

SEQ ID NO: 3514 - protein, 464 aa, Zea mays
MVNGEQRADAECTRASLLGRYEIGRTLGEGNFGKVKYARHIATGGHFAIKILDRSKILSLRIDDQIRREIGTLKLLKHPNVVRLHEVAASKTKIYMVLEFVNGGELFDKIAIKGKLSEHEGRRLFQQLIDGVSYCHDRGVYHRDLKPENVLVDRKGTIKISDFGLSALPQHLGSDGLLHTTCGSPNYIAPEVLQNRGYDGSLSDLWSCGVILYVMLVGCLPFDDRNLVVLYQKIFKGDCQIPKWLSPAAQDLLKRILQPNPMKRINVAGIREHEWFKKDYVPAVPHDDDEDVLPSPAPSIKEPIDEPAQEKCTPINAFQLIGMASSLDLSGFFEEEDAAQRKIRFTSTHPPKDLFDKIESVVMEMGFKVHRGAGKLKVLKNSKCSRNSRNPSSLLVCTEVFELGPSLYVVELRKSHGDSTLYRQLCERLSDELGACKTDQIARTESSSDDLSSLDGEAFPLSGF

SEQ ID NO: 3515 - protein, 493 aa, Brassica juncea
MVLSKTASESDVSIHSTFASRYVRTSLPRFEMPENSIPKEAAYQIINDELMLDGNPRLNLASFVTTWMEPECDKLMMESINKNYVDMDEYPVTTELQNRCVNMIARLFNAPLGDGEAAVGVGTVGSSEAIMLAGLAFKRQWQNKRKAQGLPYDKPNIVTGANVQVCWEKFARYFEVELKEVKLREGYYVMDPEKAVEMVDENTICVAAILGSTLTGEFEDVKLLNDLLVEKNKQTGWDTGIHVDAASGGFIAPFLYPELEWDFRLPLVKSINVSGHKYGLVYAGIGWVVWRTKSDLPDELIFHINYLGADQPTFTLNFSKGSSQVIAQYYQLIRLGFEGYRNVMDNCRENMMVLREGLEKTGRFNIVSKENGVPLVAFSLKDSSRHDEFEVAETLRRFGWIVPAYTMPADAQHVTVLRVVIREDFSRTLAERLVADFEKVLHELDTLPARVQAKMANGNANGVKKTEEETTREVTAYWKKFVEAKKSNKNRIC

SEQ ID NO: 3516 - protein, 134 aa, Helianthus annuus
GVGYSWIDGLKSHAEQHVTNKMMLNAERIFPHNTPVTKEAYYYRMIFERFFPQNSAKLTVPGGASVACSTAKAIEWEGFWSNNLDPSGRGALGVHNAAYKKKSGSISPAKLAPSIADNVPRMMDITGPEIVIRS

SEQ ID NO: 3517 - protein, 493 aa, Brassica juncea
MVLSKTASGTDVSVHSTFASRYVRNSLPRFEMPENSIPKEAAYQIINDELMLDGNPRLNLASFVTTWMEPECDKLMMESINKNYVDMDEYPVTTELQNRCVNMIARLFNAPLGDGEAAVGVGTVGSSEAIMLAGLAFKRQWQNKRKAQGLPYDKPNIVTGANVQVCWEKFARYFEVELKEVKLREGYYVMDPEKAVEMVDENTICVAAILGSTLTGEFEDVKLLNDLLVEKNKQTGWDTGNHVDAASGGFIAPFLYPELEWDFRLPLVKSINVSGHKYGLVYAGIGWVVWRTKSDLPDELIFHINYLGADQPTFTLNFSKGSSQVIAQYYQLIRLGFEGYRNVMDNCRENMMVLREGLEKTGRFNIVSKENGVPLVAFSLKDSSRHNEFEVAETLRRFGWIVPAYTVPADAEHVTVLRVVIREDFSRTLAERLVADFEKVLHELDTLPARVRAKMANGKAKVVKQTEEETTREVTAYWKKFVETKKTNQNKIC

SEQ ID NO: 3518 - protein, 262 aa, Brassica juncea
MVLSHAASDSDVSVHSTFASRYVRTSLPRFKMPENSIPKEAAYQIINDELMLDGNPRLNLASFVTTWMEPECDKLIMASINKNYVDMDEYPVTTELQNRCVNMIAHLFNAPLGRDETAVGVGTVGSSEAIMLAGLAFKRKWQNKRKAEGKPFDKPNIVTGANVQVCWEKFARYFEVELKEVKLSEGYYVMDPEKAVEMVDENTICVAAILGSTLNGEFEDVKLLNDLLVLKNKENGWDTPIHVDAASGGFIAPFLYPELEWD

SEQ ID NO: 3519 - protein, 319 aa, Salmonella typhimurium LT2
MKAMNKVWVIGDASVDLVPEKQNSYLKCPGGASANVGVCVARLGGECGFIGCLGDDDAGRFLRQVFQDNGVDVTFLRLDADLTSAVLIVNLTADGERSFTYLVHPGADTYVSPQDLPPFRQYEWFYFSSIGLTDRPAREACLEGARRMREAGGYVLFDVNLRSKMWGNTDEIPELIARSAALASICKVSADELCQLSGASHWQDARYYLRDLGCDTTIISLGADGALLITAEGEFHFPAPRVDVVDTTGAGDAFVGGLLFTLSRANCWDHALLAEAISNANACGAMAVTAKGAMTALPFPDQLNTFLSSHSLAQAMTVK

SEQ ID NO: 3520 - protein, 478 aa, Triticum aestivum
MLPNMEEPLVGGKSEKTGGPGESLLVIEVKKQLYLAGPLVVGSLLQNVVQMISVMFVGHLGELDLSSASIATSFAGVTGFSLLAGMSSSLDTLCGQAFGAKQYHLLGIYKQRAILVLTPLSVVVAVIWAYTGQILPFFGQDPEIAMGAGSYIRWMIPALFVYGPLQCHVRFLQTQNIVLPVMLSSGVTALNHILVCWLLVYKLGLGNKGAALANTISYLTNLLILALYIRLSPSCKRTWTGLSMEAFRDILSFLRLAVPSALMVCLEWWSFELLVLFSGFLPNPKLEASVLSISLNTLSLVFRIPSGLGAAISTRVSNELGAGRPEAARLATHVIMALGLVSSVSVGLAIILVRNLWGYAYSNEKEVVEYIARMMPILAVTFLFDDLQCVLSGIVRGCGFQKIGAYVNLSAYYLVGIPAALYFAFVYHLGGMGLWFGLTCGLVVQTVLLLSITLRTNWDKEALKAKDRVFSSSNLSCL

SEQ ID NO: 3521 - protein, 111 aa, Synechococcus sp. PCC 7002
MKTLPKEKRYETLSYLPPLSDQQIARQVQYMMDQGYIPGIEFEKDPTPELHHWTLWKLPLFNASSAQEVLNEVRECRSEYSDCYIRVVGFDNIKQCQTVSFIVYKPNQTRY

SEQ ID NO: 3522 - protein, 308 aa, Sinorhizobium meliloti
MSPINIAIVGVGKIVRDQHLPALAKNADYRLIAAASRHGTVDGIDNFKSIEAMIDAVPAVEAVSLCMPPQYRYEAARTALAAGKHVFLEKPPGATLSEVADLEALAEEKGVSLFASWHSRYAPAVEAAKTFLASAAIRNVRIIWKEDVRHWHPNQEWIWAAGGLGVFDPGINALSIMTHILPRPVFITSATLEFPENRDAPIAATIAFSDAEKLDVAAEFDWRQTGKQSWDIVAETDAGGMVLSEGGAKLAIDGKIVHEEPEQEYPMLYRRFAEIIKAGRSDVDLAPLRHVADAFMLGRRKFVEAFHD

SEQ ID NO: 3523 - protein, 432 aa, Bacillus cereus E33L
MKFTKSEALHKEALEHIVGGVNSPSRSFKAVGGGAPVAMERGKGAYFWDVDGNKYIDYLAAYGPIITGHAHPHITKAITTAAENGVLYGTPTALEVKFAKMLKEAMPALDKVRFVNSGTEAVMTTIRVARAYTGRTKIMKFAGCYHGHSDLVLVAAGSGPSTLGTPDSAGVPQSIAQEVITVPFNNIETLKEALDKWGHEVAAILVEPIVGNFGIVEPKPGFLEKVNELVHEAGALVIYDEVITAFRFMYGGAQDLLGVTPDLTALGKVIGGGLPIGAYGGKKEIMEQVAPLGPAYQAGTMAGNPASMASGIACLEVLQQEGLYEKLDELGAMLEKGILEQAAKHNIDITLNRLKGALTVYFTTNTIEDYDAAQDTDGEMFGKFFKLMLQEGVNLAPSKYEAWFLTTEHTKEDIEYTIEAVGRAFAALADNK

SEQ ID NO: 3524 - protein, 463 aa, Mycobacterium leprae TN
MPCLVASVIDTVVNLAKRRGFVYPAGEIYGGTKSAWDYGPLGVEFKENIKRQWWRSVVTGREDVVGIDSSIILPRQVWVASGHLEIFHDPLVESLITHKRYRADHLIEAYEAKHGQSPCNGLADIRDPDTGEPGQWTEPREFNLMLKTYLGPIETEEGLHYLRPETAQGIFINFANVVTTARRKPPFGIGQIGKSFRNEITPGNFIFRTREFEQMEMEFFVEPSTARDWHQYWIDTRMQWYVELGIDPQNLRLFEHPKDKLSHYSDRTVDIEYKFGFVGNPWGELEGVANRTDFDLSTHARYSGVDLSFYDQVNDTRYTPYVIEPAAGLTRSFMAFLIDAYTEDEAPNTRGGMDKRALLRLDPRLAPIKAAVLPLFRHVDLSPKARDLAAELRKCWNSEFDDAGAIGRRYRRQDEVGTPFCVTVDFESLDDNAVTVRERDAMTQERVAMTNVADYLAVRLKGS

SEQ ID NO: 3525 - protein, 187 aa, Magnolia praecocissima
  misc_feature (164)..(164): Xaa can be any naturally occurring amino acid
  unsure (1)..(187): unsure at all Xaa locations
ELTVLCDAEVALIVFSPRGKLYEFASSSMHKTIDRYERHAKDISIANKTVEQNVQQWKFEAAHMAKKIEHLEVSKRKLLGEGLGSRPIEELQQIESQLERLSSIRARKTLLFTEQIQQLKEKERFLTEENAILSKKADDLSVQPLQQLSPTQKEIVPYDDETRXPEVETELFIGRPERGKKRYPMKV

SEQ ID NO: 3526 - protein, 214 aa, Saccharomyces cerevisiae
MSFNSPFFDFFDNINNEVDAFNRLLGEGGLRAYAPRRQLANTPAKDSTGKEVARPNNYAGALYDPRDETLDDWFDNDLSLFPSGFGFPRSVAVPVDILDHDNNYELKVVVPGVKSKKDIDIEYHQNKNQILVSGEIPSTLNEESKDKVKVKESSSGKFKRVITLPDYPGVDADNIKADYANGVLTLTVPKLKPQKDGKNHVKKIEVCSQESWGN

SEQ ID NO: 3527 - protein, 384 aa, Cryptococcus neoformans var. neoformans B-3501A
MSFSSPSSLYSSVYFSSPPSSPPSTPPLTSPHPSYANKPKVLLIGDYCGHETFDKQIREIAEVHTLPTVTYDETVELIKQKVEQVGGGFVAFGGLFTSMDTFPDRWDATLLSPLLPSCKLFVGPGAGYDKVDVPWLTSVGAMYANAPTIVGKRTAEGALVLTLAAMRGVVRYDMSVRKGVWGDRGVRTVDWKTAKIGIIGLGSIGSHLAFLLSSIGATSIFYHSRRPSLHAASNPAWTYLPNRDDLYAQSDVIILACPLTKETEGMIGRAAFGKMKDGVILVNVSRGKVVKEEELVEALESGKVMRAALDVFENEPTVHPNLLTNPNVILSPHVAPAPDSMGPYIKGEVIENIIHYLQTGMPLTPINLPQLKAEGWEVDGKGFV

SEQ ID NO: 3528 - protein, 275 aa, Arabidopsis thaliana
MTEVISKTSLFLGACGNHHRVDDFSFSPVSFGGFGLKKSFSCLKLKSQKPLRSVFYGKQIVFGDSQDESFRRSSAITAQTTLRIGTAQKWWEKGLKDNMREISSAQELVDSLTNAGDKLVVVDFFSPGCGGCKALHPKICQFAEMNPDVQFLQVNYEEHKSMCYSLGVHVLPFFRFYRGSQGRVCSFSCTNATIKKFRDALAKHGPDRCSLGPTKGLEEKELVALAANKELNFTYTPKPVPVEKEAATPDSNPSLPVPLPSMSSNDEKTLVSAGR

SEQ ID NO: 3529 - protein, 431 aa, Triticum aestivum
MEMKLTIKRVPTVLSNYQEEGGGGCGRNCLGDCCLPASKLPLYAFKADPKKPAQDDELPTEFFLNSLLLAQWEDRVARGLFRYDVTACETKVIPGELGFVAQLNEGRHLKKRPTEFRVDRVLQPFDSAKFNFTKVGQEEVLFRFENGGGDSSYFLENAPSTEGDHAPSVVAINVSPIEYGHVLLIPRVLDRLPQQIDPESFLLALHMAAEAASPYFRLGYNSLGAFATINHLHFQAYYLSVPFPVEKAPTKKIPLAKCALNSGVKVSKLTNFPVRGLVFERGNTLKDLADVVTNACIWLQENNVPFNVLISDSGRRIFVFPQCYAEKQALGEVSQDLLDTQVNPAVWEISGHIVLKRRTDFKEASEASAWRLLAEVSLSEERFEEVKACIFEATGLTESDEEEESSESPYASSSSVPRASSHMSEGCLVLQ

SEQ ID NO: 3530 - protein, 586 aa, Bacillus cereus E33L
MQGIKRYLQFVKPYRWLIAITIMIGLVKFGIPLIMPWLLKYIIDDVIQGGESLQDKTSQLITAIGIAFFIFAVLRPPIEYYRQYFAQRIANTILYDLRKHIFGHLQKLSLRYYSNTKTGEIISRVIHDVEQTKDFVITGLMNVWLDTATIAIAIIVMFSMNIKLTFVALLILPIYVVAVKYFFGRLRKLTKERSQALATMQGYLHERIQGMQVTRSFALEEYEGKQFEKRNNEFLTKALTHTSWTARTFSAVNTLTDLGPLLVIGFAAYEVIQGQLTLGTMVAFVGYMDSLYSPLRRLVNSSTTLTQSFASMDRVFELLDENYDIVNVPSAVQTKKLNGEVIFDNVSFRYNADEKEILHNLSLTMLPGEKVALVGASGGGKSSLASLIPRFYDVSSGAVYVDGIDVRKYDMRNLRSHIGIVLQDNLLFSDTIGANILYGNPKATEEEVIAAAKAAQIHDFIIELPDGYETVVGERGVKLSGGQRQRVAIARVFLKNPSLLILDEATSALDLENERYIQEALQTLAADRTTIIIAHRLATITHVDTIIYIEDGEIKETGSHEELMKKRGYYYNLYQLQHITETAPLA

SEQ ID NO: 3531 - protein, 370 aa, Hypocrea jecorina
MPVGTVLVTGGTGYIGSFTTLSLLDAGYDVVIVDSLYNSSKVAIDRIELLSGRRPDFYQIDITDEKALDEVFAKHPAIDSVIHFAALKAVGESSIIPLEYYRVNVGGSIALLQSMTRHNVTNIVFSSSATVYGDATRFPNMIPIPEHCPIGPTNTYGRTKSMIEDVITDHVTAQRNNLQKEGKPFEQWNGALLRYFNPCGAHPSGIMGEDPQGVPFNLLPLLGQVATGQREKLLVYGDDYPSRDGTAIRDYIHVVDLARGHLMALNYLRSNQPGVKAWNLGSGRGSTVFEIIKAFSDVVGRPLKYEVVPRRAGDVLDLTANPTLANKELGWKTEHTMEQACEDLWRWVKNNPQGYRQEPPAELLAAIKKA

SEQ ID NO: 3532 - protein, 189 aa, Magnolia praecocissima
ELTVLCDAEVALIVFSSRGRLYEYSNNSIKATIERYKKACADSSNTTSITQANSQYYQQEASKLRQQIQILQNANRHLMGDALSSLTVKELKQLENRLERGITRIRSKKHELLFAEIEYMQKREVELQNDNLYLRAKIAENERAQQANVLPAPEFDTLPSFDSRNYFEANMLEAASHYSHQDQTALHLG

SEQ ID NO: 3533 - protein, 175 aa, Hypocrea jecorina
AGGVGTLLVQMLRTVGAKIVATASTEEKLALAKKYGADYVVNSNDDIVARVNEITGGHGIDVIFDGVGKATFDADLQMLALKGHLISFGNASGAVPPFNILQLGPKNGRLMRPVVNGYVAERADLERYTSELFDLVLSKKVEVKIHKIYPLKDAAQAHIDLESRKTTGKLLLKID

SEQ ID NO: 3534 - protein, 625 aa, Yersinia pestis biovar Medievalis str. 91001
MGRIAVDLYGQQIGARLEDVASFAKYLGGSSGNVAYGSARQGLRSSMLARVGDEHMGRFLREELHQVGCDTSHLTTDKKRLTALVLLSIKDRDTFPLIFYRDNCADMAITAQDFSEQYIASARSLAITGTHLSHPNTREAVLTALRYARRNGVRTVLDIDYRPVLWGLTSLGDGETRFIESHQVTAELLAVFNLFDVIVGTEEEFHIAGGSTNTLDALRGVREVSDAALVCKRGALGCSVYTEAIPQTLDEGLTVSGVRVKVLNVLGAGDAFMSGLLRGYLNDEGWPQACRYANACGALVVSRHGCAPAMPSKIELDNYLARADAVVRPDLDVHLNHLHRVTTRRRQWPELCVMAFDHRSQLEEMALQCGADLCHISTLKTLILQASREAVHTAGLQGKAGLLCDGTFGQDALNAITGAGWWIGRPIELPGSRPLAMEHGNIGSQLIGWPQEHIVKCLVFFHPEDAYSLRLEQEQKIIEVYRACCQSGHELLLEVILPAGMPRSDELYLRAISRFYNLGVYPDWWKLPPLASEGWAALNKLIERRDPHCRGVVILGLDASLEALRTGFNAAAGYPIVKGFAVGRTLFGDASLAWLKRDIDDTQLIARIRDNYLQLITLWRERGQK

SEQ ID NO: 3535 - protein, 367 aa, Bacillus thuringiensis serovar konkukian str. 97-27
MKKQRIVVKIGSSSLADSHEGISKEQLSDHVAALARLKEEGHEVLLITSGAVAAGFSALGYPSRPVTIKGKQAAAAVGQSLLMQAYTEEFRKYGIVTAQLLLTRSDFSRKEQYSNAYATLGELLNRSALPIINENDSISLEELTFGDNDMLSALVSGLVSADMLMIFTDVNGLYDKNPQKNEDAKKYYFLPEVTEEIASLAGDAGSKLGTGGMKSKIDAAKTALSLGVSVFIGTGRGQEKFVDVLKGKGDGTYVGNAPQKEMKMNKQWIALHSVVSGQIEIDAGAATAIIQHGKSLLPAGVTNVSGFFQVGEVVEVMTQQGRVIGKGQCTYSAEELRDVKGMQSQHIQARGERHSYEVIHRDHWVSL

SEQ ID NO: 3536 - protein, 144 aa, Glycine max
  misc_feature (62)..(62): Xaa can be any naturally occurring amino acid
  misc_feature (69)..(69): Xaa can be any naturally occurring amino acid
  unsure (1)..(144): unsure at all Xaa locations
RELTLESFTVEGSDGVKLRTRVFKPDAGTEADGKLGIVLVHPYSILGGCQGLLKGIASGLAXNGYTALXFDMRGVGKSTGRASLTGSSEVKDVVAVCNWLSNTFSLPRILLLGSSAGLSLHGLVVLIHMLLVCDSFPQFIHELL

SEQ ID NO: 3537 - protein, 356 aa, Ashbya gossypii ATCC 10895
MVEEVPDVTRILGGIYVGSVKPIVNHTPLKGMFNITHILSVLKFTVIPESLVIKGYSLKNIAIDDDESTDILQYINESNRFIDQCLFPHEEEYDPRKVDFRKKKQHGSVYIHCQAGVSRSVSFTIAYLMYRYGLDLKSALHAVKRRRPEAQPNDGFMEQLRIFEEMGGQYVDTALPRYRHWVLQASLQADPTGSGILAREETYRGDGEEDLQSLSTEDRHKLTMLRCKKCRQRLALSTAFIQHEPPSAESSEGHFIRRAAGSRRIIDIQQSQDQCSHFFVEPLNWMKAELQGKQELEGKFSCPNCTQKVGGYNWKGSRCSCGKWMIPAIHLQAVKVDQVDAARLALPNPVNFETKQ

SEQ ID NO: 3538 - protein, 478 aa, Triticum aestivum
  misc_feature (406)..(406): Xaa can be any naturally occurring amino acid
  unsure (1)..(478): unsure at all Xaa locations
MGGCFSLEEQRLQSRTGTSAEAGGPDGLRKCKSDSKAISSVLAPPKDVEDLQTEGYGNVNIFTYNELRAATKNFRPDQILGEGGFGVVYKGVIDENVRIGFPSRQVAVKELNPEGFQGDKEWLAEVNYLGQLSHANLVELIGYCCEGSHRLLVYEYMACGSLEKHLFRRVCLNMPWSTRMKIALGAARGLEYLHGAERSIIYRDFKTSNILLDADYNAKLSDFGLARTGPSGDQTHVSTRVMGTYGYAAPEYVMTGHLTARSDVYGFGVVLLEMIIGRRAVDKSRPSREHNLVEWARPLLVHNRKLFRIIDPRMEGQYSTKAAIEVASLCYRCLSQNPKGRPTMSQVVETFEEVQSMPECQDILLQNCMTGSVTLYEVPKEPVEHVETEKAKQEPTAKTDAVAVGXPPPNGKASGLQSRRTRPANGRSKSEPPLECKLYIPSPDSDGHQLGLEALASPPSRNSSRDDPPPVDEDLYKI

SEQ ID NO: 3539 - protein, 598 aa, Streptomyces avermitilis MA-4680
MREFSLPALYEVPADGNLTDIVRRNAAQHPDVAVIARKVGGSWQDVTATAFLAEVRAAAKGLIASGVQPGDRVGLMSRTRYEWTLLDFAIWSAGAITVPVYETSSPEQVQWILGDSGATACVVELDTHAASVESVRDRLPALKHVWQIDTGGVEELGRLGRDVSDATVEERSSLAKADDPATIVYTSGTTGRPKGCVLTHRAFFAECGNIVERLRPLFRTGECSVLLFLPLAHVFGRLVQVAPMMAPIKLGCVPDIKNLTDELAAFRPTLILGVPRVFEKVYNSARAKAQADGKGKIFDKAADTAIAYSRALDTPSGPSLGLKIKYKTFDKLVYSKLRAVLGGKGEYAISGGAPLGERLGHFFRGIGFTVLEGYGLTESCAATAFNPWDRTKIGTVGQPLPGSVIRIADDGEVLLHGEHLFKEYWNNEGATAEALADGWFHTGDIGTLDEDGYLRITGRKKEIIVTAGGKNVAPAVIEDRIRAHALVAECMVVGDGRPFVGALVTIDDEFLGRWAAEHGKPAGSTAASLRQDPDLLAAVQSAVDDGNAAVSKAESVRKFRILSSQFTEESGHLTPSLKLKRHVVAKDYADEIEAIYQK

SEQ ID NO: 3540 - protein, 232 aa, Magnaporthe grisea 70-15
MAQNQDVFQYSMSSNSAWAGYKAHQNPNFFPKLASGQWPQILWLGCSDSRCPETTILGLQPGDVFVHRNIANIISATDINTSAVIEYAVMHLKVKHVVLCGHTACGGANAALGDSRVGGVLDTWLTPLKAVRQANAAELDAISDAKDRVVRIAEMNVEAGVKVLMANANIQDAIQERGLQVHGCIFDLASGRMKDLGYGNAAKGPQSGDGEVVRGRHATLVFRGGNASMTAR

SEQ ID NO: 3541 - protein, 399 aa, Oryza sativa (japonica cultivar-group)
MALSISTPPTSSSLLPASLQVGRWSSSAAMSARPVAFSLRRPVLAARVAAGGNAPSSSVDEVVTELDAVASFSEIVPDTVVFDDFEKFAPTAATVSSSLLLGIAGLPDTKFKSAIDTALADGECNTMEKPEDRMSCFLTKALANVGAEMAHLVPGRVSTEIDARLAYDTQGIIQRVHELLKLYSDHDVLSERLLFKIPATWQGIEASRLLESEGIQTHLTFVYSFAQAAAAAQAGASVVQIFVGRVRDWARTHSGDPEIDEALKKGEDAGLALAKKVYAYIHKNGYKTKLMAAAIRNKQDVFSLLGIDYIIAPLKILQSLEESVTDTDVKYGYVPRLTPALGKTYNFTEEELVKWDQLSLAAAMGPAAEELLASGLEGYVNQARRVEELFGKIWPPPNV

SEQ ID NO: 3542 - protein, 594 aa, Novosphingobium aromaticivorans DSM 12444
MDKNLLLDRRRLLVGSGALALAPLFPAWAQSGNLAGHGGHSRGSGPMAGRNSGGTLSGDTIALNIGEARYSVGRRSASAVAVNGTIPAPLIRLREGQTVRIAVTNHLKEQSSIHWHGLLVPFQMDGVPGLSFPGIDPGETFTYQFPILHSGTFWYHSHSGMQEAVGLYGPIVIDPALPDAAAPFDREYVLMLADWSPVDPHAQLRKLKTMGGYYNWQRQTVGGLIAGKDQSLKDRLEWAKMRMDATDISDVTGATYSFLVNGHDTEANWTALFRPGERVKLRIINASAMTNFNFRIPGLPMTVVAADGCNVAPVETDEIQIAIAETYDVIVQPGEAAPFGIIAEAIDRSGLVRATLAPQAGMVGPVPKLRQRPILTMRDMGMDMSGMDMGAGGEIDLSKPANESMDGHSMSMRDFSAAPGVKKGPGVATISPMPADRLADRGTGLENEDHRVLTYADLRSRDPNPDPRKPTRQIDVNLTANMERYMWSIDGETISDGAAPIPFRKGERVRVNLINHTMMPHPIHLHGHFFELVTGEAGNRPRKHTVNVLPGGKASFDLTADAEGDWAFHCHMLLHMHSGMMRVVTVRADKGDAA

SEQ ID NO: 3543 - protein, 338 aa, Haemophilus influenzae R2866
MAILVTGGAGYIGSHTVVELLNAGKEVVVLDNLCNSSPKSLERVKQITGKEAKFYEGDILDRALLQKIFAENEISSVIHFAGLKAVGESVQKPTEYYMNNVAGTLVLIQEMKKAGVWNFVFSSSATVYGDPKIIPITEDCEVGGTTNPYGTSKYMVEQILRDTAKAEPKFSMTILRYFNPVGAHESGLIGEDPNGIPNNLLPYISQVAIGKLAQLSVFGSDYDTHDGTGVRDYIHVVDLAVGHLKALQRHENDAGLHIYNLGTGHGYSVLDMVKAFEKANNITIAYKLVERRSGDIATCYSDPSLAAKELGWVAERGLEKMMQDTWNWQKNNPKGYRD

SEQ ID NO: 3544 - protein, 506 aa, Novosphingobium aromaticivorans DSM 12444
MLRSAVRKRRGRAFIPAFGQTLSCRGHRLGPLVTRMERAAMNALSPTLTNRSLVDIDRDHLIHSVTSFRGHEQHGAIVLESGDGMWLTDAEGNRILDAFAGLWCVNVGYGQESIVEAAAAQMRKLPYATGYFHFASEPAIRLAGELTAAAPSGLDHVFFTQGGSDAVDSAIRYIVHYWNAAGKPSKKHFIALEWGYHGSSSLGAGLTALGNFHRNFDLPRPWQHHIASPYPYRHPQGDDDAAVIASTVAALEAKVAELGADNVAAFCCEPIQGSGGVIVPPRGWLKALREACTRLGILMLVDEVITGFGRTGPLFACEEEGVSPDFMTTAKGLTAGYIPMGAMFMADHVYQTIADAAPAALPIGHGQTYSGHPVAAAVGLEVLRLYREGGLLENGRKTGERFAWHMERIRAHPLVGDVRYRGLLGAIELTPDKATKAIFDASLDIGGRLSKLTYANGVIVRCFGNAVLGFAPALCCTLEEMDMIFERVERSLDQLLDQPDIRALVV

SEQ ID NO: 3545 - protein, 485 aa, Novosphingobium aromaticivorans DSM 12444
MALQLNDPSLLRQAALIDGAWISGDLPKVEVLDPASGEVVGVVPDCGVAETEAAIAAAEASWAGWRRRTANERAALLEAWHALVLANLDDLARIMTAEQGKPLAESQGEIRYAATFIKWFAEEGRRVGGRNIPSPERDRRIIVMTEPVGVSAAITPWNFPAAMITRKCAPALAAGCPVVIKPSEMTPFTALALVELALRAGFPKGTINLVTGMPQAIGAAITASPVVRKLSFTGSTRVGALLMRQSADTIKRLSLELGGNAPLIVFDDADLDLAVKAAMASKFRNAGQTCVCANRILVHAPVYEEFASRLGAAVSALNSAPGMEAASTVGPLINAAAVEKVSAHVEDALAKGGKVLFSGKGREGGNFLRPLVIGNASSDMRLASEETFGPVAPLFRFETEDEAIALANDTPYGLASYFYTSGLDRAFRVAEALEAGMIALNTGSIAMEMAPFGGIKQSGLGREGGLAGIEEYLETKAFHIGGLKI

SEQ ID NO: 3546 - protein, 140 aa, Sinorhizobium meliloti
MAIERTFSMIKPDATKRNLTGAITKMLEDAGLRVVASKRVWMSRREAEGFYAVHKERPFFGELVEFMSSGPTVVQVLEGENAIAKNREVMGATNPANAAEGTIRKVHALSIGENSVHGSDAPETAAEEIAYWFSGTEIVG

SEQ ID NO: 3547 - protein, 417 aa, Haemophilus influenzae R2846
MLEQMGKQAKDAAFILAQLTTAEKNRALSIIAEQLEQQAPLILAENAKDIELAKQNELSDALIDRLLLTQERLQGIANDVRHVISLADPVGKIIDGGTLDSGLKIERVRTPLGVIGTIYEARPNVTIDVASLCLKTGNAVILRGGKETQFSNKILIEVVQNALEQAGLPKFAVQAITDPNRELVMQLLKLDRYVDMIIPRGGSDLHELCKQHSTIPVIVGGVGVCHTFVEESADQNKAIFVIDNAKTQRPSTCNTLETLLVQHSIAEEFLPKLVSHLSAKNVKYHAKPTALNILKQAGANVCEVTEKELRKEWGSLDLNVVVVEDIHAAIEHIRQYGTQHSESILTSSQNLARQFINQVDAAAVYVNASTRFTDGGQFGLGAEVAVSTQKLHARGPMGLEALTSYKWVCEGEYTVRK

SEQ ID NO: 3548 - protein, 599 aa, Magnaporthe grisea 70-15
MRFTSSLRGGLVALLALGQPACIWSKTIAHDFHLSWITTNPDGAYAKPTIGINNQWPPPLISATVGDEVVVNLHNGLGNTTTSLHFHGLFQNGTNHMDGAVGVTQCPVPPGHTFTYRFKVDQPGTYWYHAHNNGQYPDGLRGPVVVHDPAGPHEGKYDDDIVLTLSDWYHRPMKELIAGFLNYKNPSGAEPVPQAALMNDTQDLRVKVEPEKTYLVRMVNVGAFASHFVRFEGHQVRVVEADGVWMEESAPVDVLYLAAAQRYSVLLKAKSDATQNFAIVSTMDEELFDDAPEDLNPSVTGWLVYNEEKPLPEPDKLAPDSGILLDDMNLVPADKFRLLDAVSQSIEFNIHMKILGNGVNYAFFNNITYVGPKVPTLYTALTVGGATAATNPIVYGSHTNTHVLRHNDVVELVVNNFDDGDHPFHLHGHNFQVITRSDADAGPFVPSNRPRLQRDIPLRRDTVLIRGNGHAVLRFVADNPGAWLFHCHIEWHMEQGLVATLVSAPEQLLASGAKHPQLPRSHLESCKLSGMAAAGNAAGNADDVLDLTGENRPPPPLPKGFTTKGYVALVCSGVAAVMGMASIWYYGNIPDMQKGYEAI

SEQ ID NO: 3549 - protein, 304 aa, Geobacter sulfurreducens PCA
MVVTGLGQCCWDTLAEVEEYPSPDSKAESGQWVEQGGGPAATALVTVARLGLQCRFAGVVGDDAAGALIRHALHAEGIDVTHLLTRPGAASQRAFIMVERTGGRRTIVWQRPTGAHLAPAELEEPFWSGSAFLHLDGLMEEASLHGVREARRRGIPVMVDAGRMRPGMRELAKLCDYLVAAEQFFLDLGWDGSEEQFARLADGLGAPTVTVTLGDRGSLTRHDGTTCHVPAFPVTTLDTTGAGDVFHGGYLFGLLKGWPLRETVIFASAAAALSCLHLGAQRGAPRLDEVIRFLVDRGIPVPAV

SEQ ID NO: 3550 - protein, 240 aa, Magnolia praecocissima
MGRGRVQLKRIENKINRQVTFSKRRMGLLKKAHEISVLCDAEVAVIVFSTKGKLYEYSTDSRMSRILERYERYSYAERELVLSGPESEGSWCLEYGKLKAKVESLQRNLRHFTGEDLDTLSLKELQQLEHQLDAALKHIRSRRPIMLIHCGASKKEKSLREQNNMLEKEIQEKEKAMAQQAQWEQQNQSQSSHPSWLASPLPTLNIGTYHQGNEVEEEGARPPARTNSLMPPWMLRHVNE

SEQ ID NO: 3551 - protein, 252 aa, Geobacter sulfurreducens PCA
MPLKGKVAVVTGGAQGIGKAVVKKLMEKGCAVVMADTDWEAGEETAAGFAGLGRVLFVPADVGREDDVRVLVERAASHFGRLDILVCNAGVFRSVPLEHCSLDEWQRLIGTNLTGAFLCAKHAAPFLACHGGSIVTIASTRAFMSEPDTEAYAASKGGLVALTHALAVSLGPGVRVNCISPGWIETCEWQKASRRRPAAHSEEDRSQHPAGRVGTPEDVASLAAWLVSPEAGFVTGVNFVVDGGMTRKMVYV

SEQ ID NO: 3552 - protein, 166 aa, Brassica rapa subsp. pekinensis
HFTANQAILEAFEGKKRVHVIDFSMNQGLQWPALMQALALREGGPPVFRLTGIGPPAADNSDHLHEVGCKLAQLAEAIHVEFEYRGFVANSLADLDASMLELRPSEIEAVAVNSVFELHKLLGRTGGIEKVLGVVKQIKPVIFTVVEQESSHNGPVFLDRFTESLH

SEQ ID NO: 3553 - protein, 605 aa, Escherichia coli O157:H7
MMLNAWHLPVPPFVKQSKDQLLITLWLTGEDPPQRIMLRTEHDNEEMSVPMHKQRSQPQPGVTAWRAAIDLSSGQPRRRYSFKLLWHDRQRWFTPQGFSRMPPARLEQFAVDVPDIGPQWAADQIFYQIFPDRFARSLPREAEQDHVYYHHAAGQEIILRDWDEPVTAQAGGSTFYGGDLDGISEKLPYLKKLGVTALYLNPVFKAPSVHKYDTEDYRHVDPQFGGDGALLRLRHNTQQLGMRLVLDGVFNHSGDSHAWFDRHNRGTGGACHNPESPWRDWYSFSDDGTALDWLGYASLPKLDYQSESLVNEIYRGEDSIVRHWLKAPWNMDGWRLDVVHMLGEAGGARNNLQHVAGITEAAKETQPEAYIVGEHFGDARQWLQADVEDAAMNYRGFTFPLWGFLANTDISYDPQQIDAQTCMAWMDNYRAGLSHQQQLRMFNQLDSHDTARFKTLLGREVARLPLAVVWLFTWPGVPCIYYGDEVGLDGKNDPFCRKPFPWQVEKQDMALFALYQRMIALRKKSQALRRGGCQVLYAEDNVVVFVRVLNQQRVLVAINRGEACEVVLPASPFLNVVQWQRKEGHGQLTDGILALPAISATVWMN

SEQ ID NO: 3554 - protein, 416 aa, Oryza sativa (japonica cultivar-group)
MEQYEVVEQIGRGAYGSAYLVVHKGERKRYVMKKIRLSKQNDKFQRTAYQEMSLMASLSNPYIVEYKDGWVDEGTSACIVTSYCEGGDMAERIKKARGVLFSEERVCRWFTQLLLALDYLHCNRVLHRDLKCSNILLTKDNNIRLADFGLAKLLMEDLASTIVGTPNYMCPEILADIPYGYKSDIWSLGCCMFEILAHRPAFKAADMASLINKINRSSISPMPPIYSSSLKQIVKSMLRKNPEHRPTAGELLRHPYLQPYLAESCSCSPIYLPVKPTKSNLGDKQQSRKPGSGRKRIIKTNGSSEALETAAEQAVDTRDNSTYISEESSPKSAVKLAHSDSTPAEWDHLNIVQQRADALESLLELCAKLLKQERLEELAGVLRPFGEGAVSSRETAIWLTKSLMTPPKLEGSPKLT

SEQ ID NO: 3555 - protein, 586 aa, Bacillus thuringiensis serovar konkukian str. 97-27
MLKEAIYHRPKDNYAYAYDEKTIHIRIRTKRDDVQSTTLIYGDPYEWKDGKWISSSTPMKKTGSTALFDYWFISIEPKFKRLRYGFELKNDTDTLIYAERGFFSTTPNDDVGNFFCFPFIHANDVFKAPSWIKDTVWYQIFPERFANGDHTLNPENTLPWGSAEPTPTNFFGGDFAGIIQNLDYLVKLGISGIYFTPIFKAHSNHKYDTINYMEIDPQFGTKETFKELVQACHTHGIKVMLDAVFNHSGYFFDKFQDVLQNGEQSAYKEWFHIHEFPIRTEPLPNYDTFAFTPYMPKLNTAHPDVKEYLLEVGRYWVREFNIDGWRLDVANEVDHNFWREFRSEIKALNSEVYILGEIWHDALPWLQGDQFDAVMSYPVTNALLSYFANDSIKANEFMKQITESLHSYSMNVNEAAFHLLDSHDTPRILTTCNGDKNKLKLLYVFHLSFIGSPCIYYGDEIGMDGGMDPDCRKCMVWDTEEQDHTLFTHVQTLISLRKQYKAFGGHGTFQFIEANDEYNYISYTKTYEDETIFFVLNPTNSDITASLPLHVTGKKIINIYTNEEFSAEASVLQVTLPPYGFSILKW

SEQ ID NO: 3556 - protein, 314 aa, Ralstonia eutropha JMP134
MTPTIIYTHTACLEHRPGPHHPESPERLKAVVEALRTPEFASLEWRDAPMGTVEQLQLIHDTDYIDEIAQRAPTHGYVPLDAGDTVMSPGSWEAVMRCVGAACAGVDTVMNGDARNVFCATRPCGHHAEPAKAMGFCIFNQAAIAAAYACEVHKLERVAVVDFDVHHGNGTQAAFFNRPELFYASSHQSPFYPGTGARSETGVNHNIVNVPLPRGCESAQFRAAISALVLPSLRAFAPDLLIISAGFDAHRLDPLAGMNLEDSDFHWITRELMQIADEACNGRIVSILEGGYSLDALATSSMAHVGALMQDAGI

SEQ ID NO: 3557 - protein, 243 aa, Zea mays
  misc_feature (235)..(235): Xaa can be any naturally occurring amino acid
  unsure (1)..(243): unsure at all Xaa locations
GLPPPPLTMQIFVKTLTGKTITLEVEPSDTIENVKAKIQDKEGIPPDQQRLIFAGKQLEDGRTLSDYNIQKESTLHLVLRLRGGMQIFVKTLTGKTITLEVEPSDTIENVKAKIQDKEGIPPDQQRLIFAGKQLEDGRTLSDYNIQKESTLHLVLRLRGGMQIFVKTLTGKTITLEVEPSDTIENVKAKIQDKEGIPPDQQRLIFAGKQLEDGRTLSDYNIQKESTLHLVLRLRXGMQIFVKT

SEQ ID NO: 3558 - protein, 383 aa, Triticum aestivum
  misc_feature (327)..(327): Xaa can be any naturally occurring amino acid
  misc_feature (336)..(336): Xaa can be any naturally occurring amino acid
  unsure (1)..(383): unsure at all Xaa locations
MGKGDVATRSKSQKSSTSQNEQSTPTNPPTAYPDWSQFQAYYNVPGTAQMTPPAYFHSTVAPSPQGHPYMWGPQMMPPYGTPPPYATMYAQGTPYQQAPMPPGSHPYSPYPVQAPNGTVQTPTPGAGGSETDKSNKNKRKTPLKRSKGSLGSLDVVTVKDKTPPAKPLVSSSNEGSSQSESGSGSYSGGSSTNSKSGSHTKDGSEQGPTNDASNKGVTAQGTAVEPTQVSSGPVVLNPMMPYWPVPPPMPGQATGVNMGMDYWGAPTSVPMHGKAVAAPTSAPSSNSRDIVLSDPVIQDEREVKKQKRKQSNRESARRSRLRQQAEXWEEVASSSXDCLKQENSSLKEELKQLQEKCDNLTSENTSLHEKLKALDSEKPNGNL

SEQ ID NO: 3559 - protein, 727 aa, Zea mays
  misc_feature (60)..(60): Xaa can be any naturally occurring amino acid
  misc_feature (685)..(685): Xaa can be any naturally occurring amino acid
  unsure (1)..(727): unsure at all Xaa locations
MGEVSDDNSNLSFLKRIATSDVLLLKEYGVNGVVVALLLAVVTPVLLSMMFGKKTKQRAXVRANVGGEEGFAMRNSRFSSLVEVPWEGATTMSALFEMASKKYSRRRCLGTRKLIKREFVESSDGRKFEKLHLGEYEWDTYAEAFNRACNFASGLVKMGHDLDSHAAIFSDTRAEWIIAAQGCFRQNLTVVTIYASLGEDALVHSLNETQVSTLICDSKQLKKIPAISSKLQSLRHIIYIEDEPVEAETLNQVKHLTTLSFTEVEELGKTSSVDARLPSSSDTAVIMYTSGSTGLPKGVMITHGNMVATTAAVMTIVPKLGMNDVYLAYLPLAHVFELAGETVMLASGTAIGYGSTLTMTDTSNKIKKGTKGDVSVLNPTLIISVPAILDRIRDAVFKKVGEKGGLTKKLFDFAYKRNLASIEGSWFGSWAPERMIWDTIIYKPIRAMLGGRVRFVLCGGAPLSGDTQRFMNICLGVPVGQGYGLTETCAGAAFTEWDDTSVGRVGPPLPCCYVKLVSWEEGGYKISDYPMPRGEVVVGGHSITKGYFSNEAKTNEVYKVDERGIRWFYTGDIGQFHPDGCLEIIDRKKDIVKLQHGEYVSLGKVESALATSSYVESIMVYADPFHNYCVALVVPVRQALEKWAQNSGINCEGFEELCQNGQAVKEVQQSLSKAAKAARLERFEXPAKIELLPEPWTPESGLVTAALKLKREQIKAKFKDDLDKLYH

SEQ ID NO: 3560 - protein, 266 aa, Borrelia burgdorferi B31
MNIFSNEDLNIYLKSVREHKLITHEEEIKLAGQIQRGNAKAKNKMINANLRLVLKIIKRYAGKGLKIEDLIQEGNLGLIRAAEKYDPNKNTKFSTYASFWIKQSLQRALNTKTRLVKVPYRKENLILQINKYLTEEEKSPKKEEIMKRFNLSPAQYIKIIPYLEKEYSLDKEIEGSENSTLLNLYEDNSFNPEITLEQDSTLKHLNYILETKLNEKERYIIKKRYNLDNSPKKSTLKDISTELGISSETVRQIEKRVLKKLKEEIN

SEQ ID NO: 3561 - protein, 72 aa, Arabidopsis thaliana
RPRGSNLQKELNRYIPTAAAFGGVCIGALTVLADFMGAIGSGTGILLAVTIIYQYFETFEKEKASELGFFGF

SEQ ID NO: 3562 - protein, 467 aa, Alkalilimnicola ehrlichei MLHE-1
MKRRNFLLAASAVLPAATLTRVMAESGHVHHNEGDRTPGQRTDQGYMPVHTPNGWTLPYEIKDGVKEFHLVAEEIEHEFAPGSVAKCWGYNGTTPGPTIEAVEGDRVRIYVTNRLPEYTSVHWHGIHLPSGMDGVKGVTQPPIHPGETFVYEFELNQHGTHMYHPHADEMVQMAMGMMGMFIIHPKDGEIEPVDRDYAILLHNWALHPGTRRPDPSIMVDFDLWSMNSKVFPAIDSLVAKTGERVRIRMGNLSMWNHPMHVHGVSFEVTGSDGGRWPRSQWRKETTEIVGVGQVRDIEFIAPPGDWAFHCHMTHHTMNPMGHGIANPLGVDQSGIEEEIRTLLPEYMAMGQHGMADHQAHTDGGHMRGPDNTLAMAMGEGPFGTIGMGGMFTLVKVRDDLAPGDFSDPGWYWHPDGEVAWRVSDDPDFGNPVRRGKLAGAGAEDLPTPRRDGHGHHGNHGHGDHHDH

SEQ ID NO: 3563 - protein, 474 aa, Haemophilus influenzae R2846
MSKEIKTQVVVLGAGPAGYSAAFRCADLGLETVIVERYSTLGGVCLNVGCIPSKALLHVAKVIEEAKHANKNGIYFSEPRIELDEVRAGKEAVVAKLTGGLAGMAKARKVTVVEGLAAFTDPHTLVVRDRDGNPTTVKFDNAIIAAGSRPVQLPFIPHEDPRIWDSTDALKLKEVPKKLLIMGGGIIGLEMGTVYNALGSEVEVVEMFDQVIPAADKDVVGIYTKQVEKKFKLMLETKVTAVAAKDDGIYVSMEGKACNDTKRYDAVLVAIGRVPNGKLIDAGKAGVEVDDRGFIHVDKQMRTNVPHIYAIGDIVGQPMLAHKGVHEGHVAAEVIAGQKHYFDPKVIPSIAYTEPEVAWVGKTEKECKQEGLNYEVAKFPWAASGRAIASECSEGMTKLIFDKDTHCVLGGAIVGSNGGELLGEIGLAIEMGCDAEDIALTIHAHPTLHESVGLAAEVFEGSITDLPNAKAKKK

SEQ ID NO: 3564 - protein, 88 aa, Kluyveromyces lactis
ARPAFVNKLWSMVNDKSNEKFIHWSTSGESIVVPNRERFVQEVLPKYFKHSNFASFVRQLNMYGWHKVQDVKSGSNDSRWEFENERHA

SEQ ID NO: 3565 - protein, 281 aa, Salmonella typhimurium LT2
MSQTSTLKGQCIAEFLGTGLLIFFGVGCVAALKVAGATFGQWEISVIWGLGVAMAIYLTAGVSGAHLNPAVTIALWLFACFDKRKVVPFIISQVAGAFCAAALVYGLYYNLFVDFEQTHHIVRGSVESLDLAGIFSTYPNPHINFVQAFAVEMVITAILMGLILALTDDGNGVPRGPLAPLLIGLLIAVIGASMGPLTGFAMNPARDFGPKMFAGLAGWGEIAFTGGRDIPYFLVPLFGPIVGAILGAFAYRKFIGRHLPCDTCVVEEKDSTATTQQNASL

SEQ ID NO: 3566 - protein, 542 aa, Listeria monocytogenes EGD-e
MAKDIKFSEDARRAMLRGVDQLANAVKVTLGPKGRNVVLEKKFGSPLITNDGVTIAKEIELEDPFENMGAKLVSEVASKTNDVAGDGTTTATVLAQAMIQEGLKNVTAGANPVGVRRGIEKAVATAIEELKAISKPIESKESIAQVAAISSGDEEVGKLIAEAMERVGNDGVITIEESKGFATELDVVEGMQFDRGYTSPYMVTDSDKMEAVLEKPYILITDKKINNIQEILPVLEQVVQQGRPMLIIAEDVEGEAQATLVLNKLRGTFNVVAVKAPGFGDRRKAMLEDIAILTGGQVITEDLGLELKTATVDQLGTANKVVVTKDDTTIVEGAGDSTQISARVNQIRAQMEETTSEFDREKLQERLAKLAGGVAVVKVGAATETELKERKLRIEDALNSTRAAVEEGIVAGGGTALVSIYNKVAALEAEGDVETGINIVLRSLEEPVRQIAHNAGLEGSVIVERLKHEAVGVGFNAANGEWVNMIDAGIVDPTKVTRSALQNASSVAALLLTTEAVVADKPDENGPAAVPDMGMGGMGGMM

SEQ ID NO: 3567 - protein, 94 aa, Listeria monocytogenes EGD-e
MLKPLGDRVVIEVLEAEEKTASGIVLPDSAKEKPQSGKIVAVGSGRVLDNGTKEPLEVAEGDTVIFAKYSGTEVTYEGTDYLILRESDILAITK

SEQ ID NO: 3568 - protein, 526 aa, Cyanidioschyzon merolae strain 10D
MSKRILYQEQARRALSQGMDILAEAVAVTLGPKGRNVVLEKKYSCPQIVNDGVTIAKEIDLANHMQNTGVCLIRQAASKTNEVAGDGTTTATVLAHAMIKQGLKYVASGANPMALKTGMSLATQWLVSQIRDLAQPISDHLAIKQVASLSAGNDDQVGEMISQAFEQVGADGVISLEEGKSSQTQLQITQGMRFEKGYISPYFATAGDTVVLDQPYILLTDKKITLVKQDLLPVLTLVSRTNRALLIIADDVEKEALATLILNKLRGIIQVVAVRAPGFGDRKKALLEDMAVLTGGQVITQEAGLSLETITLDLLGEARRIEVGKSYTTIVADSNKQQVKARCEQIKQQWARSDSSYEKQQLQERLAKLSSGVAVIQVGGATEAEMKDKKLRLDDAINATRAAIEEGIVAGGGSTLVHFIKPLIEWSHHLKPEEQLGAQIVAKALSAPLHRIATNAGQNGSLIVEQVQNQPNLGYDAANHRFVNMIEAGIIDPAKVTRCALQNATSIAAMVLTTECMIVDKPSGDK

SEQ ID NO: 3569 - protein, 966 aa, Flaveria trinervia
MANRNVEKLASIDAQLRLLVPGKVSEDDKLVEYDALLLDKFLDILQDLHGEDLKEAVQQCYELSAEYEGKHDPKKLEELGSLLTSLDTGDSIVIAKAFSHMLNLANLAEELQIAYRRRIKLKSGDFADEANATTESDIEETFKRLVHKLNKSPEEVFDALKNQTVELVLTAHPTQSVRRSLLQKHGRIRNCIAQLYAKDITPDDKQELDEALHREIQAAFRTDEIRRTPPTPQDEMRAGMSYFHETIWKGVPKFLRCVDTALKNIGINERFPYNAPLIQFSSWMGGDRDGNPRVTPEVTRDVCLLARMMTSNMYFSQIEDLMIEMSMWRCNSELRVRAEELYRTARKDVKHYIEFWKRIPPNQPYRVILGDVRDKLYNTRERSRHLLVDGKSDIPDEAVYTNVEQLLEPLELCYRSLCDCGDHVIADGSLLDFLRQVSTFGLSLVKLDIRQESDRHTEVLDAITQHLGIGSYREWSEEKRQEWLLAELSGKRPLIGPDLPKTEEVKDCLDTFKVLAELPSDCFGAYIISMATSTSDVLAVELLQREYHIKHPLRVVPLFEKLADLEAAPAAMTRLFSMDWYRNRIDGKQEVMIGYSDSGKDAGRFSAAWQLYKTQEQIVKIAKEFGVKLVIFHGRGGTVGRGGGPTHLALLSQPPDTINGSLRVTVQGEVIEQSFGEEHLCFRTLQRFCAATLEHGMNPPISPRPEWRELMDQMAVVATEEYRSVVFKEPRFVEYFRLATPELEFGRMNIGSRPSKRKPSGGIESLRAIPWIFSWTQTRFHLPVWLGFGAAFKHAIQKDSKNLQMLQEMYKTWPFFRVTIDLVEMVFAKGNPGIAALNDKLLVSEDLRPFGEYLRANYEETKNYLLKIAGHKDLLEGDPYLKQGIRLRDPYITTLNVCQAYTLKRIRDPNYHVTLRPHISKEYAAEPSKPADELIHLNPTSEYAPGLEDTLILTMKGIAAGMQNTG

SEQ ID NO: 3570 - protein, 399 aa, Nostoc punctiforme PCC 73102
MVSTTPAYRITDLFAERAKNLAPPTYGTELSKIVTVSFAYGLADPILFPHTDLAAASAVVLAEEAPIALNYGPPSAQLYEQIILRLQAKGIAADRDRLIIGYGSGQILGLLPDVFVEPGDVVIVEGPTFLGVVTRFVHAGARIITIPVDELGMDVDALEVTLNDLKKQGIRPRFIYTIPTFHNPTGATMPLFRRQKLVALAAEYGVLIVEDDAYSDLRFRGETMPSLATLDQEGWVLYVSTFSKIIAPGIRLGWACGDATIIERLAMFKSEGTVGPFVSHVVARYCATGKLDNHIQELIACYKHKCNLLLEAIAQEFPSDVVALRPDGGFFVWCKLPPDISAKALLMAASEHGISFLPGTRCYANGQGDDAIRLAFSFQPTQKIVEGIATLGSVLRGLR

SEQ ID NO: 3571 - protein, 998 aa, Thiobacillus denitrificans ATCC 25259
MNHYAITMPQLSDTMTEGVVVTWEKQPGDRVERGDIVATVETDKAIMDVEVFKAGYLAGPLADVGATIAVGAALGYITDTAGDVAIAADEVVAEQAQTEMIPHHAGTPIVMPQLSDTMTEGVVVTWEKQPGEAIKRGDIVATVETDKAIMDVEVFQEGFLSGPIADIGSVVEVGHPMAFIVDDAAKANDTGVTISADHKVKDTHKVAPPAADKPAHLPIPKTAPSQVAAAGNAVPVPRPQGRQASPYARKVAAQLGVNLTGLAGSGPSGVLVAADVARARPSMQEVAHALPQVDVPGQGRPMTSMEKAVSHAMTASLTLPTFNVTVNIDTAALTAATKAKKVSVTVAIAKACSVAMAKFPRMNWAYQPVDKLVERANHDFGVAVMSNDGGLVVPILHGVEKKSLEALQGDWTGLVERARVRKLAPPEYSNPTFTISNMGMLGVSHFTAIPTPGISAILAIAANGPQGTPFTITGDHRVLNGADVALYLTTLKQTIEAPDAWLSGGTAAETAGAAATTSAPVSPIPEGNWDVQVVVVGGGPGGEDCARDLADHGVKVMMVNNEPFPGGECLWRGCIPSKAWRAAADNIRNRAHDAEMGVDGTANPKLNWAQVEKHRRWVQTSRGEMALKADKGMKIDVREGYGEFVDAHTLKITPPEGEAYTVSFGAAVIATGAPAFVPPIPGARENLATGGVVTSDTIWNLANPPKKLGIVGGGVIGVEMAQIFRDFGTEVLMLERHDRILAEIEEEIGKVLIASLEKEITVVTSADIREVGGKPGKMTLRYADKEGAESTFDCDVVLMATGKRPDTSRLNLDKVGVALDGAAIKVDARCCTSTPNIYAVGDVIGGYMLAHTAATQGRVAASNLLGHASEYDQDRDCGVTFSRPQAGFVGLSVAQAKAKGIDAVEAKMPMSIDAKAMITGETEGMIKLVADKTTGRIIGVHYLADHTDTLIGTGVMMVAGEMTLTQVAKAIFPHPTQTELFGELARRLLNRLRRTAKK

SEQ ID NO: 3572 - protein, 378 aa, Amanita muscaria
MRFVQIDVNILPLSILLGASNLSVMANQYHNDLLAPYLALDQGGKFHAEYVWIDGDGGLRSKTTTVDQKVTDISQLRVWDFDGSSTNQAPSGNSDVYLRPSAIFKDPFRGGENILVLSETYNNDGTPNRTNHRHHTAKVMELAKDEIPWFGIEQEYTLFDADGSPYGWPKGGFPGPQGPYYCGAGTGKVFARDLIEAHYRACLYAGVNISGINAEVMPSQWEFQVGPCEGISMGDHLWMARYLLIRVAEQWGVKVSFHPKPLQGDWNGAGAHTNYSTLAMREPGGMKYIEAAIEKLAKRHDEHIAVYGEDNEMRLTGRHETGHIGTFSSGVANRGASIRVPRHVANKGYGYLEDRRPASNIDPYRVTGIIIETTILDK

SEQ ID NO: 3573 - protein, 370 aa, Saccharomyces cerevisiae
MNIQSNNSPNLSNNIVSKQVYYAHPPPTIDPNDPVQISFPTTEVVGHGSFGVVFATIIQETNEKVAIKKVLQDKRFKNRELEIMKMLSHINIIDLKYFFYERDSQDEIYLNLILEYMPQSLYQRLRHFVHQRTPMSRLEIKYYMFQLFKSLNYLHHFANVCHRDIKPQNLLVDPETWSLKLCDFGSAKQLKPTEPNVSYICSRYYRAPELIFGATNYTNQIDIWSSGCVMAELLLGQPMFPGESGIDQLVEIIKILGTPSKQEICSMNPNYMEHKFPQIKPIPLSRVFKKEDDQTVEFLADVLKYDPLERFNALQCLCSPYFDELKLDDGKINQITTDLKLLGFDENVELGHLSPDELSSVKKKLYPKSK

SEQ ID NO: 3574 - protein, 143 aa, Escherichia coli CFT073
MAIERTFSIIKPNAVAKNVIGSIFARFEAAGFKIVGTKMLHLTVEQARGFYAEHDGKPFFDGLVEFMTSGPIVVSVLEGENAVQRHRDLLGATNPANALAGTLRADYADSLTENGTHGSDSVESAAREIAYFFGEGEVCPRTR

SEQ ID NO: 3575 - protein, 329 aa, Prochlorococcus marinus subsp. pastoris str. CCMP1986
MTQLFYDTDADLSLLKNKTIAIIGYGSQGHAHALNLKDSGMDVIVGLYKGSNSESKAINDGLKVFTVSEACEKADWIMILLPDEFQKDVYIKEIEPNLKEGKILSFAHGFNIRFELIKPPNFVDVVMIAPKGPGHTVRWEYQNGQGVPALFAVEQDYSGNARSLAMSYAKGIGGTRAGILETNFKEETETDLFGEQAVLCGGLSELVKSGFETLVEAGYQPELAYFECLHEVKLIVDLMVKGGLSQMRDSISNTAEYGDYVSGKRLINNETKKEMQKILKDIQDGTFAKNFVDECDNNKPLMTKLREENSKHEIEKVGKGLRAMFSWLK

SEQ ID NO: 3576 - protein, 391 aa, Mycobacterium avium subsp. paratuberculosis K-10
MGESGPVVIDPRRHDAVLFGVGDALGSALASQLGQIGVGTAAFAADGPAAAADRLRVRPGRCVVVAGDPAAVEAARTAGFALVIGLAPVGRDGDGLRGAGADAVVAELEQITVRTGDRRMSQLPDASQALTGGADGLAGRHPAVFFDFDGTLSDIVDDPDAARPVAGATAALTRLAARCPVAVLSGRDLADVTKRVGVLGIWYAGSHGFELTAPDGSHHQNDDAAAAIPVLAQAAGRLRDELGAIPGVVVEHKRFGVAVHYRNAARDRVGEVAAAVRAAGRHDALRVTTGREVIELRPDLDWDKGKTLHWVIEHLRRSGSGALTPVYLGDDITDEDAFDAVRGGPVQGVPILVRHNDDGDRATAALFALDSPARAAEFTERLADQLERGEG

SEQ ID NO: 3577 - protein, 553 aa, Schizosaccharomyces pombe
MSVDENQLENGQLLSSENEASSPFKESIPSRSSLYLIALTVSLLGVQLTWSVELGYGTPYLFSLGLRKEWTSIIWIAGPLTGILIQPIAGILSDRVNSRIGRRRPFMLCASLLGTFSLFLMGWAPDICLFIFSNEVLMKRVTIVLATISIYLLDVAVNVVMASTRSLIVDSVRSDQQHEANSWAGRMIGVGNVLGYLLGYLPLYRIFSFLNFTQLQVFCVLASISLVLTVTITTIFVSERRFPPVEHEKSVAGEIFEFFTTMRQSITALPFTLKRICFVQFFAYFGWFPFLFYITTYVGILYLRHAPKGHEEDWDMATRQGSFALLLFAIISLAANTALPLLLEDTEDDEEDESSDASNNEYNIQERNDLGNIRTGTNTPRLGNLSETTSFRSENEPSRRRLLPSSRSIMTTISSKVQIKGLTLPILWLSSHVLFGVCMLSTIFLQTSWQAQAMVAICGLSWACTLWIPYSLFSSEIGKLGLRESSGKMIGVHNVFISAPQVLSTIIATIVFIQSEGSHRDIADNSIAWVLRIGGISAFLAAYQCRHLLPINF

SEQ ID NO: 3578 - protein, 333 aa, Thiobacillus denitrificans ATCC 25259
MKIEDKKRVLREMVLHRRFEERCYQAYIERKIGGFLHLYPGQEACCNGVMEAARPGHDYVITGYRDHVHAIKCGADPKEVMAELYGKETGSSKGRGGSMHIFDAGKRFMGGYALVGGPFPLAAGIAKAIQLKGGDEIAICFLGDAANNQGTFHETMNMAALWKLPVLFVCENNLYGIGTSIERSTAVVHQHKRVAAYNIPADECDGQDIEVVYEHARKAVDHVRAGNGPFFLELMTYRYRGHSMSDSRGYRTREEEELWKQRDPIFILRDRLIKEGATTMAEFEALEKETDAYIENEVIKFAEASPEPSVDELEKYVLADRESQLPWLTGKAA

SEQ ID NO: 3579 - protein, 558 aa, Schizosaccharomyces pombe
MERVVKLAAKHCPFVSKADPSALRRMAGAGLIRAGARCPVVRHALPVAAATGADVSRGFKSDSKQMAMEPSLDEIHLKAGVVNTGSRTCRHADAVKAAAEAATTTPVTKKHQMPKHYASDLNGVGPATTPRFDYDTFYREELDKKHRDKSYRYFNNINRLAKEYPLAHLADPNTRVEVWCSNDYLNMGGHKKIREAMHQCIETYGGGAGGTRNIAGHNQHAVRLEKSLADLHQKPAALVFGSCYVANDATLSTLGRKLPNCIFLSDEMNHASMINGIRNSRCEKIIFKHNDLVDLEAKLASLPLNRPKIIAFESVYSMSGNVAPISEICDLAKKYGAITFLDEVHAVGMYGPRGAGVAEETPGLLSRVDIITGTLAKSYGCVGGYIAASSTLVDMIRSLAPGFIFTTSLPPHVMVGALTAVEHLKVSNVEREQQRSAVRRVKQSLSEIGIPVLSNDTHIVPAMVGDAHLAKLASDSLLHDHNIYVQSINFPTVSVGTERLRITPTPAHNTEHYVQSLTNAMNDVWSKFNINRIDGWEKRGIDVGRLCKFPVLPFTTTH

SEQ ID NO: 3580 - protein, 317 aa, Arabidopsis thaliana
MKETNFGEKTRVLVVGGTGSLGRRIVSACLAEGHETYVLQRPEIGVDIEKVQLLLSFKRLGAHLVEGSFSDHQSLVSAVKQVDVVVSAMSGVHFRTHNIPVQLKLVAAIKEAGNVKRFLPSEFGMDPSRMGHAMPPGSETFDQKMEIRNAIKAAGISHTYLVGACFAAYFGGNLSQMGTLFPPKNKVDIYGDGNVKVVFVDEDDMAKYTAKTLNDPRTLNKTVYVRPTDNILTQMELVQIWEKLTEKELEKTYVSGNDFLADIEDKEISHQAGLGHFYHIYYEGCLTDHEVGDDEEATKLYPDVKYKRMDEYLKIFV

SEQ ID NO: 3581 - protein, 370 aa, Yarrowia lipolytica CLIB122
MKGYNTRSSSRRAQDKPVGLYPGLNDLTDALEALPLETVRHFTLLREIDAKCTTTTPLVADLIAKFLAIPPAAKDDPECAKKTEERENMLLEIRGLIRELMPCLEEKMHVAGVAAEAVARHISRIDADYELITSREIPQVIQYGEPDHPAIIVDVKPSVAERSAQSQRSESRREAIAAKKAAAAAAAEKSGNGGRRGTPSKEGGKDSGKETGGKKAAATNGAAAVGAGAKKNGEKRTATSASVSDTVASSAAAAGAKKRKTAAKASPAPGNRKSPPSSDDTPAASATRSARLVNKSRKGQEAAESAKAAEEEEDDGEPVYCYCEQVSYGEMVACDGPQCTREWFHLPCLGLSSPPKGNWYCDECKQGRKR

SEQ ID NO: 3582 - protein, 138 aa, Xylella fastidiosa Temecula1
MIKSVASGKELAGLRVMVIDDSKTIRRTAETLLKREGCEVVTAIDGFEALAKIADQKSQIIFVDIMMPRLDGYQTCALIKNNNLFKSTPVIMLSSKDGLFDKARGRVVGSEQYLTKPFTREELLSAIRTYVNPLKLAV

SEQ ID NO: 3583 - protein, 593 aa, Schizosaccharomyces pombe
MSYSKSTIYRRQGTEPNSHFRRTVEEKSQLSGTNEESLGGHTLSSNAFKNNSSSISPSSSAKDPREQRKRTFPLNDTHSSRARQHERPFRSRKSRRRKGKKAFSPRPGSPPSPSFYRSGSQKRARNLTTKDYFAKRSESSSSASVSPISPSANRNDSKRQASSFRRSPPSSVHMKPSAFNGRKVSRRPSSSPPPIPSIPHETTSSDTQKKSSVSSGFPENKHGKFHFHIPNERRSRFDQPPSKRMALTSTARESVPAPLPSPPSGPIYTYTYPKPAYEKIDQIGEGTYGKVYKAINTVTGDLVALKRIRLEQEKDGFPITTVREVKILQRLRHKNIVRLLEIMVEKSSVYMVFEYMDHDLTGVLLNSQLHFTPGNIKHLSKQIFEALAYLHHRGVLHRDIKGSNILLNNNGDLKFADFGLARFNTSSKSANYTNRVITLWFRPPELLLGETAYDTAVDIWSAGCIVMELFTGKPFFQGRDEISQLEVIYDMMGTPDVHSWPEVKNLPWYELLKPVEEKKSRFVETFKEILSPAAIDLCQKLLALNPFCRPSAHETLMHEYFTSESPPPEPAVILKNMQGSWHEWESKKRKSKR

SEQ ID NO: 3584 - protein, 335 aa, Burkholderia mallei ATCC 23344
MKAIMLRQPAGLEHLERVTLADPGAPAAGEIRVRIHASSLNYHDLGVVTGRLNPADKRIPMSDGAGVVEAIGEGVTEFAPGDAVVSTFFPYWLDGGPTVADFATVPGDGVDGYARESVVRPAHWFTHAPQGYTHEQAATLTTAGLTAWRALVVDGGLKAGDSVLVLGTGGVSIFALQFAKRMGATVIATSSSDEKLERARALGADHVVNYRRDANWAAKVLALTNGRGVDHVIEVGGPDTLPQSIQACRIGGHIALIGVLTGIAGPVPTVALMARQQNLQGLIVGSRRHQIDMVRAIDATGIKPVVDRTFALDDIADAFAHQAAGKHFGKICLSI

SEQ ID NO: 3585 - protein, 460 aa, Pseudomonas syringae pv. syringae B728a
MQHSALKELWIILRLAGPLIASQMAHMLMVFTDTVMMGKIGPEALAGGGLGAATYSFVSFFCVGVMAAVGTLVSIRHGAGDTEGATRLTQAGLWLAWGMALVAALLLWNLEPILLQFGQAEANVHMAAQFLITLPFALPGLLSFMALRGFTSALGRAGPVMTISLAGAAANFVLNYALIHQWLGLPNLGLMGIGLVTAIVTNCMALALALHIRLHPAYAAYPIRKGLSKLSRSHLGELWRLGLPIGGTYAVEVGLFTFAAFCMGAMGSTQMAAHQIALQTVSMAFMVPVGMSYAVTMRIGQHYGAGNLLMVRMAGRLGIGFGGCVMLMFGLLFWLAPHLVIGLFLDINDPAFAEIVVLATKLLAIAALFEFFDGTQTIAMGAIRGLKDARTTFLIGLGCYWLIAAPAAWLLGFSTDAGASGVWWGLALGLFCSAVALTYAFEWKTARLLRQDAAGLPVPG

SEQ ID NO: 3586 - protein, 288 aa, Zea mays
MAKDIEASGPEAGEFSAKDYTDPPPAPLVDAEELTQWSLYRAVIAEFIATLLFLYITVATVIGYKHQTDASASGPDAACGGVGILGIAWAFGGMIFILVYCTAGISGGHINPAVTFGLFLARKVSLVRALLYIVAQCLGAICGVGLVKGFQSAYYVRYGGGANELSDGYSKGTGLAAEIIGTFVLVYTVFSATDPKRSARDSHVPVLAPLPIGFAVFMVHLATIPITGTGINPARSLGAAVIYNKDKAWDDQWIFWVGPLIGAAIAAAYHQYVLRASATKLGSYRSNA

SEQ ID NO: 3587 - protein, 539 aa, Arabidopsis thaliana
  misc_feature (21)..(21): Xaa can be any naturally occurring amino acid
  unsure (1)..(539): unsure at all Xaa locations
MGNCCGTAGSLAQNDNKPKKXGRKKQNPFSIDYGLHHGGGDGGGRPLKLIVLNDPTGREIESKYTLGRELGRGEFGVTYLCTDKETDDVFACKSILKKKLRTAVDIEDVRREVEIMRHMPEHPNVVTLKETYEDEHAVHLVMELCEGGELFDRIVARGHYTERAAAAVTKTIMEVVQVCHKHGVMHRDLKPENFLFGNKKETAPLKAIDFGLSVFFKPGERFNEIVGSPYYMAPEVLKRNYGPEVDIWSAGVILYILLCGVPPFWAETEQGVAQAIIRSVLDFRRDPWPKVSENAKDLIRKMLDPDQKRRLTAQQVLDHPWLQNAKTAPNVSLGETVRARLKQFTVMNKLKKRALRVIAEHLSDEEASGIREGFQIMDTSQRGKINIDELKIGLQKLGHAIPQDDLQILMDAGDIDRDGYLDCDEFIAISVHLRKMGNDEHLKKAFAFFDQNNNGYIEIEELREALSDELGTSEEVVDAIIRDVDTDKDGRISYEEFVTMMKTGTDWRKASRQYSRERFNSISLKLMQDASLQVNGDTR

SEQ ID NO: 3588 - protein, 378 aa, Leuconostoc mesenteroides subsp. mesenteroides ATCC 8293
MADITATNKQVLDFNHQLTAQADSFPTLSVLDNTGKIVDDEAFERAELSNEDLINIIKRMILSRQLDIRSTKLAKQGRFGFFAPTAGQEASQMASSYAFNDDDWLMPGYRDIPQIVVKGWPIWKAILWSRGHVLGNVYTTEDDKPVNSWMPQIIIGAQYVEAAGIALGLKKRGKNAVVYAYTGDGGTSQGDFYEGINFAGAYNANAVFFVQNNGYAISTPRALQTAAPHLAAKGWAAGLPSLVVDGNDPIAVYLASKEARAWAANGNGPVLIETITNRLEAHSTAGDDPLRYRTKDDIGEWWKKEPLIRMRKLLQGQGIWNEEQEDDYVKEVNQLIDDQIKIADSVEKQKISNFIKNTLEVPSQAMKEQIAKFESEGK

SEQ ID NO: 3589 - protein, 184 aa, Kluyveromyces lactis NRRL Y-1140
MATGISKTLKYNAQTDKLITFAAGCFWGTQHIFLKHFGDKIIDGKVGYSNGSESLKDKPDTVSYERVKKGDTGFAEVYQISYNPKLVSLKELVDFFFRIHDPTTVNAQGPDQGSQYRSAIFAHSEADLNELKKLKEQWQPKWNNKIVTDISLIDNFYDAEEYHQLYLDKNPAGYACPTHYIRDL

SEQ ID NO: 3590 - protein, 326 aa, Alkalilimnicola ehrlichei MLHE-1
MKAPVRVAVTGAAGQIGYSLLFRIASGDMLGKDQPVILQLLEITPALEALKGVVMELEDCAFPLVSGITTSDKAEEAFKDADIALLVGARPRGPGMERKDLLEANAAIFSAQGKALNDAASRDVKVLVVGNPANTNSLIAQRNAPDLDPRNFTAMTRLDHNRAVAQLANKTGAHNTEIKNMIIWGNHSATQYPDISKTKVKGEAAPGLVERDWYENDFIPTVQQRGAAIIKARGASSAASAASSAIDHIRDWVLGTPEGEWTSMAVPSDGSYGIEKGIIYSYPCVCRNGDYEIVQDLEIDEFSREKMQATEKELVEERDAVEHLLP

SEQ ID NO: 3591 - protein, 338 aa, Pseudomonas putida KT2440
MKVFYDKDCDLSIIQGKKVAIIGYGSQGHAQACNLKDSGVDVTVGLRKGSATVAKAEAHGLKVADVATAVAAADLVMILTPDEFQGALYKNEIEPNIKKGATLAFSHGFSIHYNQVVPRADLDVIMIAPKAPGHTVRSEFVKGGGIPDLIAIYQDASGNAKNVALSYASGVGGGRTGIIETTFKDETETDLFGEQAVLCGGTVELVKAGFETLVEAGYAPEMAYFECLHELKLIVDLMYEGGIANMNYSISNNAEYGEYVTGPEVINEESRKAMRNALKRIQDGEYAKMFISEGATNYPSMTAKRRNNAAHGIEIIGEQLRSMMPWISANKIVDKTKN

SEQ ID NO: 3592 - protein, 463 aa, Corynebacterium glutamicum ATCC 13032
MAKSNEGLGTGLRTRHLTMMGLGSAIGAGLFLGTGVGIRAAGPAVLLAYIIAGAIVVLVMQMLGEMAAARPASGSFSRYGEDAFGHWAGFSLGWLYWFMLIMVMGAEMTGAAAIMGAWFGVEPWIPSLVCVVFFAVVNLVAVRGFGEFEYWFAFIKVAVIIAFLIIGIALIFGWLPGSTFVGTSNFIGDHGFMPNGISGVAAGLLAVAFAFGGIEIVTIAAAESDKPREAISLAVRAVIWRISVFYLGSVLVITFLMPYESINGADTAAESPFTQILAMANIPGTVGFMEAIIVLALLSAFNAQIYATSRLVFSMANRQDAPRVFSKLSTSHVPTNAVLLSMFFAFVSVGLQYWNPAGLLDFLLNAVGGCLIVVWAMITLSQLKLRKELQANDEISTVRMWAHPWLGILTLVLLAGLVALMLGDAASRSQVYSVAIVYGFLVLLSFVTVNSPLRGGRTPSDLN

SEQ ID NO: 3593 - protein, 445 aa, Fusobacterium nucleatum subsp. nucleatum ATCC 25586
MFLKKMNRLLSRIPVSIRVTVWFTAVIVFLFSIVLSSAILLEDRYINNSSTEELVIAVEKIYEDPDEFENFNDGIYYIKYNENNEIIAGKIPKDFDLTLAFSIEDINTYQIENKKFLYYDTRLKNTGDWIRGIYPLNRFQNDISKMWDIVFYYISPLFIAFVAFVGYKIVKNAFKPVKKISETALAIKKSKNFSRRIELDYSEDEIHKMASAFNEMLDTVEEVFIHEKQFSSDVSHELRTPITVISAQSEYALDYVETIDEAKESFEVINRQAKKMTNLINQIMELSKMERQNEIEKDRINFSNIILQLLEDYKNLLENNNIELIINIEKDLRIYGNKIMLERLFINLFTNAMKFTKTTIKVSLNRINKEVILQIKDDGVGIAKKDQKYIWDRFFQTNDSRNKDKNKGSGLGLSMVNRIVQLHSATIEVESETGEGSCFIVRFPI

SEQ ID NO: 3594 - protein, 284 aa, Magnetococcus sp. MC-1
MMGVEIIAGVLTGSMALLADGWHMGTHAFALGITYFAYVMARKYAGSAKFSFGTGKFGILSGYTSALFLGGTALYMIVESFARLFNPVPIAFDEAILVTLIGLAVNGLSIWMLHSNDGHNHHHHDHHHDHHHDHHHDHNLRAAYLHVLADALTSVLAIVALVAGKLAGWSFLDPAMGIVGGLLIARWAWGLLHSSAFILLDGHGDQASQHAIVQAIESDDDSVVSDLHIWPLGSNALAAAITVVTKAPRTPEDYRSRLAPIAKLKHTTIEIHPCNDQSCACSQR

SEQ ID NO: 3595 - protein, 160 aa, Arabidopsis thaliana
MESSSSGTTSSTIQTSSGSEESLMEQRKRKRMLSNRESARRSRMKKQKLLDDLTAQVNHLKKENTEIVTSVSITTQHYLTVEAENSVLRAQLDELNHRLQSLNDIIEFLDSSNNNNNNNNMGMCSNPLVGLECDDFFVNQMNMSYIMNQPLMASSDALMY

SEQ ID NO: 3596 - protein, 298 aa, Arabidopsis thaliana [sequence omitted]

SEQ ID NO: 3597 - protein, 122 aa, Aquifex aeolicus VF5
MKLRPLYDKIVVERLEEKEEKTPSGIIIPDTAKEKPQLGKVVAVGPGKLLDNGELKPLSVKEGDVVLFNKYAGNEVEIEGKIYLVMSEDEVLAVVEDYSSLIGGEVRWQQRQLSTTRKQGQN

SEQ ID NO: 3598 - protein, 594 aa, Frankia sp. CcI3
MCGLSGELRFDGRGANVDAVVRMTATMVPRGPDGVGVWSAGPVAFGHRRLKIIDLSECGAQPMVDNELGLTTVFNGCIYNYQELRDELIAAGYRFFSTSDTEVIGKAYHRWGRRCVDHFAGMFAFAIAERDSGRLILARDRLGIKPLYLTGNSERLRFASTLPALLAGGGVSSDIDLVAFHHYLSFHSVVPAPHTILAGVRKLPAATVRVVEPDGTSTDDLYWRPSFTRDPAHADWTARDWQDAIAERLRLAVRRRMVADVPVGVLLSGGLDSSLIVALLAEAGQKDLATFSVGFEAVGGEPGDEFVYSDVIARYFDTDHHQIRVPGTRLLPAVDAAVAAMSEPMVSHDCVAFYLLSQEVSRHVKVVQSGQGADEVFAGYSWYPPLAGVGRTDAVDAYLRVFADRPHRDLPAMVEPHHLIEADASRHFVASHFARPGAETAVDAALRIDSTIMLVDDPVKRVDNMTMAAGLEARTPFLDHELVELAAACPPELKLASGGKGVLKNIGRPLMPVDVIDRPKGYFPVPAIRHLDGPFLDRVREALTDPAAKARGLFRPVWVQTMLAAPNDNRTALGANALWQAALLEMWLQTHTVA

SEQ ID NO: 3599 - protein, 405 aa, Corynebacterium glutamicum ATCC 13032
MKGRPNVLAIVLAGGEGKRLFPLTEDRAKPAVPFGGTYRLIDFVLSNLVNSGFLKIAVLTQYKSHSLDRHISLSWNVSGPTGQYIASVPAQQRLGKRWFTGSADAILQSLNLISDEKPDYVIVFGADHVYRMDPSQMLDEHIASGRAVSVAGIRVPREEATAFGCIQSDVDGNITEFLEKPADPPGTPDDPDMTYASMGNYIFTTEALIQALKDDENNENSDHDMGGDIIPYFVSRNDAHVYDFSGNIVPGATERDKGYWRDVGTIDAFYECHMDLISVHPIFNLYNSEWPIHTTSEGNLPPAKFVRGGIAQSSMVSSGSIISAGTVRNSVLSNNVVVEEGATVEGAVLMPGVRIGKGAVVRHAILDKNVVVRDGELIGVDQVRDAQRFKVSAGGVVVVGKNQVV

SEQ ID NO: 3600 - protein, 393 aa, Fusobacterium nucleatum subsp. nucleatum ATCC 25586
MEEKIKKLSEKYLERVMELRRELHQYPELGFDLFKTAEIVKKELDRIGIPYKSEIAKTGIVATIKANKPGKTVLLRADMDALPITEESRCTFKSTHDGKMHACGHDGHTAGLLGAGMILNELKDELSGTIKLLFQPAEEGPGGAKPMIDEGVLENPKVDAAFGCHVWPSVKAGHIAIKDGDMMTHTTSFDVIFQGKGGHASQPEKTVDPVIIACQAVTNFQNVISRNISTLRPAVLSCCSIHAGDAHNIIPDKLVLKGTIRTFDEGITDQIVDRMDEILKGLTTAYGASYEFLVDRMYPALKNDHELFVFSKNALEKILGKDCIEVMDDPVMGSEDFAYFGKQVPSFFFFVGINDEQLENENMLHHPKLFWNEKNLITNMKTLSQLAVEFLNK

SEQ ID NO: 3601 - protein, 493 aa, Azorhizobium caulinodans
MNVKTWSRVGLPTLLAASALALPVLAQTAAPAADAPAAAAAIPINKGDTAWMLVSAALVLMMSVPGLALFYGGLVRTKNMLSVLMQVFYTVSVVGILWVLYGYSLAFTGGSDFVGGFSKAFLAGITPDSGTGTFSVGVNIPEFAFIAFQMTFAMITPALIFGAFAERVKFSAIVLFVPLWVTFIYFPMAHMVWYWAGPDAVDAAAKALAAADAGGKAAAQSALDAVLADAGYIYKLGAIDFAGGTVVHINAGIAAFVGCLIVGKRTGYGKEAFQPHSLTLTLVGAGLLWVGWFGFNAGSNLEANGLTALAMMNTFIATCAAALSWMVVEWLAKGKPSMLGVVSGAVAGLVAVTPMAGFAGIMGSLVSGLIVGVLCFFFCTTVKNAFGYDDSLDVFGVHCIGGIFGAIATGIVVSPALGGTGIFDYTTGKVADYDMATQVIAQVKAVVVTLVWSGVGSAVLYYIVHAVVGLRATVEREREGLDITEHGERAYHS

SEQ ID NO: 3602 - protein, 429 aa, Oryza sativa (japonica cultivar-group)
MADTAPSCDTYLLFNGETLLPNGVRAFIYTVVLAYCFIGLSAISGRFFKSMESIMRHSREVVTIDPHTNATIVKHEKVWNYTIADVALLAFGTSFPQISLATIDAIRNLGQLTAGGLGPGTLVGSAAFDLFPIHAVCVVMPRAGSKKKISDLGVWLVELFWSFWAYIWLYIILEVWTPRVITLWEALLTVLQYGLLLLHAYAQDKRWPYVSIPLARGDRPEDWVPTEDASVDYDDNYDGIGDILPGQNEDIVDIFSARSYSNEGYHHVSEKDVEESPTGLTLKNKWEDTHWFSIWWQQFVDAATLESSVSRKMDSTCLSVIGISWNLIIAPWKMLFAFIPPYEIAHGWIAFICSLIFISGIAYGVTKITDQISCVTGVSPYVIAFTALAAGTSWPDLVASKIAAERQITADSAIANITCRYISAHLLSN

SEQ ID NO: 3603 - protein, 332 aa, Dechloromonas aromatica RCB
MQRTQFTVPVLALAALIPHATMAADPTPDASQVVAAVEGVFGVTPGERRNHIKGTCAAGEFVGTKEAAKLSRSPLFSGKPVPVVARFSLSGGNPKAPDVAKSARGMALQFQLPKGQLHHITMLNTPMFGAANPQTFLDLMQALQPDPATGKPDPEKMKAFKASHPDNQAQAQYLASNNPPASYASSSYWGIHTFKFVDKKGKATLVRWQFVPQDGEKRLSDDELKTAGANFLESALIERAKQGAVRWDMMVSIGQPGDSETDPTVLWPAERPRIKAGTLTIRSAEAQKGAPCEPINFDPLVMAPGIQPTDDPVLRFRSPAYAVSFGKRLSER

SEQ ID NO: 3604 - protein, 657 aa, Dechloromonas aromatica RCB
MAKAKDTAKEAPKARTSKAKDKAAEKALLQGQMAETPEPLDAEARKMRLKALIKLGKERGYLTYAEINDHLPDDVVDAESIEAIISTFSEMSIQVFDEAPAAEDLLMSDTAAVAADDEEVEAQAEQALSTVDSEFGRTTDPVRMYMREMGSVELLTREGEIEIAKRIEEGLKHMIQAIAACPTTISDILELAAKVESDEMRIDELVDGLIDPNAVEEAPAAEMPEAEEDEEEDGDDDGEGAGGGAAAASLLQLKTDALERFKNIKGIHAKMQKMLPTKGSHDKVYIKLLQQVSDELMNIRFTSRSIERLCDSVRGMVEQVRGCERKIQQICVDRVKMPRPHFIQSFPGNEINLDWADAEVAAAPKTYVAILTRNAPDIKEEQKKLLALQDRIGIPLKDLKDINKQMSTGEAKARRAKREMTEANLRLVISIAKKYTNRGLQFLDLIQEGNIGLMKAVDKFEYRRGYKFSTYATWWIRQAITRSIADQARTIRIPVHMIETINKMNRISRQILQETGAEPDPATLAKKMDMPEDKIRKIMKISKEPISMETPIGDDDDSHLGDFIEDSGTLAPADAAMYSSLRGVTKEILDTLTTREAKVLRMRFGIEMNTDHTLEEVGKQFDVTRERIRQIEAKALRKLRHPTRSDKLRSFVDTNNS

SEQ ID NO: 3605 - protein, 423 aa, Schizosaccharomyces pombe
MKPNTTNLRNECWDTFSIPKRSQNIKINQSTKHQRSISDFVGTAGPGRQVGNWIIKKTIGAGSMGKVKLVVNILTGEKAALKMIPFTPNNTSQTVRVQREALLGRLLRHPNICRVIDCIRTPACTYILFEYVPGGQLLEYILARGKLDEDLARSFAMQLINALVYLHKNFIVHRDLKIENVLLTQDSRQVKLIDFGLSNFYSKDDLLRTYCGSLYFAAPELLDAKPYIGPEVDVWSLGVVIYVMVCGRVPFDDVSVPMLHSKIKSGKLEFPSYISEDCCSLIAAMLNVNPRKRCSLEQAAKFPWLKKNSFCLYLPIPLTSIPSTPSIRSHVFKPPFNLKVLQLLHEHGLASIPELKHELYMAYIERKTTSLVCLYLLGVESLAPALRIPTALPPVYSRHQRHHSEILGAMDLTEKITAMQCPP

SEQ ID NO: 3606 - protein, 473 aa, Bacillus cereus E33L
MMDQNKGLKRELKSRHIFMIALGGVIGTGLFLGSGYTIHEAGPGGAIVAYLVGGFVMYLTMLCLGELAVAMPDAGSYQTYATKHISPAAGYVVGWMSWLNWSATIGIELIAVSILMKRWFPDVPSWIWCVVFAVLLFAINALSSRSFAEVEFWFASIKVITIIAFIILGGAAMFGFLDMKGNEPAPMFSSFTDYGGLFPNGLSAILITMIAVNFSFQGTELVGIAAGESENPEKTIPKAINNTVWRILVFFVLSIFILAGLFPWQQAGVIESPFVVVFDKIGIPYAADIINFVIITAVLSVANSGLYATSRMLWSMSNQGMISPIFGKLSKNGVPIYALIVSTIVGCLSLLSGIYAEDTVYLWLLSIAGFGAILVWASIALSNLLARRSYIKRGGDVKDLKFKTPLYPFVPLLALVLNVTVIVGMAFIPEQRMALYCGIPFMIVCLLFYRATRNKAHKVEHIEKTDTTEVESL

SEQ ID NO: 3607 - protein, 677 aa, Mycobacterium leprae TN
MDDRRLRTLPNEAYWIAVCGLLAFVVASARADSRGSGGTNNILQADHSMARAVHLMRHRGPDELSTWSDPDIDGFSGGVAFGFNRLSIIDIAHSHQPLRWGPPETPNRYILVFNGEIYNYLELRDELVIRHGAAFATDGDGESIVAGFHYWGTEILTRLRGMFAFALWDTIAHELFCARDPFGIKPLFMATGTNGTAVASEKKCLLELAEVIRFDTQIDTRALQHYTVLQYVPEPETLHRGVHRLESGCYARIRPEQLDPATTRYFVPQFAATPITSSTEQTRYGEITAVLADSVAKHMRADVTVGSFLSGGIDSTAIAALAIRHNPRLITFTTGFEHEGFSEIDVAAASAEAIGARHIVKVVTPNEFVAALPEIVWYLDEPIADPALVPLFFVAREARKHVKVVLSGEGADELFGGYRIYREPLSLKPFDYLPGPLRRSMGKVSKSLPEGMRGKNLLHRGSLTLEERYYGNARNFSEAQLQAVLPRFHTGWTHTDVTAAVYAESVGWDPVARMQHIDLFTWLRGDILAKADKMTMANSLELRVPFLDPEVFAVASRLPMQAKITRTTTKYALRRALESIVPAHVLHRPKLGFPVPIRHWLRAGELLEWAYALVNSSQAEHLVNLAAVHRMLDEHRGGISDHSRRLWTVLIFMLWHAIFIEHSVVPQISEPQYPVQP

SEQ ID NO: 3608 - protein, 427 aa, Bacillus cereus ATCC 10987
MEQKPVLDVNEVPKPGKWLFLSIQHLFAMFGSTVLVPFLTGLNPSVALISSGLGTLAFLLITKGQVPAYLGSSFAFIAPIITAKTAGGPGAAMLGGLLAGLVYILISIGIKKSGSKWIMKLLPPIVVGPVVMVIGLALAHTAVNMAMNGADGKYSFTHFSVALVTLAITIICSIFGRGFFSIIPVLLGIIGGYIFAYFQGLVDLKPVAEAKWFVVPDFTVPFVTYTPEFSWKIVLLMVPVALVTISEHIGHQIVLGNVIKRDLIEKPGLHRSIFGDGVATLIASLIGGPPNTTYGENIGVLAITRAYSVYLFIGSAVFAIMFGFIGKISALIHSIPTPVMGGVSILLFGVIASSGLRMMVDDKTDLSDKRNLMIASVILVIGIGGAVLHVGESFQVEGMALAAIVGVLLNLLLPETKQIKQSKQIAS

SEQ ID NO: 3609 - protein, 555 aa, Mesembryanthemum crystallinum
MQASSCLVKGNLGFEVQNRRRGVLAVAGLGGFKNSSPILSSNLRFVNGVINKKSSSCKLTTSGSVLMGAGLARMGLDHVFQSTAKYRSVKAQAASGDYEDPAPVKFQGKSSASVLPYVGVACLGAILFGYHLGVVNGALEYLSPDLGIAGNTVLQGWVVSILLAGATVGSFTGGSLADKFGRTRTFQLDAIPLAIGAYLCATAQSVQTMMIGRLLCGIGIGISSALVPLYISEISPTEIRGALGSVNQLFICIGILAALVAGLPLAGNPLWWRTMFGIAAIPSVLLALGMAMCPESPRWLFQQGKVAEAEKASAALYGKERVPEVMNDLKASVQGSSEPEAGWFDLFSSRYRKVVSVGAALFLFQQMAGINAVVYYSTSVFRSAGIESDVAASALVGAANVFGTAIASSLMDRQGRKSLLITSFSGMAASMLLLSLSFTWPVLAPYSGTLAVLGTVLYVLSFSLGAGPVPALLLPEIFASRIRAKAVALSLGMHWASNFVIGLYFLSVVTKFGISRVYLGFASVCMLAVLYIAGNVVETKGRSLEEIERALSPAV

SEQ ID NO: 3610 - protein, 509 aa, Brassica juncea
MTSVNVKLLYHYVITNLFNLCFFPLTAIVAGKAYRLTIDDLHHLYYSYLQHNLITIASLFAFTVSGFGLYIATLPKPLTLVEYSCYLPPRHLKVSVSKIMDIFYQIRKADTSSRNVACDDPSSLDFLRKIQERSGLGDETYSPEGLIHVPPRKSFAASREETEKVIIGGIENLFENTKVKPKDIGILVVNSSKFNPTPSLSAMVVNTFKLRSNIKSFNLGGMGCSAGVIAIAIDLAKDLLHVHKNTYALVVSTENITQGIYAEENRSMMFSNCLFRVGGAAILLSNKSGDRRRSKYELVHTVRTHTGADDKSFRCVQQGDDEDGKIGVCLSKDITNVAGTTLTKNIAICRPLILPLSEKFLFFATSVAMKLLKDKIKHYYVPDFKLAVDHFCIQPGGRAVIDELEKNLGLSPIDVEASRSTLHRFGNTSSSSIWYELAYIEPKERLKKGNKGWQIALGLGFKCNSAVWVALNNVKASANSPWEHCIDRYPVKNDSDLSKSKTHVQNGRS

SEQ ID NO: 3611 - protein, 589 aa, Geobacter sulfurreducens PCA
MTQSGPEDGSGNSRIGAAEMPEADTEKQQPASDAPSQELRDIRAQLELSLERYANLYHFAPVGYATIDAVGVIADANRTLAGMIGADCREMVGLLFSDFVHKDDVTSFVSHLARCTGQREGVTGEFRLSGRNGISVDVQLSSMPLTPPGGRVSCRTAITDITMIKRKERELNESREELCWAKEAAEDASRAKSEFLANMSHEIRTPINGVLGMLQLVLDTELGDEQRHCLEMAKRSADALLRLVNDILDFSRIEARKMVFESRPFDLTACVNSAVEILAFEARRKGLAVMVRMGPDVPAAVVGDEARLRQVLVNLIGNAVKFTDRGKVEVTAARAERQSDPLRTAIRISVRDTGIGIAPQERERLFRVFSQVDGACNRRFGGTGLGLALTRDIVEAMGGAIDVESQSGQGSTFTITIPLLLAVTASSPFLPADTLRIAEASAGGGTGAPVTPPISIQYEEARKVKILLAEDDPITRKFMEIMLERRNFEFESASDGHEAVEKWEAGEFDVVLMDVQMPRLDGYEATGLIRERERDRGRRTPIIALTAHAMRKDEDRCLDAGMDGYLSKPIDFTKLMECIGEILARRGRG

SEQ ID NO: 3612 - protein, 419 aa, Mycobacterium avium subsp. paratuberculosis K-10
MTELVTGETLPNVVVTGIAMTTALATDAETTWKLLLDSQSGIRKLEDSFVEEFDLPVRIGGHLLEDFDDGLTRAERHRMGYLQMMSTVLGRRVWENAGSPEVDSNRLMVSIGTGLGSSEEMVFSYDDMRARGMKGVSPLAVSKYMPDGAAVAVGLERHAKAGVITPVSACASGSEGIAQAWRNIVFGEADIAICGGVETKIEAVAIAAFAQMRIVMSTKNDDPVGACRPFDRDRTGFVFGEAGALMVIETEEHAKARGANILARIMGASITSDGYHMVAPDPNGERAGHAMSRAIQLAGLTPGDIDHVNAHATGTSVGDVAESKAINNALGPHGGNAAVYAPKAALGHSVGAVGAVESILTVLALRDQVVPPTLNLENLDPEIDLDVVAGKPRPGNYQYAINNSFGFGGHNVAIAFGRY

SEQ ID NO: 3613 - protein, 359 aa, Thiobacillus denitrificans ATCC 25259
MNITKDVSRLGQSLWLDNLSRDLLRDGALAKMIAEDGVSGVTSNPSIFQNALATSPHYADDLARLRREEADVERRYEALVIPDIRDACDLLLPLFERSAGNDGYVSLEVAPRLAYDTSGTVDEARRLWSLVDRPNLLVKVPGTPEGVDAFETLTQLGINVNVTLLFSIAQAQAVFDAYVRGLGKRAASGADLRRAKAVASLFLSRVDTAVDAELAGIGTQESLSLRGKAAVAMAKLAYQAYLETFRGPAFTALAARGARPQFLLWASTGVKNPDYHDLLYVEPLIGRETINTLPDKTLAALRDHGQPVPQLEQAVDEASAQLAEFARLGVDLDAVAARLQDAGVKQFETSYQALLAQIG

SEQ ID NO: 3614 - protein, 338 aa, Xylella fastidiosa Temecula1
MLFMRNTKSTLKIAIIGYGSQGRAHALNLRDSGFDIIVGLRPGGATEAKAQADGFTVQSPDQAAKHADLVAVLTPDMVQKKLYEEVLAPNIKQGACLLFAHGLNVHYSLITPRSDLDVVLVAPKGPGALVRREYEIGRGVPCIYAVHQDLSSHAEQLALTYAGGLGGARANIIKTTFKEETETDLFGEQAVLCGGVSSLVQAGFETLVEAGYQPEIAYYEVLHELKLIVDLFYEGGITRMLEFVSETAQYGDYVSGPRVIDRSTKERMKAVLKDIQDGTFTKHWIAEYQAGLPNYKKYKQADLEHPIEKVGKQLRAKMVWLNSEKTNDTTHPMSSKVV

SEQ ID NO: 3615 - protein, 206 aa, Schizosaccharomyces pombe
MFSRFATRYNALFEKAPIMTMCLTAGTLGGISDAVAQGLTIYQTNKNAMIGLDGVRLNTHPEIPSIKRVLQFVTFGFAISPFQFRWLRLLSAKFPIEKGAINVVKRVLLDQAVFAPFGTAFFFSWMTLAEGKGFRGAYDKLQAVFWPTLKANYMVWPFFQTVNFWLMPLQYQMPFACTVAIFWNIFLSLKNASSMQESGSQEIELF

SEQ ID NO: 3616 - protein, 200 aa, Prochlorococcus marinus subsp. pastoris str. CCMP1986
MKYLFSLIIVFSILVNPINTFAEDVVLAGGCFWCLEHDLESLRGITSVISGYSGGDLQKPTYENHNGHQEVVLVNYDSEVVTLSEIYRLYFRNIDPLDGGGQFCDRGDSYRPVIFFENSDEKNEARKSLLSASKELGVNLEKINVELKPKSQFWEAEAYHQDFANRNELKYKFYRFSCGRDQQLDKLWKENARSINVWSE

SEQ ID NO: 3617 - protein, 784 aa, Bacillus anthracis str. A2012
MKGVILAGGKGRRLRPLTCNTPKPMLPLLEKPVLEYNIELLRQHGIREIAITVQYMSTAIKQYFGDGSKWGVNLYYFEDSPPLGTAGSIKQAEKFLDETFVVISGDALTDFQLSKGITFHEQQKRMVTMFVKEVENPLSFGLVVMNKEQEVTRYIEKPSWNEVVSNIVNTGIYIMEPEIFSYIPPREFFDFSQDVFPLLANKNALFAYLSEGYWLDIGTFDQYRQAQFDLLTKKLQVPIPYTEVLPMVWMGEGVTIGKGTKIHGPSFIGEGAKIGAGAVIEPYSIIGKNSIVSSYSHLQKSIVFANAHIGQYCELLETTIGEHTMVEDDVTLFQKSIVADHCHIGKSTVIKQKGKLWPYKAIDSYSVVGSAGVQESEKSAGWLQKSRIVGRGNVEITPQFIVKVAMAYGSLFTKGESILIGSQEHIETTSYKNLFLHAIHGIGIHTMECKEMNESLFQYSIQDLQCAGGVFIQVENEKEVIIKLYAQDGAQLTYKQQKAIEQVYMSESFYYVCEKEMGRNKLVHVSLHDYIEAVLERIDIEKIQKQKFHLLINKRNDMLQHLLMLFLQRLGCTVTWIYAGEQKDHVKALMKSSKANMALMFSEQGNYFELYDNHSNIYQGTDFEEVDIPDLLLESTGNIYLMSLKLGECYLLFYTQDEKKSFQARWKRDILYRIGKLFELIALQGKTFLSIVEQSPPLYLLCDEVVCSWNEKGKVMRKLLADMERKEEGIFEGVQFKYTEKEWSYIVSDTKQPKFLVYSHARNPVIARENMKNLIEKIRQYQKV

SEQ ID NO: 3618 - protein, 179 aa, Escherichia coli
MTLKELLVGFGTQVRSIWMIGLHGSPNQTRMYPEEPVYLPPRYRGRIVLTRDPDGEERCVACNLCAVACPVGCISLQKAETKDGRWYPEFFRINFSRCIFCGLCEEACPTTAIQLTPDFEMGEYKRQDLVYEKEDLLISGPGKYPEYNFYRMAGMAIDGKDKGDRRTKPSLSTFKSLLP

SEQ ID NO: 3619 - protein, 226 aa, Arabidopsis thaliana
SGKPLGSMNLDELLKTVLPPAEEGLVRQGSLTLPRDLSKKTVDEVWRDIQQDKNGNGTSTTTTHKQPTLGEITLEDLLLRAGVVTETVVPQENVVNIASNGQWVEYHHQPQQQQGFMTYPVCEMQDMVMMGGLSDTPQAPGRKRVAGEIVEKTVERRQKRMIKNRESAARSRARKQAYTHELEIKVSRLEEENEKLRRLKEVEKILPSEPPPDPKWKLRRTNSASL

SEQ ID NO: 3620 - protein, 321 aa, Francisella tularensis subsp. tularensis SCHU S4
MQKSVLEQLKQVTMVVADTGDFELIKKYKPVDATTNPSLILKAVKEQKYSNLVAETISKVKANNPDLNSDDLVKEIAIEILVSFGIKILDVIEGKVSSEVDARVSFNSATTIDYAKRIIARYESNGIPKDRVLIKIAATWEGIKAAKLLQKEGINCNLTLIFDKAQAKACAEAGVYLVSPFVGRITDWQMQQNNLKTFPAIADDDGVNSVKAIYKLYKSHGFKTIVMGASFRNVEQVIALAGCDALTISPVLLEELKNRDEHLEVKLTKNDDVVTQSPQISEADFRWLMNENAMATHKLAEGIRLFTKDTIELENIIKQNL

SEQ ID NO: 3621 - protein, 545 aa, Aquifex aeolicus VF5
MAAKAIIYNEEARAKLKAGVDKLANAVKVTLGPKGREVILGKNWGTPVVTKDGVTVAKEIELKDKFENIGAQLVKEVASKTADVAGDGTTTATVLAQAIFHEGLRVAASGANVMEVKRGIDKAVKKIVEELKKLSKDVKERKEIEQVATISANNDPEIGKIIADAMEEVGKDGVITVEESKSAETTLEVVKGMQFDRGYLSPYFVTDPEKMECVLENPYILIYEKKITNVKELLPILEQVVRSGRPLLVIAEDVEGEALATLVVNHIKGVLKACAVKAPGFGQRRKDYLGDIAVLTGGQAITEDLGIKLESVTLDMLGQAEKVVVDKEHTTIIGGKGDPEQIKARIEQIKRQIQETTSDYDREKLQERLAKLSGGVAIIRVGAATEAELKEKKYRVEDAVHATKAAVEEGIVPGGGVALVRASEALEDLKGDNHDQQLGIDIIKKAVRTPLKQIAYNAGYDGSVVLEKVIELGKEKGVSWGFNAATGEYVDMYEAGIIDPTKVVRTAIENAASVAGTMLTAEALIADLPEEKKKDITPTDMPELD

SEQ ID NO: 3622 - protein, 1389 aa, Mycobacterium ulcerans
DPIDVAHSLATTRSHHPHRATITTSIEHHSENNHDTTDALAALHALANNGTHPLLSRGLLTPQGPGKTVFVFPGQGSQYPGMGADLYRQFPVFAHALDACDAALQPFTGWSVLAVLHDEPEAPSLERVDVVQPVLFSVMVSLAALWRWAGITPDAVIGHSQGEIAAAHVAGALTLPEAAAVVALRSRVLTDLAGAGAMASVLSPEEPLTQLLARWDGKITVAAVNGPASAVVSGDTTAITELLITCEHENIDARAIPVDYPSHSPYMEHIRHQFLDELPELTPRPSTIAMYSTVDGEPHDTAYDTTTMTADYWYRNIRNTVRFHDTVAALLGAGEQVFLELSPHPVLTQAITDTVEQAGGGGAAVPALRKDRPDAVAFAAALGQLHCHGISPSWNVLYCQARPLTLPTYAFQHQRYWLLPTAGDFSGANTHAMHPLLDTATELAENRGWVFTGRISPRTQPWLNEHAVESAVLFPNTGFVELALHVADRAGYSSVNELIVHTPLLLAGHDTADLQITVTDTDDMGRQSLNIHSRPHIGHDNTTTGDEQPEWVLHASAVLTAQTTDHNHLPLTPVPWPPPGTAAIEVDDFYDDLAAQGYNYGPTFQGVQRIWRDHATPDVIYAEVELPEDTDIDGYGIHPALFDAALHPLLALTQPPTNDTDDTNTADTGDQVRLPYAFTGISLHATHATRLRVRLTRTGADAITVHTSDTTGAPVAIIDSLITRPLTTATGSAPATTAAGLLHLSWPPHPDTTTDTDTDTDALRYQVIAEPTQQLPRYLHDLHTSTDLHTSTTEADVVVWPVPVPSNEELQAHQASDTAVSSRIHTLTRQTLTVVQDWLTHPDTTGTRLVIVTRHGVSTSAHDPVPDLAHAAVWGLIRSAQNEHPGRFTLLDTDDNTNSDTLTTALTLPTRENQLAIRRDTIHIPRLTRTAVLTPPDSGPWRLDTTGKGDLANLALLPTAHTALASGQIRIDVRAAGLNFHDVVVALGLIPDDGFGGEAAGVISEIGPDVYGFAVGDAVTGMTVSGAFAPSTVADHRMVMTIPARWSFPQAASIPVVFLTAYIALAEISGLSRGQRVLIHAGTGGVGMAAIQLAHHLGAEVFATASAAKWSTLEALGVPRDHIASSRTLDFSNAFLDATNGAGVDVVLNCLSGEFVEASLALLPRGGHFVEIGKTDIRDTEVIAATHPGVIYRALDLLSVSPDHIQRTLAQLSPLFATDTLKPLPTTNYSIYQAISALRDMSQARHTGKIVLTAPVVVDPEGTVLITGGTGTLGALFAEHLVSAHGVRHLLLTSRRGPQAHGATDLQQRLTDLGAHVTITACDISDPEALAALVNSVPTQHRLTAVVHTAAVLADTPVTELTGDQLDQVLAPKIDAAWQLHQLTYEHNL

SEQ ID NO: 3623 - protein, 312 aa, Zea mays
MEKSRVLVVGGTGYIGRRLVRASLAQGHPTLVLLRPEIGLDIDKLQMLLSFKAQGARLVEASLEDHAGLVAAVAQADVVVSAMSGAHIRSHNLSLQHKLVEAIKEAGNIKRFIPSEFGMDPSKMGHALEPGRVTFDEKMDLRRAIEDANIPHTYVSANCFAAYFCPNLCQMRTLLPPKEKVHVYGDGNVKAIFCDEDDVATYTIKSVDDPRALNKTLYIRPPENILTQNDVISKWEKLSGNVLEKIHIPADEFLASMKGTDLANQAGVGHYYHIFYEGCLTNFEIGDDGADATLLYPEVQYTRMDEYMKRYL

SEQ ID NO: 3624 - protein, 307 aa, Zea mays
MARPPCCDKEGVKKGPWTPEEDLVLVSYIQDHGPGNWRAVPTRTGLMRCSKSCRLRWTNYLRPGIRRGNFTEQEEKLIVHLQALLGNRWAAIASYLPERTDNDVKNYWNTHLKRKLQAGSGDGDGDGAAKPPAHRSPPSNSKGQWERRLQTDINLARRALREALTPLGDLKRQPQPQRDGAGVGIVGAPAAEGPYVLTADTVSRMLDGWAGLNGKRRGGAPGTPGGAETASTGSSSEVSYGGGTAAVAPAAGGPVFEYETKPPAAPSQLMMPLSAIESWLFDDDSHFHRPVQSASLLDAAPMDYYLL

SEQ ID NO: 3625 - protein, 140 aa, Chlamydomonas reinhardtii
  misc_feature (1)..(1): Xaa can be any naturally occurring amino acid
  unsure (1)..(140): unsure at all Xaa locations
XMVWTPVNNKMFETFSYLPPLTDEQIAAQVDYIVANGWIPCLEFAEADKAYVSNESAIRFGSVSCLYYDNRYWTMWKLPMFGCRDPMQVLREIVACTKAFPDAYVRLVAFDNQKQVQIMGFLVQRPKTARDFQPANKRSV

SEQ ID NO: 3626 - protein, 211 aa, Brassica napus
STHASGNVVRFLSPISAVPLVGLVGFGLYEFGFPGVAKCIEIGLPELLILVFVSQYLPHVIKSGKNVFDRFAVIFAVVIVWIYAHLLTVGGAYNGAAPTTQTSCRTDRAGLVGAAPWIRVPWPFQWGAPSFDAGEAFAMMMASFVALVESTGGFIAVSRYASATMLPPSILSRGVGWQGVAILISGLFGTGAGSSVSIENAGLLALTRVGS

SEQ ID NO: 3627 - protein, 393 aa, Vibrio harveyi
MSDKPKTKPLPSFVEGRLDFYIQDLIEQNENQKHLVLGKRPQQGAVVMQSNDYLSLSHNLQIQQAHRDAIYEHDDNVVMSAIFLQDDDSKPAFETQLAEYVGMGSCLLSQSGWAANIGLLQTICPPETPVYIDFFAHMSLWEGIRAAGAQAHPFMHNNMNHLRKQIQRNGSGVIVVDSVYSTIGTIAPLRDIYEMAREFDCALVVDESHSLGTHGPNGSGLVKALELTEQVDFITVSLAKTFAYRAGAILGPEKLARTLPFVAFPAIFSSTVLPQEIVRLEKTLEVIRSADDKRTMLFKRAKELRTGLKQIGFHIRSESQIVALECGSERNTERVRDFLEERNVFGAVFCRPATGKNKNIIRFSINADMTSRDIDHVLTACQEAYNHPELEFA

SEQ ID NO: 3628 - protein, 286 aa, Kluyveromyces lactis NRRL Y-1140
MQRRLDRVFRMTYSTLSEYTLQTKDKLRINRQHLESLTYPGSKVTFDPDQPIPKPDPNLKVFFFDIDNCLYKKSLRIHDLMEQSIHQYFQMKFNLDNETARELRENYYRTYGLAIKGLVDHHEIDAVEYNELVDDSLPLQDILKPDPEQRKILQRIRESGCFDKMWLFTNAYKNHGLRCVRLLGIADLFDGITYCDYSQSDLVCKPDVRAFEKAKLQSGLGEYSNAYFIDDSGSNIRTSIKLGLRKSIHLVEAGFDDFFSTSPSEATIIKAITDLPKACPEIFAKE

SEQ ID NO: 3629 - protein, 646 aa, Magnaporthe grisea 70-15
MAPTMAMRAARNVFRTTTARQIRPFSSTRPAARIFGNAPLRAKEASPHVSGKYPVIDHEYDAIVVGAGGAGLRAAFGLAEAGFNTACISKLFPTRSHTVAAQGGINAALGNMHEDDWRWHMYDTVKGSDWLGDQDAIHYMTREAPASIIELENYGCPFSRTEDGKIYQRAFGGQSQKYGKGGQAYRCCAAADRTGHALLHTLYGQSLRHNTNYFIEYFAMDLIMQDGECVGVVAYNQEDGTLHRFFAKNTVLATGGYGRAYFSCTSAHTCTGDGMAMVARAGLPNQDLEFVQFHPTGIYGAGCLITEGSRGEGGYLLNSEGERFMERYAPTAKDLASRDVVSRSMTMEIREGRGVGPEKDHIYLQLSHLPAEVLAERLPGISETAAIFSGVDVTKQPIPVLPTVHYNMGGIPTRYTGEVITVDESGKDKVVPGLFACGEAACVSVHGANRLGANSLLDLVVFGRAVSHTIRDNFSPGQKHTPAAADAGAESIEVLDQVRTADGPKSTAEVRLAMQKAMQTDVSVFRTQESLDEGVRKVNEVDQMFSQVGTKDRSMIWNSDLVETLELRNLLTCATQTAVSAAARKESRGAHAREDYPDRDDDNWMKHTLSYQKKPHGKVELSYRGVIGHTLDEKECAAVPPFKRVY

SEQ ID NO: 3630 - protein, 520 aa, Arabidopsis thaliana
  misc_feature (108)..(108): Xaa can be any naturally occurring amino acid
  misc_feature (128)..(128): Xaa can be any naturally occurring amino acid
  misc_feature (166)..(166): Xaa can be any naturally occurring amino acid
  misc_feature (235)..(235): Xaa can be any naturally occurring amino acid
  misc_feature (253)..(253): Xaa can be any naturally occurring amino acid
  misc_feature (286)..(286): Xaa can be any naturally occurring amino acid
  misc_feature (379)..(379): Xaa can be any naturally occurring amino acid
  unsure (1)..(520): unsure at all Xaa locations
MEISVASVTVSVAVVVVSWWVWRTLQWVWLKPKMLESYLRRQGLAGTPYTPLVGDLKRNFSMLAEARSKPINLTDDITPRIVPYPLQMLKTHGRTFFTWFGPIPTNHXILDPEQIKEVFNKVYDFQEXHTFPLGRLIAAGLVSYDGDKWSKHRRIMNPAFHLDQTXNIWNLRFTRFEPSIDQSCGEFVREWNDQQSEVDIWCLALVCDVFVSMTADVISRTAFGSSYKEGRRILXLQAELAHFFIKAFRKALXPGYSYHRRMKATDREIKFILRGIVNKRLRARDXGEAPSDDLLGILLESNLGQTKGNGMSTEELMEECKLFYFAGQETTTVLLVWTMVLLSQHQDWQARAREEVKQVFGDKEPDAEGLNQLKVIIIXKTQIFPFMFRLYPPVVQLTRAIHKEMQLGDLTLPGGVQISLPILLIQRDRELWGNDAGEFKPDRFKDGLSKATKNQVSFFPFAWGPRICIGQNFALLEAKMAMTLILRKFSFELSPSYVHAPYTVLTTHPQFGAPLILHKL

SEQ ID NO: 3631 - protein, 74 aa, Capsicum annuum
MAGFSKVIATIFLMMMLVFATGMVAEARTCESQSHRFKGLCFSKSNCGSVCHTEGFNGGHCRGFRRRCFCTRHC

SEQ ID NO: 3632 - protein, 662 aa, Oryza sativa
MSKLRRRRLGVRRGGDVGTRRRKPRLGGDEGGNEVALALGTGMGALVDLVGGAVTGAGVAGVFLKETDGVVVSIVVGASGDGGIDVENDLLLRSNPAISAPPPSSTNRRQWSSSPRTTAESPWLSRGRRSGGFDSAANGFSLSGEGDSKADMEAEWLSSLASCCAESGDGTIADGLIALRAKRKGSPCQQDGDSQGAADIEIPSLPEDIWRLIHSLMPMRDAARAACVSRSFLSLWRCHPNLNFSSEAFGLNKNACGKEELAGLFYSKVDHILKRHSGIGVKKLKIQIYSDYSGKGSSYLNNWLQISVKPGIEELIISLTQFQAKYNFPCSLLSNGSGDSIQYLHLSNCSFHPTVTLSGLRSLMRLYLCCVRITENELGCLLSHSLALEQLEIRYCDRIVCLKVPCLLQRLISLKVFGCDKLKLIENEAPNVSIFAFQGDKTELKLGETLQIKSLCMVRSGYVYHARAELPSIMPNLESLAIKSRKETAFAPKLCSKFLCLRHLSIGLIGFFPAYDYLSLASYIYAAPSLETFDLNVMQRNVQSVSIFAHPADLRSIREEKHHNLKSVTVTSFISVKSLVELTCHILESTASLECLTLDASQTGFRCDTPGSKISKCPPLDRDIIMEGHRGVLAIRRYIQPRVPSTVKLTVLEPCSCHSTEL

SEQ ID NO: 3633 - protein, 285 aa, Sulfolobus tokodaii str. 7
MKPIHLSVGRFNIDIIVNIEKMPDTDEFLTTDLMEIMPGGAAVNYAVAITKLGHSSKLLAKVGKNTITQSLMESIAEMGVGLDYVEETNAPQSMALIFLRKNGKISMVRKLGASTLITQEDVKKYFGLFDTIHFASVPPNIVVRDPMARLISYDPGPFSKDVNEVDVDVLYLNEKESKAINLDKIRAKIIVIKMGEKGAKVITENQECYVEAYKVDNIVDTTGAGDVFDATFNYSLLEGLSIEEGLKLAVTASAIKIQRLGGISSPNLNEVHEALKIYEPKVKCI

SEQ ID NO: 3634 - protein, 730 aa, Idiomarina loihiensis L2TR
MSLKKLLLLLIIVALFISAFAFDLTQYLSLDVLKEKQQQLNQLFVDYPFQVFAIYFVVYVASTALSLPGATILTLGAGAIFGLGWGLLLASFAASLGAFLAFLSARFILHDWVQEKFGDRLTAINRGMERDGAFYLLSLRLVPLFPFFVINLVMGLTKIKAWTFYWVSQVGMLLGTAVYVNAGTQLAQISSLGDVISADLIGAFVLLGIFPLIAKAVLAFVKRRKAFKGYKKPKSFDNNLVVIGAGSAGLVSAYIAATVKAKVTLIEKHKMGGDCLNTGCVPSKALLHVAELAHNARNASSAGVHVGEVSVDFKQVMQQVKSVIKDIEPHDSVERYTKLGVDVEQGDARIVSPWEVEVTSNVEGKSETKRITTRSIIIATGAKPLVPDFEGLDKVDYLTSDTLWELDELPKRLLVLGGGPIGCELSQAFQRLGSQVTQVEMAERLMGPEDADTVELLTRRLTAEGIDIRLNHKALRFEQHNGESVLIAEQTVDNESVDNQNADQSKDVEIPFDKVLIALGRQPNITGFGLEELGVQTNKTVSTNELLQTNFPNIYACGDVAGPYQLTHVASHQAWYASVNALFDPFKTFRADYSVIPWVTYTSPQVANVGLTEQQAKKADKPYEVTEYDIGELDRAIADDSAYGRVKVLTKPGKDELLGVNIVGPQAGELLAEYVLAMKYGIGLNKILGTIHSYPTLAEANKYVAGEWKRANAPQKLLTWVEKFHRWRRS

SEQ ID NO: 3635 - protein, 944 aa, Cryptococcus neoformans var. neoformans B-3501A
MSSLASAPPTASIPASDSYNSPVQSSGPGLGNGNSTPSKWKSVFKLGRTATIGRGKENRSALGGESFVLDNKEQQSFAGEVSPAVPTEPYLPPRKTQLRAHTDPYPPKSPSVKNNPGSVSVEHFDSKVLHEEGMPKTREEGSSESFNVHLNSSNGNLQTTSTSGEQSRPYSSVTDSASASTTERTSHSSGGHFLPGDGSLHGVASSNTYGTASTRSPTGGPLGIGNLKSRFFSAPLSAPAGKNKHDKSKSEKYRGLGKVATDFPQSTAPPSSAGGASSSGGGRKKSDGSSSLSSRGAASPRTPAKSKREPSANSSRRMPFGQTNDNGSNSGSVAARFLRRVVSAPNTKALFSNNLFSNAPDVPPLPAPKNQPNSSTSSKEKSSSPVVIVGNSGGHIDLTSSPDSDHPPSISPLSNSSTMYTSQTSHTPSASASATPTPSPLKQKNHFLSPTASPSPGQGSGLSAKGTRASRSLTTGTAPVLKNIRQLQGYSGSSPGGGGYMDGESRHKQVFKRTYSSNSIKTKQVEVTASSFQKIKLLGKGDVGKVYLVREKKTDKLFAMKVLSKKEMIKRNKIKRALAEQEILATANHPFIVTLFHSFQSQDYLFFVLDYCMGGEFFRALQTRPGKCLSEEHAKFYAAEVTAALEYLHLNGYIYRDLKPENILLHQSGHIMLSDFDLSKQSGEAGGAPAAIRHGGPNGQTILVDTRSCIADFRTNSFVGTEEYIAPEVIKGHSHSSAVDWWTLGILVYEMIFATTPFKGPNRNATFANVMKNEVLFPESVPVSSNCKSCIRKLLIKDENKRLGSASGASEVKQHKWFASVNWGLLRNMTPPIIPEESNGIDTINFRPLRESKSIDFDRDDITTDIIHAKAGSPSVSGNSTPGMLTPKELVQTTSSSSPIGGGAGGTSGHSSSAMPIPGSMRGYDKEKNPFGEFSSVTRDFGEC

SEQ ID NO: 3636 - protein, 793 aa, Chara corallina
MAAVAEGLNAMTTIPTTTAPADLALAAVTGNTIVSETAVLIFIPAACVIGILFAVLQWSVVGKISVRPSGGGMNYPLMGDEGLEDSSVVTRCAEIQEAISEGAVSFLMTEYKYLSYFMVGFFIVIFAFLGATEDFGTDRKPCEWDATKLCGSGVMNALLSAVAFALGAITSTLCGFLGMKIATFANARTRSRRGGGVGPAFKAAFRSGAVMGFLLTSLGLIVLYFTILIFQRYYGDDWIGLYESIAGYGLGGSSVALFGRVGGGIYTKAADVGADLVGKVERNIPEDDPRNPAVIADNVGDNVGDIAGMGADLFGSLAESTCAALVVSSLSDFGKEMNYVAMSFPLLITGAGILVCLITTLVATDLTSGVSNIKGIEPALKQQLVISTVLMTPVIALLAWGCLPDTFEIINGAETKVVKKWYMFFCVACGLWAGLLIGYTTEYFTSHQFTPVRDVADSCRTGAATNVIFGLALGYKSVIIPILAIAFTVFVSHTLAAMYGIACAALGMLSTLSTCLAIDAYGPISDNAGGIAEMAEMGPAIREKTDALDAAGNTTAAIGKGFAIGSAALVSLALFGAYINRAGITSVDVILPKEFVGLIVGAMLPYWFSAMTMKSVGKAALAMVEEVRRQFNTIAGLMQGTVKPDYKRCVEISTDASLREMIPPGCLVMLTPLVVGGLLGKETLAGILAGALVSGVQIAISASNTGGAWDNAKKYIEAGGNDHARTLGPKGSDCHKAAVIGDTVGDPLKDTSGPSLNILIKLMAVESLVFAPFFKTYGGVLFVLWDKFVAGKY

SEQ ID NO: 3637 - protein, 354 aa, Bacillus cereus E33L
MESMFNKIFLIVALIGVPLSVLGKTLHWPQTIMFAVYCITIIALAGFMGRATESLAIVSGPRIGGLLNATFGNAVELIISIFALQAGLIEVVLASLTGSVLGNLLLVGGLSFFVGGLKYKRQSFNVYDARHNSALLIFAVVVAFVIPEIFSMKMDASKTYQLSIGVSIIMIIMYLAALLFKLVTHRGVYQHKSDEVAHEEEPEWSKGKALLILAIATIAVAYVSEALVHTFETVAKSFGWSELFIGVIIVAIVGNAAEHASAIIMAYKNKVNIAVEIAVGSTLQIAMFVAPVLVLLSMFFAQRMPLVFTIPELVSMITAVFLTIAISNDGDTNWFEGGTLLAAYVIMGIGFYLL

SEQ ID NO: 3638 - protein, 849 aa, Schizosaccharomyces pombe
MPSGAQGNTQSAAYKRIVNVSRNFQFKAALNKDTREWTFQHRSSGTALYSAIASLGDPSSPWDAVYVASPGPVQISEGNDHTVETKIDEAAVVHRSSSIVISPEDQEIFLKKATEYYRKKNIEADIVPVWGKVQRVPQAKSSSATITPSVSNKLSTAYQSIKSEALKDGPMYADSVLWDVLHYRIPTLDGYQQHNLWKNFTRWSQYFADNIVSNYRPGDLILIHDYSLFLLPRLIRKQLSDAPIVFFLHAPFCTSEVFRCLSKRAEILKGVLASNVIAMQTDSYTRHFLSTCSNVLGLETTSTHIDTSDGFRVVVFSSHVSIDVPRVYSRCNSKPVSLKIQQLKSLYPSDKKLIVGRDQLTKACGVTHKLRAFRELLIHFPKWRGHVVLIQITSLPVGNNYSNEELKKTENLVAQINSEFGSLDYTPVIHFHQLLDPDEYYALLSVANIACVSSVRDSMNTMALEYVACQQKNKGSLILSEFSGTAELLLSAYLVNPYDYSRFAETINYCLNMTEKERERRFSSLWKQATSQSSQQWIYKLINRAAYEVKALESHMTTPLLTYNILIKPYRNAKRRLFLLDYDGTLIESARNSIDAVPTDRLLRTLKRLASDSRNIVWILSGRSQKFMEEWMGDISELGLSSEHGSAIRPPLAGSWSSCAENLDLSWKDTVRDFFQYYVERTPGSYIEEKKHSISWCYQNANTTYSKFQSLECQTNLEDMLKHYDVEISPAKSFLEVHPNYLNKGSIVRRILKRSGSVDFVFCAGDDKTDENMFEVFLPTAFSNSHLIDEIDSTEYSGSHHTDDNSDANKVENVKVATFRVHIGLTDKPTLSDYHLPAPRDLGELLHNL

SEQ ID NO: 3639 - protein, 175 aa, Oryza sativa (japonica cultivar-group)
MAPSVMASSATTVAPFQGLKSTAGMPVARRSGNSSFGNVSNGGRIRCMQVWPIEGIKKFETLSYLPPLTVEDLLKQIEYLLRSKWVPCLEFSKVGFVYRENHRSPGYYDGRYWTMWKLPMFGCTDATQVLKELEEAKKANPDAFVRIIGFDNVRQVQLISFIAYKPPGCEESGGN

SEQ ID NO: 3640 - protein, 179 aa, Brassica napus
  misc_feature (11)..(11): Xaa can be any naturally occurring amino acid
  misc_feature (17)..(17): Xaa can be any naturally occurring amino acid
  misc_feature (20)..(20): Xaa can be any naturally occurring amino acid
  misc_feature (27)..(27): Xaa can be any naturally occurring amino acid
  misc_feature (33)..(33): Xaa can be any naturally occurring amino acid
  misc_feature (35)..(35): Xaa can be any naturally occurring amino acid
  misc_feature (38)..(38): Xaa can be any naturally occurring amino acid
  misc_feature (94)..(94): Xaa can be any naturally occurring amino acid
  misc_feature (133)..(133): Xaa can be any naturally occurring amino acid
  unsure (1)..(179): unsure at all Xaa locations
GTRGPRRMHCXMNSIPXSSXEPGGSVXNQPEKXVXGRXDESFRSNISFSKSSLDYRSVDFSSARFSEMGVVSCEEDQEETSFRPLVLKNKQPRXHEQLQCWCLNFRGRVTVASVKNFQLVAVRQPQTQGTGGXAPAPGAHGEQDKVILQFGKVGKDMFTMDYRYPLSAFSSVCDLLEQL

SEQ ID NO: 3641 - protein, 411 aa, Yarrowia lipolytica CLIB122
TSSLVDEVTREPRIANMSLLVETIVKLKRDGHRVIIVSSGGIAVGLKRLGITDRPKGIAEVQAVAAVGQARLIGLWDDLFRQMGQPIAQILLTRNDLADRTQYLNATATLNELLNMGVIPIVNENDTLSAYEIRFGDNDTLSAITAGMANADYLFLMTDVDCLYTANPRSDPTAKPILIVDDISSLKVDVSSTGSNVGTGGMTTKLIAAELATSVGTTTVICKSSVPGNIRAIVKYNQKYDVEADAKEIVTPAYQAQELERLVVEDVPLHTKFIADKEPIKDRQFWLLHGLSAAGKIYIDAGCYKALTRKNRAGMLPAGLLGTVGTFHTSETVSIHVGRKLEDGGWIPHPDFADMEVGRALVNYGSTEMELIKGLQSNQIESVLGFMDSEYLAFRDNIAFLPHTNAPSSPA

SEQ ID NO: 3642 - protein, 711 aa, Oryza sativa
MAGGGRMPLLGWWLMLVGSLRLASVWFGFFNIWALRVAVFSQTDMTEIHGRTFGVWTLLTCTLCFLCAFNLENRPLYLATFLSFIYALGHFLTEYLIYHTMAVANLSTVGFFAVLSCNTQMTCLKLIGLHKEGHRLYGCCFNGIHMGNLVVLNLLSSHECLTMVMHRSLKATVLDAGLTAVAHDAVHFDSDLPHYATHGGVLRDPSGGDPGRVVSPPLMWAEALDLLLARLAPRVDYARVAAVSGGAQQHGSVYWKRGAAAVLASLDPARGLAPQLAAALATTESPVWMDSSTAAQCREVEAAVGGALELARMTGCRAHERCTGPQIRKMYQARRRVYDDTERISLVSSFMASLLVGGYACIDETDGAGMNLMDITTRELRRDALEATAPDLEDKIGKLAPAHAVAGTLSPYFVQRFQFSSNCLVVQWSGDNPNSLAGLTLSDPGDLAISLGTSDTVFGITDLPEPSLDGNILPNPVDPKTYMVMLCYKNGSLTREDVRNRYADGSWDVFNKHLENTAPLNGRKLGYYYNEPEILPPLPVGFHRYVVSSSASGSLDEMVEHQINQFDPPSEVRAIIEGQFLSMRGHAERCGLPVPPKRIIATGGASSNQIILKTMASIFGCSVYTVQRPDSASLGAALRAAHGWICNQKGKFVPVSCLHSDRLNRTSLSIKLAAPFGDSEEDIDLLNNYTLLMKKRLEIEQKLVEKFGRHS

SEQ ID NO: 3643 - protein, 689 aa, Prochlorococcus marinus subsp. pastoris str. CCMP1986
MIESNEPNKIKLNPSKKFIDENNPDHWSSRVLTWWSGFSLRTKLLAIATLVVSLLMTGITFFALNSIQRDAGMNDTRYARDLGLLLSGNVTELVANNQRKEISNVAEKFWRSSRNLRYIFFTDADDIVQLGIPISATPTSSDNQFQLTRRLKLPSELKKRPQFPLVRQHATPQGQVTDVFVPMLWKGKYLGTLALGVTPNKKALSSAALTREVTIAVFISIWVLVILGAVFNALTITRPVRELVKGVREISKGNFKSRISLPMTGDLGELLTGFNRMASQLENYDEANIEELKAAQIKQQSLIATMADGAILLDSKGKIVLTNPTAKRLFRWEGRFLEGKYLLNEIPEILSNDLHTNIESILKREKENDDLRCSLGEPARTLRIVLQSVLDTNKVELKGIAVTIQDLTREVELNAAQNRFISNVSHELRTPLFNIKSYVETLYDLKDQLSNEEQLEFLGIANSETDRLTRLVNDVLDLSRLESGKIIQLEPMEIKPAIEQTLRNYRLNATEKNVSLAHDIEENIPSILGNFDLLLQVFDNLLGNGLKFSPKNSTLKIRAYTWPDSCPAFPPNNNKDAPQCELVSPLPKVRIEIADNGSGISQPDQEKIFDRFYRVENAVHTEQGTGLGLSIVRGIIEKHGGQIRMASELGIGTTFWFDLPLEQSDKDELLAQTINNVENFSDSQVSELF

SEQ ID NO: 3644 - protein, 440 aa, Staphylococcus aureus subsp. aureus COL
MKTYDLIVIGFGKAGKTLAKYAASTGQHVAVIEQSPKMYGGTCINIGCIPSKTLVHDGLEGKSFEASYNRKNDVVNALNNKNYHLLADDNNIDVLDFKAQFKSNTEVNLLDQHDDIVDSITAPHIIINTGATSVIPNIKGLDQAKHVFDSTGLLNISYQPKHLVIVGGGYIALEFASMFANLGSKVTVLERGESFMPREDQDVVAYGITDLENKGIALHTNVETTELSSDNHHTTVHTNVDNFEADAVLLAIGRKPNTDLALENTDIELGDRGEIKVNAHLQTTVPHIYAAGDVKGGLQFTYISLDDYRIIKSALYGNQSRTTDNRGSVPYTVFIDPPLSRVGLTSKEAAAQHYDYTEHQLLVSAIPRHKINNDPRGLFKVVINNENNMILGATLYGKQSEELINIIKLAIDQNIPYTVLRDNIYTHPTMAESFNDLFNF

SEQ ID NO: 3645 - protein, 480 aa, Pseudomonas syringae pv. syringae B728a
MQLKDSTLFRQQAYINGQWLDADGGQSIKVNNPANNEILGTVPKMGAAETRRAIEAADKALPAWRALTAKERGNKLRRWFELMIENQDDLGLLMTLEQGKPLAEAKGEITYAASFIEWFAEEAKRVYGDVIPGHQPDKRLIVLKQPIGVTAAITPWNFPAAMITRKAGPALAAGCTMVLKPASQTPFSALALAELAERAGIPAGVFSVVTGSAGDIGAELTGNPIVRKLSFTGSTDIGRQLMAECAKDIKKVSLELGGNAPFIVFDDADLDKAVEGAMISKYRNNGQTCVCANRIYVQDAVYDAFAEKLKAAVGKLKIGNGLEEGVTTGPLIDDKAVAKVKEHIADAVSKGATVLTGGNSLEGSFFEPTILVNVSKDAAVAREETFGPLAPLFRFKDEAEVIAMANDTEFGLASYFYAQNMSRVFRVAEALEYGMVGINTGLISNELAPFGGIKSSGLGREGSKYGIEDYLEIKYLCLSV

SEQ ID NO: 3646 - protein, 366 aa, Rhodospirillum rubrum
MMTIPVTILTGFLGSGKSTLLNRLLRHPAMGETAVVINEFGEVGLDHLLVRQVDEDIVLLNAGCLCCTVRGDMVTALHDLFLKRVRGDVPEFQRLAIETTGLADPAPIIHTLMTDPLIGGRFRLDGVVTVIDAVNGEKELDEHIEAVKQAAVADRLVLSKTDLVEDSAALKARLKALNPAAIVLEAIEGDIHPDALLDCGLFSSSGKAPDVAQWLRDEAYRDRDEQHHGHGHHHDHDHHDHDHGHDHHHDHHPHDVNRHDARISSFCLTFDEPLDWELFVSALEMLISSKGEDLLRIKGILDVIGQDRPIAVHGVQHVFHPPVPLPAWPAGEPKTSKLVFITRDLDRATVEGLLRAALGGQEVLLD

SEQ ID NO: 3647 - protein, 966 aa, Flaveria australasica
MANRNVEKLASIDAQLRLLVPGKVSEDDKLVEYDALLLDKFLDILQDLHGEDLKEAVQQCYELSAEYEGKHDPKKLEELGSLLTSLDTGDSIVIAKAFSHMLNLANLAEELQIAYRRRIKLKSGDFADEANATTESDIEETFKRLVHKLNKSPEEVFDALKNQTVELVLTAHPTQSVRRSLLQKHGRIRNCLAQLYAKDITPDDKQELDEALHREIQAAFRTDEIRRTPPTPQDEMRAGMSYFHETIWKGVPKFLRRVDTALKNIGINERFPYNAPLIQFSSWMGGDRDGNPRVTPEVTRDVCLLARMMTSNMYFSQIEDLMIEMSMWRCNSELRVRAEELYRTARKDVKHYIEFWKRIPPNQPYRVILGDVRDKLYNTRERSRHLLVDGKSDIPDKAVYTNVEQLLEPLELCYRSLCDCGDHVIADGSLLDFLRQVSTFGLSLVKLDIRQESDRHTEVLDAITQHLGIGSYREWSEEKRQEWLLAELSGKRPLIGPDLPKTEEVKDCLDTFKVLAELPSDCFGAYIISMATSTSDVLAVELLQREYHIKHPLRVVPLFEKLADLEAAPAAMTRLFSMDWYRNRIDGKQEVMIGYSDSGKDAGRFSAAWQLYKTQEQIVKIAKEFGVKLVIFHGRGGTVGRGGGPTHLALLSQPPDTINGSLRVTVQGEVIEQSFGEEHLCFRTLQRFCAATLEHGMNPPISPRPEWRELMDQMAVVATEEYRSVVFKEPRFVEYFRLATPELEFGRMNIGSRPSKRKPSGGIESLRAIPWIFSWTQTRFHLPVWLGFGAAFKHAIQKDSKNLQMLQEMYKTWPFFRVTIDLVEMVFAKGNPGIAALNDKLLVSEDLRPFGESLRANYEETKNYLLKIAGHKDLLEGDPYLKQGIRLRDPYITTLNVCQAYTLKRIRDPNYHVTLRPHISKEYAAEPSKPADELIHLNPTSEYAPGLEDTLILTMKGIAAGMQNTG

SEQ ID NO: 3648 - protein, 382 aa, Ashbya gossypii ATCC 10895
MQIFVKTLTGKTITLEVESSDTIDNVKSKIQDKEGIPPDQQRLIFAGKQLEDGRTLSDYNIQKESTLHLVLRLRGGMQIFVKTLTGKTITLEVESSDTIDNVKSKIQDKEGIPPDQQRLIFAGKQLEDGRTLSDYNIQKESTLHLVLRLRGGMQIFVKTLTGKTITLEVESSDTIDNVKSKIQDKEGIPPDQQRLIFAGKQLEDGRTLSDYNIQKESTLHLVLRLRGGMQIFVKTLTGKTITLEVESSDTIDNVKSKIQDKEGIPPDQQRLIFAGKQLEDGRTLSDYNIQKESTLHLVLRLRGGMQIFVKTLTGKTITLEVESSDTIDNVKSKIQDKEGIPPDQQRLIFAGKQLEDGRTLSDYNIQKESTLHLVLRLRGGAL

SEQ ID NO: 3649 - protein, 373 aa, Thermus thermophilus HB8
MRLFLKLFLSHLLVALLALLLLLLLAEAFAPAFYRGHVERMLHALSMMGGGMMGEALRRDLEEGLRSTLTAALLAALPLAALGALLTASFASLRLARTARLLAEGSRRMAEGEYGVRLPLLERDELGELALHFNRLAEALEKVEKTRAELIGTVAHELRTPLAALQGYAEGLIDGVLSKEKAAEGILREVKAMRRLVEDLSLVSRVEAKAVEIRPRPLDPKGLLEEALARFQSAFQAKGVALSLEAQDPLPQVWADEERVLQVLANLLTNALRHTPQGGEVRLRAFRQGEAVAFQVADTGPGIPEEHLPHIFERFYRVDKARSRKEGGSGVGLTVAKGLVEAMGGRIFVESRVGEGTTFTFTLPLYTGLTLKG

SEQ ID NO: 3650 - protein, 390 aa, Bacillus cereus ATCC 10987
MREAVIVAGARTPIGKAKRGSLKTVRPDDLGALVVKETLKRANYEGPIDDLIFGCAMPEAEQGLNMARNIGGLAGLSYDVPAITINRYCSSGLQSIAYGAERIMLGHSEAVLSGGAESMSLVPMMGHVVRPNSRLVEAAPEYYMGMGHTAEQVAVKYGISREEQDAFAVRSHQRAAKALAAGNFADETVPVDVTLRTVGSNNKLQEETITFTQDEGVRAETTIDILGKLRPAFNVRGSVTAGNSSQMSDGAASVLLMDREKAVSDGMKPLAKFRSFAVAGVPPEVMGIGPIAAIPKALKLAGLELSDIGLFELNEAFASQSIQVIRELGLDEEKVNVNGGAIALGHPLGCTGAKLTLSLIHEMKRRNEQFGIVTMCIGGGMGAAGVFELL

SEQ ID NO: 3651 - protein, 284 aa, Francisella tularensis subsp. tularensis SCHU S4
MLKTKSLTPHEYDIIINKATEKPFTGRYNDLDQKGVYICRNCGTPLFRADSKFISACGWPSYDIHIDNNVKQLPDADGRRTEILCNNCDGHLGHIFHGEGYTKLNTRYCVNSACVDFIPIEDFGTTEEIIVAAGCFWGVEYYMKKLPGVLFAESGYCGGDQPYPDYKKVCQGDTGYLEVVRVIFDTSKVSLQQVLKYFFEIHDFEQVDGQGPDIGEQYKSAIFYYDDKQKQIAEDLKHILAQKGYKVATEIRAMKPYYVAEDYHLDYYMKKGTLPYCHSHKKIF

SEQ ID NO: 3652 - protein, 123 aa, Dianthus caryophyllus
MITIHHPWVFAFGLLGNFISFMVFLAPLPTFIRVYKKKSTEGFQSFPYVVAIFSAMLWIYYALLKGNSLLLITVNVTGVIIETIYVIIFITYAPRQARISTMKLLLFMNFGGFCMIVPRPRPR

SEQ ID NO: 3653 - protein, 771 aa, Candida glabrata CBS138
MSEKDGGNTVFINKLYDLLENKDLDDLIWWAANGESFLIRPSESFSQNLAHYFKHTNITSFVRQLNIYGFHKISNDHFHNLKREKKQKSSTDNNTGVSNNNSGDENIKVWEFKHSGGLFKKGDLENLKLIKRRSSSRTIPSLSLASSNTNTSTLETNDGAEIDNVKVIASAVHNATEHLKKKDKVKKEGKKSSKKSTKLKNEPTVDISNTETTSAAITNESEQSSNKRATRVYKSVGTISNQDSKNPEKLTKKPKKNSNLKNKGKKSKSNSVDGQSIDNIQPNENQPINIQVNTTEIPTDNTLHHYNETLYEQSIQLNHQIAQMRNTNMDMLAILELMSKLAEMNKEVLNINNSEKIPELMANHYRFFDAQLTSLKNNILDRINNTNIHKFGMDSNDLRSASQTNIHLSHPIAQNMVYSSADQAIPKSVPYYLKQGQRTSPDNGTTTPAGAQNYSKNQVVQHPQAANDYFSSVHVQTANPFEKFQTEKNGIINVTARRHMSVLVDPLTPASMMSVPTTTQSSLSGPSLYNQQHAIIFPHDLNQAFNSRSEPTITPITGHHSNFTRASDSNLMNTKQTIVNSMKNRASYPSRRTESPLKYSSGMPIEEEQRWEYKITKDNGRNTDIPQLPSNQCQIDSPVPVRSPYNKFVSPHSFYAGGRNISPPMNGNVDMLAQRPSTEVVSLTSSDNKIDNAVVIKRSSTANPILRGSSSEKENKESSNKLIGSTVTEKTSRTKRNSSGVYSLLNGTIKEEKANETFIDTDSHVDKKIKL

(The sequence listing continues in the following parts.)

The claims are as follows:

1. A plant cell with stably integrated, recombinant DNA comprising a promoter that is functional in plant cells and that is operably linked to DNA from a plant, bacteria or yeast that encodes a protein having at least one domain of amino acids in a sequence that exceeds the Pfam gathering cutoff for amino acid sequence alignment with a protein domain family identified by a Pfam name in the group of Pfam names consisting of bZIP_{—}1, bZIP_{—}2, Meth_synt_{—}1, Homeobox, Succ_DH_flav_C, RWP-RK, Meth_synt_{—}2, CTP_synth_N, WD40, Sigma70_r2, Sigma70_r3, Fer4, Sigma70_r4, Sigma70_r1_{—}2, CMAS, Sugar_tr, Rubrerythrin, Pro_dh, Ldh_{—}1_C, START, HATPase_c, Cpn10, Glycos_transf_{—}1, Glycos_transf_{—}2, Pkinase, KH_{—}1, cobW, Ldh_{—}1_N, DUF393, SecY, PC1, SRF-TF, IF4E, Lectin_legA, MatE, Dehydrin, Lectin_legB, Ank, 2-Hacid_dh_C, Tic22, Chal_sti_synt_C, AA_kinase, ELFV_dehydrog_N, HLH, Ribonuclease_T2, HEM4, AT_hook, Peptidase_A22B, tRNA-synt_{—}2b, Suc_Fer-like, Glyco_transf_{—}20, MFS_{—}1, HMA, Ketoacyl-synt_C, Steroid_dh, Hydrolase, Peptidase_C1, Ion_trans, Aa_trans, peroxidase, GAF, Cu-oxidase, ABC1, PMSR, BI2D, Chromo, Lipase_GDSL, Ran_BP1, DUF125, Lig_chan, GAT, Tub, NPH3, BAH, GFO_IDH_MocA, DUF6, Orn_DAP_Arg_deC, F-box, 3_{—}5_exonuc, NUDIX, Cyclin_C, Trehalase_Ca-bi, Acyltransferase, MtN3_slv, zf-B_box, PUA, AMPKBI, Peptidase_M20, Transaldolase, ketoacyl-synt, Cyclin_N, HisKA, Ribosomal_L7Ae, Methyltransf_{—}11, Methyltransf_{—}12, Hexapep, Ribosomal_S2, Jacalin, ERp29, MFMR, Usp, DUF641, Pyr_redox_dim, Auxin_resp, Inhibitor_I29, Transferase, cNMP_binding, BURP, Epimerase, Ribosomal_L39, Metallothio_{—}2, Pyr_redox_{—}2, WRKY, GSHPx, Kelch_{—}1, Kelch_{—}2, Aminotran_b 1_{—}2, ABC_tran, UDPGT, Cystatin, YL1, AMP-binding, NTP_transferase, HALZ, Kunitz_legume, HSP20, DUF581, FGGY_N, Aminotran_{—}3, PHD, 856, Aminotran_{—}5, PS1_PsaF, malic, zf-C2H2, HEAT, UPF0057, Asn_synthase, K-box, HAMP, PTR2, SapB_{—}1, Ammonium_transp, SapB_{—}2, GATase, Pyr_redox, Cu-oxidase_{—}2, Cu-oxidase_{—}3, Cyclotide, Asp, M20_dimer, PA, Thiolase_C, FHA, YjeF_N, Citrate_synt, GTP—EFTU_D2, GTP—EFTU_D3, PK, GATA, Thiolase_N, Glycogen_syn, WHEP-TRS, B3, EF1_GNE, FAD_binding_{—}3, ComA, Remorin_C, FAD_binding_{—}7, RmlD_sub_bind, CBS, ELFV_dehydrog, YL1_C, zf-D of, Ribosomal_S11, ArfGap, GRAS, Metallophos, Annexin, Ras, NAG, Acetyltransf_{—}1, Ribosomal_S17, NAF, DUF246, GST_C, CN_hydrolase, Na_Ca_ex, DUF1423, Ubie_methyltran, p450, PP2C, NAM, Histone, GST_N, Tubulin, 2-Hacid_dh, Ribosomal_L19e, CCT, Malic_M, PK_C, VHS, IPK, HSF_DNA-bind, Tubulin_C, Sina, JmjC, CH, Catalase, DUF250, HMG_box, PfkB, Yippee, DSPc, Pkinase_C, UbiA, Ribosomal_S27, ADH_zinc_N, Zip, Globin, JmjN, Cys_Met_Meta_PP, HI0933_like, GH3, Bromodomain, ERO1, DAO, DUF760, Methyltransf_{—}2, Gp_dh_C, HGTP_anticodon, Methyltransf_{—}3, Aldo_ket_red, Thioredoxin, NmrA, SelR, LEA_{—}5, Orn_Arg_deC_N, Polysacc_synt_{—}2, Gp_dh_N, NifU_N, GFO_IDH_MocA_C, Gamma-thionin, FBA_{—}1, H_PPase, ADH_N, Heme_oxygenase, AUX_IAA, NAD_binding_{—}4, Auxin_inducible, LIM, Response_reg, Dirigent, E2F_TDP, Di 19, Alpha_adaptinC2, efhand, 1CL, Rieske, GTP—EFTU, ARID, adh_short, Transket_pyr, AA_permease, TPP_enzyme_C, NDK, RRM_{—}1, Trypsin, Pro_CA, Hexokinase_{—}1, CBFD_NFYB_HMF, Glyco_hydro_{—}38C, TPP_enzyme_M, TPP_enzyme_N, Hexokinase_{—}2, 3Beta_HSD, DUF788, Wzy_C, E1_dh, Glycolytic, RuBisCO_small, ZF-HD_dimer, DUF1530, PARP, Pyridoxal_deC, IlvC, Ribosomal_L1, Alpha-amylase, EB1, CorA, Sucrose_synth, PGAM, IlvN, MAP1_LC3, DNA_photolyase, PAD_porph, Abhydrolase_{—}1, Glyco_hydro_{—}16, NTF2,CobW_C, GATase_{—}2, Cation_efflux, Gln-synt_C, VQ, DUF296, W2, SAM_{—}1, SAM_{—}2, Gln-synt_N, Transketolase_C, PEPcase, GRIM-19, Pkinase_Tyr, DnaJ, MIP, PRA1, Trehalose_PPase, Transketolase_N, LRR_{—}2, KAI, Mpv17_PMP22, Reticulon, Trp_syntA, YTH, Aldedh, zf-C3HC4, GIDA, Trp_Tyr_perm, UBA, PB1, PAS, Carb_kinase, zf-LSD1, CAF1, Xan_ur_permease, Hist_deacetyl, Cpn60_TCP1, XET_C, Ribosomal_L10e, Trehalase, ubiquitin, Glyco_hydro_{—}38, AP2, Myb_DNA-binding, APS_kinase, PBD, FAE_{—}3-kCoA_syn1 wherein the Pfam gathering cuttoff for said protein domain families is stated in Table 12; wherein said plant cell is selected from a population of plant cells with said recombinant DNA by screening plants that are regenerated from plant cells in said population and that express said protein for an enhanced trait as compared to control plants that do not have said recombinant DNA; and wherein said enhanced trait is selected from group of enhanced traits consisting of enhanced water use efficiency, enhanced cold tolerance, increased yield, enhanced nitrogen use efficiency, enhanced seed protein and enhanced seed oil.

2. A plant cell of claim 1 wherein said protein has an amino acid sequence with at least 90% identity to a consensus amino acid sequence in the group of consensus amino acid sequences consisting of the consensus amino acid sequence constructed for SEQ ID NO: 742 and homologs thereof listed in Table 2 through the consensus amino acid sequence constructed for SEQ ID NO: 1482 and homologs thereof listed in Table 2.

3. A plant cell of claim 1 wherein said protein is selected from the group of proteins identified in Table 1.

4. A plant cell of claim 1 further comprising DNA expressing a protein that provides tolerance from exposure to an herbicide applied at levels that are lethal to a wild type of said plant cell.

5. A plant cell of claim 4 wherein the agent of said herbicide is a glyphosate, dicamba, or glufosinate compound.

6. A transgenic plant comprising a plurality of the plant cell of claim 1

7. A transgenic plant of claim 6 which is homozygous for said recombinant DNA.

8. A transgenic seed comprising a plurality of the plant cell of claim 1.

9. A transgenic seed of claim 8 from a corn, soybean, cotton, canola, alfalfa, wheat or rice plant.

10. Non-natural, transgenic corn seed of claim 9 wherein said seed can produce corn plants that are resistant to disease from the Mal de Rio Cuarto virus or the Puccina sorghi fungus or both.

11. A transgenic pollen grain comprising a haploid derivative of a plant cell of claim 1.

12. A method for manufacturing non-natural, transgenic seed that can be used to produce a crop of transgenic plants with an enhanced trait resulting from expression of stably-integrated, recombinant DNA comprising a promoter that is (a) functional in plant cells and (b) is operably linked to DNA from a plant, bacteria or yeast that encodes a protein having at least one domain of amino acids in a sequence that exceeds the Pfam gathering cutoff for amino acid sequence alignment with a protein domain family identified by a Pfam name in the group of Pfam names consisting of bZIP_{—}1, bZIP_{—}2, Meth_synt_{—}1; Homeobox, Succ_DH_flav_C, RWP-RK, Meth_synt_{—}2, CTP_synth_N, WD40, Sigma70_r2, Sigma70_r3, Fer4, Sigma70_r4, Sigma70_r1_{—}2, CMAS, Sugar_tr, Rubrerythrin, Pro_dh, Ldh_{—}1_C, START, HATPase_c, Cpn10, Glycos_transf_{—}1, Glycos_transf_{—}2, Pkinase, KH_{—}1, cobW, Ldh_{—}1_N, DUF393, SecY, PCI, SRF-TF, IF4E, Lectin_legA, MatE, Dehydrin, Lectin_legB, Ank, 2-Hacid_dh_C, Tic22, Chal_sti_synt_C, AA_kinase, ELFV_dehydrog_N, HLH, Ribonuclease_T2, HEM4, AT_hook, Peptidase_A22B, tRNA-synt_{—}2b, Suc_Fer-like, Glyco_transf_{—}20, MFS_{—}1, HMA, Ketoacyl-synt_C, Steroid_dh, Hydrolase, Peptidase_C1, Ion_trans, Aa_trans, peroxidase, GAF, Cu-oxidase, ABC1, PMSR, B12D, Chromo, Lipase_GDSL, Ran_BP1, DUF125, Lig_chan, GAT, Tub, NPH3, BAH, GFO_IDH_MocA, DUF6, Orn_DAP_Arg_deC, F-box, 3_{—}5_exonuc, NUDIX, Cyclin_C, Trehalase_Ca-bi, Acyltransferase, MtN3_slv, zf-B_box, PUA, AMPKBI, Peptidase_M20, Transaldolase, ketoacyl-synt, Cyclin_N, HisKA, Ribosomal_L7Ae, Methyltransf_{—}11, Methyltransf_{—}12, Hexapep, Ribosomal_S2, Jacalin, ERp29, MFMR, Usp, DUF641, Pyr_redox_dim, Auxin_resp, Inhibitor_I29, Transferase, cNMP_binding, BURP, Epimerase, Ribosomal_L39, Metallothio_{—}2, Pyr_redox_{—}2, WRKY, GSHPx, Kelch_{—}1, Kelch_{—}2, Aminotran_{—}1_{—}2, ABC_tran, UDPGT, Cystatin, YL1, AMP-binding, NTP_transferase, HALZ, Kunitz_legume, HSP20, DUF581, FGGY_N, Aminotran_{—}3, PHD, B56, Aminotran_{—}5, PS1_PsaF, malic, zf-C2H2, HEAT, UPF0057, Asn_synthase, K-box, HAMP, PTR2, SapB_{—}1, Ammonium_transp, SapB_{—}2, GATase, Pyr_redox, Cu-oxidase_{—}2, Cu-oxidase_{—}3, Cyclotide, Asp, M20_dimer, PA, Thiolase_C, FHA, YjeF_N, Citrate_synt, GTP—EFTU_D2, GTP—EFTU_D3, PK, GATA, Thiolase_N, Glycogen_syn, WHEP-TRS, B3, EF1_GNE, FAD_binding_{—}3, ComA, Remorin_C, FAD_binding_{—}7, RmlD_sub_bind, CBS, ELFV_dehydrog, YL1_C, zf-D of, Ribosomal_S11, ArfGap, GRAS, Metallophos, Annexin, Ras, NAC, Acetyltransf_{—}1, Ribosomal_S17, NAF, DUF246, GST_C, CN_hydrolase, Na_Ca_ex, DUF1423, Ubie_methyltran, p450, PP2C, NAM, Histone, GST_N, Tubulin, Ribosomal_L19e, CCT, Malic_M, PK_C, VHS, IPK, HSF_DNA-bind, Tubulin_C, Sina, JmjC, CH, Catalase, DUF250, HMG_box, PfkB, Yippee, DSPc, Pkinase_C, UbiA, Ribosomal_S27, ADH_zinc_N, Zip, Globin, JmjN, Cys_Met_Meta_PP, HI0933_like, GH3, Bromodomain, ERO1, DAO, DUF760, Methyltransf_{—}2, Gp_dh_C, HGTP_anticodon, Methyltransf_{—}3, Aldo_ket_red, Thioredoxin, NmrA, SelR, LEAS, Orn_Arg_deC_N, Polysacc_synt_{—}2, Gp_dh_N, NifU_N, GFO_IDH_MocA_C, Gamma-thionin, FBA_{—}1, H_PPase, ADH_N, Heme_oxygenase, AUX_{—}1AA, NAD_binding_{—}4, Auxin_inducible, LIM, Response_reg, Dirigent, E2F_TDP, Di19, Alpha_adaptinC2, efhand, ICL, Rieske, GTP—EFTU, ARID, adh_short, Transket_pyr, AA_permease, TPP_enzyme_C, NDK, RRM_{—}1, Trypsin, Pro_CA, Hexokinase_{—}1, CBFD_NFYB_HMF, Glyco-hydro_{—}38C, TPP_enzyme_M, TPP_enzyme_N, Hexokinase_{—}2, 3Beta_HSD, DUF788, Wzy_C, E1_dh, Glycolytic, RuBisCO_small, ZF-HD_dimer, DUF1530, PARP, Pyridoxal_deC, IlvC, Ribosomal_L1, Alpha-amylase, EB1, CorA, Sucrose_synth, PGAM, IlvN, MAP1_LC3, DNA_photolyase, PAD_porph, Abhydrolase_{—}1, Glyco_hydro_{—}16, NTF2, CobW_C, GATase_{—}2, Cation_efflux, Gln-synt_C, VQ, DUF296, W2, SAM_{—}1, SAM2, Gln-synt_N, Transketolase_C, PEPcase, GRIM-19, Pkinase_Tyr, DnaJ, MIP, PRA1, Trehalose_PPase, Transketolase_N, LRR_{—}2, KAI, Mpv17_PMP22, Reticulon, Trp_syntA, YTH, Aldedh, zf-C3HC4, GIDA, Trp_Tyr_perm, UBA, PB1, PAS, Carb_kinase, zf-LSD1, CAF1, Xan_ur_permease, Hist_deacetyl, Cpn60_TCP1, XET_C, Ribosomal_L10e, Trehalase, ubiquitin, Glyco_hydro_{—}38, AP2, Myb_DNA-binding, APS_kinase, PBD, FAE_{—}3-kCoA_syn1; wherein the gathering cutoff for said protein domain families is stated in Table 12; and wherein said enhanced trait is selected from the group of enhanced traits consisting of enhanced water use efficiency, enhanced cold tolerance, increased yield, enhanced nitrogen use efficiency, enhanced seed protein and enhanced seed oil, said method for manufacturing said seed comprising:
(a) screening a population of plants for said enhanced trait and said recombinant DNA, wherein individual plants in said population can exhibit said trait at a level less than, essentially the same as or greater than the level that said trait is exhibited in control plants which do not express the recombinant DNA,
(b) selecting from said population one or more plants that exhibit the trait at a level greater than the level that said trait is exhibited in control plants,
(c) verifying that said recombinant DNA is stably integrated in said selected plants,
(d) analyzing tissue of a selected plant to determine the production of a protein having the function of a protein encoded by nucleotides in a sequence of one of SEQ ID NO: 1-741; and
(e) collecting seed from a selected plant.

13. A method of claim 12 wherein plants in said population further comprise DNA expressing a protein that provides tolerance to exposure to an herbicide applied at levels that are lethal to wild type plant cells, and wherein said selecting is effected by treating said population with said herbicide.

14. A method of claim 13 wherein said herbicide comprises a glyphosate, dicamba, or glufosinate compound.

15. A method of claim 12 wherein said selecting is effected by identifying plants with said enhanced trait.

16. A method of claim 12 wherein said seed is corn, soybean, cotton, alfalfa, wheat or rice seed.

17. A method of producing hybrid corn seed comprising:
(a) acquiring hybrid corn seed from a herbicide tolerant corn plant which also has stably-integrated, recombinant DNA comprising a promoter that is (a) functional in plant cells and (b) is operably linked to DNA that encodes a protein having at least one domain of amino acids in a sequence that exceeds the Pfam gathering cutoff for amino acid sequence alignment with a protein domain family identified by a Pfam name in the group of Pfam names consisting of bZIP_{—}1, bZIP_{—}2, Meth_synt_{—}1, Homeobox, Succ_DH_flav_C, RWP-RK, Meth_synt_{—}2, CTP_synth_N, WD40, Sigma70_r2, Sigma70_r3, Fer4, Sigma70_r4, Sigma70_r1_{—}2, CMAS, Sugar_tr, Rubrerythrin, Pro_dh, Ldh_{—}1_C, START, HATPase_c, Cpn10, Glycos_transf_{—}1, Glycos_transf_{—}2, Pkinase, KH_{—}1, cobW, Ldh_{—}1_N, DUF393, SecY, PCI, SRF-TF, IF4E, Lectin_legA, MatE, Dehydrin, Lectin_legB, Ank, Tic22, Chal_sti_synt_C, AA_kinase, ELFV_dehydrog_N, HLH, Ribonuclease_T2, HEM4, AT_hook, Peptidase_A22B, tRNA-synt_{—}2b, Suc_Fer-like, Glyco_transf_{—}20, MFS_{—}1, HMA, Ketoacyl-synt_C, Steroid_dh, Hydrolase, Peptidase_C1, Ion_trans, Aa_trans, peroxidase, GAF, Cu-oxidase, ABC1, PMSR, B12D, Chromo, Lipase_GDSL, Ran_BP1, DUF125, Lig_chan, GAT, Tub, NPH3, BAH, GFO_IDH_MocA, DUF6, Orn_DAP_Arg_deC, F-box, 3_{—}5_exonuc, NUDIX, Cyclin_C, Trehalase_Ca-bi, Acyltransferase, MtN3_slv, zf-B_box, PUA, AMPKBI, Peptidase_M20, Transaldolase, ketoacyl-synt, Cyclin_N, HisKA, Ribosomal_L7Ae, Methyltransf_{—}11, Methyltransf_{—}12, Hexapep, Ribosomal_S2, Jacalin, ERp29, MFMR, Usp, DUF641, Pyr_redox_dim, Auxin_resp, Inhibitor 129, Transferase, cNMP_binding, BURP, Epimerase, Ribosomal_L39, Metallothio_{—}2, Pyr_redox_{—}2, WRKY, GSHPx, Kelch_{—}1, Kelch_{—}2, Aminotran_{—}1_{—}2, ABC_tran, UDPGT, Cystatin, YL1, AMP-binding, NTP_transferase, HALZ, Kunitz_legume, HSP20, DUF581, FGGY_N, Aminotran_{—}3, PHD, B56, Aminotran_{—}5, PS1_PsaF, malic, zf-C2H2, HEAT, UPF0057, Asn_synthase, K-box, HAMP, PTR2, SapB_{—}1, Ammonium_transp, SapB_{—}2, GATase, Pyr_redox, Cu-oxidase_{—}2, Cu-oxidase_{—}3, Cyclotide, Asp, M20_dimer, PA, Thiolase_C, FHA, YjeF_N, Citrate_synt, GTP_EFTU_D2, GTP_EFTU_D3, PK, GATA, Thiolase_N, Glycogen_syn, WHEP-TRS, B3, EF1_GNE, FAD_binding_{—}3, ComA, Remorin_C, FAD_binding_{—}7, RmlD_sub_bind, CBS, ELFV_dehydrog, YL1_C, zf-D of, Ribosomal_S11, ArfGap, GRAS, Metallophos, Annexin, Ras, NAC, Acetyltransf_{—}1, Ribosomal_S17, NAF, DUF246, GST_C, CN_hydrolase, Na_Ca_ex, DUF1423, Ubie_methyltran, p450, PP2C, NAM, Histone, GST_N, Tubulin, 2-Hacid_dh, Ribosomal_L19e, CCT, Malic_M, PK_C, VHS, IPK, HSF_DNA-bind, Tubulin_C, Sina, JmjC, CH, Catalase, DUF250, HMG_box, MB, Yippee, DSPc, Pkinase_C, UbiA, Ribosomal_S27, ADH_zinc_N, Zip, Globin, JmjN, Cys_Met_Meta_PP, HI0933_like, GH3, Bromodomain, ERO1, DAO, DUF760, Methyltransf_{—}2, Gp_dh_C, HGTP_anticodon, Methyltransf_{—}3, Aldo_ket_red, Thioredoxin, NmrA, SelR, LEA_{—}5, Orn_Arg_deC_N, Polysacc_synt_{—}2, Gp_dh_N, NifU_N, GFO_IDH_MocA_C, Gamma-thionin, FBA_{—}1, H_PPase, ADH_N, Heme_oxygenase, AUX_IAA, NAD_binding_{—}4, Auxin_inducible, LIM, Response_reg, Dirigent, E2F_TDP, Di19, Alpha_adaptinC2, efhand, ICL, Rieske, GTP—EFTU, ARID, adh_short, Transket_pyr, AA_permease, TPP_enzyme_C, NDK, RRM_{—}1, Trypsin, Pro_CA, Hexokinase_{—}1, CBFD_NFYB_HMF, Glyco_hydro_{—}38C, TPP_enzyme_M, TPP_enzyme_N, Hexokinase_{—}2, 3Beta_HSD, DUF788, Wzy_C, E1_dh, Glycolytic, RuBisCO_small, ZF-HD_dimer, DUF1530, PARP, Pyridoxal_deC, IlvC, Ribosomal_L1, Alpha-amylase, EB1, CorA, Sucrose_synth, PGAM, IlvN, MAP1_LC3, DNA_photolyase, PAD_porph, Abhydrolase_{—}1, Glyco_hydro_{—}16, NTF2, CobW_C, GATase_{—}2, Cation_efflux, Gln-synt_C, VQ, DUF296, W2, SAM_{—}1, SAM2, Gln-synt_N, Transketolase_C, PEPcase, GRIM-19, Pkinase_Tyr, DnaJ, MIP, PRA1, Trehalose_PPase, Trailsketolase_N, LRR_{—}2, KAI, Mpv17_PMP22, Reticulon, Trp_syntA, YTH, Aldedh, zf-C3HC4, GIDA, Trp_Tyr_perm, UBA, PB1, PAS, Carb_kinase, zf-LSD1, CAF1, Xan_ur_permease, Hist_deacetyl, Cpn60_TCP1, XET_C, Ribosomal_L10e, Trehalase, ubiquitin, Glyco_hydro_{—}38, AP2, Myb_DNA-binding, APS_kinase, PBD, FAE_{—}3-kCoA_syn1; wherein the gathering cuttoff for said protein domain families is stated in Table 12;
(b) producing corn plants from said hybrid corn seed, wherein a fraction of the plants produced from said hybrid corn seed is homozygous for said recombinant DNA, a fraction of the plants produced from said hybrid corn seed is hemizygous for said recombinant DNA, and a fraction of the plants produced from said hybrid corn seed has none of said recombinant DNA;
(c) selecting corn plants which are homozygous and hemizygous for said recombinant DNA by treating with an herbicide;
(d) collecting seed from herbicide-treated-surviving corn plants and planting said seed to produce further progeny corn plants;
(e) repeating steps (c) and (d) at least once to produce an inbred corn line;
(f) crossing said inbred corn line with a second corn line to produce hybrid seed.

18. The method of selecting a plant comprising cells of claim 1 wherein an immunoreactive antibody is used to detect the presence of said protein in seed or plant tissue.

19. Anti-counterfeit milled seed having, as an indication of origin, a plant cell of claim 1.

20. A method of growing a corn, cotton or soybean crop without irrigation water comprising planting seed having plant cells of claim 1 which are selected for enhanced water use efficiency.

21. A method of claim 20 comprising providing up to 300 millimeters of ground water during the production of said crop.

22. A method of growing a corn, cotton or soybean crop without added nitrogen fertilizer comprising planting seed having plant cells of claim 1 which are selected for enhanced nitrogen use efficiency.
